United States Patent Application Publication US 2010/0144538 A1 - sequence listing, part 2

SEQ ID NO: 1257 - DNA, 15563 bp, Homo sapiens
cgcacgccgagcggctgccgggggaagcagaggcgccggaggctggggcaccgccgacgcctcgggagccatggccgaagggggagaaggaggcgaggacgagatccagtttctgaggactgaggatgaagtggtactccagtgcatcgccaccattcataaggagcagaggaagttctgcctggcagccgagggacttgggaatcgcctgtgcttcttggaacccacttcagaagccaagtacattcctccagatctctgcgtctgcaattttgtgctggaacagtccctatctgtcagagccctgcaggaaatgcttgccaacacaggtgaaaatggcggcgaaggggcagcacaaggaggtggccacaggaccctgttatacggccatgcagttctcctgaggcactctttcagcggaatgtatctaacatgcttgactacatcaagatcccagacagacaaacttgcctttgatgtaggtctacgggaacatgccacaggagaagcctgttggtggactatacatcctgcttccaaacagaggtccgaaggagagaaagttcgaattggcgatgacctcatcctcgtcagcgtgtcctctgaaagataccttcatctctcagtatcaaatggtaacatacaagtggatgcctcctttatgcaaacactctggaatgtacatcctacgtgctcaggaagtagcatcgaagaaggatacctacttggtgggcatgtagtacgtcttttccatggtcatgatgaatgtttgacgataccatctacagaccagaatgattcccagcacaggaggatattctacgaagctgggggagctgggactcgagccaggtctctttggagagtggaaccccttcggataagctggagtggcagtaacatcagatggggccaggctttccgactccggcatctcaccacaggccactacctggccttgacagaagaccaaggccttatactgcaagaccgggcaaagtcagacaccaagtccacagctttctctttccgggcatcaaaggaactcaaggagaaattagactccagtcacaagcgagacatagaaggcatgggagttccagaaatcaagtatggagattctgtctgctttgtgcagcatatagccagtggtctgtgggtgacctacaaagcacaagacgccaaaacttcccgcctgggacctctaaaaagaaaggtcatactccatcaggaaggccacatggatgatggattaacactgcagagatgccagcgtgaggagtcccaggctgctcggatcatccggaacactacagccttattcagccagtttgtcagcggaaacaatcgcacagctgcccccatcaccctgcctatagaagaagtcctgcagaccctacaggacttgatcgcctacttccagcccccagaggaggagatgcgacatgaagacaagcagaacaagctccgctcactcaaaaacagacaaaatcttttcaaggaagagggaatgttggcccttgtcttaaattgcattgaccgcttaaatgtctacaatagcgtagcacactttgcagggattgcaagggaagagagtggcatggcctggaaagaaattctgaacctcctctacaaattgctggctgctctcattcgcggaaacagaaacaattgcgctcaattctccaataaccttgattggctcatcagtaaattggacagactagaatcttcctcaggtatcttggaagttttgcactgcatcttaactgaaagcccagaagccttaaatctgatagcggagggccacatcaagtcgatcatctccctgttggataagcacgggcggaatcacaaggttctggatatcctgtgctccctctgtctctgcaatggggttgcagtgagagccaaccagaatctgatctgtgacaacttgctgccccggagaaacctactcctgcagacacgactgattaacgatgtaaccagtatccggccaaacatcttcctgggagtcgcggagggctcagcccagtacaagaagtggtacttcgagctgattatcgaccaggtggaccccttcctaacagcagagcccacacatctgcgggtgggctgggcctcttcttcaggctatgccccatacccaggaggtggagaaggatggggaggcaatggtgttggtgacgacctgtactcctatggctttgatggacttcacctttggtcaggccggatacccagagctgtggcttccatcaaccagcacctcctgagatcggatgacgtggtaagctgctgcctggacctcggggtgcccagcatctcattccgcatcaatgggcagcccgtgcaggggatgtttgagaacttcaacacagacgggctcttcttccctgtgatgagcttttcagcaggtgtcaaagtacgtttcctgatgggtggacgtcatggagagtttaagttcctgcctccctctggctatgccccttgctatgaagccttacttccaaaagagaagatgagattggagcctgtcaaagaatataaacgtgatgctgatggcattagagatctcttgggtaccacccagttcctctcccaagcctctttcatcccatgccccgtagacaccagtcaggttattttgccacctcacctagaaaagatccgagacagactagctgaaaacatccatgagctttggggaatgaataaaatagaacttggctggactttcggcaagatacgagatgacaataaaagacaacacccttgccttgtggagttttcaaagctcccagaaactgagaagaactataacctgcaaatgtcaactgaaaccttaaaaaccctcttggccctggggtgccacattgctcatgttaacccagctgctgaggaggatctcaagaaggtcaaactgcccaaaaactatatgatgtccaacggctataagccagcccctttggatttgtctgatgtgaagctgttacctcctcaagaaattttagtggataagcttgcagaaaatgcacacaatgtttgggcaaaagacagaataaaacaaggatggacctatggcatccaacaggatttgaagaacaaaagaaatccccgtctggtgccatatgcattactggatgagcgtaccaagaagtcaaacagggacagcctgcgggaagctgtgcgcacttttgttggttacgggtataacattgagccatcagaccaagaactagctgactcggctgtggagaaggtcagcatagacaagatccgatttttccgggtagagcgatcttatgcagtgagatctggaaagtggtattttgagtttgaagtggtgactggaggagacatgcgagtcggctgggcgaggccaggctgtcgacctgatgtcgagctgggggccgatgaccaagcctttgtgtttgaaggcaacaggggccagcgttggcatcaaggaagtgggtattttgggcgtacctggcagccaggggatgtggtcggatgtatgattaacctggatgatgcttcaatgatcttcacactgaatggggagctgctgatcaccaacaaaggctctgaacttgccttcgctgactacgagattgagaatggcttcgtgcccatctgctgtctgggtctatctcagatcggccgcatgaatctcgggacagatgccagtaccttcaagttttataccatgtgcggtctccaagagggctttgagccttttgctgtcaacatgaacagagatgttgctatgtggttcagcaagcgcctcccgacgtttgtcaacgtgccaaaggatcatccacacatagaggtcatgaggattgatggcaccatggacagccctccgtgtctcaaggtgacgcataagacatttggcacacagaatagcaatgccgacatgatctattgccgcttgagcatgcctgtcgagtgccactcctccttcagccacagcccctgtctggacagtgaagctttccagaaaaggaaacagatgcaagaaatactctctcatacaacaacacagtgctactacgccatccgcatctttgctggacaggatccatcctgtgtctgggtcggatgggtgactccagactatcacttgtacagtgaaaagtttgacctgaataaaaactgcacagtgactgtcaccctaggggatgaaagaggccgggtccatgaaagtgtgaaacgcagcaactgctacatggtctggggtggagacattgtagccagttcccagagatcaaatcggagcaacgtggacctggagatcggctgtctcgtggatctggccatgggcatgttgtccttctcagccaatggaaaggaactgggcacctgctaccaggtggagcctaataccaaagtgtttccagcagtcttcctgcagcctacaagtacttctttgtttcagtttgaacttggaaagctgaagaacgcaatgcccctgtcagcggccatattcaggagtgaagagaagaacccagtcccacagtgtccacctcggctggacgtccaaaccatccagcccgtgctctggagccgcatgcccaacagcttcctgaaggtggagaccgagcgtgtgagcgagcgccacggctgggtggtgcagtgcctggagcccctgcagatgatggcgctccacatccccgaggagaacaggtgtgtggatatcctggagctctgtgagcaggaggacctgatgcggttccattaccacacgctgaggctctacagcgcggtgtgcgccctgggaaacagccgcgtggcctacgccctgtgcagccacgtggacctctcccagctcttctatgccattgacaacaagtacctccccggcctccttcgatctggtttctatgacctgctcatcagcatccacctggccagcgccaaggagaggaagctgatgatgaagaacgagtacatcatccccattaccagcaccaccaggaatatccgcctcttcccggacgagtccaagaggcatggactgcctggggtgggcctgagaacatgtctcaagcccgggttcaggttctccaccccttgctttgttgtgactggtgaggatcaccaaaagcagagccccgagattcccttggagagtctcaggacgaaggctctgagtatgctgacagaggcagtgcagtgcagcggggcccacatccgagaccctgtaggggggtctgtggagttccagtttgtgcctgtgctgaaactcattggaaccctgctggtcatgggcgtgtttgatgatgatgatgttcggcagatcctcctcctgattgatccctctgtgtttggggagcatagtgcggggacagaggagggagcagaaaaggaggaagtgacccaggtggaggagaaggctgtggaggctggggagaaggccggcaaggaggctcctgtcaaaggcttgttgcagactcgattacccgaatccgtcaagctgcagatgtgtgagctcctcagctatctctgcgactgtgagctgcagcaccgagtggaggccattgtggcatttggtgacatttatgtctccaagctgcaggcaaatcagaagttccgctacaatgagctcatgcaggccctgaacatgtctgcggccctgactgcccggaagaccaaggagttccgctcacccccacaggagcagatcaacatgctgcttaactttcaactgggagagaactgcccctgcccagaggagattcgggaggagctgtatgatttccatgaggaccttctccttcactgtggggttcctttggaagaagaggaagaggaggaggaggacacctcctggacaggaaaactctgtgccttggtttacaaaatcaaaggcccacccaagccagagaaggagcagccgacggaggaggaggagagatgccccacaacattgaaggaactcatctcacagacgatgatctgctgggcccaggaggaccagatccaggattcagagctggtccgaatgatgttcaacctcctccggaggcagtatgacagcattggggagctgctgcaggcgctgcggaagacctacaccatcagccacacctctgtaagcgacaccatcaacctgctggctgccctgggccaaatccgctccctcctcagtgtcaggatgggcaaggaagaggagttgctcatgatcaatgggctgggagacataatgaacaacaaggtgttttaccagcatcccaacctcatgagagtcctgggcatgcacgagacggtgatggaggtgatggtgaacgtgttgggtacagagaaatctcagattgcatttccaaagatggttgctagctgctgccgtttcctttgctatttctgtcgaattagccggcaaaatcagaaggccatgtttgagcatctgagttatcttctggagaatagcagtgttggcctagcctccccgtcgatgaggggatccaccccgctggatgtggcagcttcctctgtgatggacaacaatgagttagcgctgagcttagaggaaccagacctcgagaaggtggtgacctacttggcaggctgtggcctacagagctgccccatgcttctggccaaaggataccctgatgtcggctggaaccccattgaaggggaacgctacctgtccttcctgaggtttgctgtcttcgtgaacagtgagagtgtggaagaaaacgccagcgttgtggtcaagctgctcatcagacgcccagagtgcttcggcccggccctgcggggtgaggggggaaacgggctcttggcagccatgcagggtgccattaagatctctgagaacccagcgctcgacctcccctctcaaggatacaaaagagaagtcagcacgggggacgatgaagaggaagaagaaatcgtgcatatgggcaatgcaattatgtcattttattcggcccttatagatctactgggccgctgtgctcctgaaatgcacctcatccagacaggaaagggggaagccatccgcatcaggtccatcctgcgctccctggtccccacagaagacctggttgggatcatcagcatccccttgaaactgccctccctcaacaaagatgggtcggtcagtgagccagatatggcggccaatttctgccctgaccacaaggcacctatggtgctgttcttggaccgcgtttatggcattaaggatcaaacttttctgctccacttgctggaggttggatttttacctgacctaagagcttctgcctctctagatacagtttccctaagcaccacagaggctgcgcttgcactaaataggtatatatgttctgctgtgctcccgctcctcacaagatgtgcccctctctttgccggaacagaacactgcacctctctgattgattccacactgcagacaatatacaggctatccaagggacgttccctcaccaaagcacaaagggacactatagaagaatgtttgcttgccatttgcaatcacttgaggccttccatgttacagcaactcctgcgacgcctcgtttttgatgtgccgcaactcaatgaatactgcaaaatgcctctcaagcttctgacgaatcactatgaacagtgttggaagtattactgcctgccttcaggatgggggagctacgggctagctgtggaagaagagctgcacctaacggagaagcttttctgggggatttttgactcgctctcccataagaaatatgacccagatcttttccgaatggccctgccttgtctcagtgctatagctggggccttgccaccagattatttagataccagaatcacagccacgttggagaaacagatctcagtggatgcggatggcaactttgacccaaaacctattaacaccatgaatttttccttgcctgaaaaattggaatacatcgtcaccaagtatgctgagcattcacatgataaatgggcctgtgacaagagtcagagtggatggaaatatgggatttccctggatgaaaatgtgaagacccacccactgataaggcctttcaagacattaacggagaaggagaaggaaatttatcgctggcctgcgcgagagtccctgaaaaccatgctggctgtgggctggactgtggagaggaccaaagagggagaagctttggttcaacagcgggaaaatgagaagcttcgaagtgtgtcccaggccaaccagggcaacagctacagtcctgctcccctcgacctctcaaacgttgtgctctccagagagctccagggaatggtggaggtcgtggctgagaactatcacaatatctgggccaagaagaagaagctggagctggagagcaaaggtggtggcagccaccctcttctggtaccatatgacaccttgactgccaaggaaaagttcaaggaccgggagaaggcacaggacctgtttaagttcctccaagtgaatggcatcatagtttccaggggtatgaaggatatggagctggatgcctcctccatggagaagaggtttgcctataagttcttgaagaagatcctgaaatacgttgattctgctcaagaatttattgcccatttagaagccattgtcagcagtgggaaaactgaaaagtctccccgtgaccaggagatcaaattctttgccaaagttctcctcccgctggttgaccagtacttcaccagtcattgcctctacttcttgtcatcccctctgaagccccttagcagcagcggatatgcctcccataaggagaaagaaatggtggccggcctgttctgcaaacttgccgctctcgttagacacagaatttccctctttggtagtgattctactacaatggtgagctgtcttcacatcttagctcagacacttgacacaaggactgtcatgaagtcaggctcagagctggtgaaggctgggttacgagcattctttgaaaatgctgcagaagatttggagaagacttcagaaaacctgaaacttgggaagttcacccattcccgaacgcagattaaaggcgtttctcagaatattaactacactacagtggctctgctccccatcctgacgtccatctttgagcacgtcactcagcatcagtttggaatggatctactcttgggtgatgtgcagatttcatgctaccacatactgtgcagcctctactcccttgggacgggaaagaacatttatgttgaaaggcaacgccctgcccttggagaatgtctggcctcgctggcagctgccataccagtggcattcctggagcccacccttaatcgctacaatccactctcggtcttcaacaccaaaacccccagggagaggtctattctggggatgccagacacggtagaagacatgtgtcctgacatcccccagctggaaggcctgatgaaggaaatcaacgacctggccgagtcaggggcccggtacacagagatgccccatgtcatcgaggtgatcttacccatgctctgcaactacttgtcctactggtgggagcggggtcctgagaacctgccccccagcacagggccatgctgcaccaaggtcacctctgaacacctcagtctcatcctgggcaacattctgaaaatcatcaacaacaacctgggcatcgatgaggcctcctggatgaagcgcattgcagtgtatgcacagcccatcatcagcaaagccaggcccgacctgctgagaagccacttcatcccaactctggagaagctgaagaaaaaggctgtcaagacggtgcaggaggaggagcagttgaaagccgatggcaaaggggacacccaggaggcagaactcctcatcctggacgagttcgcggtcctctgcagagatctctatgccttctaccccatgctgatccgctacgtggacaacaacagatctaactggctgaaaagtcctgatgctgattctgaccagctcttccgcatggtggcagaagtcttcattctgtggtgtaaatctcataacttcaagagagaagagcaaaattttgtgattcagaatgaaattaataatttggcatttttaactggagacagcaaaagcaagatgtcaaaagccatgcaagtaaagtctggaggacaagaccaggagcggaagaagacaaagcggcggggagacttgtattccatccagacctccctcatcgtggctgcactcaagaaaatgctgcccattggtttgaatatgtgtactccaggcgaccaggagctgatctccctcgcaaaatcgcgatacagccatagggacacagatgaagaggtcagagaacatctgcggaacaacttgcacttgcaggaaaagtctgatgacccagctgtaaaatggcaactgaacctctacaaggatgttctgaagagtgaagaacctttcaatccggaaaagacagtggagcgtgtgcagagaatttcagcagctgtcttccacctggaacaggtggaacagcctttgaggtccaagaaggccgtctggcacaaactgttatcaaagcaacggaaacgggcagtggtggcctgtttcaggatggcccctctctacaacctgcccaggcaccgctctattaacctcttcctccatggctatcagagattttggatagaaacagaggagtattcctttgaagagaaactagtacaggatttggctaaatctccaaaggtggaagaggaggaggaggaagagacagaaaaacaacctgacccactacatcagatcattctctattttagccgcaacgctctcacggagaggagcaaattggaagacgaccctttgtacacctcctattccagcatgatggccaagagttgtcaaagtggtgaggatgaagaagaagatgaagacaaggaaaaaacattcgaagagaaagagatggagaagcaaaaaaccctctatcagcaagctcggctgcatgagcgtggtgctgcagagatggtccttcagatgataagcgctagcaaaggtgagatgagccccatggtggttgagacgctgaagctggggatcgccattctgaacggaggcaatgctggtgtgcaacagaaaatgctagattacctaaaggagaaaaaggatgctggattctttcaaagcctttctggtcttatgcagtcttgcagtgtccttgatttgaatgcatttgagaggcagaataaagctgaaggcctggggatggtgactgaagaaggaacactcattgttcgggaacgtggtgaaaaagtactccagaatgacgagttcacgcgtgatctctttagattcctacagttactttgtgagggacataacagtgactttcagaacttcctgcggactcagatgggcaacaccaccaccgtgaatgtcatcatcagcactgtggactaccttctgcgtctgcaggaatcaatcagtgatttctactggtattattcagggaaggacatcattgatgaatctggacagcacaatttttccaaagctctggcagtcaccaagcagattttcaattctcttacagaatacatccagggcccttgcattggtaatcaacagagcctggctcacagcaggctgtgggacgcagtggttggcttcctccatgtctttgctaatatgcagatgaaactctctcaggattccagtcagatcgagctgctgaaggaactcttggatctccttcaggacatggtggtgatgcttctgtccctcctggaagggaatgtggtaaatggcaccattggcaagcagatggttgacacactggtagaatcatctaccaatgtagaaatgatcttgaaattctttgacatgttcttgaaacttaaagacttaaccagctcagacaccttcaaagaatatgacccagatggtaaaggaattatctccaaaaaagaattccagaaggccatggaagggcaaaaacagtacacgcagtcagagattgactttctcctgtcgtgtgcagaagctgatgagaatgacatgtttaattacgttgattttgtagaccggttccatgagccagccaaggacatagggtttaatgtggctgtgttattgacaaatctttctgaacacatgccaaacgattcccgcctgaagtgtctgttggacccagcagaaagtgtgctaaattacttcgaaccctacctaggacgcatcgagatcatgggtggggccaagaagattgagcgtgtttattttgagatcagtgaatccagtcgcactcagtgggagaagccccaggtgaaggaatctaagcgacagttcatttttgatgttgtcaatgaaggtggggagcaggaaaagatggagctgtttgtgaacttctgtgaggacaccatctttgaaatgcagttagcatctcagatctctgaatccgattcagctgacaggccagaagaggaggaagaagatgaagattcttcttacgtgttagaaattgcgggtgaagaggaagaagacgggtctcttgagccggcctctgcatttgctatggcctgtgcctctgtgaagaggaatgtcaccgacttcctgaagagagcaaccctgaagaacctcaggaagcagtacaggaacgtgaaaaagatgactgcgaaggagctggtgaaggtgctcttctcctttttctggatgctgttcgtggggctattccagttgctcttcaccatcctgggaggaatctttcagatcctctggagcacagtgtttggagggggcctggtagaaggggcaaagaacatcagagtgaccaagatcctgggtgacatgcctgacccaacccaatttggtatccatgatgacactatggaggctgagagggcagaggtgatggagccaggtatcaccactgaactagtacacttcataaagggggagaagggagatacagatatcatgtcagacctctttggactccacccaaagaaagagggcagcttaaagcatgggcctgaagtgggtttgggtgacctctcagaaattattggcaaggatgaaccccctacattagagagtactgtacagaagaagaggaaagctcaggcagcagaaatgaaagcagcaaatgaagcagaaggaaaagtagaatccgagaaggcagacatggaagatggagagaaggaagacaaagacaaagaagaggagcaagctgagtacctgtggacagaagtgacaaaaaagaagaagcggcggtgtggtcagaaggttgagaagccggaagctttcacagccaatttctttaaagggctggaaatctatcagaccaagttactgcattacctggccaggaatttctacaacctgaggttccttgctctgtttgtagccttcgctatcaacttcatcctgcttttttataaggtcactgaagaacctttagaagaagagacagaggatgttgcaaacctatggaattcctttaatgacgaggaagaggaagaagcgatggtattctttgtccttcaggagagcaccgggtatatggcaccaaccctgcgtgccctggccatcatccataccatcatctctctagtctgtgtggtgggctactactgcctgaaggtgcctttggtggttttcaaaagggaaaaagaaatcgccaggaagctggagtttgatggcctatatatcaccgaacagccatctgaagatgacatcaaggggcagtgggaccgcttggtgatcaacacaccatcttttcctaataactactgggacaagtttgtaaagagaaaggtgatcaacaagtatggagatctctacggagcagaacgcattgctgaacttctgggtttggacaaaaatgctcttgactttagcccagtagaagagaccaaagcagaagcggcttctctggtgtcatggctaagttccatagacatgaagtaccatatctggaagcttggagttgtttttactgacaactcctttctctaccttgcctggtatacaaccatgtcagtcctgggccactacaataacttcttctttgctgctcacctattggacatcgcaatgggcttcaagacactgaggaccattctgtcatctgtaactcacaatggcaaacagttggttctgactgtcggtctcctggccgtggtggtttatctctatactgtggtggctttcaacttcttccgcaagttctacaacaaaagcgaagacgatgacgagcccgatatgaagtgcgacgacatgatgacgtgttaccttttccacatgtacgtgggagtgagagcaggaggtggcattggtgatgaaattgaagaccctgctggtgatccttatgaaatgtatcgcattgtctttgacattacctttttcttcttcgtcattgtcatcttgctggccatcattcaaggtcttattattgatgctttcggagagctaagagaccagcaggaacaagtacgagaagatatggagactaaatgtttcatctgtgggattggcaatgactactttgacacaacccctcatggttttgaaacacatacattacaagagcacaacttagccaactacttgttctttctgatgtatttgattaataaagatgaaacagagcacacgggtcaggaatcttatgtctggaagatgtaccaagaaaggtgttgggatttcttcccagccggtgactgctttcgtaaacaatatgaagatcagcttggataaatctgaatcaaagaagcgcgacaattctggacagtcaacttcccatgaaataaagtcccctttttacagttctgcaacatatctgaaatgtgacattttctaaatgcctcccttaaaaaaaaaactgctgaaaatctgtgctattttgaaattgatttggctttttgtgcctaatggacatacactgtgggagagaacctgtcaaaatgtcgaagaaggaaggcgaagaatcaagtaatctctaggcaaatgccttcaagttttccagttctgaggtaactagttcagtttgttgggatggaagcatgaaggaaagggctagagaagtatgaaatctcgaatgtgtaatacctgaaaatttaaacacttgaatgtcatcatggtatccaacttgtgactcatagggtctgaactcactccaaaagataataactgcagtctaatttttcccatggtacttgctagtgactgtatccagaaaagctttaagcagttaaagaaacagaaaaaaaccgacactttgtcgacactgaaatatcgattaagtgccttaaaacctctttagacatagctatgcaagttttttatgtttgtgttccagaaggacagttccattcattagttgtgatcttccgtcttactttatgaaactgcacttgaaggttattcatacaagtttttttagtaacagctgtcagtcaactgctgttattagaagaaaagtactgtactgaaaattcagaaaaaaaatctcaaccttatgccaaaatggagtaatgctttatggtcccttgtaagtagtggagctgctctgtttaggtgaatctcctcaaatacaatgaagtgcccactgcaataaagtaatacgtaccaataaaaa

SEQ ID NO: 1258 - protein, 4870 aa, Homo sapiens
MAEGGEGGEDEIQFLRTEDEVVLQCIATIHKEQRKFCLAAEGLGNRLCFLEPTSEAKYIPPDLCVCNFVLEQSLSVRALQEMLANTGENGGEGAAQGGGHRTLLYGHAVLLRHSFSGMYLTCLTTSRSQTDKLAFDVGLREHATGEACWWTIHPASKQRSEGEKVRIGDDLILVSVSSERYLHLSVSNGNIQVDASFMQTLWNVHPTCSGSSIEEGYLLGGHVVRLFHGHDECLTIPSTDQNDSQHRRIFYEAGGAGTRARSLWRVEPLRISWSGSNIRWGQAFRLRHLTTGHYLALTEDQGLILQDRAKSDTKSTAFSFRASKELKEKLDSSHKRDIEGMGVPEIKYGDSVCFVQHIASGLWVTYKAQDAKTSRLGPLKRKVILHQEGHMDDGLTLQRCQREESQAARIIRNTTALFSQFVSGNNRTAAPITLPIEEVLQTLQDLIAYFQPPEEEMRHEDKQNKLRSLKNRQNLFKEEGMLALVLNCIDRLNVYNSVAHFAGIAREESGMAWKEILNLLYKLLAALIRGNRNNCAQFSNNLDWLISKLDRLESSSGILEVLHCILTESPEALNLIAEGHIKSIISLLDKHGRNHKVLDILCSLCLCNGVAVRANQNLICDNLLPRRNLLLQTRLINDVTSIRPNIFLGVAEGSAQYKKWYFELIIDQVDPFLTAEPTHLRVGWASSSGYAPYPGGGEGWGGNGVGDDLYSYGFDGLHLWSGRIPRAVASINQHLLRSDDVVSCCLDLGVPSISFRINGQPVQGMFENFNTDGLFFPVMSFSAGVKVRFLMGGRHGEFKFLPPSGYAPCYEALLPKEKMRLEPVKEYKRDADGIRDLLGTTQFLSQASFIPCPVDTSQVILPPHLEKIRDRLAENIHELWGMNKIELGWTFGKIRDDNKRQHPCLVEFSKLPETEKNYNLQMSTETLKTLLALGCHIAHVNPAAEEDLKKVKLPKNYMMSNGYKPAPLDLSDVKLLPPQEILVDKLAENAHNVWAKDRIKQGWTYGIQQDLKNKRNPRLVPYALLDERTKKSNRDSLREAVRTFVGYGYNIEPSDQELADSAVEKVSIDKIRFFRVERSYAVRSGKWYFEFEVVTGGDMRVGWARPGCRPDVELGADDQAFVFEGNRGQRWHQGSGYFGRTWQPGDVVGCMINLDDASMIFTLNGELLITNKGSELAFADYEIENGFVPICCLGLSQIGRMNLGTDASTFKFYTMCGLQEGFEPFAVNMNRDVAMWFSKRLPTFVNVPKDHPHIEVMRIDGTMDSPPCLKVTHKTFGTQNSNADMIYCRLSMPVECHSSFSHSPCLDSEAFQKRKQMQEILSHTTTQCYYAIRIFAGQDPSCVWVGWVTPDYHLYSEKFDLNKNCTVTVTLGDERGRVHESVKRSNCYMVWGGDIVASSQRSNRSNVDLEIGCLVDLAMGMLSFSANGKELGTCYQVEPNTKVFPAVFLQPTSTSLFQFELGKLKNAMPLSAAIFRSEEKNPVPQCPPRLDVQTIQPVLWSRMPNSFLKVETERVSERHGWVVQCLEPLQMMALHIPEENRCVDILELCEQEDLMRFHYHTLRLYSAVCALGNSRVAYALCSHVDLSQLFYAIDNKYLPGLLRSGFYDLLISIHLASAKERKLMMKNEYIIPITSTTRNIRLFPDESKRHGLPGVGLRTCLKPGFRFSTPCFVVTGEDHQKQSPEIPLESLRTKALSMLTEAVQCSGAHIRDPVGGSVEFQFVPVLKLIGTLLVMGVFDDDDVRQILLLIDPSVFGEHSAGTEEGAEKEEVTQVEEKAVEAGEKAGKEAPVKGLLQTRLPESVKLQMCELLSYLCDCELQHRVEAIVAFGDIYVSKLQANQKFRYNELMQALNMSAALTARKTKEFRSPPQEQINMLLNFQLGENCPCPEEIREELYDFHEDLLLHCGVPLEEEEEEEEDTSWTGKLCALVYKIKGPPKPEKEQPTEEEERCPTTLKELISQTMICWAQEDQIQDSELVRMMFNLLRRQYDSIGELLQALRKTYTISHTSVSDTINLLAALGQIRSLLSVRMGKEEELLMINGLGDIMNNKVFYQHPNLMRVLGMHETVMEVMVNVLGTEKSQIAFPKMVASCCRFLCYFCRISRQNQKAMFEHLSYLLENSSVGLASPSMRGSTPLDVAASSVMDNNELALSLEEPDLEKVVTYLAGCGLQSCPMLLAKGYPDVGWNPIEGERYLSFLRFAVFVNSESVEENASVVVKLLIRRPECFGPALRGEGGNGLLAAMQGAIKISENPALDLPSQGYKREVSTGDDEEEEEIVHMGNAIMSFYSALIDLLGRCAPEMHLIQTGKGEAIRIRSILRSLVPTEDLVGIISIPLKLPSLNKDGSVSEPDMAANFCPDHKAPMVLFLDRVYGIKDQTFLLHLLEVGFLPDLRASASLDTVSLSTTEAALALNRYICSAVLPLLTRCAPLFAGTEHCTSLIDSTLQTIYRLSKGRSLTKAQRDTIEECLLAICNHLRPSMLQQLLRRLVFDVPQLNEYCKMPLKLLTNHYEQCWKYYCLPSGWGSYGLAVEEELHLTEKLFWGIFDSLSHKKYDPDLFRMALPCLSAIAGALPPDYLDTRITATLEKQISVDADGNFDPKPINTMNFSLPEKLEYIVTKYAEHSHDKWACDKSQSGWKYGISLDENVKTHPLIRPFKTLTEKEKEIYRWPARESLKTMLAVGWTVERTKEGEALVQQRENEKLRSVSQANQGNSYSPAPLDLSNVVLSRELQGMVEVVAENYHNIWAKKKKLELESKGGGSHPLLVPYDTLTAKEKFKDREKAQDLFKFLQVNGIIVSRGMKDMELDASSMEKRFAYKFLKKILKYVDSAQEFIAHLEAIVSSGKTEKSPRDQEIKFFAKVLLPLVDQYFTSHCLYFLSSPLKPLSSSGYASHKEKEMVAGLFCKLAALVRHRISLFGSDSTTMVSCLHILAQTLDTRTVMKSGSELVKAGLRAFFENAAEDLEKTSENLKLGKFTHSRTQIKGVSQNINYTTVALLPILTSIFEHVTQHQFGMDLLLGDVQISCYHILCSLYSLGTGKNIYVERQRPALGECLASLAAAIPVAFLEPTLNRYNPLSVFNTKTPRERSILGMPDTVEDMCPDIPQLEGLMKEINDLAESGARYTEMPHVIEVILPMLCNYLSYWWERGPENLPPSTGPCCTKVTSEHLSLILGNILKIINNNLGIDEASWMKRIAVYAQPIISKARPDLLRSHFIPTLEKLKKKAVKTVQEEEQLKADGKGDTQEAELLILDEFAVLCRDLYAFYPMLIRYVDNNRSNWLKSPDADSDQLFRMVAEVFILWCKSHNFKREEQNFVIQNEINNLAFLTGDSKSKMSKAMQVKSGGQDQERKKTKRRGDLYSIQTSLIVAALKKMLPIGLNMCTPGDQELISLAKSRYSHRDTDEEVREHLRNNLHLQEKSDDPAVKWQLNLYKDVLKSEEPFNPEKTVERVQRISAAVFHLEQVEQPLRSKKAVWHKLLSKQRKRAVVACFRMAPLYNLPRHRSINLFLHGYQRFWIETEEYSFEEKLVQDLAKSPKVEEEEEEETEKQPDPLHQIILYFSRNALTERSKLEDDPLYTSYSSMMAKSCQSGEDEEEDEDKEKTFEEKEMEKQKTLYQQARLHERGAAEMVLQMISASKGEMSPMVVETLKLGIAILNGGNAGVQQKMLDYLKEKKDAGFFQSLSGLMQSCSVLDLNAFERQNKAEGLGMVTEEGTLIVRERGEKVLQNDEFTRDLFRFLQLLCEGHNSDFQNFLRTQMGNTTTVNVIISTVDYLLRLQESISDFYWYYSGKDIIDESGQHNFSKALAVTKQIFNSLTEYIQGPCIGNQQSLAHSRLWDAVVGFLHVFANMQMKLSQDSSQIELLKELLDLLQDMVVMLLSLLEGNVVNGTIGKQMVDTLVESSTNVEMILKFFDMFLKLKDLTSSDTFKEYDPDGKGIISKKEFQKAMEGQKQYTQSEIDFLLSCAEADENDMFNYVDFVDRFHEPAKDIGFNVAVLLTNLSEHMPNDSRLKCLLDPAESVLNYFEPYLGRIEIMGGAKKIERVYFEISESSRTQWEKPQVKESKRQFIFDVVNEGGEQEKMELFVNFCEDTIFEMQLASQISESDSADRPEEEEEDEDSSYVLEIAGEEEEDGSLEPASAFAMACASVKRNVTDFLKRATLKNLRKQYRNVKKMTAKELVKVLFSFFWMLFVGLFQLLFTILGGIFQILWSTVFGGGLVEGAKNIRVTKILGDMPDPTQFGIHDDTMEAERAEVMEPGITTELVHFIKGEKGDTDIMSDLFGLHPKKEGSLKHGPEVGLGDLSEIIGKDEPPTLESTVQKKRKAQAAEMKAANEAEGKVESEKADMEDGEKEDKDKEEEQAEYLWTEVTKKKKRRCGQKVEKPEAFTANFFKGLEIYQTKLLHYLARNFYNLRFLALFVAFAINFILLFYKVTEEPLEEETEDVANLWNSFNDEEEEEAMVFFVLQESTGYMAPTLRALAIIHTIISLVCVVGYYCLKVPLVVFKREKEIARKLEFDGLYITEQPSEDDIKGQWDRLVINTPSFPNNYWDKFVKRKVINKYGDLYGAERIAELLGLDKNALDFSPVEETKAEAASLVSWLSSIDMKYHIWKLGVVFTDNSFLYLAWYTTMSVLGHYNNFFFAAHLLDIAMGFKTLRTILSSVTHNGKQLVLTVGLLAVVVYLYTVVAFNFFRKFYNKSEDDDEPDMKCDDMMTCYLFHMYVGVRAGGGIGDEIEDPAGDPYEMYRIVFDITFFFFVIVILLAIIQGLIIDAFGELRDQQEQVREDMETKCFICGIGNDYFDTTPHGFETHTLQEHNLANYLFFLMYLINKDETEHTGQESYVWKMYQERCWDFFPAGDCFRKQYEDQLG

SEQ ID NO: 1259 - DNA, 2616 bp, Homo sapiens
aagctcagctttctgtttagttgtgagattgcatactcaagaagaggaggaacataaaatacgtgatgtcttctcttaagtcaatcgcaggccactctgctgagcatcttctcccaggagtaccagaaacacattaaaagaacacatgccaaacatcatacttcggaagcaattgaaagttattaccagaggtacgtgaatggagtggtgaaaaatggagctgccccagtgctcctggacctggccaatgaggtggactatgcgccctcattaatggctcggcttatactggagaggtttctacaggaacacgaggaaactccaccctccaagtctattataaatagtatgctacgggacccttctcagattccagatggagttctagcaaatcaggtctatcagtgcattgtgaacgactgctgttacggaccactagtggactgcatcaagcatgccattggtcatgagcatgaggtcctgctgagagacttgcttctagagaaaaacctgtccttcctagatgaagatcagcttcgtgcaaagggttatgacaaaacaccagacttcattttacaagtaccagttgctgtagaagggcacataattcactggattgaaagcaaagcctcatttggtgatgaatgtagccaccacgcctacctgcatgaccagttctggagctactggaatagatttgggccaggcttagtcatctattggtatggatttatccaggagctggactgcaaccgggaaaggggcatcctgctcaaagcctgtttccccacgaacattgtcaccttatgccacagcatagcttgaccctgaagatcctggaagagaagctgggaggaaaaggtgaatccggaagcaattttactttcctgcactgtaagatcctggcaacatctgccctgaacttcagctgaactcttgctgcccgtagtcacaccactacctctttagacaaacatatcaagagtttctgttttccttcatcccttgctgatgtgaacagccaagaactacagacacaacccactcattatcagcatttctgtctctgtcaaacaattagtttatagatagtcataatctttctttcttccggatggtttatccttgtatgctgaacaaaagaaaaaatgtgaagactgaaaggtgtgatttttcaattctcctcccagttaccgaatcaccctcttatttttttttccctaagcctccgttcactgtctctccctctccctttctcttcatgtgcactcacagagacccagcattgcattaccatcgtggaataatctagcgcaaacctaggaaagctgaagccacaaagtccaaagccacctttgtactcacctgcagagctccagaagaccttgatggcagcctgcctatgctgtgtgtttgctatattcaatctttacggcttcctgacttctgtgacagtaagccaagtgcaaaaatacacttgatgagaatttcctcttttaataatgttatttgaacaccacatattttagatttatcttatttgaaagtattagttccattgtgcctggaaaccacactcctttagattgggggccgagaggcgacaacccaacattgaggagagtttatttttaaacatggctagttgtcagtatgtacgtgagctagtatttttatgagtcgagttttttaaaggcacattctgtatactgcttagtatatgcattttataccatgtaattataaaacactcgagtaagttcagcattagaaatgtttagctttgtatgaactgagtgtgccagaaataaacctggagcaatttttaaataagcaaaataaaggagatttttctatttgttcactttaatttattcacttttgtgtacttttatgtactgcaaatcagatttcagtctaaagcgaaacatcagtaagttaataataaacctatctttcgggaagttgaatattaatctgtacccaaaacgtatttagtaaaatatttgcccccgccaccctgccatgctgacataacaacttttataatgttgaatagatgatatgggaaatactaataacaacaatgtaatttttgcagacagctttaacttatatacattgcttgatttttttcaaaagactaaatatgtcatttatactttgtttattttctaccaaagaaggtttgtaaaaatatgcctgctgcttttccttttgaaggacacaaacctggtcccaacatgtgtggattttaactctgagtggggtgcattaaatcaaaagagagaggcagaagatgaaatgctaaagaagggtcaggcaaacttctgtttcagtataaaattcatcatgcaggcttctgagtgaaatagaatgatttgaaaccactactgtattgcctggatacacacacacacacacacacactttatacaaaaatgttaaaagcaggtttcctggcatgttctaaactgttttttctttaggaataaattacatttatctgcacagatgttgaaaatcctgttaaacccttgtcaaggatttgtttattttacattaaacaaatttattatgatgaacgtgaacaaataaattaaaaaataaaaaagg

SEQ ID NO: 1260 - protein, 183 aa, Homo sapiens
MARLILERFLQEHEETPPSKSIINSMLRDPSQIPDGVLANQVYQCIVNDCCYGPLVDCIKHAIGHEHEVLLRDLLLEKNLSFLDEDQLRAKGYDKTPDFILQVPVAVEGHIIHWIESKASFGDECSHHAYLHDQFWSYWNRFGPGLVIYWYGFIQELDCNRERGILLKACFPTNIVTLCHSIA

SEQ ID NO: 1261 - DNA, 7326 bp, Homo sapiens
cctctgccgctcctccgccccacggctcaggattcgcccaaaatgaggacttccctgcaggcagtggcactctggggacagaaggcccctccccacagcatcactgccatcatgatcactgatgaccagcgaacgattgtgactggaagtcaagagggtcagctctgtctctggaatctctcacatgaactaaagatttcagcgaaagaactcctatttggtcattcagcttcggtaacatgtttggcaagagcaagggacttctctaaacagccctacattgttagtgctgctgaaaatggggagatgtgtgtttggaatgtcaccaatggacagtgcgtggagaaggctacacttccttacaggcacactgcaatctgttattaccactgctcattccggatgacaggagaaggctggcttctttgttgtggagaatatcaagatgtccttataattgatgccaaaactttggctgttgttcacagttttagatcatctcagtttcctgactggatcaactgcatgtgcattgttcactccatgagaattcaagaagattctctcttggtggtatcagtagctggtgagctcaaagtatgggatctttcctcatctatcaacagcattcaggaaaagcaagatgtctatgaaaaagaatccaagtttcttgagtccttgaactgccagacaattcgattttgcacatatactgagagacttctattggtggtattttctaaatgttggaaggtttatgattattgtgatttttcccttctgctgactgaagttagtagaaatgggcagttctttgctggtggagaagtgattgctgctcacagaatcctcatctggacagaagatggtcacagttacatctatcagctgctgaacagtgggctttcaaaaagcatataccctgctgatggaagagtgcttaaagagaccatttatcctcatttactgtgctctacttctgtgcaggaaaataaggaacagagccgtccctttgttatgggctacatgaatgaaaggaaagagcctttttacaaggtacttttctctggagaagtctcaggaagaattactttgtggcacatccctgatgttcctgtatccaagtttgatggttctcctagagagataccagtaactgccacctggactcttcaagataattttgataagcatgatactatgtcacaaagtattattgactatttctctgggcttaaagatggggcaggaactgctgtagtcacttcatcagagtatattccaagtcttgataaactaatatgtggctgtgaagatgggacaattatcattacccaggctttgaatgctgccaaagcaagacttctggaaggtggttctttagtaaaagattctccccctcataaagttcttaaaggccaccaccaaagtgtcacttcattactctatccacatggtctctcttcgaaattagaccaaagttggatgttgtctggggacctggactcatgtgtgatcttgtgggatatctttactgaagaaattttgcataaattctttttggaagctggtccagtaacaagtcttttgatgtcaccagagaagtttaaactaaggggtgagcagataatttgctgtgtgtgcggtgaccattccgtggctctccttcaccttgagggaaagagttgcctcctgcatgcccggaagcacctttttcctgtgaggatgataaaatggcacccggttgagaattttttaattgttggatgtgcagatgactcagtttatatctgggaaattgaaacaggcactttggaaagacatgagacaggagaaagagcacgaattattcttaattgttgtgatgattcacagcttgtgaagtctgtacttcccattgcctcagagacacttaagcacaaaagtatagaacagagatcctccagcccctaccagcttgggccattaccttgccctggtctgcaggtggagtcttcatgtaaggttactgatgccaaattttgcccaagaccttttaatgtcttgcctgtgaagacaaaatggagtaacgttggctttcatattcttctatttgatctggaaaaccttgttgaacttttgctaccaactccactcagtgatgttgactcttccagttcattctatggtggtgaggtcctgagaagagccaagagcacagtggagaagaagacactgacactgagaaaaagtaaaactgcctgtggtcctctttcagcagaggcactagccaagcctattactgaaagcctggcccaaggagataataccatcaaattctcagaagaaaatgatggcattaaaaggcagaagaaaatgaagatctccaaaaaaatgcagcctaagccatcaagaaaagtagatgccagtctcacaatagacacagcaaaattgtttctgtcttgccttttgccatggggagtggataaagatttagattatctttgcattaagcacctcaatattttaaagcttcagggtcctatttctttgggaatttctttgaatgaagataatttctcactgatgttgccaggttgggatttatgcaatagtggaatgataaaagactattcaggagtaaatttattttccaggaaagttttggacttgtcagataaatacacagccactcttccaaatcaggttggaattccaagaggattggaaaataattgtgattctttgcgagagtcagatactatagtttatttgttgagcagactatttttagttaataaattagttaacatgcctttagaattggcatgtagagttggcagttctttcagaatggaaagtatacataataagatgagaggtgctgggaatgacattttaaatatgtcaagcttctacagttgcttacgaaatggtaagaatgaatcccatgtacctgaggctgacctttcacttttgaagctaatttcctgttggagagaccagtctgtgcaggtaactgaagcaatacaagctgttctcttggcggaagttcaacaacacatgaagagtttgggaaagatacccgtcaatagtcaaccagtgtccatggcagagaatggtaactgtgagatgaagcagatgctgccaaagctggaatggacagaagaactagagttacagtgtgttagaaacactttgcctctgcaaactccagtcagcccggtcaagcatgacagcaactcaaactcggcaaacttccaagacgtggaggacatgcctgacagatgtgccttggaagagtctgagagtccaggtgagccaaggcatcattcatggatagcaaaggtctgcccctgcaaggtgtcttaaatggaatctcatcagtaggagctgaatttggacaaattaagaaatccaaaagatgccatttgtttattactgtataaaagcattgttgttattggtcaagttattaggctgtagtggatttgctaatactttagccaacatgtattaaagtgattttaatacatgctgattacaatgcaatacatactgattgaaaatattcatattcatctaattttagaaaaatattgcctagatcattctctattcctgtttcttactttttctgttaatatttccaacagggaatgccagtccacagacacaaatttaatactgctttaaattttctcctatccttttagtccctgaattatataataaacaatgttaaaaccaatgtagtacacaatacttacttacaaatttaatactgcttcaaggtatttaatctaaaattttaccaactttgatttgtctggttaggatattttgttttagtggatatgctttaattcggatcaattactgcagtaaatctcatccctaagcatgaaatgttgtcaacaaatacccagttccatttagttatcaattagcccaaataagagatacaaagtataacagtgaccaaccttgtactgttgagttaatttgaacttctaatgacattgaggctaatgtctttagctcaaggttgatcttgttggccatatagatgtgaactagggaaggggaatcaacttacagcatatcacaattgatccttattaagtataaactcttgtaggtcttttcccagaaagaagcttgactagcaggaattctaaaactgaaatatatcaaacagcataaataggaatagacataaagtgctcttctattaaagcctttggtgatctatttactatgatttatattgtacagttcctcgatttacagaaaatcatcaaaattattaatctacatatcttatgtatataaatattgcctaatccatagaaaaaaggatataaagtattaaatatgtgatatatagctatatctatctatctatgtatctaatagggaagtccaagtcacttcaattgaagaaacatatctctgagcataggagcagcctcaggtcctatggtgggatgcagtggacaggagagggggaaattagaaaagagaactatataattgaaaaagggatataaagcattaaatatatgatatatagctatatctatgtatgtatctaacagagaagttcaagtcacttcaattaaagaaacatttttgagcatgggaccagcctcaggtcttatgctgggatgcagtagacaggagatggggaaattagaaaagagaactgtgtaattgaaatgacgtgggctgcacccttaaggaacttataattaatgatgatctgaataaacataccaggataaagatgtcaaatgagtgtgactcccttaaagtagattaaagtgtgcattctttgtttcctaaaatatgattttactgcttgaaattacatttgagttgaagtttagaaactaacatagcattaatatgaataatcatggaaaattattatcctttgaaaactgattgataaatatattccccctcctttagaaacagtcaaaagccacttcaaacaagtttcaaaataaaggaaggtagcaagttaggcgatggattatattttcttgcttgttgtataccagttgtcaaggacattataaggactcccaaaagcattttgaaggatggcaatatcaaataagtgtatgtcctctcaaatgaggcatttttaattgttaaaatctatttggacgctcaggttatgatatgtttatgaaaaataagcttcattatttttatagctacatcctattattcccttttagaaacaagaataacaataggttttaatagttgccatacttagcatttatcagttctaatgaaaccaatattgaatctctgataaatattttctgatgttactagctatgggaaattagaactggcacaaccctgacattactaagtggaaatgttaggatttttcggcatcgcatgttagaatctctaaaatttaaacattcctgttaaatgactaaggtttgcttttatcaatatgaattctgaaggccaatatcataccattaactatgaaagcttttaattcctaaaaatagttttagagatattcaagcaatgctctcctaatatccatacgcaagtgtgtttatgacacaaattcactagtctgtttaaaaatgaattctttatattgactggtgttccacatatttcagtaatttctgttatgagaggacttgaaatagcaaattgccacacagttaactggatagaccacgtacgtggtgatcataaccacttggtactacacccagaaactcaaaattgtctttctcctgatgagatatgggtgtccttttgtacgtctaggcctaggtaaccagtggagtgattatattagcaaatgtgtttgtatccggagtcttcctgtcattgtaataaaaaatttatttaaaaattttgtcttgtgtttcttttttggtaatcatcttggtgatatttatgaatgtatttgtgtgtgtgtgtgtgtgtgtatacatacatatatatgtgtgtatatatatacacacatatatatacacatatatatgtgtgtatatatatatatatatggcatatcccccaaaggaatatcatattttcatttgcaagccttgattctttgacttgctgttgagtttcacattggctccattgtatattgcaggaaaaagtacctggaaagcctggagggttaaaagcagaggctcctcggcagcgtgtccaggccgtgtgtgcttgctgtgcttgtcagagcctcattccctcccctgtgttggagagctttctcacagggctcatccagaggtgctagaaagcaatgtgagcactattaaacacttcaaatataaggaaaaatgtataatgttagaaacacacagttaaaaagtagccccaggtatcaaacattctgttactattttagaaactaaattaaggctgctttgaacatgatggtattagaaaaatggtagaatacagtttgttaaatattaatattctatctttagatgatagcatttggtgacttttatttcttttctcatacattttttccagtgttctgtatttttaaaatcctttcataattattataatgaacactttagaaaagatactatttctcttccatccttagagggcacattataataattgagtattttaaaattaaattttatgccatgtatttaaaatgaaagttcaggttacattaattccaactgattttaaagccttattttcacagagtggactcattcaattttttaaattttatattcatacattttgattgctcagttatataaaagcggtgttatagactcctttattctccacaaaatgttgtcttatatgtaaagtgccaaaagttgtgtttaatttcctaagaaagtcattgctttgtaaacatttgcataatacttagtgttttttgtaattttaaaaaattagcttaaccaaaagagttgcaaaattaaaacttacttgagtaggtatctttcagacaaagctgcatggcttcatgtacaatagtccccagatcacctcgcactgtagtttgctcaagaaggagcctacagatggcaggtaggagaaggtaaactggaaattaacaggtctgtctgtaagagcatgccactggaaacacccatccaatttgggacccctggaagacagcatgtgtctaatgggaggcctgtcctagtacaactcctttactcttttcaccttcatcttgaccttctcagataccatctttatgtaaaatgttgatgttgtggagtttttgcagtaatttaatttttataaatattgtattaaaatatatttatcttgaaaaaaaaaaaaaaaaaa

SEQ ID NO: 1262 - protein, 1102 aa, Homo sapiens
MRTSLQAVALWGQKAPPHSITAIMITDDQRTIVTGSQEGQLCLWNLSHELKISAKELLFGHSASVTCLARARDFSKQPYIVSAAENGEMCVWNVTNGQCVEKATLPYRHTAICYYHCSFRMTGEGWLLCCGEYQDVLIIDAKTLAVVHSFRSSQFPDWINCMCIVHSMRIQEDSLLVVSVAGELKVWDLSSSINSIQEKQDVYEKESKFLESLNCQTIRFCTYTERLLLVVFSKCWKVYDYCDFSLLLTEVSRNGQFFAGGEVIAAHRILIWTEDGHSYIYQLLNSGLSKSIYPADGRVLKETIYPHLLCSTSVQENKEQSRPFVMGYMNERKEPFYKVLFSGEVSGRITLWHIPDVPVSKFDGSPREIPVTATWTLQDNFDKHDTMSQSIIDYFSGLKDGAGTAVVTSSEYIPSLDKLICGCEDGTIIITQALNAAKARLLEGGSLVKDSPPHKVLKGHHQSVTSLLYPHGLSSKLDQSWMLSGDLDSCVILWDIFTEEILHKFFLEAGPVTSLLMSPEKFKLRGEQIICCVCGDHSVALLHLEGKSCLLHARKHLFPVRMIKWHPVENFLIVGCADDSVYIWEIETGTLERHETGERARIILNCCDDSQLVKSVLPIASETLKHKSIEQRSSSPYQLGPLPCPGLQVESSCKVTDAKFCPRPFNVLPVKTKWSNVGFHILLFDLENLVELLLPTPLSDVDSSSSFYGGEVLRRAKSTVEKKTLTLRKSKTACGPLSAEALAKPITESLAQGDNTIKFSEENDGIKRQKKMKISKKMQPKPSRKVDASLTIDTAKLFLSCLLPWGVDKDLDYLCIKHLNILKLQGPISLGISLNEDNFSLMLPGWDLCNSGMIKDYSGVNLFSRKVLDLSDKYTATLPNQVGIPRGLENNCDSLRESDTIVYLLSRLFLVNKLVNMPLELACRVGSSFRMESIHNKMRGAGNDILNMSSFYSCLRNGKNESHVPEADLSLLKLISCWRDQSVQVTEAIQAVLLAEVQQHMKSLGKIPVNSQPVSMAENGNCEMKQMLPKLEWTEELELQCVRNTLPLQTPVSPVKHDSNSNSANFQDVEDMPDRCALEESESPGEPRHHSWIAKVCPCKVS

SEQ ID NO: 1263 - DNA, 6485 bp, Homo sapiens
ctcgcccaagatggcgatggaggggcgggtgaggcggcagcggccctggcccccgcgccggccccagctcgggcccgggcccccgaggccgcgcccccgcccgcggcgccgcgcctccccgggccactgacgcccggcgcgctctccccccgcggcggcggccgaagcacggggaggcggcggcggcggcggcggcccgagcccagccccatggcgcggggggacgccggccgcggccgtgggctcctcgcgttgaccttctgcctgttggccgcgcgcggggagctgctgttgccccaggagacgactgtggagctgagctgtggagtggggccactgcaagtgatcctgggcccagagcaggctgcagtgctaaactgtagcctgggggctgctgccgctggaccccccaccagggtgacctggagcaaggatggggacaccctgctggagcacgaccacttacacctgctgcccaatggttccctgtggctgtcccagccactagcacccaatggcagtgacgagtcagtccctgaggctgtgggggtcattgaaggcaactattcgtgcctagcccacggccccctcggagtgctggccagccagactgctgtcgtcaagcttgccacactcgcagacttctctctgcacccggagtctcagacggtggaggagaacgggacagctcgctttgagtgccacattgaagggctgccagctcccatcattacttgggagaaggaccaggtgacattgcctgaggagcctcggctcatcgtgcttcccaacggcgtccttcagatcctggatgttcaggagagtgatgcaggcccctaccgctgcgtggccaccaactcagctcgccagcacttcagccaggaggccctactcagtgtggcccacagagggtccctggcgtccaccagggggcaggacgtggtcattgtggcagccccagagaacaccacagtggtgtctggccagagtgtggtgatggaatgtgtggcctcagctgaccccaccccttttgtgtcctgggtccgacaagacgggaagcccatctccacagatgtcatcgtcctgggccgcaccaacctactaattgccaacgcgcagccctggcactccggcgtctatgtctgccgcgccaacaagccccgcacgcgcgacttcgccactgcagccgctgagctccgtgtgctggcggctcccgccatcactcaggcgcccgaggcgctgtcgcggacgcgggcgagcacagcgcgcttcgtgtgccgcgcgtcgggggagccgcggccagcgctgcgctggctgcacaacggggcgccgctgcggcccaacgggcgcgtcaaggtccagggcggcggtggcagcctggtcatcacacagatcggcctgcaggacgccggctactaccagtgcgtggctgagaacagcgcgggaatggcgtgcgctgccgcgtcgctggccgtggtggtgcgcgaggggctgcccagcgcccccacgcgggtcactgctacgccactgagcagctccgctgtgttggtggcctgggagcggcccgagatgcacagcgagcagatcatcggcttctctctccactaccagaaggcacggggcatggacaatgtggaataccagtttgcagtgaacaacgacaccacagaactacaggttcgggacctggaacccaacacagattatgagttctacgtggtggcctactcccagctgggagccagccgcacctccaccccagcactggtgcacacactggatgatgtccccagtgcagcaccccagctctccctgtccagccccaacccttcggacatcagggtggcgtggctgcccctgccccccagcctgagcaatgggcaggtggtgaagtacaagatagaatacggtttgggaaaggaagatcagattttctctactgaggtgcgaggaaatgagacacagcttatgctgaactcgcttcagccaaacaaggtgtatcgagtacggatttcggctggtacagcagccggcttcggggccccctcccagtggatgcatcacaggacgcccagtatgcacaaccagagccatgtcccttttgcccctgcagagttgaaggtgcaggcaaagatggagtccctggtcgtgtcatggcagccaccccctcaccccacccagatctctggctacaaactatattggcgggaggtgggggctgaggaggaggccaatggcgatcgcctgccagggggccgtggagaccaggcttgggatgtggggcctgtccggctcaagaagaaagtgaagcagtatgagctgacccagctagtccctggccggctgtacgaggtgaagctcgtggctttcaacaaacatgaggatggctatgcagcagtgtggaagggcaagacggagaaggcgccggcaccagacatgcctatccagaggggaccacccctgcctccagcccacgtccatgcggaatcaaacagctccacatccatctggcttcggtggaaaaagccagatttcaccacagtcaagattgtcaactacactgtgcgcttcagcccctgggggctcaggaatgcctccctggtcacctattacaccagttctggagaagacatcctcattggcggcttgaagccattcaccaaatacgagtttgcagtgcagtctcacggcgtggacatggatgggcctttcggctctgtggtggagcgctccaccctgcctgaccggccctccacacccccatccgacctgcgactgagccccctgacaccgtccacggttcggctgcactggtgcccccccacagagcccaacggggagatcgtggagtatctgatcctgtacagcagcaaccacacgcagcctgagcaccagtggaccttgctcaccacgcagggaaacatcttcagtgctgaggtccatggcctggagagcgacactcggtacttcttcaagatgggggcgcgcacagaggtgggacctgggcctttctcccgcctgcaggatgtgatcacgctccaggagaagctgtcagactcgctggacatgcactcagtcacgggcatcatcgtgggtgtctgcctgggcctcctctgcctcctggcctgcatgtgtgctggcctgcgccgcagcccccacagggaatccctcccaggcctgtcctccaccgccacccccgggaatcccgcgctgtactccagagctcggcttggcccccccagccccccagctgcccatgaattggagtcccttgtgcacccccatccccaggactggtccccgccaccctcagacgtggaggacagggctgaagtgcacagccttatgggtggcggtgtttctgaaggccggagtcactccaaaagaaagatctcctgggctcaaccaagcgggctgagctgggctggttcctgggcaggctgtgagctgccccaggcaggcccccggccggctctgacccgggccctgctgccccctgctggaactgggcagacgctgttgctgcaggctctggtgtacgacgccataaagggcaatgggaggaagaagtcacccccagcctgcaggaaccaggtggaggctgaagtcattgtccactctgactttagtgcatctaacgggaaccctgacctccatctccaagacctggagcctgaggaccccctgcctccagaggctcctgatctcatctcgggtgttggggatccagggcagggggcagcctggctggacagggagttgggagggtgtgagctggcagcccccgggccagacagacttacctgcttgccagaggcagccagtgcttcctgctcctacccggacctccagccaggcgaggtgctagaggagacccctggagatagctgccagctcaaatccccctgccctctaggagccagcccaggcctgcccagatccccggtctcctcctctgcctagctcttcccagaggatgtggtttggggcaggcaggtatggatcacataggatgcgatacctgtggccgtgtatgtccacatgtgtgcctgtagatacatcatcaagccctttggagcttcctaagttgctttggctgaggggagaggaaaacatggattattcactccccccatactctttgtgatacacatgtgacatgtgaaagacatacgagacatagctacatgtgatgtgcacatgtgtgaagtgcatgtatgcgtactggttgttgagctgggaaaccgtggcccaggcagtggtcactacagcctgattggtcctccaggtcagaacggtgccccacagtggtcagtccccagccctgtgggcccccacctccatcgcccagccttttattacacactctgagagtgtctccaatgcctgtctgacaaagacagtcccagcccattctcctgtctggctgggttgggtgcaagcaggctctgaatgcctggcatttcagctgcatcacctcccagctccttattgcccaaatagagagggtggccctggctcccctccgagcaactctgcatttaattttgtaatctgggaagtgcctggttttgaaaatccgctttctctcactcttcccctccttccttgcccctggctgctctagtgttctgtctcccagtcacctcgctctcccagcaccagtgcccttctcctgctcccagatactctttcctttcctctctcctgttttccttcctctgctatctctcacacctctcccagactatgtcatcttgttctcctgcctgggttcaaactctgcatccttctctaacaacgtgactacctcatgtctgcttcaaggcccccgtgcccttcctgtatccgcggctgccgcgcactcgcctgccatcctcctgcctcctcttcactcagtgcttctgcttgccctgccccaggcagcccacccacgcccagtgcgggtgtggagaagatcttctggcttccctgcatcttgcctttgggattgggatccaagggttctccatggatggatccaagtcatagaggggaatgtttgagacagggaagggggctgtgatccagaggctcagaataaaaagatgccctcccttctatgcaggggggcaagtttactggatggagatgatttgggcctctcttccagaagaagctaaaggaagagaaggggagtgagagttcagggaggcccttcccaccctgtgaggcttgacttgatctggattggggatgacaggaatctcaccctctggggtgctggcaaggaggtctttgcacaggaaaaggggtagctcatttcagtttgttttttctttaaattgaatcctcaagtcattttctgttcacctgccgcacagggacaagcttgacttctattttctgtgtagtgaaaacaatgtcatttatttggtttttcacctcagccctctcataggagcatagaatgttagggtctttactccctaatgatgtctgattggcacatcaagagttaactctgccttctgggccaaattcgaaataaccagtccatttttccttttttttttttttttttttaaatggtggaatgtctctcagcacagttgcggcttcctcaaaccctgaaagcatctgtgtttattatactcgggtgtcactcactgttgatgtctgcacctacgtttccacctcctccccctccttcagccagcctatgataacactaaagattattaatgttggttttgtatctcgttaaagacagaattgtcacttgtagtatttctgtagcattcagcgctgctgtggctaacaccactgtgtatgtttcatcattgctctgaaggtcaaaagcctcattttattttgctggtttgattttttttttttaaagaagaaaaaaaaactgccctgaattaaatggctgttttaacagtaggctcttagcattataccacatagtcatttttcatgttcttgtttaacaggcactgaggttctggtttaaattaaatagctgcaaatgagacaatttataacccattaggttgggtggaaaattgtttctcaaaagcaaataagtaataaatctggtatctgcctataactcacagttgataagaaagtggccatttctcactagcactatatatgatttgggctctgggtaatttggaagtgttaggtttgtgtctttgtagcagtatttttattagaaaagaatctattggccttttacagggtattaatccctttgtcacctaccattgatgccttaagttttctgagtctcaattaaaaatcttccttttcttgatgcatgacaagtgtaatcagtacttgctcatttatttgtctgtatttagtttatgctgtactatttaattatccttccagcgttttttttttctccttacaaatatgatactctttagtgttaagctaaggcattgattcatgtatctgtccttataatgaattaataaactattttccag

SEQ ID NO: 1264 - protein, 1250 aa, Homo sapiens
MARGDAGRGRGLLALTFCLLAARGELLLPQETTVELSCGVGPLQVILGPEQAAVLNCSLGAAAAGPPTRVTWSKDGDTLLEHDHLHLLPNGSLWLSQPLAPNGSDESVPEAVGVIEGNYSCLAHGPLGVLASQTAVVKLATLADFSLHPESQTVEENGTARFECHIEGLPAPIITWEKDQVTLPEEPRLIVLPNGVLQILDVQESDAGPYRCVATNSARQHFSQEALLSVAHRGSLASTRGQDVVIVAAPENTTVVSGQSVVMECVASADPTPFVSWVRQDGKPISTDVIVLGRTNLLIANAQPWHSGVYVCRANKPRTRDFATAAAELRVLAAPAITQAPEALSRTRASTARFVCRASGEPRPALRWLHNGAPLRPNGRVKVQGGGGSLVITQIGLQDAGYYQCVAENSAGMACAAASLAVVVREGLPSAPTRVTATPLSSSAVLVAWERPEMHSEQIIGFSLHYQKARGMDNVEYQFAVNNDTTELQVRDLEPNTDYEFYVVAYSQLGASRTSTPALVHTLDDVPSAAPQLSLSSPNPSDIRVAWLPLPPSLSNGQVVKYKIEYGLGKEDQIFSTEVRGNETQLMLNSLQPNKVYRVRISAGTAAGFGAPSQWMHHRTPSMHNQSHVPFAPAELKVQAKMESLVVSWQPPPHPTQISGYKLYWREVGAEEEANGDRLPGGRGDQAWDVGPVRLKKKVKQYELTQLVPGRLYEVKLVAFNKHEDGYAAVWKGKTEKAPAPDMPIQRGPPLPPAHVHAESNSSTSIWLRWKKPDFTTVKIVNYTVRFSPWGLRNASLVTYYTSSGEDILIGGLKPFTKYEFAVQSHGVDMDGPFGSVVERSTLPDRPSTPPSDLRLSPLTPSTVRLHWCPPTEPNGEIVEYLILYSSNHTQPEHQWTLLTTQGNIFSAEVHGLESDTRYFFKMGARTEVGPGPFSRLQDVITLQEKLSDSLDMHSVTGIIVGVCLGLLCLLACMCAGLRRSPHRESLPGLSSTATPGNPALYSRARLGPPSPPAAHELESLVHPHPQDWSPPPSDVEDRAEVHSLMGGGVSEGRSHSKRKISWAQPSGLSWAGSWAGCELPQAGPRPALTRALLPPAGTGQTLLLQALVYDAIKGNGRKKSPPACRNQVEAEVIVHSDFSASNGNPDLHLQDLEPEDPLPPEAPDLISGVGDPGQGAAWLDRELGGCELAAPGPDRLTCLPEAASASCSYPDLQPGEVLEETPGDSCQLKSPCPLGASPGLPRSPVSSSA

SEQ ID NO: 1265 - DNA, 3796 bp, Homo sapiens
aacgaaccggaagtgctaaagcctccgaggccaaggccgctgctactgccgccgctgcttcttagtgccgcgttcgccgcctgggttgtcaccggcgccgccgccgaggaagccactgcaaccaggaccggagtggaggcggcgcagcatgaagcggcgcaggcccgctccatagcgcacgtcgggacggtccgggcggggccggggggaaggaaaatgcaacatggcagcagcaatggaaacagaacagctgggtgttgagatatttgaaactgcggactgtgaggagaatattgaatcacaggatcggcctaaattggagcctttttatgttgagcggtattcctggagtcagcttaaaaagctgcttgccgataccagaaaatatcatggctacatgatggctaaggcaccacatgatttcatgtttgtgaagaggaatgatccagatggacctcattcagacagaatctattaccttgccatgtctggtgagaacagagaaaatacactgttttattctgaaattcccaaaactatcaatagagcagcagtcttaatgctctcttggaagcctcttttggatctttttcaggcaacactggactatggaatgtattctcgagaagaagaactattaagagaaagaaaacgcattggaacagtcggaattgcttcttacgattatcaccaaggaagtggaacatttctgtttcaagccggtagtggaatttatcacgtaaaagatggagggccacaaggatttacgcaacaacctttaaggcccaatctagtggaaactagttgtcccaacatacggatggatccaaaattatgccctgctgatccagactggattgcttttatacatagcaacgatatttggatatctaacatcgtaaccagagaagaaaggagactcacttatgtgcacaatgagctagccaacatggaagaagatgccagatcagctggagtcgctacctttgttctccaagaagaatttgatagatattctggctattggtggtgtccaaaagctgaaacaactcccagtggtggtaaaattcttagaattctatatgaagaaaatgatgaatctgaggtggaaattattcatgttacatcccctatgttggaaacaaggagggcagattcattccgttatcctaaaacaggtacagcaaatcctaaagtcacttttaagatgtcagaaataatgattgatgctgaaggaaggatcatagatgtcatagataaggaactaattcaaccttttgagattctatttgaaggagttgaatatattgccagagctggatggactcctgagggaaaatatgcttggtccatcctactagatcgctcccagactcgcctacagatagtgttgatctcacctgaattatttatcccagtagaagatgatgttatggaaaggcagagactcattgagtcagtgcctgattctgtgacgccactaattatctatgaagaaacaacagacatctggataaatatccatgacatctttcatgtttttccccaaagtcacgaagaggaaattgagtttatttttgcctctgaatgcaaaacaggtttccgtcatttatacaaaattacatctattttaaaggaaagcaaatataaacgatccagtggtgggctgcctgctccaagtgatttcaagtgtcctatcaaagaggagatagcaattaccagtggtgaatgggaagttcttggccggcatggatctaatatccaagttgatgaagtcagaaggctggtatattttgaaggcaccaaagactcccctttagagcatcacctgtacgtagtcagttacgtaaatcctggagaggtgacaaggctgactgaccgtggctactcacattcttgctgcatcagtcagcactgtgacttctttataagtaagtatagtaaccagaagaatccacactgtgtgtccctttacaagctatcaagtcctgaagatgacccaacttgcaaaacaaaggaattttgggccaccattttggattcagcaggtcctcttcctgactatactcctccagaaattttctcttttgaaagtactactggatttacattgtatgggatgctctacaagcctcatgatctacagcctggaaagaaatatcctactgtgctgttcatatatggtggtcctcaggttgctattgctggggccccagtcactctgtggatcttctatgatacaggatacacggaacgttatatgggtcaccctgaccagaatgaacagggctattacttaggatctgtggccatgcaagcagaaaagttcccctctgaaccaaatcgtttactgctcttacatggtttcctggatgagaatgtccattttgcacataccagtatattactgagttttttagtgagggctggaaagccatatgatttacagatctatcctcaggagagacacagcataagagttcctgaatcgggagaacattatgaactgcatcttttgcactaccttcaagaaaaccttggatcacgtattgctgctctaaaagtgatataattttgacctgtgtagaactctctggtatacactggctatttaaccaaatgaggaggtttaatcaacagaaaacacagaattgatcatcacattttgatacctgccatgtaacatctactcctgaaaataaatgtggtgccatgcaggggtctacggtttgtggtagtaatctaataccttaaccccacatgctcaaaatcaaatgatacatattcctgagagacccagcaataccataagaattactaaaaaaaaaaaaaaaaaaaagacattagcaccatgtattcatactaccctattttcacttttaatagtattataaacttcatgaacttaattagtgtatttttacagtatacttttgagtttgttaaaatatgatgatattagtgattggtttggttcagttccagaatctttgactagttacagatttgatagcacttaaatgtaattgaatagcttatgcttcattgcttgggcatatccagcatgttatgaactaataactattaaacttgacttaaccagtcattcattaataatttttcaaggataacttagtggcctcctaaagacacttgttttggcactgaccagtttttagccaatttaatctgtatctagtataaataattctcatttttctttgatgatattaacagagtgggcttttccttttgcataaaggctagtaactgtatatgtagcatggatttaattagtcatgatattgataattacaggcagaaaatttttaatcaaatgattagagcttaaatatttgcaggcaagtttttttttttcctttaagaaaaggaaaaagtacacattcactagaattcttcagaaaatttagtggtgccagtttccatttggtatttccttattaaaatattctagaattttaaggagattgaagggaatcacagtggggtggggagacctgggtttggggaatgacagagagaagaggtggtgagggcctgattaaaaactaagcagaagtagttttaacaaaaatactcatgaaaatgtttggaaactgaaatttaaacaactgtaatattaaggaaaccagaatcaataaatcactgtcttgccagcacagctacagagtaacatgattcaggggaggaaaagttccttagagttacttttataattctttttttttttcctcttaggtttagaaatcttacaaatttaaactttatcctttta

SEQ ID NO: 1266 - protein, 782 aa, Homo sapiens
MAAAMETEQLGVEIFETADCEENIESQDRPKLEPFYVERYSWSQLKKLLADTRKYHGYMMAKAPHDFMFVKRNDPDGPHSDRIYYLAMSGENRENTLFYSEIPKTINRAAVLMLSWKPLLDLFQATLDYGMYSREEELLRERKRIGTVGIASYDYHQGSGTFLFQAGSGIYHVKDGGPQGFTQQPLRPNLVETSCPNIRMDPKLCPADPDWIAFIHSNDIWISNIVTREERRLTYVHNELANMEEDARSAGVATFVLQEEFDRYSGYWWCPKAETTPSGGKILRILYEENDESEVEIIHVTSPMLETRRADSFRYPKTGTANPKVTFKMSEIMIDAEGRIIDVIDKELIQPFEILFEGVEYIARAGWTPEGKYAWSILLDRSQTRLQIVLISPELFIPVEDDVMERQRLIESVPDSVTPLIIYEETTDIWINIHDIFHVFPQSHEEEIEFIFASECKTGFRHLYKITSILKESKYKRSSGGLPAPSDFKCPIKEEIAITSGEWEVLGRHGSNIQVDEVRRLVYFEGTKDSPLEHHLYVVSYVNPGEVTRLTDRGYSHSCCISQHCDFFISKYSNQKNPHCVSLYKLSSPEDDPTCKTKEFWATILDSAGPLPDYTPPEIFSFESTTGFTLYGMLYKPHDLQPGKKYPTVLFIYGGPQVAIAGAPVTLWIFYDTGYTERYMGHPDQNEQGYYLGSVAMQAEKFPSEPNRLLLLHGFLDENVHFAHTSILLSFLVRAGKPYDLQIYPQERHSIRVPESGEHYELHLLHYLQENLGSRIAALKVI

SEQ ID NO: 1267 - DNA, 4096 bp, Homo sapiens
aacgaaccggaagtgctaaagcctccgaggccaaggccgctgctactgccgccgctgcttcttagtgccgcgttcgccgcctgggttgtcaccggcgccgccgccgaggaagccactgcaaccaggaccggagtggaggcggcgcagcatgaagcggcgcaggcccgctccatagcgcacgtcgggacggtccgggcggggccggggggaaggaaaatgcaacatggcagcagcaatggaaacagaacagctgggtgttgagatatttgaaactgcggactgtgaggagaatattgaatcacaggatcggcctaaattggagcctttttatgttgagcggtattcctggagtcagcttaaaaagctgcttgccgataccagaaaatatcatggctacatgatggctaaggcaccacatgatttcatgtttgtgaagaggaatgatccagatggacctcattcagacagaatctattaccttgccatgtctggtgagaacagagaaaatacactgttttattctgaaattcccaaaactatcaatagagcagcagtcttaatgctctcttggaagcctcttttggatctttttcaggcaacactggactatggaatgtattctcgagaagaagaactattaagagaaagaaaacgcattggaacagtcggaattgcttcttacgattatcaccaaggaagtggaacatttctgtttcaagccggtagtggaatttatcacgtaaaagatggagggccacaaggatttacgcaacaacctttaaggcccaatctagtggaaactagttgtcccaacatacggatggatccaaaattatgccctgctgatccagactggattgcttttatacatagcaacgatatttggatatctaacatcgtaaccagagaagaaaggagactcacttatgtgcacaatgagctagccaacatggaagaagatgccagatcagctggagtcgctacctttgttctccaagaagaatttgatagatattctggctattggtggtgtccaaaagctgaaacaactcccagtggtggtaaaattcttagaattctatatgaagaaaatgatgaatctgaggtggaaattattcatgttacatcccctatgttggaaacaaggagggcagattcattccgttatcctaaaacaggtacagcaaatcctaaagtcacttttaagatgtcagaaataatgattgatgctgaaggaaggatcatagatgtcatagataaggaactaattcaaccttttgagattctatttgaaggagttgaatatattgccagagctggatggactcctgagggaaaatatgcttggtccatcctactagatcgctcccagactcgcctacagatagtgttgatctcacctgaattatttatcccagtagaagatgatgttatggaaaggcagagactcattgagtcagtgcctgattctgtgacgccactaattatctatgaagaaacaacagacatctggataaatatccatgacatctttcatgtttttccccaaagtcacgaagaggaaattgagtttatttttgcctctgaatgcaaaacaggtttccgtcatttatacaaaattacatctattttaaaggaaagcaaatataaacgatccagtggtgggctgcctgctccaagtgatttcaagtgtcctatcaaagaggagatagcaattaccagtggtgaatgggaagttcttggccggcatggatctaatatccaagttgatgaagtcagaaggctggtatattttgaaggcaccaaagactcccctttagagcatcacctgtacgtagtcagttacgtaaatcctggagaggtgacaaggctgactgaccgtggctactcacattcttgctgcatcagtcagcactgtgacttctttataagtaagtatagtaaccagaagaatccacactgtgtgtccctttacaagctatcaagtcctgaagatgacccaacttgcaaaacaaaggaattttgggccaccattttggattcagcaggtcctcttcctgactatactcctccagaaattttctcttttgaaagtactactggatttacattgtatgggatgctctacaagcctcatgatctacagcctggaaagaaatatcctactgtgctgttcatatatggtggtcctcaggtgcagttggtgaataatcggtttaaaggagtcaagtatttccgcttgaataccctagcctctctaggttatgtggttgtagtgatagacaacaggggatcctgtcaccgagggcttaaatttgaaggcgcctttaaatataaaatgggtcaaatagaaattgacgatcaggtggaaggactccaatatctagcttctcgatatgatttcattgacttagatcgtgtgggcatccacggctggtcctatggaggatacctctccctgatggcattaatgcagaggtcagatatcttcagggttgctattgctggggccccagtcactctgtggatcttctatgatacaggatacacggaacgttatatgggtcaccctgaccagaatgaacagggctattacttaggatctgtggccatgcaagcagaaaagttcccctctgaaccaaatcgtttactgctcttacatggtttcctggatgagaatgtccattttgcacataccagtatattactgagttttttagtgagggctggaaagccatatgatttacagatctatcctcaggagagacacagcataagagttcctgaatcgggagaacattatgaactgcatcttttgcactaccttcaagaaaaccttggatcacgtattgctgctctaaaagtgatataattttgacctgtgtagaactctctggtatacactggctatttaaccaaatgaggaggtttaatcaacagaaaacacagaattgatcatcacattttgatacctgccatgtaacatctactcctgaaaataaatgtggtgccatgcaggggtctacggtttgtggtagtaatctaataccttaaccccacatgctcaaaatcaaatgatacatattcctgagagacccagcaataccataagaattactaaaaaaaaaaaaaaaaaaaagacattagcaccatgtattcatactaccctattttcacttttaatagtattataaacttcatgaacttaattagtgtatttttacagtatacttttgagtttgttaaaatatgatgatattagtgattggtttggttcagttccagaatctttgactagttacagatttgatagcacttaaatgtaattgaatagcttatgcttcattgcttgggcatatccagcatgttatgaactaataactattaaacttgacttaaccagtcattcattaataatttttcaaggataacttagtggcctcctaaagacacttgttttggcactgaccagtttttagccaatttaatctgtatctagtataaataattctcatttttctttgatgatattaacagagtgggcttttccttttgcataaaggctagtaactgtatatgtagcatggatttaattagtcatgatattgataattacaggcagaaaatttttaatcaaatgattagagcttaaatatttgcaggcaagtttttttttttcctttaagaaaaggaaaaagtacacattcactagaattcttcagaaaatttagtggtgccagtttccatttggtatttccttattaaaatattctagaattttaaggagattgaagggaatcacagtggggtggggagacctgggtttggggaatgacagagagaagaggtggtgagggcctgattaaaaactaagcagaagtagttttaacaaaaatactcatgaaaatgtttggaaactgaaatttaaacaactgtaatattaaggaaaccagaatcaataaatcactgtcttgccagcacagctacagagtaacatgattcaggggaggaaaagttccttagagttacttttataattctttttttttttcctcttaggtttagaaatcttacaaatttaaactttatcctttta

SEQ ID NO: 1268 - protein, 882 aa, Homo sapiens
MAAAMETEQLGVEIFETADCEENIESQDRPKLEPFYVERYSWSQLKKLLADTRKYHGYMMAKAPHDFMFVKRNDPDGPHSDRIYYLAMSGENRENTLFYSEIPKTINRAAVLMLSWKPLLDLFQATLDYGMYSREEELLRERKRIGTVGIASYDYHQGSGTFLFQAGSGIYHVKDGGPQGFTQQPLRPNLVETSCPNIRMDPKLCPADPDWIAFIHSNDIWISNIVTREERRLTYVHNELANMEEDARSAGVATFVLQEEFDRYSGYWWCPKAETTPSGGKILRILYEENDESEVEIIHVTSPMLETRRADSFRYPKTGTANPKVTFKMSEIMIDAEGRIIDVIDKELIQPFEILFEGVEYIARAGWTPEGKYAWSILLDRSQTRLQIVLISPELFIPVEDDVMERQRLIESVPDSVTPLIIYEETTDIWINIHDIFHVFPQSHEEEIEFIFASECKTGFRHLYKITSILKESKYKRSSGGLPAPSDFKCPIKEEIAITSGEWEVLGRHGSNIQVDEVRRLVYFEGTKDSPLEHHLYVVSYVNPGEVTRLTDRGYSHSCCISQHCDFFISKYSNQKNPHCVSLYKLSSPEDDPTCKTKEFWATILDSAGPLPDYTPPEIFSFESTTGFTLYGMLYKPHDLQPGKKYPTVLFIYGGPQVQLVNNRFKGVKYFRLNTLASLGYVVVVIDNRGSCHRGLKFEGAFKYKMGQIEIDDQVEGLQYLASRYDFIDLDRVGIHGWSYGGYLSLMALMQRSDIFRVAIAGAPVTLWIFYDTGYTERYMGHPDQNEQGYYLGSVAMQAEKFPSEPNRLLLLHGFLDENVHFAHTSILLSFLVRAGKPYDLQIYPQERHSIRVPESGEHYELHLLHYLQENLGSRIAALKVI

SEQ ID NO: 1269 - DNA, 4086 bp, Homo sapiens
attccgagtcaaccaccgttcactgggcgccccttgagctctgggcgctggcctcctggcttccacgctttgatggtgaggaaaggaaagattcctgtgagaagagcaggatgagcagagggattctatgcttgaagtcgagtcacttgaaaaagatctctttgaatgtggaagagatctgagcagatgaaaataaaatcaggaaaatgcaacatggcagcagcaatggaaacagaacagctgggtgttgagatatttgaaactgcggactgtgaggagaatattgaatcacaggatcggcctaaattggagcctttttatgttgagcggtattcctggagtcagcttaaaaagctgcttgccgataccagaaaatatcatggctacatgatggctaaggcaccacatgatttcatgtttgtgaagaggaatgatccagatggacctcattcagacagaatctattaccttgccatgtctggtgagaacagagaaaatacactgttttattctgaaattcccaaaactatcaatagagcagcagtcttaatgctctcttggaagcctcttttggatctttttcaggcaacactggactatggaatgtattctcgagaagaagaactattaagagaaagaaaacgcattggaacagtcggaattgcttcttacgattatcaccaaggaagtggaacatttctgtttcaagccggtagtggaatttatcacgtaaaagatggagggccacaaggatttacgcaacaacctttaaggcccaatctagtggaaactagttgtcccaacatacggatggatccaaaattatgccctgctgatccagactggattgcttttatacatagcaacgatatttggatatctaacatcgtaaccagagaagaaaggagactcacttatgtgcacaatgagctagccaacatggaagaagatgccagatcagctggagtcgctacctttgttctccaagaagaatttgatagatattctggctattggtggtgtccaaaagctgaaacaactcccagtggtggtaaaattcttagaattctatatgaagaaaatgatgaatctgaggtggaaattattcatgttacatcccctatgttggaaacaaggagggcagattcattccgttatcctaaaacaggtacagcaaatcctaaagtcacttttaagatgtcagaaataatgattgatgctgaaggaaggatcatagatgtcatagataaggaactaattcaaccttttgagattctatttgaaggagttgaatatattgccagagctggatggactcctgagggaaaatatgcttggtccatcctactagatcgctcccagactcgcctacagatagtgttgatctcacctgaattatttatcccagtagaagatgatgttatggaaaggcagagactcattgagtcagtgcctgattctgtgacgccactaattatctatgaagaaacaacagacatctggataaatatccatgacatctttcatgtttttccccaaagtcacgaagaggaaattgagtttatttttgcctctgaatgcaaaacaggtttccgtcatttatacaaaattacatctattttaaaggaaagcaaatataaacgatccagtggtgggctgcctgctccaagtgatttcaagtgtcctatcaaagaggagatagcaattaccagtggtgaatgggaagttcttggccggcatggatctaatatccaagttgatgaagtcagaaggctggtatattttgaaggcaccaaagactcccctttagagcatcacctgtacgtagtcagttacgtaaatcctggagaggtgacaaggctgactgaccgtggctactcacattcttgctgcatcagtcagcactgtgacttctttataagtaagtatagtaaccagaagaatccacactgtgtgtccctttacaagctatcaagtcctgaagatgacccaacttgcaaaacaaaggaattttgggccaccattttggattcagcaggtcctcttcctgactatactcctccagaaattttctcttttgaaagtactactggatttacattgtatgggatgctctacaagcctcatgatctacagcctggaaagaaatatcctactgtgctgttcatatatggtggtcctcaggtgcagttggtgaataatcggtttaaaggagtcaagtatttccgcttgaataccctagcctctctaggttatgtggttgtagtgatagacaacaggggatcctgtcaccgagggcttaaatttgaaggcgcctttaaatataaaatgggtcaaatagaaattgacgatcaggtggaaggactccaatatctagcttctcgatatgatttcattgacttagatcgtgtgggcatccacggctggtcctatggaggatacctctccctgatggcattaatgcagaggtcagatatcttcagggttgctattgctggggccccagtcactctgtggatcttctatgatacaggatacacggaacgttatatgggtcaccctgaccagaatgaacagggctattacttaggatctgtggccatgcaagcagaaaagttcccctctgaaccaaatcgtttactgctcttacatggtttcctggatgagaatgtccattttgcacataccagtatattactgagttttttagtgagggctggaaagccatatgatttacagatctatcctcaggagagacacagcataagagttcctgaatcgggagaacattatgaactgcatcttttgcactaccttcaagaaaaccttggatcacgtattgctgctctaaaagtgatataattttgacctgtgtagaactctctggtatacactggctatttaaccaaatgaggaggtttaatcaacagaaaacacagaattgatcatcacattttgatacctgccatgtaacatctactcctgaaaataaatgtggtgccatgcaggggtctacggtttgtggtagtaatctaataccttaaccccacatgctcaaaatcaaatgatacatattcctgagagacccagcaataccataagaattactaaaaaaaaaaaaaaaaaaaagacattagcaccatgtattcatactaccctattttcacttttaatagtattataaacttcatgaacttaattagtgtatttttacagtatacttttgagtttgttaaaatatgatgatattagtgattggtttggttcagttccagaatctttgactagttacagatttgatagcacttaaatgtaattgaatagcttatgcttcattgcttgggcatatccagcatgttatgaactaataactattaaacttgacttaaccagtcattcattaataatttttcaaggataacttagtggcctcctaaagacacttgttttggcactgaccagtttttagccaatttaatctgtatctagtataaataattctcatttttctttgatgatattaacagagtgggcttttccttttgcataaaggctagtaactgtatatgtagcatggatttaattagtcatgatattgataattacaggcagaaaatttttaatcaaatgattagagcttaaatatttgcaggcaagtttttttttttcctttaagaaaaggaaaaagtacacattcactagaattcttcagaaaatttagtggtgccagtttccatttggtatttccttattaaaatattctagaattttaaggagattgaagggaatcacagtggggtggggagacctgggtttggggaatgacagagagaagaggtggtgagggcctgattaaaaactaagcagaagtagttttaacaaaaatactcatgaaaatgtttggaaactgaaatttaaacaactgtaatattaaggaaaccagaatcaataaatcactgtcttgccagcacagctacagagtaacatgattcaggggaggaaaagttccttagagttacttttataattctttttttttttcctcttaggtttagaaatcttacaaatttaaactttatcctttta

SEQ ID NO: 1270 - protein, 898 aa, Homo sapiens
MWKRSEQMKIKSGKCNMAAAMETEQLGVEIFETADCEENIESQDRPKLEPFYVERYSWSQLKKLLADTRKYHGYMMAKAPHDFMFVKRNDPDGPHSDRIYYLAMSGENRENTLFYSEIPKTINRAAVLMLSWKPLLDLFQATLDYGMYSREEELLRERKRIGTVGIASYDYHQGSGTFLFQAGSGIYHVKDGGPQGFTQQPLRPNLVETSCPNIRMDPKLCPADPDWIAFIHSNDIWISNIVTREERRLTYVHNELANMEEDARSAGVATFVLQEEFDRYSGYWWCPKAETTPSGGKILRILYEENDESEVEIIHVTSPMLETRRADSFRYPKTGTANPKVTFKMSEIMIDAEGRIIDVIDKELIQPFEILFEGVEYIARAGWTPEGKYAWSILLDRSQTRLQIVLISPELFIPVEDDVMERQRLIESVPDSVTPLIIYEETTDIWINIHDIFHVFPQSHEEEIEFIFASECKTGFRHLYKITSILKESKYKRSSGGLPAPSDFKCPIKEEIAITSGEWEVLGRHGSNIQVDEVRRLVYFEGTKDSPLEHHLYVVSYVNPGEVTRLTDRGYSHSCCISQHCDFFISKYSNQKNPHCVSLYKLSSPEDDPTCKTKEFWATILDSAGPLPDYTPPEIFSFESTTGFTLYGMLYKPHDLQPGKKYPTVLFIYGGPQVQLVNNRFKGVKYFRLNTLASLGYVVVVIDNRGSCHRGLKFEGAFKYKMGQIEIDDQVEGLQYLASRYDFIDLDRVGIHGWSYGGYLSLMALMQRSDIFRVAIAGAPVTLWIFYDTGYTERYMGHPDQNEQGYYLGSVAMQAEKFPSEPNRLLLLHGFLDENVHFAHTSILLSFLVRAGKPYDLQIYPQERHSIRVPESGEHYELHLLHYLQENLGSRIAALKVI

SEQ ID NO: 1271 - DNA, 4079 bp, Homo sapiens
aacgaaccggaagtgctaaagcctccgaggccaaggccgctgctactgccgccgctgcttcttagtgccgcgttcgccgcctgggttgtcaccggcgccgccgccgaggaagccactgcaaccaggaccggagtggaggcggcgcagcatgaagcggcgcaggcccgctccatagcgcacgtcgggacggtccgggcggggccggggggaaggctttgatggtgaggaaaggaaagattcctgtgagaagagcaggatgagcagagggattctatgcttgaagtcgagtcacttgaaaaagatctctttgaatgtggaagagatctgagcagatgaaaataaaatcaggaaaatgcaacatggcagcagcaatggaaacagaacagctgggtgttgagatatttgaaactgcggactgtgaggagaatattgaatcacaggatcggcctaaattggagcctttttatgttgagcggtattcctggagtcagcttaaaaagctgcttgccgataccagaaaatatcatggctacatgatggctaaggcaccacatgatttcatgtttgtgaagaggaatgatccagatggacctcattcagacagaatctattaccttgccatgtctggtgagaacagagaaaatacactgttttattctgaaattcccaaaactatcaatagagcagcagtcttaatgctctcttggaagcctcttttggatctttttcaggcaacactggactatggaatgtattctcgagaagaagaactattaagagaaagaaaacgcattggaacagtcggaattgcttcttacgattatcaccaaggaagtggaacatttctgtttcaagccggtagtggaatttatcacgtaaaagatggagggccacaaggatttacgcaacaacctttaaggcccaatctagtggaaactagttgtcccaacatacggatggatccaaaattatgccctgctgatccagactggattgcttttatacatagcaacgatatttggatatctaacatcgtaaccagagaagaaaggagactcacttatgtgcacaatgagctagccaacatggaagaagatgccagatcagctggagtcgctacctttgttctccaagaagaatttgatagatattctggctattggtggtgtccaaaagctgaaacaactcccagtggtggtaaaattcttagaattctatatgaagaaaatgatgaatctgaggtggaaattattcatgttacatcccctatgttggaaacaaggagggcagattcattccgttatcctaaaacaggtacagcaaatcctaaagtcacttttaagatgtcagaaataatgattgatgctgaaggaaggatcatagatgtcatagataaggaactaattcaaccttttgagattctatttgaaggagttgaatatattgccagagctggatggactcctgagggaaaatatgcttggtccatcctactagatcgctcccagactcgcctacagatagtgttgatctcacctgaattatttatcccagtagaagatgatgttatggaaaggcagagactcattgagtcagtgcctgattctgtgacgccactaattatctatgaagaaacaacagacatctggataaatatccatgacatctttcatgtttttccccaaagtcacgaagaggaaattgagtttatttttgcctctgaatgcaaaacaggtttccgtcatttatacaaaattacatctattttaaaggaaagcaaatataaacgatccagtggtgggctgcctgctccaagtgatttcaagtgtcctatcaaagaggagatagcaattaccagtggtgaatgggaagttcttggccggcatggatctaatatccaagttgatgaagtcagaaggctggtatattttgaaggcaccaaagactcccctttagagcatcacctgtacgtagtcagttacgtaaatcctggagaggtgacaaggctgactgaccgtggctactcacattcttgctgcatcagtcagcactgtgacttctttataagtaagtatagtaaccagaagaatccacactgtgtgtccctttacaagctatcaagtcctgaagatgacccaacttgcaaaacaaaggaattttgggccaccattttggattcagcaggtcctcttcctgactatactcctccagaaattttctcttttgaaagtactactggatttacattgtatgggatgctctacaagcctcatgatctacagcctggaaagaaatatcctactgtgctgttcatatatggtggtcctcaggtgcagttggtgaataatcggtttaaaggagtcaagtatttccgcttgaataccctagcctctctaggttatgtggttgtagtgatagacaacaggggatcctgtcaccgagggcttaaatttgaaggcgcctttaaatataaaatggttgctattgctggggccccagtcactctgtggatcttctatgatacaggatacacggaacgttatatgggtcaccctgaccagaatgaacagggctattacttaggatctgtggccatgcaagcagaaaagttcccctctgaaccaaatcgtttactgctcttacatggtttcctggatgagaatgtccattttgcacataccagtatattactgagttttttagtgagggctggaaagccatatgatttacagatctatcctcaggagagacacagcataagagttcctgaatcgggagaacattatgaactgcatcttttgcactaccttcaagaaaaccttggatcacgtattgctgctctaaaagtgatataattttgacctgtgtagaactctctggtatacactggctatttaaccaaatgaggaggtttaatcaacagaaaacacagaattgatcatcacattttgatacctgccatgtaacatctactcctgaaaataaatgtggtgccatgcaggggtctacggtttgtggtagtaatctaataccttaaccccacatgctcaaaatcaaatgatacatattcctgagagacccagcaataccataagaattactaaaaaaaaaaaaaaaaaaaagacattagcaccatgtattcatactaccctattttcacttttaatagtattataaacttcatgaacttaattagtgtatttttacagtatacttttgagtttgttaaaatatgatgatattagtgattggtttggttcagttccagaatctttgactagttacagatttgatagcacttaaatgtaattgaatagcttatgcttcattgcttgggcatatccagcatgttatgaactaataactattaaacttgacttaaccagtcattcattaataatttttcaaggataacttagtggcctcctaaagacacttgttttggcactgaccagtttttagccaatttaatctgtatctagtataaataattctcatttttctttgatgatattaacagagtgggcttttccttttgcataaaggctagtaactgtatatgtagcatggatttaattagtcatgatattgataattacaggcagaaaatttttaatcaaatgattagagcttaaatatttgcaggcaagtttttttttttcctttaagaaaaggaaaaagtacacattcactagaattcttcagaaaatttagtggtgccagtttccatttggtatttccttattaaaatattctagaattttaaggagattgaagggaatcacagtggggtggggagacctgggtttggggaatgacagagagaagaggtggtgagggcctgattaaaaactaagcagaagtagttttaacaaaaatactcatgaaaatgtttggaaactgaaatttaaacaactgtaatattaaggaaaccagaatcaataaatcactgtcttgccagcacagctacagagtaacatgattcaggggaggaaaagttccttagagttacttttataattctttttttttttcctcttaggtttagaaatcttacaaatttaaactttatcctttta

SEQ ID NO: 1272 - protein, 847 aa, Homo sapiens
MWKRSEQMKIKSGKCNMAAAMETEQLGVEIFETADCEENIESQDRPKLEPFYVERYSWSQLKKLLADTRKYHGYMMAKAPHDFMFVKRNDPDGPHSDRIYYLAMSGENRENTLFYSEIPKTINRAAVLMLSWKPLLDLFQATLDYGMYSREEELLRERKRIGTVGIASYDYHQGSGTFLFQAGSGIYHVKDGGPQGFTQQPLRPNLVETSCPNIRMDPKLCPADPDWIAFIHSNDIWISNIVTREERRLTYVHNELANMEEDARSAGVATFVLQEEFDRYSGYWWCPKAETTPSGGKILRILYEENDESEVEIIHVTSPMLETRRADSFRYPKTGTANPKVTFKMSEIMIDAEGRIIDVIDKELIQPFEILFEGVEYIARAGWTPEGKYAWSILLDRSQTRLQIVLISPELFIPVEDDVMERQRLIESVPDSVTPLIIYEETTDIWINIHDIFHVFPQSHEEEIEFIFASECKTGFRHLYKITSILKESKYKRSSGGLPAPSDFKCPIKEEIAITSGEWEVLGRHGSNIQVDEVRRLVYFEGTKDSPLEHHLYVVSYVNPGEVTRLTDRGYSHSCCISQHCDFFISKYSNQKNPHCVSLYKLSSPEDDPTCKTKEFWATILDSAGPLPDYTPPEIFSFESTTGFTLYGMLYKPHDLQPGKKYPTVLFIYGGPQVQLVNNRFKGVKYFRLNTLASLGYVVVVIDNRGSCHRGLKFEGAFKYKMVAIAGAPVTLWIFYDTGYTERYMGHPDQNEQGYYLGSVAMQAEKFPSEPNRLLLLHGFLDENVHFAHTSILLSFLVRAGKPYDLQIYPQERHSIRVPESGEHYELHLLHYLQENLGSRIAALKVI

SEQ ID NO: 1273 - DNA, 5889 bp, Homo sapiens
aagcgggctcagagcgccgcggcattcagcccctcgtgttccgctaccgcgcgtgcgggattccggcgccgctctccgagctcgatccgctgctcgcacgggagccagctgggtgttatttctcaaactctgaggctgcggagttcacacattgaaatctgtcatctttttcagagagaaactttcgatgtaaccttctgtaatggaagatgattgaagacaaggggcctcgtgttgctgactactttgttgtagcaggattaactgatgtttcaaagcctctagaagaagaaattcacttcaatgatgcttgtcataaagtagctaaaccaaaagaacctattacagatgtttcagttattatcaaatctcttggggaggaagtcccacaggattatatctgtattgatgttaccccaactggattgtcagctgatcttaataatggaagtcttgtggggccacagatttacctttgctatagaagaggaagagataagcctccacttacagatctgggggttttatatgactggaaagaaagattgaaacagggttgtgaaattattcagagtactccctatgggcgccccgcaaatattagtgggagtacctcatcacaaagaatttatatcacttaccgaagagcctctgaaaacatgactcagaatacgttggctgtcactgacatatgtattattatacccagtaaaggagaaagcccaccacacacgttctgcaaagtcgacaagaatctcaataacagtatgtggggatcagcagtatacttgtgttataaaaaatcggtggcaaagacgaacactgtatcttacaaagctggcctaatttgtagatatcctcaagaagattatgagtcattctcactaccggaatctgttcctctattttgtttaccaatgggtgcaaccattgaatgttggccatcaaatagcaaataccctctgcctgtattttctacttttgttttaactggagcctcagctgaaaaggtttatggtgctgctattcagttttatgaaccatactctgaggagaatcccacagaaaagcagagacttcttttgggtttaacatcagcagatgggaagtctgatagttccaaaacaattcatactaacaaatgcatctgtcttctttctcactggcctttttttgatgcattcaggaagtttctgacttttctgtatcgttattccatctctgggcctcatgtccttccaattgagaagcatatttctcattttatgcataaagttccttttccatctcctcagagaccacggattttagttcagttatcaccacatgataatctgattctcagtcagcctgtgtcttcacctcttccactaagtggtggcaagttttcaacactactgcagaatttaggccctgaaaatgctgtgacactactggtgtttgcagtaacagaacataaaattcttatccattccctacggccatccgtgcttactagtgtgacagaagcattagtgtctatgattttccctttccactggccatgcccgtatgttcctctctgcccactggctttagcagatgtcttgagtgcaccatgtccattcatagtagggattgattcaagatactttgatctctatgatcctccaccagatgtcagttgtgttgatgtagataccaacactatttctcaaattggtgacaagaaaaatgtagcctggaagatacttccaaagaagccatgtaaaaatctgatgaacacactgaataatttgcatcagcaattggcaaaattgcagcagagaccgagagatgatggactcatggatttagcaataaatgactatgattttaattctggaaagaggttgcacatgatagatttggaaatccaagaggcatttttgtttttcatggcctctattttaaaaggttacagatcatacttaaggccaataacacaagccccatctgagacagccacagatgcagcctctctctttgccctacaagctttcttaagaagccgggaccggtcacatcaaaaattctataacatgatgaccaaaacacaaatgtttattcgcttcattgaagaatgttcttttgttagtgacaaagatgcaagcctggcattttttgatgattgtgtagataaagtggatatggacaagagcggtgaagtacgacttatagaactggatgaatctttcaaaagtgaacacactgtttttgtaacaccacctgagatcccccacctacccaatggtgaagaaccccctttacagtacagctataatggatttccagttcttaggaacaatttatttgaaagacctgaaggatttctacaagcaaagaagaacaaattgccttcaaaatcaagtagtcctaatagccctttgcccatgttcagaagaacaaaacaggaaattaaatcagcccataaaattgcaaagaggtactcttccatccctcagatgtggtctaggtgtctactgcgccactgttatggactgtggtttatttgtctcccagcttatgtgaaagtctgtcattcaaaagtcagggctctgaaaacagcatatgatgtgcttaaaaaaatgcagtcaaagaagatggatccacctgatgaggtatgctaccgcattcttatgcaactctgtggacaatatgatcagccagtgcttgcagttcgagtgctttttgaaatgcagaaagctggtattgaccccaatgccattacttatggttattataataaggctgttttggaaagtacctggccttcaagaagtcgtagtggctattttctttggacaaaagtaagaaatgttgttttaggagtaacacagttcaaaagagctttaaagaagcatgcacacttatcacaaacaactctctcaggtggccagtctgatcttggatataattcattatctaaagatgaagttagaagaggggatacatctactgaagacattcaagaagaaaaagataaaaaagggagtgattgtagttccttgtcagagagtgagagtacaaaaggaagtgctgattgccttcctaagctcagttatcaaaattcttccagtatcgttcgcctcactggtacaagtaacaacagtgctggtaaaatatcaggagaaagcatggaaagcacacctgagctgctcttaatatcatctcttgaagatacaaatgaaacacgaaacattcaaagtagatgcttcaggaaaagacataaaagtgacaatgaaactaatttgcagcagcaagtggtctggggaaatagaaaccgtaatcttagtggaggggtactgatgggatttatgctcaatagaattaaccaggaagcaacccctggagatatagttgaaaaattgggagctgatgcaaaaattctttcaaatgttatctcaaaaagcacgagaccaaatactcttgatattgggaagccacctttaagatcaaaaagagacagtctagaaaaggaatctagtgatgatgatacaccttttgatggttctaactatttggcagataaagtggattctcctgttatttttgacttagaagacttagacagtgaaacagatgtatcaaaagcaggatgtgttgctacacaaaatcccaagaggattcaacgtatgaacagcagcttttcagtaaaaccttttgaaaaaactgatgtcgcaacaggatttgatcccctctctcttttggttgctgagactgaacagcagcaaaaagaagaagaggaggaggatgaagatgatagcaaaagcatttcaacaccatctgctaggcgtgatttagctgaagaaattgtgatgtatatgaataacatgagcagtcctttgacaagtcgtacaccaagcattgatttacaacgggcatgtgatgataaattaaataagaaaagtccaccattggtcaaggcatgcagaagatctagtctgcctcctaattctcctaagccagtgagacttaccaaatctaaaagttacacaaaaagtgaggagaaaccaagggatagactttggtcttctccagccttctcacctacttgcccatttagggaagaatctcaggatacattaacccactcatcaccttcatttaacttagatacactactagtacctaaactagatgttctaagaaacagtatgttcactgctggaaaaggagttgcagagaaagcaagcaaatggtattcaagattcaccatgtacaccacatcatctaaggatcaaagttctgatcgtaccagtctttcttcagtgggagcccaggattctgaatctacctctttaacagatgaagatgtctgccatgagttggaaggacctatctcctctcaagagaccagtgctacttcagggactaagagaattgatctcagccgaataagcctggaaagttctgcatccttggaaggatctctgtcgaagtttgccttacctgggaaatcagaagtgacatcttccttcaacgcgagtaatacaaatatcttccagaactatgcaatggaggttctcatctcaagttgctctcggtgtagaacttgtgattgtcttgtccatgatgaggaaatcatggctggctggacagcagatgattcaaatctcaatactacatgcccattctgtggcaatatcttcttaccctttctgaatatagaaataagagatttaagacgacctggaagatactttctaaagtcaagcccatcaacagaaaatatgcactttccatcctccatttcaagtcagacgaggcagtcttgcatttcaacatcagcctctggtcttgacacatctgctctctctgttcaagggaattttgatctaaatagcaaatctaaactgcaggaaaatttttgcacccgaagtattcagatccctgctaatagatcaaaaacagctatgtctaaatgtccaatatttccaatggccaggagtattagtacttctggccccttggataaggaagatactggaagacagaagctcatttctacaggcagcctgccagctactttacaaggagctacagattctttaggtttagaatggcaccttccaagtcccgatcctgtcactgttccgtatcttagtcctttagtggtatggaaagaacttgaaagcttattggaaaatgaaggtgatcatgcaataacagtagcagactttgtggaccatcatccaattgttttttggaacctggtatggtatttcagacgtcttgacttgcccagtaacttacctggattgattctttcttctgagcactgtaacaagtattcaaagattccccgccactgtatgtctgaagatagcaaatatgttttaatacaaatgttatgggacaatatgaagttacatcaggatccgggacagcccttgtacattctctggaatgcacacacccaaaaatatccaatggtccatttattgcaaaaaagtgataactcatttaaccaggaactgttgaaaagtatggtaaaaagcattaaaatgaatgatgtctatggaccaatgagtcagattttagagacactgaataagtgtccacattttaaaagacagaggagtttatacagagaaatactatttctctcacttgtggcactgggaagagaaaacattgatatagatgcttttgataaagagtacaagatggcatacgatcgtctcacacctagtcaagtcaagagtacacacaactgtgatagaccaccaagtacaggggtgatggaatgtcgaaaaacctttggagaaccttatctttaagatgtatttgtatgtgtaaacattcaatgtatattgtatagtcagtgtataaaataacacttttagactctaaaaaaaaaaaaaaaaa

SEQ ID NO: 1274 - protein, 1863 aa, Homo sapiens
MIEDKGPRVADYFVVAGLTDVSKPLEEEIHFNDACHKVAKPKEPITDVSVIIKSLGEEVPQDYICIDVTPTGLSADLNNGSLVGPQIYLCYRRGRDKPPLTDLGVLYDWKERLKQGCEIIQSTPYGRPANISGSTSSQRIYITYRRASENMTQNTLAVTDICIIIPSKGESPPHTFCKVDKNLNNSMWGSAVYLCYKKSVAKTNTVSYKAGLICRYPQEDYESFSLPESVPLFCLPMGATIECWPSNSKYPLPVFSTFVLTGASAEKVYGAAIQFYEPYSEENPTEKQRLLLGLTSADGKSDSSKTIHTNKCICLLSHWPFFDAFRKFLTFLYRYSISGPHVLPIEKHISHFMHKVPFPSPQRPRILVQLSPHDNLILSQPVSSPLPLSGGKFSTLLQNLGPENAVTLLVFAVTEHKILIHSLRPSVLTSVTEALVSMIFPFHWPCPYVPLCPLALADVLSAPCPFIVGIDSRYFDLYDPPPDVSCVDVDTNTISQIGDKKNVAWKILPKKPCKNLMNTLNNLHQQLAKLQQRPRDDGLMDLAINDYDFNSGKRLHMIDLEIQEAFLFFMASILKGYRSYLRPITQAPSETATDAASLFALQAFLRSRDRSHQKFYNMMTKTQMFIRFIEECSFVSDKDASLAFFDDCVDKVDMDKSGEVRLIELDESFKSEHTVFVTPPEIPHLPNGEEPPLQYSYNGFPVLRNNLFERPEGFLQAKKNKLPSKSSSPNSPLPMFRRTKQEIKSAHKIAKRYSSIPQMWSRCLLRHCYGLWFICLPAYVKVCHSKVRALKTAYDVLKKMQSKKMDPPDEVCYRILMQLCGQYDQPVLAVRVLFEMQKAGIDPNAITYGYYNKAVLESTWPSRSRSGYFLWTKVRNVVLGVTQFKRALKKHAHLSQTTLSGGQSDLGYNSLSKDEVRRGDTSTEDIQEEKDKKGSDCSSLSESESTKGSADCLPKLSYQNSSSIVRLTGTSNNSAGKISGESMESTPELLLISSLEDTNETRNIQSRCFRKRHKSDNETNLQQQVVWGNRNRNLSGGVLMGFMLNRINQEATPGDIVEKLGADAKILSNVISKSTRPNTLDIGKPPLRSKRDSLEKESSDDDTPFDGSNYLADKVDSPVIFDLEDLDSETDVSKAGCVATQNPKRIQRMNSSFSVKPFEKTDVATGFDPLSLLVAETEQQQKEEEEEDEDDSKSISTPSARRDLAEEIVMYMNNMSSPLTSRTPSIDLQRACDDKLNKKSPPLVKACRRSSLPPNSPKPVRLTKSKSYTKSEEKPRDRLWSSPAFSPTCPFREESQDTLTHSSPSFNLDTLLVPKLDVLRNSMFTAGKGVAEKASKWYSRFTMYTTSSKDQSSDRTSLSSVGAQDSESTSLTDEDVCHELEGPISSQETSATSGTKRIDLSRISLESSASLEGSLSKFALPGKSEVTSSFNASNTNIFQNYAMEVLISSCSRCRTCDCLVHDEEIMAGWTADDSNLNTTCPFCGNIFLPFLNIEIRDLRRPGRYFLKSSPSTENMHFPSSISSQTRQSCISTSASGLDTSALSVQGNFDLNSKSKLQENFCTRSIQIPANRSKTAMSKCPIFPMARSISTSGPLDKEDTGRQKLISTGSLPATLQGATDSLGLEWHLPSPDPVTVPYLSPLVVWKELESLLENEGDHAITVADFVDHHPIVFWNLVWYFRRLDLPSNLPGLILSSEHCNKYSKIPRHCMSEDSKYVLIQMLWDNMKLHQDPGQPLYILWNAHTQKYPMVHLLQKSDNSFNQELLKSMVKSIKMNDVYGPMSQILETLNKCPHFKRQRSLYREILFLSLVALGRENIDIDAFDKEYKMAYDRLTPSQVKSTHNCDRPPSTGVMECRKTFGEPYL

SEQ ID NO: 1275 - DNA, 138 bp, Homo sapiens
atggaggggaacagggatgaagctgagaaatgtgtcgacatcgtccaggaggctctgaatgctggcaaccgcgagaaggcccagcgtttcctgcagaaggccgagaagctctacccactgcccttggcctgcgcataa

SEQ ID NO: 1276 - protein, 45 aa, Homo sapiens [sequence omitted]

SEQ ID NO: 1277 - DNA, 723 bp, Homo sapiens
atggtggtaaccaggaacagttcccttcccccaccacacacccccccaaaaagactagaaaaaaaactggtcaacttggacgctggccgcgctcacgcagaacccgtgcccgcgggccggggaaggctgaacagaccctgggaggaaaagtgggcctgcaggcaccccgggctccccccgccgcctgtctcagataccgagcaggtgggattccgggaagccacctccgacttacgagccccccacgcgtccgacgcagaggcgcgggtgctactctcagcaccgccgcgccatcccggggcggaccgagccgcggagcacctcccggatctcaggagctctcgggcggagatctcggccatccgtgcctcctccccgaacccacccgccccgctcccgcgcccccggctgtcacctctccgggccgtgacagctccacctgccaccgctgcccgggtcgccgcccccgcactcaccacccagctggctcccgtgcgagcagcggatcgagctcggagagcggcgccggaatcccgcacgcgcggtagcggaacacgaggggctgaatgccgcggcgctctgagcccgcttagctcatccccagcccggcgctccgcccttcgcggcacccccgcccgcccgcccaggcctgccgtctcagtcagacgggactccccctcccctcgcggccgccactgcctccgcctctttctccgactctag

SEQ ID NO: 1278 - protein, 240 aa, Homo sapiens
MVVTRNSSLPPPHTPPKRLEKKLVNLDAGRAHAEPVPAGRGRLNRPWEEKWACRHPGLPPPPVSDTEQVGFREATSDLRAPHASDAEARVLLSAPPRHPGADRAAEHLPDLRSSRAEISAIRASSPNPPAPLPRPRLSPLRAVTAPPATAARVAAPALTTQLAPVRAADRARRAAPESRTRGSGTRGAECRGALSPLSSSPARRSALRGTPARPPRPAVSVRRDSPSPRGRHCLRLFLRL

SEQ ID NO: 1279 - DNA, 2393 bp, Homo sapiens
agcggcagggaggggctcttcacccagtccggcagttgaagctcggcgctcgggttacccctgcagcgacgccccctggtcccacagataccactgctgctcccgccctttcgctcctcggccgcgcaatgggcacccgcgacgacgagtacgactacctctttaaagttgtccttattggagattctggtgttggaaagagtaatctcctgtctcgatttactcgaaatgagtttaatctggaaagcaagagcaccattggagtagagtttgcaacaagaagcatccaggttgatggaaaaacaataaaggcacagatatgggacacagcagggcaagagcgatatcgagctataacatcagcatattatcgtggagctgtaggtgccttattggtttatgacattgctaaacatctcacatatgaaaatgtagagcgatggctgaaagaactgagagatcatgctgatagtaacattgttatcatgcttgtgggcaataagagtgatctacgtcatctcagggcagttcctacagatgaagcaagagcttttgcagaaaagaatggtttgtcattcattgaaacttcggccctagactctacaaatgtagaagctgcttttcagacaattttaacagagatttaccgcattgtttctcagaagcaaatgtcagacagacgcgaaaatgacatgtctccaagcaacaatgtggttcctattcatgttccaccaaccactgaaaacaagccaaaggtgcagtgctgtcagaacatctaaggcatttctcttctcccctagaaggctgtgtatagtccatttcccaggtctgagatttaaatatatttgtaattcttgtgtcacttttgtgttttattacttcatacttatgaatttttccatgtcctaagtcttttgattttagctttataaaatcatccacttgtcccgaatgactgcagctttttttcatgctatggcttcactagccttagtttaataaactgaatgtttggattcctcagttattgtttacttttcatcatggaagcctgtcactgtatgtaggacataatagaacttgatcacttgaagctcagacctattggtcttgatcaaatcaaactaagaagaccttagaaataagctaccattttgccacagagcagcttataggtaatacactcttctctcagtgcagtgtacatttccacaaatctaagaattgccctataaacatagcaggattttgagagcttgaaaattttccattattctggacatgaatttctaaaatgccttaataggtttatgtagttgagtaaattttgttttttaatttttgtaagcatcaaagttgattagagaggggggcactttttctggagaattctcttagtaaacacaaaagattgttacggtttcattagtagtatggttgtggggccataagttaaacagtgctgcctggtaggctgggaactgaagagacttgtggtattccatctcgggtgcctctgttggcaatgatcaggcagcccaaaagatttaaatgatctataataatttccaagcggtagattatgtggcattttattgctcaggcaataattggtttaatgctggtagtgtcaaattttgaagtgttaattttgtcttagaaccttccagtaagtgaaatacaacctagttttatcaccatatccaccagcaggcatggataattattttaacaatgctaatatttgagttttgcagtatattatagaatatagtccagttaaatctttggtttcagtatgtctgaagagtacagtgagaggttaatttctgctcaagtggtaccacttaaaggcatgtattcttttagtatgtaaaatgaaatagtaccttgagtttaaatagaatgcatttaggcattgtagagatctgaaatagttttcttccactacattgttgaaatcaatgaagcaattagtttctcattcagaaatgtgcacactaatatttagttttgctttctcgtggataatattaagcacttactctgcagtttcctggaagttgtgtcaactgcagtgatactattcaggatggtgggaaatccccaaaaatatgtatgtgtgggcttgcttagattactatatttcatagttaatcttttgtctcttgcggtgctcatgatgtgtggggcacacggaaggcattgctgtagtcagtcattttggttttcttctatagccattttattattttagtgtattagttatgaagataatattatctatttgtaaattgctactttgtattttatgcatgctctgtaatttgatttttttttagttattgatttggattatattcacattctaataaacagttatagggggatta

SEQ ID NO: 1280 - protein, 216 aa, Homo sapiens
MGTRDDEYDYLFKVVLIGDSGVGKSNLLSRFTRNEFNLESKSTIGVEFATRSIQVDGKTIKAQIWDTAGQERYRAITSAYYRGAVGALLVYDIAKHLTYENVERWLKELRDHADSNIVIMLVGNKSDLRHLRAVPTDEARAFAEKNGLSFIETSALDSTNVEAAFQTILTEIYRIVSQKQMSDRRENDMSPSNNVVPIHVPPTTENKPKVQCCQNI

SEQ ID NO: 1281 - DNA, 5702 bp, Homo sapiens
gcccgctgcccgccgcccggctcccggctgctcgcggccccctgctcctgcctggcgctctggccaggctcgggctccggaggacaggaccgcgcgactggccggccgatccctgggccggccgcgggagcagctatgctgtgactgtccaggaatcgtatgcacaccccttcgatcagatctattacacacgatgcacagacatcctcaactggttcaagtgcaccaggcaccgccctgtgtacggaggagtgtgtgcacggccgctgcgtttccccggacacctgccactgcgagcctggctggggagggcccgactgctccagcggctgcgacagcgaccactgggggccccactgcagcaaccggtgccagtgccagaacggcgccctgtgtaaccccatcacaggcgcctgcgtgtgcgccgccggcttccgtggatggcgctgcgaggagctctgcgcgcctggcacccacggcaagggatgccagctgccgtgccagtgccgacacggtgccagctgcgacccccgcgccggcgagtgcctctgcgcacctggctacaccggcgtctactgcgaggagctgtgccctcctgggagccatggagctcactgtgagctgcgctgcccctgtcagaatgggggcacctgccaccacatcactggcgagtgtgcctgccccccaggctggacgggagcagtgtgtgcccagccctgcccaccagggacatttggccagaactgcagccaggattgtccttgccaccatggagggcagtgtgaccacgtgactggacagtgccactgtacagctggatacatgggggacaggtgccaagaggagtgccccttcgggtccttcggcttccagtgctcacagcgctgtgactgccacaatggggggcagtgttcacccaccacgggtgcctgcgagtgtgagcctggctacaagggcccacgctgccaggagcgactgtgcccggagggcctgcatggcccaggctgcaccctgccctgcccctgtgacgctgacaacaccatcagctgccacccagtaactggagcttgtacctgccagccaggctggtctggtcaccactgcaatgaatcctgccctgttggctactatggcgatggctgccagctgccttgcacctgtcagaatggcgccgactgccacagcatcactgggggctgcacttgtgctccgggcttcatgggagaggtctgtgccgtttcctgtgcagcagggacctatggccccaactgctcgtccatctgtagctgtaacaatggtggcacctgctccccagtagatggctcctgtacctgcaaggaagggtggcagggcctggactgcaccctgccatgtcccagtgggacgtggggcctgaactgcaacgagagctgcacctgtgccaatggggcagcctgcagccccatagacggctcctgctcctgcactcctggctggctgggagacacctgtgagctgccttgcccggatggcacatttgggctgaactgcagtgaacactgtgactgcagccatgctgatggatgtgaccccgtcacaggccactgctgctgcctggccggatggacaggcatccgctgtgacagcacgtgtccacctggccgctggggccccaactgctctgtctcctgcagctgtgagaatggaggctcctgctccccagaggatgggagctgcgagtgtgcccctggcttccgaggacccttatgccagagaatctgcccccctgggttctatggccacggctgcgcccagccatgccccctctgcgtgcacagcagcaggccctgccaccacatcagcggcatctgtgagtgcctcccaggattctctggagctctctgcaaccaagtgtgtgctggaggatactttgggcaggactgtgcccagctctgctcctgtgccaacaacgggacctgcagccctatcgatggctcctgccagtgctttcctggatggattggcaaggactgctcacaggcttgcccacccgggttctggggccccgcctgcttccacgcatgcagctgccacaacggggcgagctgcagcgccgaggacggggcctgccactgcacccctggctggactggactcttctgcacacagcgctgcccagcagcattttttgggaaggactgtgggcgcgtatgccagtgtcagaatggcgccagctgtgaccacatcagtggcaagtgcacctgccgcacaggcttcaccgggcaacactgtgagcagagatgtgccccaggaacctttggctatgggtgtcagcagctatgtgagtgcatgaacaactccacctgtgaccatgtcaccggcacctgttactgcagccctggcttcaaaggaatcaggtgtgaccaagctgccctcatgatggaggagctgaatccctacaccaagatcagcccagcactgggtgcagagcggcactcggtgggtgctgtcacaggcatcatgctcctgttattcttcattgtggtgctgctgggcctatttgcctggcatcggcggcggcagaaagagaagggccgagacctggctccccgtgtctcctacacacctgccatgaggatgaccagcaccgactactccctctcaggtgcttgtggaatggatagacgtcagaacacatacattatggacaaaggcttcaaagattacatgaaagaatccgtgtgcagttctagtacttgttccttgaatagcagtgaaaacccttacgccacaattaaggacccacccatcctcacctgcaagcttccagaaagcagctatgtagaaatgaagtcgcctgtgcacatggggtctccgtacacagatgtgccatccttgtcgacatctaataaaaatatatatgaagttgagcccacagtcagtgtggtccaagaaggttgcggtcataactccagctatatccagaatgcatacgacctacctaggaacagccatattcctggtcattatgacctcctcccagtaagacagagccctgccaatgggccgtcccaggacaagcaatcttaagagggataagcttctctcttgcagtgtgctctactgaatattctgactctgaaagaagacagtcccttgacttgaagtaatggtacagactggctccagctgcatgttagttattacgttcacctggaactaaagaagagcgtccaggtgggactgggataattgttcaaggaattgtgttctcaaaggcaaatcctatcacccactcagccccaaatgccctggattatatgatttttaaaacattttaagatacagctactcatcaacatcagctaaatatagctgatatatatatatatatttatctgaaacgtgatattttaaaaacatgtaggtttaacaaaccttcctaggacaaaaaggagactggggagggaagaggattactttaaagcacctgaaacgtatatgtacttttggttgctgttaccatcaacatctgttttattaccgaagacaattagtacacagacatgaactgttcttaaacagaacagtcttaaaatgtctgtacatatctgtctggtccatcaaattacaacagccaagattacagaatctatatagtctaatgctgacaacttctattttaaaaaacaagactttactttcttctgccccctaagtgataggtttaaacacacagagacacacacacacgtttccaaagtgcagcagtgtctctttcagtctacaataagattcctagggcagctttatcaaattttgccaattcaaagttcaaggacattacaagttagtcctggctttgtcatatctacttagtccatccgacacctgaatcattccatgtaaaacagagctctaagatgatcctttaagcaagcagtcatagactggtcgggattaagtaaaagacggctagttggcctcctcattttatttggtcagcatcccttgactcaagagtacttgctttcaagttcttcataaatcttgagattgacgtagtatgaaacctaaaagtatacaggaaattggacaaatgtggatacagcaagtttacactgcttaaagtacattatgctttttaatggaactaaatgatcaaaaaaagaatggactgtaaccagttgctgtaacatgatgtaaaaacgttactgtaaacagcatgaggatatgaagtccttccaccttctatcttaaaactactacttactgagctagcccaatatgcattacaatgagctaatgctccagatcccagtattcagatgtgtctataccttccactatgaacacagataaactgaggctcagataagtccaaatgaaatgaaatcaactcccaagccctaaagagaaccttctcacaagaattaaaaacaaaaagggcaaacctaggaagctaacggctactcctgtaccactctattcactggtacagtccagccagtaaaaaacacttccaaaaagatacacagaagaggaactaaatgactgcgaagctggaatactgctacaggaagtatgagagttctgaaacccttgatagaaactggaagcctgccatggaacacaatactttgggcaataatcagaaaaagcaaaaaaataaataaatgagtacatctccccttcccacatcactcaaggcataagcagattttactgttagaggaaaatatgtaatacttacatgaatgttgcatgtgtgcatgggagcaactgagtagcaatagtaaatttactttccaaaaaagccttattaaaatataaatattagaaaattactttggagacccaagtaaatatttctcatacatatgtagaaagaaatataggtaagcagcttacctcagtatttcagggcagcaagtgtttgtgaagcaaggatgagcagcatgaagatgtcagatcagcaaggagaaacttcaactcaatcccaggttttctcttcttcccttatcctgcatgtacaataactgctgcctggcaaactgcaaacaagcagcatcactcaagtttgaagtttcgccgcttttgtcaactatcctctgggcaaaggtattcagcaagaggtggaatggctagacactgaatcaagagatttcagtgttactctggtcaagttagtcgccctctctgggctccctttttttctatgcataaaaaggggagaagcagagagtgggaagacagctctactaacccttcagctctagcagtccatgactttttaaggaaatgtaatacaagtcaaaccaggcaatacagaggagaagggaaaggcagagggtgtgattatggtgacaatagctgccttcccctatcgaacagttatcagtaaaagacatttcaatcttacaaagcaactgttagaaacttctgtctaacaccatcacaaataggttcatggtcagcctaaacatgtatactgtgcattttatgggtgactttgaaagatctgttcaattatttttcagaaactaaattttcaaaaaattaatatgtgtacaattaaaatgaatgaaagaaaaaccattattgtacagaggtattaatgagactatgaaacggcaatacttttttaaatcacagatttgtaatatatgttcactgtgcagagggattgtaccttgtacaaaataaaacaaatttctcaaact

SEQ ID NO: 1282 - protein, 969 aa, Homo sapiens
MHTPSIRSITHDAQTSSTGSSAPGTALCTEECVHGRCVSPDTCHCEPGWGGPDCSSGCDSDHWGPHCSNRCQCQNGALCNPITGACVCAAGFRGWRCEELCAPGTHGKGCQLPCQCRHGASCDPRAGECLCAPGYTGVYCEELCPPGSHGAHCELRCPCQNGGTCHHITGECACPPGWTGAVCAQPCPPGTFGQNCSQDCPCHHGGQCDHVTGQCHCTAGYMGDRCQEECPFGSFGFQCSQRCDCHNGGQCSPTTGACECEPGYKGPRCQERLCPEGLHGPGCTLPCPCDADNTISCHPVTGACTCQPGWSGHHCNESCPVGYYGDGCQLPCTCQNGADCHSITGGCTCAPGFMGEVCAVSCAAGTYGPNCSSICSCNNGGTCSPVDGSCTCKEGWQGLDCTLPCPSGTWGLNCNESCTCANGAACSPIDGSCSCTPGWLGDTCELPCPDGTFGLNCSEHCDCSHADGCDPVTGHCCCLAGWTGIRCDSTCPPGRWGPNCSVSCSCENGGSCSPEDGSCECAPGFRGPLCQRICPPGFYGHGCAQPCPLCVHSSRPCHHISGICECLPGFSGALCNQVCAGGYFGQDCAQLCSCANNGTCSPIDGSCQCFPGWIGKDCSQACPPGFWGPACFHACSCHNGASCSAEDGACHCTPGWTGLFCTQRCPAAFFGKDCGRVCQCQNGASCDHISGKCTCRTGFTGQHCEQRCAPGTFGYGCQQLCECMNNSTCDHVTGTCYCSPGFKGIRCDQAALMMEELNPYTKISPALGAERHSVGAVTGIMLLLFFIVVLLGLFAWHRRRQKEKGRDLAPRVSYTPAMRMTSTDYSLSGACGMDRRQNTYIMDKGFKDYMKESVCSSSTCSLNSSENPYATIKDPPILTCKLPESSYVEMKSPVHMGSPYTDVPSLSTSNKNIYEVEPTVSVVQEGCGHNSSYIQNAYDLPRNSHIPGHYDLLPVRQSPANGPSQDKQS

SEQ ID NO: 1283 - DNA, 1276 bp, Homo sapiens
gtgattccatcctgcatggctgttctctggagcagtagtcatttatctccatccaccttctctcccacctaagggtgtgccaccatcccaaggaagattcgatggacatggacatgagccccctgaggccccagagctatctttttggttgcgaactaaaggccaacaaagatgatcactttaaggtggataatgatgaaaatgagaccagttatctttaggaacagtcagtttaggagctggtgcaaaggatgaactgcacattgttgaagcagaaacaatgaattatgaagacagtccaattaaagtaagactgacaactttgaaaatgtctgtacagtcaacggtttcccttggggactttgaaataacaccaccagtggtcttatggttgaagcttggttcggggccagtgcatattagtggacagcacttagtagctgtggaggaagctgcagaatcagaagacgaagagaaggaggatgtgaaactcttaagtatatctggaaagtgatgcccctggaggtggtagcaaggttccacagaaacaagtaaaacttgccgctgatgaagaagaataagaaggagaaggagaagaaggaagaagaagattttgatgatgaggatattgaagaaaaagcaccggtgaagaaatctataaagatgctccagccgaaaatgcacagaagtcaaatcagaatggaaaagactcaaaaccgtcaacaccaagatcaaaaggacaagaaaccttcaagaaacaggaaaaaaaaaaacctcctaaaacaccaaaagggcctagttctgtagaagacattaaagcaaaaatgcaaacaagtatagaaaaagctggtttgtttcccaaaatggaagccaagttcgtcaattatgtaaagaattgtctctggatgaatgaccaggaggctattcaagatctctggcagtggaggaagtctctttaagaaaatcgtttgaacaatttgttaaaaattttccatcttacttcatttctctaacagttgctatctggctgtactttttataatgcagagtgagaactttccctaccatgtttgataaatgttgtccaggttccattgccaagaatgtgttgtccaaaatgcctgtttagtttttaaagatgaaaatccaccctttgcttggttttaagtatgtatggaatgttatgataggacatagtagtagcagtggtcagacatagaaatggtggggagacaaaaatatacatgtgaaataaaagtcagtattttaataaaaa

SEQ ID NO: 1284 - DNA, 7057 bp, Homo sapiens
gggccgggccgggctgggctggagcagcggcggccgcgggagccgagcttgcagcgagggaccggctgaggcgcgcgggagggaaggaggcaagggctccgcggcgctgtcgccgccgctgccgctcactctcggggaagagatggcggcggagcggggagcccggcgactcctcagcaccccctccttctggctctactgcctgctgctgctcgggcgccgggcgccgggcgccgcggccgccaggagcggctccgcgccgcagtccccaggagccagcattcgaacgttcactccattttattttctggtggagccggtggatacactctcagttagaggctcttctgttatattaaactgttcagcatattctgagccttctccaaaaattgaatggaaaaaagatggaacttttttaaacttagtatcagatgatcgacgccagcttctcccggatggatctttatttatcagcaatgtggtgcattccaaacacaataaacctgatgaaggttattatcagtgtgtggccactgttgagagtcttggaactattatcagtagaacagcgaagctcatagtagcaggtcttccaagatttaccagccaaccagaaccttcctcagtttatgctgggaacaatgcaattctgaattgtgaagttaatgcagatttggtcccatttgtgaggtgggaacagaacagacaaccccttcttctggatgatagagttatcaaacttccaagtggaatgctggttatcagcaatgcaactgaaggagatggcgggctttatcgctgcgtagtggaaagtggtgggccaccaaagtatagtgatgaagttgaattgaaggttcttccagatcctgaggtgatatcagacttggtatttttgaaacagccttctcccttagtcagagtcattggtcaggatgtagtgttgccatgtgttgcttcaggacttcctactccaaccattaaatggatgaaaaatgaggaggcacttgacacagaaagctctgaaagattggtattgctggcaggtggtagcctggagatcagtgatgttactgaggatgatgctgggacttatttttgtatagctgataatggaaatgagacaattgaagctcaagcagagcttacagtgcaagctcaacctgaattcctgaagcagcctactaatatatatgctcacgaatctatggatattgtatttgaatgtgaagtgactggaaaaccaactccaactgtgaagtgggtcaaaaatggggatatggttatcccaagtgattattttaagattgtaaaggaacataatcttcaagttttgggtctggtgaaatcagatgaagggttctatcagtgcattgctgaaaatgatgttggaaatgcacaagctggagcccaactgataatccttgaacatgcaccagccacaacgggaccactgccttcagctcctcgggatgtcgtggcctccctggtctctacccgcttcatcaaattgacgtggcggacacctgcatcagatcctcacggagacaaccttacctactctgtgttctacaccaaggaagggattgctagggaacgtgttgagaataccagtcacccaggagagatgcaagtaaccattcaaaacctaatgccagcgaccgtgtacatctttagagttatggctcaaaataagcatggctcaggagagagttcagctccactgcgagtagaaacacaacctgaggttcagctccctggcccagcacctaaccttcgtgcatatgcagcttcgcctacctccatcactgttacgtgggaaacaccagtgtctggcaatggggaaattcagaattataaattgtactacatggaaaaggggactgataaagaacaggatgttgatgtttcaagtcactcttacaccattaatgggttgaaaaaatatacagagtatagtttccgagtggtggcctacaataaacatggtcctggagtttccacaccagatgttgctgttcgaacattgtcagatgttcccagtgctgctcctcagaatctgtccttggaagtgagaaattcaaagagtattatgattcactggcagccacctgctccagccacacaaaatgggcagattactggctacaagattcgctaccgaaaggcctcccgaaagagtgatgtcactgagaccttggtaagcgggacacagctgtctcagctgattgaaggtcttgatcgggggactgagtataatttccgagtggctgctctaacaatcaatggtacaggcccggcaactgactggctgtctgctgaaacttttgaaagtgacctagatgaaactcgtgttcctgaagtgcctagctctcttcacgtacgcccgctcgttactagcatcgtagtgagctggactcctccagagaatcagaacattgtggtcagaggttacgccattggttatggcattggcagccctcatgcccagaccatcaaagtggactataaacagcgctattacaccattgaaaatctggatcccagctctcactatgtgattaccctgaaagcatttaataacgtgggtgaaggcatccccctgtatgagagtgctgtgaccaggcctcacacagacacttctgaagttgatttatttgttattaatgctccatacactccagtgccagatcccactcccatgatgccaccagtgggagttcaggcttccattctgagtcatgacaccatcaggattacgtgggcagacaactcgctgcccaagcaccagaagattacagactcccgatactacaccgtccgatggaaaaccaacatcccagcaaacaccaagtacaagaatgcaaatgcaaccactttgagttatttggtgactggtttaaagccgaatacactctatgaattctctgtgatggtgaccaaaggtcgaagatcaagtacatggagtatgacagcccatgggaccacctttgaattagttccgacttctccacccaaggatgtgactgttgtgagtaaagaggggaaacctaagaccataattgtgaattggcagcctccctccgaagccaatggcaaaattacaggttacatcatatattacagtacagatgtgaatgcagagatacatgactgggttattgagcctgttgtgggaaacagactgactcaccagatacaagagttaactcttgacacaccatactacttcaaaatccaggcacggaactcaaagggcatgggacccatgtctgaagctgtccaattcagaacacctaaagcggactcctctgataaaatgcctaatgatcaagcctcagggtctggagggaaaggaagccggctgccagacctaggatccgactacaaacctccaatgagcggcagtaacagccctcatgggagccccacctctcctctggacagtaatatgctgctggtcataattgtttctgttggcgtcatcaccatcgtggtggttgtgattatcgctgtcttttgtacccgtcgtaccacctctcaccagaaaaagaaacgagctgcctgcaaatcagtgaatggctctcataagtacaaagggaattccaaagatgtgaaacctccagatctctggatccatcatgagagactggagctgaaacccattgataagtctccagacccaaaccccatcatgactgatactccaattcctcgcaactctcaagatatcacaccagttgacaactccatggacagcaatatccatcaaaggcgaaattcatacagagggcatgagtcagaggacagcatgtctacactggctggaaggcgaggaatgagaccaaaaatgatgatgccctttgactcccagccaccccagcctgtgattagtgcccatcccatccattccctcgataaccctcaccatcatttccactccagcagcctcgcttctccagctcgcagtcatctctaccacccgggcagcccatggcccattggcacatccatgtccctttcagacagggccaattccacagaatccgttcgaaatacccccagcactgacaccatgccagcctcttcgtctcaaacatgctgcactgatcaccaggaccctgaaggtgctaccagctcctcttacttggccagctcccaagaggaagattcaggccagagtcttcccactgcccatgttcgcccttcccacccattgaagagcttcgccgtgccagcaatcccgcctccaggacctcccacctatgatcctgcattgccaagcacaccattactgtcccagcaagctctgaaccatcacattcactcagtgaagacagcctccatcgggactctaggaaggagccggcctcctatgccagtggttgttcccagtgcccctgaagtgcaggagaccacaaggatgttggaagactccgagagtagctatgaaccagatgagctgaccaaagagatggcccacctggaaggactaatgaaggacctaaacgctatcacaacagcatgacgaccttcaccaggacctgacttcaaacctgagtctggaagtcttggaacttacccttgaaaacaaggaattgtacagagtacgagaggacagcacttgagaacacagaatgagccagcagactggccagcgcctctgtgtagggctggctccaggcatggccacctgccttcccctggtcagcctggaagaagcctgtgtcgaggcagcttccctttgcctgctgatattctgcaggactgggcaccatgggccaaaattttgtgtccagggaagaggcgagaagtgcaacctgcatttcactttgtggtcaggccgtgtctttgtgctgtgactgcatcacctttatggagtgtagacattggcatttatgtacaattttatttgtgtcttattttattttaccttcaaaaacaaaaacgccatccaaaaccaaggaagtccttggtgttctccacaagtggttgacatttgactgcttgttccaattatgtatggaaagtctttgacagtgtgggtcgttcctggggttggcttgttttttggtttcatttttattttttaattctgagtcattgcatcctctaccagctgttaatccatcactctgagggggaggaaatgttgcattgctgtttgtaagctttttttattatttttttattataattattaaaggcctgactctttcctctcatcactgtgagattacagatctatttgaattgaatgaaatgtaacattgaaaagacttgtttgttgctttctgtgcagtttcagtattggggcgggtggggggctgggggttggtaataggaaatggaggggctgctgaggtcctgtgaatgtttctgtcattgtactttcttccagaagcctgcagagaatggaagcatcttctttattgtcctttcctggcatgtccatccttattgtcactacgttgcaactggagtttgatttggatctggttttaaaattcttctgtgcaatagatgggtttgaggatttagcggccctgatgtcttggtcatagcctggtaagaatgtccatgctgaggagccagatgttgtatttctaactgcctgagtcacacagaatagggtaagagcctgaccccattctgtaaatcagaaagcaaggatggagaccctttcctgctgctattattggctctctttgaggaagttggaggttaaggaaggaacttgtttgtttccgtatacgactccttcttctctctagttcagtcttcagccagtccagcgctctcttccacacttcagagccccttcagagaaagcattagcaggaatgagacaaggcagagctgcagtgccccctgaggcttccacacatctttctgaatattatttttcaagtaacaagggcagggacagcggaaacagctgcccaccccccccatcccagcagctcagctaagccctgatgagaatgaagccacaggagttgtctgaggtgaacccagccgctcagccacacatggaagccattgcctttgcacatagttcttgggttctttttcctaaaaaggtaaggagctgaggtgtgtggttttttaatattaagaatatataatggaaaacacacgactgacgctcaggcatcttcccctactccccaacagatccccagaagacagcgtggaaggcagtgtagacagtaaatcgggcttcagttctatagccaagaagagatcagctgctgaaaccaccagtgggtaccccaggccacctgcctttgaacttggggatttgccatgtttgatcttgtcacatacttgcttttttacaagatgaactctttgtatttatgatttggggggcaatgaaaggtgcaatgcaggaactgctgctgccgagctcgctggtcacatgggggtgccaggcgggattctggaaaaccagtgcacttaaactgatcctgaagagagctgtcccagcactctggccaccaggagggccagattccccagaaactaccttttgcccaaagaacatgctcagtatttggggcatttcctcccacaaaccctgactgcttctgttacctcagggccttggtacctggatactgccacagaattggggcgggtgggggaggggcctatttttaaataaaataactgttcaaagttgggggttttttaaaaaattaagaaaaaggaaagctattctgtattgcaccttttcacaatttaatacattttcttacattttcctgtgattttcgaaactaaaccattgtgtgtcctgtagtgtcctggttgagctgccgctcagcagcttcctcggggggatttggaacacctgtgtctgtcgccgcactgcctgtgggaggggcccagagggctgctgggactggcgtctgtacacacttgtttggccttttctgtagttgatgctgtaaactctatggctttttaaaaacgatttcatgtttttatttagtattggaaatccaatacacttttttaatccaatcaaaaaaaaaaaaaaaaaaaaaaa

SEQ ID NO: 1285 - protein, 1461 aa, Homo sapiens
MAAERGARRLLSTPSFWLYCLLLLGRRAPGAAAARSGSAPQSPGASIRTFTPFYFLVEPVDTLSVRGSSVILNCSAYSEPSPKIEWKKDGTFLNLVSDDRRQLLPDGSLFISNVVHSKHNKPDEGYYQCVATVESLGTIISRTAKLIVAGLPRFTSQPEPSSVYAGNNAILNCEVNADLVPFVRWEQNRQPLLLDDRVIKLPSGMLVISNATEGDGGLYRCVVESGGPPKYSDEVELKVLPDPEVISDLVFLKQPSPLVRVIGQDVVLPCVASGLPTPTIKWMKNEEALDTESSERLVLLAGGSLEISDVTEDDAGTYFCIADNGNETIEAQAELTVQAQPEFLKQPTNIYAHESMDIVFECEVTGKPTPTVKWVKNGDMVIPSDYFKIVKEHNLQVLGLVKSDEGFYQCIAENDVGNAQAGAQLIILEHAPATTGPLPSAPRDVVASLVSTRFIKLTWRTPASDPHGDNLTYSVFYTKEGIARERVENTSHPGEMQVTIQNLMPATVYIFRVMAQNKHGSGESSAPLRVETQPEVQLPGPAPNLRAYAASPTSITVTWETPVSGNGEIQNYKLYYMEKGTDKEQDVDVSSHSYTINGLKKYTEYSFRVVAYNKHGPGVSTPDVAVRTLSDVPSAAPQNLSLEVRNSKSIMIHWQPPAPATQNGQITGYKIRYRKASRKSDVTETLVSGTQLSQLIEGLDRGTEYNFRVAALTINGTGPATDWLSAETFESDLDETRVPEVPSSLHVRPLVTSIVVSWTPPENQNIVVRGYAIGYGIGSPHAQTIKVDYKQRYYTIENLDPSSHYVITLKAFNNVGEGIPLYESAVTRPHTDTSEVDLFVINAPYTPVPDPTPMMPPVGVQASILSHDTIRITWADNSLPKHQKITDSRYYTVRWKTNIPANTKYKNANATTLSYLVTGLKPNTLYEFSVMVTKGRRSSTWSMTAHGTTFELVPTSPPKDVTVVSKEGKPKTIIVNWQPPSEANGKITGYIIYYSTDVNAEIHDWVIEPVVGNRLTHQIQELTLDTPYYFKIQARNSKGMGPMSEAVQFRTPKADSSDKMPNDQASGSGGKGSRLPDLGSDYKPPMSGSNSPHGSPTSPLDSNMLLVIIVSVGVITIVVVVIIAVFCTRRTTSHQKKKRAACKSVNGSHKYKGNSKDVKPPDLWIHHERLELKPIDKSPDPNPIMTDTPIPRNSQDITPVDNSMDSNIHQRRNSYRGHESEDSMSTLAGRRGMRPKMMMPFDSQPPQPVISAHPIHSLDNPHHHFHSSSLASPARSHLYHPGSPWPIGTSMSLSDRANSTESVRNTPSTDTMPASSSQTCCTDHQDPEGATSSSYLASSQEEDSGQSLPTAHVRPSHPLKSFAVPAIPPPGPPTYDPALPSTPLLSQQALNHHIHSVKTASIGTLGRSRPPMPVVVPSAPEVQETTRMLEDSESSYEPDELTKEMAHLEGLMKDLNAITTA

SEQ ID NO: 1286 - DNA, 2312 bp, Homo sapiens
aagcagttgttttgctggaaggagggagtgcgcgggctgccccgggctcctccctgccgcctcctctcagtggatggttccaggcaccctgtctggggcagggagggcacaggcctgcacatcgaaggtggggtgggaccaggctgcccctcgccccagcatccaagtcctcccttgggcgcccgtggccctgcagactctcagggctaaggtcctctgttgctttttggttccaccttagaagaggctccgcttgactaagagtagcttgaaggaggcaccatgcaggagctgcatctgctctggtgggcgcttctcctgggcctggctcaggcctgccctgagccctgcgactgtggggaaaagtatggcttccagatcgccgactgtgcctaccgcgacctagaatccgtgccgcctggcttcccggccaatgtgactacactgagcctgtcagccaaccggctgccaggcttgccggagggtgccttcagggaggtgcccctgctgcagtcgctgtggctggcacacaatgagatccgcacggtggccgccggagccctggcctctctgagccatctcaagagcctggacctcagccacaatctcatctctgactttgcctggagcgacctgcacaacctcagtgccctccaattgctcaagatggacagcaacgagctgaccttcatcccccgcgacgccttccgcagcctccgtgctctgcgctcgctgcaactcaaccacaaccgcttgcacacattggccgagggcaccttcaccccgctcaccgcgctgtcccacctgcagatcaacgagaaccccttcgactgcacctgcggcatcgtgtggctcaagacatgggccctgaccacggccgtgtccatcccggagcaggacaacatcgcctgcacctcaccccatgtgctcaagggtacgccgctgagccgcctgccgccactgccatgctcggcgccctcagtgcagctcagctaccaacccagccaggatggtgccgagctgcggcctggttttgtgctggcactgcactgtgatgtggacgggcagccggcccctcagcttcactggcacatccagatacccagtggcattgtggagatcaccagccccaacgtgggcactgatgggcgtgccctgcctggcacccctgtggccagctcccagccgcgcttccaggcctttgccaatggcagcctgcttatccccgactttggcaagctggaggaaggcacctacagctgcctggccaccaatgagctgggcagtgctgagagctcagtggacgtggcactggccacgcccggtgagggtggtgaggacacactggggcgcaggttccatggcaaagcggttgagggaaagggctgctatacggttgacaacgaggtgcagccatcagggccggaggacaatgtggtcatcatctacctcagccgtgctgggaaccctgaggctgcagtcgcagaaggggtccctgggcagctgcccccaggcctgctcctgctgggccaaagcctcctcctcttcttcttcctcacctccttctagccccacccagggcttccctaactcctccccttgcccctaccaatgcccctttaagtgctgcaggggtctggggttggcaactcctgaggcctgcatgggtgacttcacattttcctacctctccttctaatctcttctagagcacctgctatccccaacttctagacctgctccaaactagtgactaggatagaatttgatcccctaactcactgtctgcggtgctcattgctgctaacagcattgcctgtgctctcctctcaggggcagcatgctaacggggcgacgtcctaatccaactgggagaagcctcagtggtggaattccaggcactgtgactgtcaagctggcaagggccaggattgggggaatggagctggggcttagctgggaggtggtctgaagcagacagggaatgggagaggaggatgggaagtagacagtggctggtatggctctgaggctccctggggcctgctcaagctcctcctgctccttgctgttttctgatgatttgggggcttgggagtccctttgtcctcatctgagactgaaatgtggggatccaggatggccttccttcctcttacccttcctccctcagcctgcaacctctatcctggaacctgtcctccctttctccccaactatgcatctgttgtctgctcctctgcaaaggccagccagcttgggagcagcagagaaataaacagcatttctgatgccaaaaaaaaaaaaaaaaa

SEQ ID NO: 1287 - protein, 428 aa, Homo sapiens
MQELHLLWWALLLGLAQACPEPCDCGEKYGFQIADCAYRDLESVPPGFPANVTTLSLSANRLPGLPEGAFREVPLLQSLWLAHNEIRTVAAGALASLSHLKSLDLSHNLISDFAWSDLHNLSALQLLKMDSNELTFIPRDAFRSLRALRSLQLNHNRLHTLAEGTFTPLTALSHLQINENPFDCTCGIVWLKTWALTTAVSIPEQDNIACTSPHVLKGTPLSRLPPLPCSAPSVQLSYQPSQDGAELRPGFVLALHCDVDGQPAPQLHWHIQIPSGIVEITSPNVGTDGRALPGTPVASSQPRFQAFANGSLLIPDFGKLEEGTYSCLATNELGSAESSVDVALATPGEGGEDTLGRRFHGKAVEGKGCYTVDNEVQPSGPEDNVVIIYLSRAGNPEAAVAEGVPGQLPPGLLLLGQSLLLFFFLTSF

SEQ ID NO: 1288 - DNA, 2128 bp, Homo sapiens
caggccgaggcagggagaactctccactcggaggaggagctggggtcctcttccatcccgtcttcatcctgcctggctgcgtgacctcgggaggcaccatgcaggagctgcatctgctctggtgggcgcttctcctgggcctggctcaggcctgccctgagccctgcgactgtggggaaaagtatggcttccagatcgccgactgtgcctaccgcgacctagaatccgtgccgcctggcttcccggccaatgtgactacactgagcctgtcagccaaccggctgccaggcttgccggagggtgccttcagggaggtgcccctgctgcagtcgctgtggctggcacacaatgagatccgcacggtggccgccggagccctggcctctctgagccatctcaagagcctggacctcagccacaatctcatctctgactttgcctggagcgacctgcacaacctcagtgccctccaattgctcaagatggacagcaacgagctgaccttcatcccccgcgacgccttccgcagcctccgtgctctgcgctcgctgcaactcaaccacaaccgcttgcacacattggccgagggcaccttcaccccgctcaccgcgctgtcccacctgcagatcaacgagaaccccttcgactgcacctgcggcatcgtgtggctcaagacatgggccctgaccacggccgtgtccatcccggagcaggacaacatcgcctgcacctcaccccatgtgctcaagggtacgccgctgagccgcctgccgccactgccatgctcggcgccctcagtgcagctcagctaccaacccagccaggatggtgccgagctgcggcctggttttgtgctggcactgcactgtgatgtggacgggcagccggcccctcagcttcactggcacatccagatacccagtggcattgtggagatcaccagccccaacgtgggcactgatgggcgtgccctgcctggcacccctgtggccagctcccagccgcgcttccaggcctttgccaatggcagcctgcttatccccgactttggcaagctggaggaaggcacctacagctgcctggccaccaatgagctgggcagtgctgagagctcagtggacgtggcactggccacgcccggtgagggtggtgaggacacactggggcgcaggttccatggcaaagcggttgagggaaagggctgctatacggttgacaacgaggtgcagccatcagggccggaggacaatgtggtcatcatctacctcagccgtgctgggaaccctgaggctgcagtcgcagaaggggtccctgggcagctgcccccaggcctgctcctgctgggccaaagcctcctcctcttcttcttcctcacctccttctagccccacccagggcttccctaactcctccccttgcccctaccaatgcccctttaagtgctgcaggggtctggggttggcaactcctgaggcctgcatgggtgacttcacattttcctacctctccttctaatctcttctagagcacctgctatccccaacttctagacctgctccaaactagtgactaggatagaatttgatcccctaactcactgtctgcggtgctcattgctgctaacagcattgcctgtgctctcctctcaggggcagcatgctaacggggcgacgtcctaatccaactgggagaagcctcagtggtggaattccaggcactgtgactgtcaagctggcaagggccaggattgggggaatggagctggggcttagctgggaggtggtctgaagcagacagggaatgggagaggaggatgggaagtagacagtggctggtatggctctgaggctccctggggcctgctcaagctcctcctgctccttgctgttttctgatgatttgggggcttgggagtccctttgtcctcatctgagactgaaatgtggggatccaggatggccttccttcctcttacccttcctccctcagcctgcaacctctatcctggaacctgtcctccctttctccccaactatgcatctgttgtctgctcctctgcaaaggccagccagcttgggagcagcagagaaataaacagcatttctgatgccaaaaaaaaaaaaaaaaa

SEQ ID NO: 1289 - protein, 428 aa, Homo sapiens; identical to SEQ ID NO: 1287

SEQ ID NO: 1290 - DNA, 2820 bp, Homo sapiens
ccagaaaggggcaggctgaggctgggggaggggctcaagggagcccagctgggagggcccaggcaggcagtgcggagctggccgtgggctgcctaccctttcatctctgcaactccttcctccctgggcctcccttctggagaagggccagagaatgtcgtcccagccagcagggaaccagacctcccccggggccacagaggactactcctatggcagctggtacatcgatgagccccaggggggcgaggagctccagccagagggggaagtgccctcctgccacaccagcataccacccggcctgtaccacgcctgcctggcctcgctgtcaatccttgtgctgctgctcctggccatgctggtgaggcgccgccagctctggcctgactgtgtgcgtggcaggcccggcctgcccagccctgtggatttcttggctggggacaggccccgggcagtgcctgctgctgttttcatggtcctcctgagctccctgtgtttgctgctccccgacgaggacgcattgcccttcctgactctcgcctcagcacccagccaagatgggaaaactgaggctccaagaggggcctggaagatactgggactgttctattatgctgccctctactaccctctggctgcctgtgccacggctggccacacagctgcacacctgctcggcagcacgctgtcctgggcccaccttggggtccaggtctggcagagggcagagtgtccccaggtgcccaagatctacaagtactactccctgctggcctccctgcctctcctgctgggcctcggattcctgagcctttggtaccctgtgcagctggtgagaagcttcagccgtaggacaggagcaggctccaaggggctgcagagcagctactctgaggaatatctgaggaacctcctttgcaggaagaagctgggaagcagctaccacacctccaagcatggcttcctgtcctgggcccgcgtctgcttgagacactgcatctacactccacagccaggattccatctcccgctgaagctggtgctttcagctacactgacagggacggccatttaccaggtggccctgctgctgctggtgggcgtggtacccactatccagaaggtgagggcaggggtcaccacggatgtctcctacctgctggccagctttggaatcgtgctctccgaggacaagcaggaggtggtggagctggtgaagcaccatctgtgggctctggaagtgtgctacatctcagccttggtcttgtcctgcttactcaccttcctggtcctgatgcgctcactggtgacacacaggaccaaccttcgagctctgcaccgaggagctgccctggacttgagtcccttgcatcggagtccccatccctcccgccaagccatattctgttggatgagcttcagtgcctaccagacagcctttatctgccttgggctcctggtgcagcagatcatcttcttcctgggaaccacggccctggccttcctggtgctcatgcctgtgctccatggcaggaacctcctgctcttccgttccctggagtcctcgtggcccttctggctgactttggccctggctgtgatcctgcagaacatggcagcccattgggtcttcctggagactcatgatggacacccacagctgaccaaccggcgagtgctctatgcagccacctttcttctcttccccctcaatgtgctggtgggtgccatggtggccacctggcgagtgctcctctctgccctctacaacgccatccaccttggccagatggacctcagcctgctgccaccgagagccgccactctcgaccccggctactacacgtaccgaaacttcttgaagattgaagtcagccagtcgcatccagccatgacagccttctgctccctgctcctgcaagcgcagagcctcctacccaggaccatggcagccccccaggacagcctcagaccaggggaggaagacgaagggatgcagctgctacagacaaaggactccatggccaagggagctaggcccggggccagccgcggcagggctcgctggggtctggcctacacgctgctgcacaacccaaccctgcaggtcttccgcaagacggccctgttgggtgccaatggtgcccagccctgagggcagggaaggtcaacccacctgcccatctgtgctgaggcatgttcctgcctaccatcctcctccctccccggctctcctcccagcatcacaccagccatgcagccagcaggtcctccggatcactgtggttgggtggaggtctgtctgcactgggagcctcaggagggctctgctccacccacttggctatgggagagccagcaggggttctggagaaaaaaactggtgggttagggccttggtccaggagccagttgagccagggcagccacatccaggcgtctccctaccctggctctgccatcagccttgaagggcctcgatgaagccttctctggaaccactccagcccagctccacctcagccttggccttcacgctgtggaagcagccaaggcacttcctcaccccctcagcgccacggacctctctggggagtggccggaaagctcccgggcctctggcctgcagggcagcccaagtcatgactcagaccaggtcccacactgagctgcccacactcgagagccagatatttttgtagtttttatgcctttggctattatgaaagaggttagtgtgttccctgcaataaacttgttcctgagaaaaaaaaaaaaaaaaaaaaaaaaaaaaaaaaaaaaaaaaaaaaaaaaaaa

SEQ ID NO: 1291 - protein, 667 aa, Homo sapiens
MSSQPAGNQTSPGATEDYSYGSWYIDEPQGGEELQPEGEVPSCHTSIPPGLYHACLASLSILVLLLLAMLVRRRQLWPDCVRGRPGLPSPVDFLAGDRPRAVPAAVFMVLLSSLCLLLPDEDALPFLTLASAPSQDGKTEAPRGAWKILGLFYYAALYYPLAACATAGHTAAHLLGSTLSWAHLGVQVWQRAECPQVPKIYKYYSLLASLPLLLGLGFLSLWYPVQLVRSFSRRTGAGSKGLQSSYSEEYLRNLLCRKKLGSSYHTSKHGFLSWARVCLRHCIYTPQPGFHLPLKLVLSATLTGTAIYQVALLLLVGVVPTIQKVRAGVTTDVSYLLASFGIVLSEDKQEVVELVKHHLWALEVCYISALVLSCLLTFLVLMRSLVTHRTNLRALHRGAALDLSPLHRSPHPSRQAIFCWMSFSAYQTAFICLGLLVQQIIFFLGTTALAFLVLMPVLHGRNLLLFRSLESSWPFWLTLALAVILQNMAAHWVFLETHDGHPQLTNRRVLYAATFLLFPLNVLVGAMVATWRVLLSALYNAIHLGQMDLSLLPPRAATLDPGYYTYRNFLKIEVSQSHPAMTAFCSLLLQAQSLLPRTMAAPQDSLRPGEEDEGMQLLQTKDSMAKGARPGASRGRARWGLAYTLLHNPTLQVFRKTALLGANGAQP

SEQ ID NO: 1292 - DNA, 526 bp, Homo sapiens
agactgggtccaggctgggctgtgggtgagagggtgcagtgctcagcctggcagttggtctctcagtggccatggcattcagggggcctgaaccctgggtctctgcatccctgctgagacagaggctgaaggccgaggagaagacgctggatctggagttcgaagttttgagcgtggggtttaatgaggcgggtagatacgccctgagactgtcagcagagaaccccctgcaggtttctgcaagaatgacgggcagcatgatgctcagctgcatgtggaggcactgaggctggacgaacccttgggacgggcagcccagcgggtgggtgaggccatcttccccatctacccgaggccagaccaaccccgcatgaacccaaaggctcaggatcacgaggacctgtaccgctactgtggcaacctggctctgctccgggctagcacggaccccacagcccgacactgtgggagcctggcctacagtgtggccttccacgtccaccggggccctcagcctccagtctca

SEQ ID NO: 1293 - protein, 71 aa, Homo sapiens
MAFRGPEPWVSASLLRQRLKAEEKTLDLEFEVLSVGFNEAGRYALRLSAENPLQVSARMTGSMMLSCMWRH

SEQ ID NO: 1294 - DNA, 4022 bp, Homo sapiens
atgcagaaggggatccggctgaatgatggccacgtcgcgtccctgggactgctggcgcgcaaggacggcacgcgcaaaggctacctgagcaagcggagttcggacaacacaaaatggcaaaccaagtggttcgcgctgctgcagaacctgctcttctacttcgagagcgactcgagctcgcggccctcggggctttacctgctggagggctgcgtctgcgaccgcgcgccctcccccaagccggcgctgtcggccaaggagccgctggagaaacagcattacttcacggtgaacttcagccatgagaaccagaaagccttggagctgaggacagaggacgcaaaagattgtgacgaatgggtggcagccattgcacatgccagctacaggaccctcgccacagagcatgaggcattaatgcagaaatacctgcacctgctgcagatcgtggagacagagaagaccgtggccaagcagcttcggcagcagatcgaggatggggagatcgagatcgagcggctgaaggcagagatcacatccctgctcaaggacaatgagcgcatccagtccacccagactgtcgcccccaacgatgaagacagcgacatcaagaaaattaagaaggtgcagagcttcctgcggggctggctgtgccggcggaagtggaagaccatcatccaggactacatccggtcaccccatgctgacagcatgcgcaagaggaaccaggtggtgttcagcatgctggaggctgaggctgagtacgtgcagcagctgcacatccttgtcaacaatttcctgcgcccgctgcggatggccgccagctccaagaagcctcccatcacacacgacgacgtcagcagcatcttcctgaacagcgaaaccatcatgtttttacatcagatcttttaccaaggcctgaaggcccgcatctccagctggcccacgctggtcctggctgacctatttgacatcctgctgcccatgctcaacatctaccaagagttcgtccgcaaccaccagtacagcctgcagatcctggcccactgcaagcagaaccgtgacttcgacaagctgctgaagcactacgaggccaagcctgactgcgaggagaggacgctggagaccttcctcacctaccccatgttccagatccccaggtacatcctgaccctccatgagctcctggcccacacgcctcatgagcacgttgagcgcaacagcctggactacgccaagtccaaactggaggagctgtccagaataatgcacgatgaagtaagtgagacggagaacatccggaaaaacctggccatcgagcgcatgatcatcgaaggctgtgagatcctcctggacaccagccagacctttgtgagacaaggttccctcattcaggtgcccatgtctgaaaagggcaagatcaccagggggcgcctggggtctctctccctaaagaaagagggcgagcgacagtgcttcctgttttctaagcatctgattatctgtaccagaggctctggagggaagcttcacttgaccaagaatggagtcatatccctcattgactgcactttattggaggagccagaaagcacggaggaggaagccaaaggatccggccaagacatagatcacttggattttaaaatcggggtggagccaaaggattccccgccctttacagtcatcctagtggcctcgtccagacaggagaaggcagcgtggaccagtgacatcagccagtgtgtggataacatccgatgcaatgggctcatgatgaacgcatttgaagaaaattccaaggtcactgtgccgcagatgatcaagaggaccagggaggggaccagggaagcagaaatgagcaggtccgacgcctccttatattgtgatgatgttgacattcgcttcagcaaaaccatgaactcctgcaaagtgctgcagatccgctacgccagtgtggagcggctgctggagaggctgacggacctgcgcttcctgagcatcgacttcctcaacaccttcctgcactcctaccgcgtcttcaccaccgccatcgtggtcctggacaagctcattaccatctacaagaagcctatcagtgccattcctgccaggtggctgaggtcgctggagctcctgtttgccagtggccagaacaataagctcctgtacggtgaaccccccaagtccccgcgcgccacccgcaagttctcctcgccgccacctctgtccatcaccaagacatcgtcaccgagccgccggcggaagctctccctgaacatccccatcatcactggcggcaaggccctggacctggccgccctcagctgcaactccaatggctacaccagcatgtactcggccatgtcacccttcagcaaggccacgctggacaccagcaagctctatgtgtccagcagcttcaccaacaagattccagatgagggcgatacgacccctgagaagcccgaagacccttcagcgctcagcaagcagagctcagaagtctccatgagagaggagtcagatattgatcaaaaccagagtgatgatggtgatactgaaacatcaccaactaaatctccaacaacacccaaatcagtcaaaaacaaaaattcttcagagttcccactcttttcctataacaatggagtcgtcatgacctcctgtcgtgaactggacaataaccgcagtgccttgtcggccgcctctgcctttgccatagcaaccgccggggccaacgagggcaccccaaacaaggagaagtaccggaggatgtccttagccagtgcagggtttcccccagaccagaggaatggagacaaggagtttgtgatccgcagagcagccaccaatcgtgtcttgaacgtgctccgccactgggtgtccaagcactctcaggactttgagaccaacgatgagctcaaatgcaaggtgatcggcttcctggaagaagtcatgcacgacccggagctcctgacccaggagcggaaggctgcagccaacatcatcaggactctgacccaggaggacccaggtgacaaccagatcacgctggaggagatcacgcagatggctgaaggcgtgaaggctgagccctttgaaaaccactcagccctggagatcgcggagcagctgaccctgctagatcacctcgtcttcaagaagattccttatgaggagttcttcggacaaggatggatgaaactggaaaagaatgaaaggaccccttatatcatgaaaaccactaagcacttcaatgacatcagtaacttgattgcttcagaaatcatccgcaatgaggacatcaacgccagggtgagcgccatcgagaagtgggtggccgtagctgacatatgccgctgcctccacaactacaatgccgtactggagatcacctcgtccatgaaccgcagtgcaatcttccggctcaaaaagacgtggctcaaagtctctaagcagactaaagctttgattgataagctccaaaagcttgtgtcatctgagggcagatttaagaatctcagagaagctctgaaaaattgtgacccaccctgtgtcccttacctggggatgtacctcaccgacctggccttcatcgaggaggggacgcccaattacacggaagacggcctggtcaacttctccaagatgaggatgatatcccatattatccgagagattcgccagtttcaacaaactgcctacaaaatagagcaccaagcaaaggtaacgcaatatttactggaccaatcttttgtaatggatgaagaaagcctctacgagtcttctctccgaatagaaccaaaactccccacctgaagctgagcccagcccagacccagctgctcccggggacatgtgctagatgatactgtacatattcgtttggtttcactggattttcttcttcagtatgtgcttctccaagaatacaaatcgtccttgttcttagattcctgtagaaccggaatatgaatttctgcaccgtttcagacttcgcccacccatccctcccctcg

SEQ ID NO: 1295 - protein, 1273 aa, Homo sapiens
MQKGIRLNDGHVASLGLLARKDGTRKGYLSKRSSDNTKWQTKWFALLQNLLFYFESDSSSRPSGLYLLEGCVCDRAPSPKPALSAKEPLEKQHYFTVNFSHENQKALELRTEDAKDCDEWVAAIAHASYRTLATEHEALMQKYLHLLQIVETEKTVAKQLRQQIEDGEIEIERLKAEITSLLKDNERIQSTQTVAPNDEDSDIKKIKKVQSFLRGWLCRRKWKTIIQDYIRSPHADSMRKRNQVVFSMLEAEAEYVQQLHILVNNFLRPLRMAASSKKPPITHDDVSSIFLNSETIMFLHQIFYQGLKARISSWPTLVLADLFDILLPMLNIYQEFVRNHQYSLQILAHCKQNRDFDKLLKHYEAKPDCEERTLETFLTYPMFQIPRYILTLHELLAHTPHEHVERNSLDYAKSKLEELSRIMHDEVSETENIRKNLAIERMIIEGCEILLDTSQTFVRQGSLIQVPMSEKGKITRGRLGSLSLKKEGERQCFLFSKHLIICTRGSGGKLHLTKNGVISLIDCTLLEEPESTEEEAKGSGQDIDHLDFKIGVEPKDSPPFTVILVASSRQEKAAWTSDISQCVDNIRCNGLMMNAFEENSKVTVPQMIKRTREGTREAEMSRSDASLYCDDVDIRFSKTMNSCKVLQIRYASVERLLERLTDLRFLSIDFLNTFLHSYRVFTTAIVVLDKLITIYKKPISAIPARWLRSLELLFASGQNNKLLYGEPPKSPRATRKFSSPPPLSITKTSSPSRRRKLSLNIPIITGGKALDLAALSCNSNGYTSMYSAMSPFSKATLDTSKLYVSSSFTNKIPDEGDTTPEKPEDPSALSKQSSEVSMREESDIDQNQSDDGDTETSPTKSPTTPKSVKNKNSSEFPLFSYNNGVVMTSCRELDNNRSALSAASAFAIATAGANEGTPNKEKYRRMSLASAGFPPDQRNGDKEFVIRRAATNRVLNVLRHWVSKHSQDFETNDELKCKVIGFLEEVMHDPELLTQERKAAANIIRTLTQEDPGDNQITLEEITQMAEGVKAEPFENHSALEIAEQLTLLDHLVFKKIPYEEFFGQGWMKLEKNERTPYIMKTTKHFNDISNLIASEIIRNEDINARVSAIEKWVAVADICRCLHNYNAVLEITSSMNRSAIFRLKKTWLKVSKQTKALIDKLQKLVSSEGRFKNLREALKNCDPPCVPYLGMYLTDLAFIEEGTPNYTEDGLVNFSKMRMISHIIREIRQFQQTAYKIEHQAKVTQYLLDQSFVMDEESLYESSLRIEPKLPT

SEQ ID NO: 1296 - DNA, 2843 bp, Homo sapiens
cctttttggcctacttggggtgagtcaacataaggagtgcaggccaccttagcctttgcttctcaaaagtcatggggcaatgaaggacttggccaaggctgtccagcagtaggccaagttcagggattggctcaggcccctaatggacttcactgcatccaggaatggtaggtgattatcttttccgagaggccacctacccagatcccagttgtggacagcccatcccagccctcagaggctcagaggctctctgagtgccctgccccaaaacaccctaggcaagacattatgccagagcctcagctctagggctgcctggagcagagctcctgaatcacactggctccccagggctccccaggaacctcaccattcctcccccaatccacacctctgctgccagagcaacgcaacgacccagaatacacccgttccctcttctgttccctcctcctgcccccacctcaggcctcactggggcagggtacatcttgcctctctgccctgaacttctgaaacctcaatgatcagattcccagggctctgagaaaacagaagcaaacatcccatccaggatggatttaccccctaaaagtcactgagatcattcccaggggcccagcagacagtgtccttcctttcccagcagcagtgccctgcagaacaaagaggctggttcagagccagctctcagccctatggccttggctgagtcccttaacctttctgagactcagtttcctacctgtgacattcctgcagttatcctgtaggaataagagtgcctacgtcctggggcaacagtgagggttaaaagatcaatcctatcctgtgtgcaacgtggagcagacagcctcgatgagacaagctatggtttgcaatgttctggatgtataacctgtttccagcctggcctgaggtggaaccctgtcatgaggatggtcgctggagctcctgtttgccagtggccagaacaataagctcctgtacggtgaaccccccaagtccccgcgcgccacccgcaagttctcctcgccgccacctctgtccatcaccaagacatcgtcaccgagccgccggcggaagctctccctgaacatccccatcatcactggcggcaaggccctggacctggccgccctcagctgcaactccaatggctacaccagcatgtactcggccatgtcacccttcagcaaggccacgctggacaccagcaagctctatgtgtccagcagcttcaccaacaagattccagatgagggcgatacgacccctgagaagcccgaagacccttcagcgctcagcaagcagagctcagaagtctccatgagagaggagtcagatattgatcaaaaccagagtgatgatggtgatactgaaacatcaccaactaaatctccaacaacacccaaatcagtcaaaaacaaaaattcttcagagttcccactcttttcctataacaatggagtcgtcatgacctcctgtcgtgaactggacaataaccgcagtgccttgtcggccgcctctgcctttgccatagcaaccgccggggccaacgagggcaccccaaacaaggagaagtaccggaggatgtccttagccagtgcagggtttcccccagaccagaggaatggagacaaggagtttgtgatccgcagagcagccaccaatcgtgtcttgaacgtgctccgccactgggtgtccaagcactctcaggactttgagaccaacgatgagctcaaatgcaaggtgatcggcttcctggaagaagtcatgcacgacccggagctcctgacccaggagcggaaggctgcagccaacatcatcaggactctgacccaggaggacccaggtgacaaccagatcacgctggaggagatcacgcagatggctgaaggcgtgaaggctgagccctttgaaaaccactcagccctggagatcgcggagcagctgaccctgctagatcacctcgtcttcaagaagattccttatgaggagttcttcggacaaggatggatgaaactggaaaagaatgaaaggaccccttatatcatgaaaaccactaagcacttcaatgacatcagtaacttgattgcttcagaaatcatccgcaatgaggacatcaacgccagggtgagcgccatcgagaagtgggtggccgtagctgacatatgccgctgcctccacaactacaatgccgtactggagatcacctcgtccatgaaccgcagtgcaatcttccggctcaaaaagacgtggctcaaagtctctaagcagactaaagctttgattgataagctccaaaagcttgtgtcatctgagggcagatttaagaatctcagagaagctctgaaaaattgtgacccaccctgtgtcccttacctggggatgtacctcaccgacctggccttcatcgaggaggggacgcccaattacacggaagacggcctggtcaacttctccaagatgaggatgatatcccatattatccgagagattcgccagtttcaacaaactgcctacaaaatagagcaccaagcaaaggtaacgcaatatttactggaccaatcttttgtaatggatgaagaaagcctctacgagtcttctctccgaatagaaccaaaactccccacctgaagctgagcccagcccagacccagctgctcccggggacatgtgctagatgatactgtacatattcgtttggtttcactggattttcttcttcagtatgtgcttctccaagaatacaaatcgtccttgttcttagattcctgtagaaccggaatatgaatttctgcaccgtttcagacttcgcccacccatccctcccctcg

SEQ ID NO: 1297 - protein, 489 aa, Homo sapiens
MYSAMSPFSKATLDTSKLYVSSSFTNKIPDEGDTTPEKPEDPSALSKQSSEVSMREESDIDQNQSDDGDTETSPTKSPTTPKSVKNKNSSEFPLFSYNNGVVMTSCRELDNNRSALSAASAFAIATAGANEGTPNKEKYRRMSLASAGFPPDQRNGDKEFVIRRAATNRVLNVLRHWVSKHSQDFETNDELKCKVIGFLEEVMHDPELLTQERKAAANIIRTLTQEDPGDNQITLEEITQMAEGVKAEPFENHSALEIAEQLTLLDHLVFKKIPYEEFFGQGWMKLEKNERTPYIMKTTKHFNDISNLIASEIIRNEDINARVSAIEKWVAVADICRCLHNYNAVLEITSSMNRSAIFRLKKTWLKVSKQTKALIDKLQKLVSSEGRFKNLREALKNCDPPCVPYLGMYLTDLAFIEEGTPNYTEDGLVNFSKMRMISHIIREIRQFQQTAYKIEHQAKVTQYLLDQSFVMDEESLYESSLRIEPKLPT

SEQ ID NO: 1298 - DNA, 2637 bp, Homo sapiens
atggatctggataaaccatctgtttggggctcattaaaacagcggaccaggccattgttgatcaacttaagcaagaagaaggtgaaaaagaacccaagtaagcccccagatctacgggcaaggcatcacttggaccgccgtctcagcctctctgtgcctgatctcctggaggctgaggccttggccccagagggccggccttactccgggccacagtcttcctacacctcggtgcccagcagtctgtccactgcagggatctttcccaagagcagcagtagctccttgaaacagtctgaagaagaattggattggagccaggaagaagccagtcacctccatgtggtggaaacagactcagaggaggcctatgcctctcctgctgagcggagacgggtgtccagcaacggcatctttgatcttcagaaaacttcccttggaggggatgcaccagaagagccagagaagctatgtggaagcagtgacctgaatgcttctatgacatctcaacattttgaagaacaatctgtaccgggggaagccagtgatggcttgagtaacctccccagcccttttgcgtacctcctcaccatacacctgaaggaaggccggaacctggttgtccgagatcgctgtggcacaagtgatccttatgtgaaatttaagctgaatgggaagacgctgtacaaaagtaaagtcatatataagaacttgaacccagtatgggatgagatagttgtattgccaatccaaagccttgatcaaaagctacgtgtgaaggtatatgatcgagatttaaccacatctgatttcatgggttctgcatttgtcattctcagtgatcttgagcttaacagaacaactgaacatattttaaaactggaagatccaaacagtttagaagatgacatgggagtgatcgtcttaaatttgaacctagtggtaaaacagggtgatttcaagagacaccgttggtcaaatcggaagcgattaagtgccagcaagtcctctttgatacgcaacctacggctctctgagtccttgaaaaagaaccaactctggaacgggattataagtataactttgttggaagggaagaatgtctcaggaggaagcatgacagagatgtttgtccagttaaaactgggagatcagaggtataaaagtaagacactgtgtaagagtgcaaatccgcagtggcaggaacattttgactttcactacttctctgacaggatgggcattttggacattgaagtgtggggaaaggacaacaaaaagcatgaggaacgtctgggcacatgtaaagtggatatctcggcactccctctgaagcaagccaactgcctggagctgccactggacagctgtctgggggctctccttatgttggtcacacttacaccctgtgcgggggtctccgtctctgatctgtgtgtctgccccttagcagacctcagcgaaagaaagcagattacccagcgatattgcttacagaaccccctgaaagatgtgaaagacgtcggcattctacaagtgaaggttttaaaggcagcagatctcttagcggcagatttctcagggaagagtgacccattttgcttgttggagttaggcaatgaccgacttcagacgcataccgtctacaaaaacctcaaccctgaatggaacaaagtttttacatttcccattaaagatatccatgatgttttggaagtgacagtgtttgatgaagatggagataaacccccagattttcttggaaaagttgccattcccttgctgtccattagagatggacaaccgaattgttatgtactaaagaataaagatttagaacaagcttttaaaggagttatttacttagagatggaccttatatataatccggtgaaagcaagtattaggacttttactccccgggaaaagcgctttgttgaagacagccgcaagctgtccaaaaagatcttatcaagagatgtggaccgtgtgaaaagaatcactatggcaatatggaatacaatgcagttccttaaaagctgcttccagtgggaatccacattaagaagtacaatagcattcgcggtatttttgatcactgtctggaattttgaactatatatgatccccttggcattgttgctgatctttgtctacaatttcatcagacctgtgaaaggcaaggtcagcagcatccaggacagccaggagagcacagacatagatgacgaggaggatgaagatgacaaggaatctgagaaaaaggggttgattgaaagaatctatatggtacaggatattgtttcaactgttcaaaacgtcttggaggaaatagcttcttttggagaaaggattaagaacacatttaactggacggtccccttcctttcatctctggcctgtttgattctggcagcagccaccatcattttgtatttcattccactgcggtacatcattttaatctggggcataaataaatttactaagaagcttcgaaatccctattccatcgacaataatgagctactagacttcctctctagggtaccgtctgatgttcaaaaggtgcagtatgcagaattgaaactctgcagcagccacagccccctgcggaagaagcgcagcgctctctag

SEQ ID NO: 1299 - protein, 878 aa, Homo sapiens
MDLDKPSVWGSLKQRTRPLLINLSKKKVKKNPSKPPDLRARHHLDRRLSLSVPDLLEAEALAPEGRPYSGPQSSYTSVPSSLSTAGIFPKSSSSSLKQSEEELDWSQEEASHLHVVETDSEEAYASPAERRRVSSNGIFDLQKTSLGGDAPEEPEKLCGSSDLNASMTSQHFEEQSVPGEASDGLSNLPSPFAYLLTIHLKEGRNLVVRDRCGTSDPYVKFKLNGKTLYKSKVIYKNLNPVWDEIVVLPIQSLDQKLRVKVYDRDLTTSDFMGSAFVILSDLELNRTTEHILKLEDPNSLEDDMGVIVLNLNLVVKQGDFKRHRWSNRKRLSASKSSLIRNLRLSESLKKNQLWNGIISITLLEGKNVSGGSMTEMFVQLKLGDQRYKSKTLCKSANPQWQEHFDFHYFSDRMGILDIEVWGKDNKKHEERLGTCKVDISALPLKQANCLELPLDSCLGALLMLVTLTPCAGVSVSDLCVCPLADLSERKQITQRYCLQNPLKDVKDVGILQVKVLKAADLLAADFSGKSDPFCLLELGNDRLQTHTVYKNLNPEWNKVFTFPIKDIHDVLEVTVFDEDGDKPPDFLGKVAIPLLSIRDGQPNCYVLKNKDLEQAFKGVIYLEMDLIYNPVKASIRTFTPREKRFVEDSRKLSKKILSRDVDRVKRITMAIWNTMQFLKSCFQWESTLRSTIAFAVFLITVWNFELYMIPLALLLIFVYNFIRPVKGKVSSIQDSQESTDIDDEEDEDDKESEKKGLIERIYMVQDIVSTVQNVLEEIASFGERIKNTFNWTVPFLSSLACLILAAATIILYFIPLRYIILIWGINKFTKKLRNPYSIDNNELLDFLSRVPSDVQKVQYAELKLCSSHSPLRKKRSAL

SEQ ID NO: 1300 - DNA, 6331 bp, Homo sapiens
ttcactccggctggcgccgccgcctagcgcgctcctgcttcgccgccacggtccgggggggctgccggtcccgggtaccatgtgtgacggcgccctgctgcctccgctcgtcctgcccgtgctgctgctgctggtttggggactggacccgggcacagctgtcggcgacgcggcggccgacgtggaggtggtgctcccgtggcgggtgcgccccgacgacgtgcacctgccgccgctgcccgcagcccccgggccccgacggcggcgacgcccccgcacgcccccagccgccccgcgcgcccggcccggagagcgcgccctgctgctgcacctgccggccttcgggcgcgacctgtaccttcagctgcgccgcgacctgcgcttcctgtcccgaggcttcgaggtggaggaggcgggcgcggcccggcgccgcggccgccccgccgagctgtgcttctactcgggccgtgtgctcggccaccccggctccctcgtctcgctcagcgcctgcggcgccgccggcggcctggttggcctcattcagcttgggcaggagcaggtgctaatccagcccctcaacaactcccagggcccattcagtggacgagaacatctgatcaggcgcaaatggtccttgacccccagcccttctgctgaggcccagagacctgagcagctctgcaaggttctaacagaaaagaagaagccgacgtggggcaggccttcgcgggactggcgggagcggaggaacgctatccggctcaccagcgagcacacggtggagaccctggtggtggccgacgccgacatggtgcagtaccacggggccgaggccgcccagaggttcatcctgaccgtcatgaacatggtatacaatatgtttcagcaccagagcctggggattaaaattaacattcaagtgaccaagcttgtcctgctacgacaacgtcccgctaagttgtccattgggcaccatggtgagcggtccctggagagcttctgtcactggcagaacgaggagtatggaggagcgcgatacctcggcaataaccaggttcccggcgggaaggacgacccgcccctggtggatgctgccgtgtttgtgaccaggacagatttctgtgtacacaaggatgaaccgtgtgacactgttggaattgcttacttaggaggtgtgtgcagtgctaagaggaagtgtgtgcttgccgaagacaatggtctcaatttggcctttaccatcgcccatgagctgggccacaacttgggcatgaaccacgacgatgaccactcatcttgcgctggcaggtcccacatcatgtcaggagagtgggtgaaaggccggaacccaagtgacctctcttggtcctcctgcagccgagatgaccttgaaaacttcctcaagtcaaaagtcagcacctgcttgctagtcacggaccccagaagccagcacacagtacgcctcccgcacaagctgccgggcatgcactacagtgccaacgagcagtgccagatcctgtttggcatgaatgccaccttctgcagaaacatggagcatctaatgtgtgctggactgtggtgcctggtagaaggagacacatcctgcaagaccaagctggaccctcccctggatggcaccgagtgtggggcagacaagtggtgccgcgcgggggagtgcgtgagcaagacgcccatcccggagcatgtggacggagactggagcccgtggggcgcctggagcatgtgcagccgaacatgtgggacgggagcccgcttcaggcagaggaaatgtgacaaccccccccctgggcctggaggcacacactgcccgggtgccagtgtagaacatgcggtctgcgagaacctgccctgccccaagggtctgcccagcttccgggaccagcagtgccaggcacacgaccggctgagccccaagaagaaaggcctgctgacagccgtggtggttgacgataagccatgtgaactctactgctcgcccctcgggaaggagtccccactgctggtggccgacagggtcctggacggtacaccctgcgggccctacgagactgatctctgcgtgcacggcaagtgccagaaaatcggctgtgacggcatcatcgggtctgcagccaaagaggacagatgcggggtctgcagcggggacggcaagacctgccacttggtgaagggcgacttcagccacgcccgggggacagctctcaaagactcgggtaaggggtccatcaacagtgactggaagatagagctccccggagagttccagattgcaggcacaactgttcgctatgtgagaagggggctgtgggagaagatctctgccaagggaccaaccaaactaccgctgcacttgatggtgttgttatttcacgaccaagattatggaattcattatgaatacactgttcctgtaaaccgcactgcggaaaatcaaagcgaaccagaaaaaccgcaggactctttgttcatctggacccacagcggctgggaagggtgcagtgtgcagtgcggcggaggggagcgcagaaccatcgtctcgtgtacacggattgtcaacaagaccacaactctggtgaacgacagtgactgccctcaagcaagccgcccagagccccaggtccgaaggtgcaacttgcacccctgccagtcacggtgggtggcaggcccgtggagcccctgctcggcgacctgtgagaaaggcttccagcaccgggaggtgacctgcgtgtaccagctgcagaacggcacacacgtcgctacgcggcccctctactgcccgggcccccggccggcggcagtgcagagctgtgaaggccaggactgcctgtccatctgggaggcgtctgagtggtcacagtgctctgccagctgtggtaaaggggtgtggaaacggaccgtggcgtgcaccaactcacaagggaaatgcgacgcatccacgaggccgagagccgaggaggcctgcgaggactactcaggctgctacgagtggaaaactggggactggtctacgtgctcgtcgacctgcgggaagggcctgcagtcccgggtggtgcagtgcatgcacaaggtcacagggcgccacggcagcgagtgccccgccctctcgaagcctgccccctacagacagtgctaccaggaggtctgcaacgacaggatcaacgccaacaccatcacctccccccgccttgctgctctgacctacaaatgcacacgagaccagtggacggtatattgccgggtcatccgagaaaagaacctctgccaggacatgcggtggtaccagcgctgctgccagacctgcagggacttctatgcaaacaagatgcgccagccaccgccgaactcgtgacacgcagtcccaagggtcgctcaaagctcagactcaggtctgaaacccacccacccgcaagcctaccagccttgtggccacgcccccacccggctgccacaagaatccaactacatagaacatgagcgtggacttggcgtttgccattagtgcttccgtacttaatatattgttaacagccactggctggctttctacagtgaggagaaagtaggcatgagtcacaaagtaacttcaatttctaggatttcaggtacctcgaagggaagcacctctggcagacaaccgtcaagagagagacatcatttagtgttcttgtcttgactcgcttttgacatttgaatttccagtgcttggtatatcatggaggaaacatccccaaaacgagacatgctagaaaaggctttattctgaaagccggcgacaccatggagggaggggcaggtgttggtgagcctctgcccgtggcttctctggggagggccgggctgcttagcacacgtttctctccatctaccttcttgaccacatgagaaccaggacgttgcctccatgcccgtctctgagaacatagtctctaaatcctaggtgttgccttggaagtctcgtgcgtggagtgtaaatctatatatgccagcgaggacagcagtgccacgcagttcataccacccgcatgggaagaatgttccaagagagtctgggtttggggaagcatctaattttcagagctctgctgtccaccgtgtagggaaacagaagggcctctcttcaaggtgctgtgacataagaaacggtaattgcggtgatggggttgcttcctaaggcaaaggtaagcttgggccagcttcactggggcggatgggcacctgccccgccttccgggaacatccactctggcctgcacttcctaaagctttgtaccttagagatgctgtaccacatcccagtggctttctaccgaccgtggccatttatctgaaggtaagacgacatttgggacctctgaggacacaagcccaggcctaggatctgtagagcaaggcctgactgctctatcctggcacggagcagcctgatgtgccaggaccaggggaggaacgccatctggctggcactgctgcacacccgccgagccttcctgtagccccagactttgtggtacccattatcatcacgcctgtcatcattgacccatcttcttggtggggcaaggatgatgcatgatgaaggaaggtccttcccccctgcagcccccttacgcctggcagcagacaagcagagtggcctctttgagagcacagaggatggtagcaccctacctgcaaggaggccgggcagggaccctagatgccaggaggcctgttttgctcaccaacttggtgggcatttcatgggtgcttatgttctaggactttaccgtaaataacacctcctccctgatttcagacggaaggtctcacttggacttccatgggatcatctccctgtgcttcttgatttattggtgctgtgtttctgtgttttgttttgttacatgtcacaaccgtagagttagcttaaatcagaaagaagcctctctgccttctccaccctgtcttacgagctgtgtttttgtttttactaccctagaggcagagaagcggtagggatgtcagggaatttactcacttccacttgaatcaacgagaagtgttgagaaacttccgtgggtgctctgtggaaagaaccgagggtgtcaggatggagcggcccaccctcgccccgcggcctgcgcagactgctgtcctccccttcaggcctggccaccagcagactcccatgaattcccattttcacaaagccctcaaaattttgggggcgctgaggttcaattttcttcatccccaaatgaactgttaattcactgaaagacatttagacttttgcagccaaggagcagagccgggcaagctcactaaggaagccttagcttggtctcctgcatgggccccggggcctccagatatgcccactgtcaccctggcaagggccccacaccctcagaatgaaaaggattgattgggttattgtcagatacccccattagttcccctaaagtctgcatctgcagagctcttttagctcatctttttgttgtcggtgttgttttttgagacagagtctccctctgttgcccaggctggagtgcagtggcgcgatctcagctcattgaaagctccgcctcccgggttcaggccattcttctgcctcaccctccccagtagctgggactacaggcgcccaccaccacgcccacctacttttttgtatttttactagagacggggtttcaccatgttagccaggatggtctcgatctcctgacctcatgatccacccgcctcagccttccaaagtgctgggattacaggagtgagccaccgcgcccggccttttagcttatcttgaaatccaccagcctaccttctgttcatggcacgagcagtgatttcagtgaaaccatcataaacattcttgttccactagatgctgatcacagcagtgatgtttctgtgttaataccctgtactgtccctcgagtactgtacctttgtgcttgcacacgtgtcactaacgcacgtgttaccagagtctcacgaccctacggtgctatttttattggtgcaaaattaaaccctctcagctgaccgttgctggataggatcagaatgcaggaaaagagcctctatggcaatacgattgtccttttttcgtttcagagtcaaatgtatctattttccattcgttaacttgcattacatactgtacccatggaatttttgttttactttttggggctggttttgaaaggaaaaaaaacggaagacaaacattggacgccattatacatgaaaattatatagaaaaattaatcatttcattggaagcaagttgaatatgtgtaataaaatgtttttccataac

SEQ ID NO: 1301 - protein, 1095 aa, Homo sapiens
MCDGALLPPLVLPVLLLLVWGLDPGTAVGDAAADVEVVLPWRVRPDDVHLPPLPAAPGPRRRRRPRTPPAAPRARPGERALLLHLPAFGRDLYLQLRRDLRFLSRGFEVEEAGAARRRGRPAELCFYSGRVLGHPGSLVSLSACGAAGGLVGLIQLGQEQVLIQPLNNSQGPFSGREHLIRRKWSLTPSPSAEAQRPEQLCKVLTEKKKPTWGRPSRDWRERRNAIRLTSEHTVETLVVADADMVQYHGAEAAQRFILTVMNMVYNMFQHQSLGIKINIQVTKLVLLRQRPAKLSIGHHGERSLESFCHWQNEEYGGARYLGNNQVPGGKDDPPLVDAAVFVTRTDFCVHKDEPCDTVGIAYLGGVCSAKRKCVLAEDNGLNLAFTIAHELGHNLGMNHDDDHSSCAGRSHIMSGEWVKGRNPSDLSWSSCSRDDLENFLKSKVSTCLLVTDPRSQHTVRLPHKLPGMHYSANEQCQILFGMNATFCRNMEHLMCAGLWCLVEGDTSCKTKLDPPLDGTECGADKWCRAGECVSKTPIPEHVDGDWSPWGAWSMCSRTCGTGARFRQRKCDNPPPGPGGTHCPGASVEHAVCENLPCPKGLPSFRDQQCQAHDRLSPKKKGLLTAVVVDDKPCELYCSPLGKESPLLVADRVLDGTPCGPYETDLCVHGKCQKIGCDGIIGSAAKEDRCGVCSGDGKTCHLVKGDFSHARGTALKDSGKGSINSDWKIELPGEFQIAGTTVRYVRRGLWEKISAKGPTKLPLHLMVLLFHDQDYGIHYEYTVPVNRTAENQSEPEKPQDSLFIWTHSGWEGCSVQCGGGERRTIVSCTRIVNKTTTLVNDSDCPQASRPEPQVRRCNLHPCQSRWVAGPWSPCSATCEKGFQHREVTCVYQLQNGTHVATRPLYCPGPRPAAVQSCEGQDCLSIWEASEWSQCSASCGKGVWKRTVACTNSQGKCDASTRPRAEEACEDYSGCYEWKTGDWSTCSSTCGKGLQSRVVQCMHKVTGRHGSECPALSKPAPYRQCYQEVCNDRINANTITSPRLAALTYKCTRDQWTVYCRVIREKNLCQDMRWYQRCCQTCRDFYANKMRQPPPNS

SEQ ID NO: 1302 - DNA, 5675 bp, Homo sapiens
ccggcggcgtcccggggccaggggggtgcgcctttctccgcgtcggggcggcccggagcgcggtggcgcggcgcgggaggggttttctggtgcgtcctggtccaccatggccaaaccaacaagcaaagattcaggcttgaaggagaagtttaagattctgttgggactgggaacaccgaggccaaatcccaggtctgcagagggtaaacagacggagtttatcatcaccgcggaaatactgagagaactgagcatggaatgtggcctcaacaatcgcatccggatgatagggcagatttgtgaagtcgcaaaaaccaagaaatttgaagagcacgcagtggaagcactctggaaggcggtcgcggatctgttgcagccggagcggccgctggaggcccggcacgcggtgctggctctgctgaaggccatcgtgcaggggcagggcgagcgtttgggggtcctcagagccctcttctttaaggtcatcaaggattacccttccaacgaagaccttcacgaaaggctggaggttttcaaggccctcacagacaatgggagacacatcacctacttggaggaagagctggctgactttgtcctgcagtggatggatgttggcttgtcctcggaattccttctggtgctggtgaacttggtcaaattcaatagctgttacctcgacgagtacatcgcaaggatggttcagatgatctgtctgctgtgcgtccggaccgcgtcctctgtggacatagaggtctccctgcaggtgctggacgccgtggtctgctacaactgcctgccggctgagagcctcccgctgttcatcgttaccctctgtcgcaccatcaacgtcaaggagctctgcgagccttgctggaagctgatgcggaacctccttggcacccacctgggccacagcgccatctacaacatgtgccacctcatggaggacagagcctacatggaggacgcgcccctgctgagaggagccgtgttttttgtgggcatggctctctggggagcccaccggctctattctctcaggaactcgccgacatctgtgttgccatcattttaccaggccatggcatgtccgaacgaggtggtgtcctatgagatcgtcctgtccatcaccaggctcatcaagaagtataggaaggagctccaggtggtggcgtgggacattctgctgaacatcatcgaacggctccttcagcagctccagaccttggacagcccggagctcaggaccatcgtccatgacctgttgaccacggtggaggagctgtgtgaccagaacgagttccacgggtctcaggagagatactttgaactggtggagagatgtgcggaccagaggcctgagtcctccctcctgaacctgatctcctatagagcgcagtccatccacccggccaaggacggctggattcagaacctgcaggcgctgatggagagattcttcaggagcgagtcccgaggcgccgtgcgcatcaaggtgctggacgtgctgtcctttgtgctgctcatcaacaggcagttctatgaggaggagctgattaactcagtggtcatctcgcagctctcccacatccccgaggataaagaccaccaggtccgaaagctggccacccagttgctggtggacctggcagagggctgccacacacaccacttcaacagcctgctggacatcatcgagaaggtgatggcccgctccctctccccacccccggagctggaagaaagggatgtggccgcatactcggcctccttggaggatgtgaagacagccgtcctggggcttctggtcatccttcagaccaagctgtacaccctgcctgcaagccacgccacgcgtgtgtatgagatgctggtcagccacattcagctccactacaagcacagctacaccctgccaatcgcgagcagcatccggctgcaggcctttgacttcctgttgctgctgcgggccgactcactgcaccgcctgggcctgcccaacaaggatggagtcgtgcggttcagcccctactgcgtctgcgactacatggagccagagagaggctctgagaagaagaccagcggccccctttctcctcccacagggcctcctggcccggcgcctgcaggccccgccgtgcggctggggtccgtgccctactccctgctcttccgcgtcctgctgcagtgcttgaagcaggagtctgactggaaggtgctgaagctggttctgggcaggctgcctgagtccctgcgctataaagtgctcatctttacttccccttgcagtgtggaccagctgtgctctgctctctgctccatgctttcaggcccaaagacactggagcggctccgaggcgccccagaaggcttctccagaactgacttgcacctggccgtggttccagtgctgacagcattaatctcttaccataactacctggacaaaaccaaacagcgcgagatggtctactgcctggagcagggcctcatccaccgctgtgccagccagtgcgtcgtggccttgtccatctgcagcgtggagatgcctgacatcatcatcaaggcgctgcctgttctggtggtgaagctcacgcacatctcagccacagccagcatggccgtcccactgctggagttcctgtccactctggccaggctgccgcacctctacaggaactttgccgcggagcagtatgccagtgtgttcgccatctccctgccgtacaccaacccctccaagtttaatcagtacatcgtgtgtctggcccatcacgtcatagccatgtggttcatcaggtgccgcctgcccttccggaaggattttgtccctttcatcactaagggcctgcggtccaatgtcctcttgtcttttgatgacacccccgagaaggacagcttcagggcccggagtactagtctcaacgagagacccaagagtctgaggatagccagaccccccaaacaaggcttgaataactctccacccgtgaaagaattcaaggagagctctgcagccgaggccttccggtgccgcagcatcagtgtgtctgaacatgtggtccgcagcaggatacagacgtccctcaccagtgccagcttggggtctgcagatgagaactccgtggcccaggctgacgatagcctgaaaaacctccacctggagctcacggaaacctgtctggacatgatggctcgatacgtcttctccaacttcacggctgtcccgaagaggtctcctgtgggcgagttcctcctagcgggtggcaggaccaaaacctggctggttgggaacaagcttgtcactgtgacgacaagcgtgggaaccgggacccggtcgttactaggcctggactcgggggagctgcagtccggcccggagtcgagctccagccccggggtgcatgtgagacagaccaaggaggcgccggccaagctggagtcccaggctgggcagcaggtgtcccgtggggcccgggatcgggtccgttccatgtcggggggccatggtcttcgagttggcgccctggacgtgccggcctcccagttcctgggcagtgccacttctccaggaccacggactgcaccagccgcgaaacctgagaaggcctcagctggcacccgggttcctgtgcaggagaagacgaacctggcggcctatgtgcccctgctgacccagggctgggcggagatcctggtccggaggcccacagggaacaccagctggctgatgagcctggagaacccgctcagccctttctcctcggacatcaacaacatgcccctgcaggagctgtctaacgccctcatggcggctgagcgcttcaaggagcaccgggacacagccctgtacaagtcactgtcggtgccggcagccagcacggccaaaccccctcctctgcctcgctccaacacagtggcctctttctcctccctgtaccagtccagctgccaaggacagctgcacaggagcgtttcctgggcagactccgccgtggtcatggaggagggaagtccgggcgaggttcctgtgctggtggagcccccagggttggaggacgttgaggcagcgctaggcatggacaggcgcacggatgcctacagcaggtcgtcctcagtctccagccaggaggagaagtcgctccacgcggaggagctggttggcaggggcatccccatcgagcgagtcgtctcctcggagggtggccggccctctgtggacctctccttccagccctcgcagcccctgagcaagtccagctcctctcccgagctgcagactctgcaggacatcctcggggaccctggggacaaggccgacgtgggccggctgagccctgaggttaaggcccggtcacagtcagggaccctggacggggaaagtgctgcctggtcggcctcgggcgaagacagtcggggccagcccgagggtcccttgccttccagctccccccgctcgcccagtggcctccggccccgaggttacaccatctccgactcggccccatcacgcaggggcaagagagtagagagggacgccttaaagagcagagccacagcctccaatgcagagaaagtgccaggcatcaaccccagtttcgtgttcctgcagctctaccattcccccttctttggcgacgagtcaaacaagccaatcctgctgcccaatgagtcacagtcctttgagcggtcggtgcagctcctcgaccagatcccatcatacgacacccacaagatcgccgtcctgtatgttggagaaggccagagcaacagcgagctcgccatcctgtccaatgagcatggctcctacaggtacacggagttcctgacgggcctgggccggctcatcgagctgaaggactgccagccggacaaggtgtacctgggaggcctggacgtgtgtggtgaggacggccagttcacctactgctggcacgatgacatcatgcaagccgtcttccacatcgccaccctgatgcccaccaaggacgtggacaagcaccgctgcgacaagaagcgccacctgggcaacgactttgtgtccattgtctacaatgactccggtgaggacttcaagcttggcaccatcaagggccagttcaactttgtccacgtgatcgtcaccccgctggactacgagtgcaacctggtgtccctgcagtgcaggaaagacatggagggccttgtggacaccagcgtggccaagatcgtgtctgaccgcaacctgcccttcgtggcccgccagatggccctgcacgcaaatatggcctcacaggtgcatcatagccgctccaaccccaccgatatctacccctccaagtggattgcccggctccgccacatcaagcggctccgccagcggatctgcgaggaagccgcctactccaaccccagcctacctctggtgcaccctccgtcccatagcaaagcccctgcacagactccagccgagcccacacctggctatgaggtgggccagcggaagcgcctcatctcctcggtggaggacttcaccgagtttgtgtgaggccggggccctccctcctgcactggccttggacggtattgcctgtcagtgaaataaataaagtcctgaccccagtgcacagacatagaggcacagattgcaaaaaaaaaaaaaaaaaaaaaaaaaaaaaaaaaaaaaaaaaaaa

SEQ ID NO: 1303 - protein, 1807 aa, Homo sapiens
MAKPTSKDSGLKEKFKILLGLGTPRPNPRSAEGKQTEFIITAEILRELSMECGLNNRIRMIGQICEVAKTKKFEEHAVEALWKAVADLLQPERPLEARHAVLALLKAIVQGQGERLGVLRALFFKVIKDYPSNEDLHERLEVFKALTDNGRHITYLEEELADFVLQWMDVGLSSEFLLVLVNLVKFNSCYLDEYIARMVQMICLLCVRTASSVDIEVSLQVLDAVVCYNCLPAESLPLFIVTLCRTINVKELCEPCWKLMRNLLGTHLGHSAIYNMCHLMEDRAYMEDAPLLRGAVFFVGMALWGAHRLYSLRNSPTSVLPSFYQAMACPNEVVSYEIVLSITRLIKKYRKELQVVAWDILLNIIERLLQQLQTLDSPELRTIVHDLLTTVEELCDQNEFHGSQERYFELVERCADQRPESSLLNLISYRAQSIHPAKDGWIQNLQALMERFFRSESRGAVRIKVLDVLSFVLLINRQFYEEELINSVVISQLSHIPEDKDHQVRKLATQLLVDLAEGCHTHHFNSLLDIIEKVMARSLSPPPELEERDVAAYSASLEDVKTAVLGLLVILQTKLYTLPASHATRVYEMLVSHIQLHYKHSYTLPIASSIRLQAFDFLLLLRADSLHRLGLPNKDGVVRFSPYCVCDYMEPERGSEKKTSGPLSPPTGPPGPAPAGPAVRLGSVPYSLLFRVLLQCLKQESDWKVLKLVLGRLPESLRYKVLIFTSPCSVDQLCSALCSMLSGPKTLERLRGAPEGFSRTDLHLAVVPVLTALISYHNYLDKTKQREMVYCLEQGLIHRCASQCVVALSICSVEMPDIIIKALPVLVVKLTHISATASMAVPLLEFLSTLARLPHLYRNFAAEQYASVFAISLPYTNPSKFNQYIVCLAHHVIAMWFIRCRLPFRKDFVPFITKGLRSNVLLSFDDTPEKDSFRARSTSLNERPKSLRIARPPKQGLNNSPPVKEFKESSAAEAFRCRSISVSEHVVRSRIQTSLTSASLGSADENSVAQADDSLKNLHLELTETCLDMMARYVFSNFTAVPKRSPVGEFLLAGGRTKTWLVGNKLVTVTTSVGTGTRSLLGLDSGELQSGPESSSSPGVHVRQTKEAPAKLESQAGQQVSRGARDRVRSMSGGHGLRVGALDVPASQFLGSATSPGPRTAPAAKPEKASAGTRVPVQEKTNLAAYVPLLTQGWAEILVRRPTGNTSWLMSLENPLSPFSSDINNMPLQELSNALMAAERFKEHRDTALYKSLSVPAASTAKPPPLPRSNTVASFSSLYQSSCQGQLHRSVSWADSAVVMEEGSPGEVPVLVEPPGLEDVEAALGMDRRTDAYSRSSSVSSQEEKSLHAEELVGRGIPIERVVSSEGGRPSVDLSFQPSQPLSKSSSSPELQTLQDILGDPGDKADVGRLSPEVKARSQSGTLDGESAAWSASGEDSRGQPEGPLPSSSPRSPSGLRPRGYTISDSAPSRRGKRVERDALKSRATASNAEKVPGINPSFVFLQLYHSPFFGDESNKPILLPNESQSFERSVQLLDQIPSYDTHKIAVLYVGEGQSNSELAILSNEHGSYRYTEFLTGLGRLIELKDCQPDKVYLGGLDVCGEDGQFTYCWHDDIMQAVFHIATLMPTKDVDKHRCDKKRHLGNDFVSIVYNDSGEDFKLGTIKGQFNFVHVIVTPLDYECNLVSLQCRKDMEGLVDTSVAKIVSDRNLPFVARQMALHANMASQVHHSRSNPTDIYPSKWIARLRHIKRLRQRICEEAAYSNPSLPLVHPPSHSKAPAQTPAEPTPGYEVGQRKRLISSVEDFTEFV

SEQ ID NO: 1304 - DNA, 14135 bp, Homo sapiens
gcactgcagcgccagcgtccgagcgggcggccgagctcccggagcggcctggccccgagccccgagcgggcgtcgctcagcagcaggtcgcggccgcagccccatccagccccgcgcccgccatgccgtccgcgggccccgcctgagctgcggcctccgcgcgcgggcgggcctggggacggcggggccatgcgcgcgctgccctaacgatgccgcccgccgcgcccgcccgcctggcgctggccctgggcctgggcctgtggctcggggcgctggcggggggccccgggcgcggctgcgggccctgcgagcccccctgcctctgcggcccagcgcccggcgccgcctgccgcgtcaactgctcgggccgcgggctgcggacgctcggtcccgcgctgcgcatccccgcggacgccacagcgctagacgtctcccacaacctgctccgggcgctggacgttgggctcctggcgaacctctcggcgctggcagagctggatataagcaacaacaagatttctacgttagaagaaggaatatttgctaatttatttaatttaagtgaaataaacctgagtgggaacccgtttgagtgtgactgtggcctggcgtggctgccgcgatgggcggaggagcagcaggtgcgggtggtgcagcccgaggcagccacgtgtgctgggcctggctccctggctggccagcctctgcttggcatccccttgctggacagtggctgtggtgaggagtatgtcgcctgcctccctgacaacagctcaggcaccgtggcagcagtgtccttttcagctgcccacgaaggcctgcttcagccagaggcctgcagcgccttctgcttctccaccggccagggcctcgcagccctctcggagcagggctggtgcctgtgtggggcggcccagccctccagtgcctcctttgcctgcctgtccctctgctccggccccccgccacctcctgcccccacctgtaggggccccaccctcctccagcacgtcttccctgcctccccaggggccaccctggtggggccccacggacctctggcctctggccagctagcagccttccacatcgctgccccgctccctgtcactgccacacgctgggacttcggagacggctccgccgaggtggatgccgctgggccggctgcctcgcatcgctatgtgctgcctgggcgctatcacgtgacggccgtgctggccctgggggccggctcagccctgctggggacagacgtgcaggtggaagcggcacctgccgccctggagctcgtgtgcccgtcctcggtgcagagtgacgagagcctcgacctcagcatccagaaccgcggtggttcaggcctggaggccgcctacagcatcgtggccctgggcgaggagccggcccgagcggtgcacccgctctgcccctcggacacggagatcttccctggcaacgggcactgctaccgcctggtggtggagaaggcggcctggctgcaggcgcaggagcagtgtcaggcctgggccggggccgccctggcaatggtggacagtcccgccgtgcagcgcttcctggtctcccgggtcaccaggtgcctagacgtgtggatcggcttctcgactgtgcagggggtggaggtgggcccagcgccgcagggcgaggccttcagcctggagagctgccagaactggctgcccggggagccacacccagccacagccgagcactgcgtccggctcgggcccaccgggtggtgtaacaccgacctgtgctcagcgccgcacagctacgtctgcgagctgcagcccggaggcccagtgcaggatgccgagaacctcctcgtgggagcgcccagtggggacctgcagggacccctgacgcctctggcacagcaggacggcctctcagccccgcacgagcccgtggaggtcatggtattcccgggcctgcgtctgagccgtgaagccttcctcaccacggccgaatttgggacccaggagctccggcggcccgcccagctgcggctgcaggtgtaccggctcctcagcacagcagggaccccggagaacggcagcgagcctgagagcaggtccccggacaacaggacccagctggcccccgcgtgcatgccagggggacgctggtgccctggagccaacatctgcttgccgctggacgcctcctgccacccccaggcctgcgccaatggctgcacgtcagggccagggctacccggggccccctatgcgctatggagagagttcctcttctccgttcccgcggggccccccgcgcagtactcggtcaccctccacggccaggatgtcctcatgctccctggtgacctcgttggcttgcagcacgacgctggccctggcgccctcctgcactgctcgccggctcccggccaccctggtccccgggccccgtacctctccgccaacgcctcgtcatggctgccccacttgccagcccagctggagggcacttgggcctgccctgcctgtgccctgcggctgcttgcagccacggaacagctcaccgtgctgctgggcttgaggcccaaccctggactgcggctgcctgggcgctatgaggtccgggcagaggtgggcaatggcgtgtccaggcacaacctctcctgcagctttgacgtggtctccccagtggctgggctgcgggtcatctaccctgccccccgcgacggccgcctctacgtgcccaccaacggctcagccttggtgctccaggtggactctggtgccaacgccacggccacggctcgctggcctgggggcagtgtcagcgcccgctttgagaatgtctgccctgccctggtggccaccttcgtgcccggctgcccctgggagaccaacgataccctgttctcagtggtagcactgccgtggctcagtgagggggagcacgtggtggacgtggtggtggaaaacagcgccagccgggccaacctcagcctgcgggtgacggcggaggagcccatctgtggcctccgcgccacgcccagccccgaggcccgtgtactgcagggagtcctagtgaggtacagccccgtggtggaggccggctcggacatggtcttccggtggaccatcaacgacaagcagtccctgaccttccagaacgtggtcttcaatgtcatttatcagagcgcggcggtcttcaagctctcactgacggcctccaaccacgtgagcaacgtcaccgtgaactacaacgtaaccgtggagcggatgaacaggatgcagggtctgcaggtctccacagtgccggccgtgctgtcccccaatgccacgctagcactgacggcgggcgtgctggtggactcggccgtggaggtggccttcctgtggacctttggggatggggagcaggccctccaccagttccagcctccgtacaacgagtccttcccggttccagacccctcggtggcccaggtgctggtggagcacaatgtcatgcacacctacgctgccccaggtgagtacctcctgaccgtgctggcatctaatgccttcgagaacctgacgcagcaggtgcctgtgagcgtgcgcgcctccctgccctccgtggctgtgggtgtgagtgacggcgtcctggtggccggccggcccgtcaccttctacccgcacccgctgccctcgcctgggggtgttctttacacgtgggacttcggggacggctcccctgtcctgacccagagccagccggctgccaaccacacctatgcctcgaggggcacctaccacgtgcgcctggaggtcaacaacacggtgagcggtgcggcggcccaggcggatgtgcgcgtctttgaggagctccgcggactcagcgtggacatgagcctggccgtggagcagggcgcccccgtggtggtcagcgccgcggtgcagacgggcgacaacatcacgtggaccttcgacatgggggacggcaccgtgctgtcgggcccggaggcaacagtggagcatgtgtacctgcgggcacagaactgcacagtgaccgtgggtgcggccagccccgccggccacctggcccggagcctgcacgtgctggtcttcgtcctggaggtgctgcgcgttgaacccgccgcctgcatccccacgcagcctgacgcgcggctcacggcctacgtcaccgggaacccggcccactacctcttcgactggaccttcggggatggctcctccaacacgaccgtgcgggggtgcccgacggtgacacacaacttcacgcggagcggcacgttccccctggcgctggtgctgtccagccgcgtgaacagggcgcattacttcaccagcatctgcgtggagccagaggtgggcaacgtcaccctgcagccagagaggcagtttgtgcagctcggggacgaggcctggctggtggcatgtgcctggcccccgttcccctaccgctacacctgggactttggcaccgaggaagccgcccccacccgtgccaggggccctgaggtgacgttcatctaccgagacccaggctcctatcttgtgacagtcaccgcgtccaacaacatctctgctgccaatgactcagccctggtggaggtgcaggagcccgtgctggtcaccagcatcaaggtcaatggctcccttgggctggagctgcagcagccgtacctgttctctgctgtgggccgtgggcgccccgccagctacctgtgggatctgggggacggtgggtggctcgagggtccggaggtcacccacgcttacaacagcacaggtgacttcaccgttagggtggccggctggaatgaggtgagccgcagcgaggcctggctcaatgtgacggtgaagcggcgcgtgcgggggctcgtcgtcaatgcaagccgcacggtggtgcccctgaatgggagcgtgagcttcagcacgtcgctggaggccggcagtgatgtgcgctattcctgggtgctctgtgaccgctgcacgcccatccctgggggtcctaccatctcttacaccttccgctccgtgggcaccttcaatatcatcgtcacggctgagaacgaggtgggctccgcccaggacagcatcttcgtctatgtcctgcagctcatagaggggctgcaggtggtgggcggtggccgctacttccccaccaaccacacggtacagctgcaggccgtggttagggatggcaccaacgtctcctacagctggactgcctggagggacaggggcccggccctggccggcagcggcaaaggcttctcgctcaccgtgctcgaggccggcacctaccatgtgcagctgcgggccaccaacatgctgggcagcgcctgggccgactgcaccatggacttcgtggagcctgtggggtggctgatggtggccgcctccccgaacccagctgccgtcaacacaagcgtcaccctcagtgccgagctggctggtggcagtggtgtcgtatacacttggtccttggaggaggggctgagctgggagacctccgagccatttaccacccatagcttccccacacccggcctgcacttggtcaccatgacggcagggaacccgctgggctcagccaacgccaccgtggaagtggatgtgcaggtgcctgtgagtggcctcagcatcagggccagcgagcccggaggcagcttcgtggcggccgggtcctctgtgcccttttgggggcagctggccacgggcaccaatgtgagctggtgctgggctgtgcccggcggcagcagcaagcgtggccctcatgtcaccatggtcttcccggatgctggcaccttctccatccggctcaatgcctccaacgcagtcagctgggtctcagccacgtacaacctcacggcggaggagcccatcgtgggcctggtgctgtgggccagcagcaaggtggtggcgcccgggcagctggtccattttcagatcctgctggctgccggctcagctgtcaccttccgcctgcaggtcggcggggccaaccccgaggtgctccccgggccccgtttctcccacagcttcccccgcgtcggagaccacgtggtgagcgtgcggggcaaaaaccacgtgagctgggcccaggcgcaggtgcgcatcgtggtgctggaggccgtgagtgggctgcaggtgcccaactgctgcgagcctggcatcgccacgggcactgagaggaacttcacagcccgcgtgcagcgcggctctcgggtcgcctacgcctggtacttctcgctgcagaaggtccagggcgactcgctggtcatcctgtcgggccgcgacgtcacctacacgcccgtggccgcggggctgttggagatccaggtgcgcgccttcaacgccctgggcagtgagaaccgcacgctggtgctggaggttcaggacgccgtccagtatgtggccctgcagagcggcccctgcttcaccaaccgctcggcgcagtttgaggccgccaccagccccagcccccggcgtgtggcctaccactgggactttggggatgggtcgccagggcaggacacagatgagcccagggccgagcactcctacctgaggcctggggactaccgcgtgcaggtgaacgcctccaacctggtgagcttcttcgtggcgcaggccacggtgaccgtccaggtgctggcctgccgggagccggaggtggacgtggtcctgcccctgcaggtgctgatgcggcgatcacagcgcaactacttggaggcccacgttgacctgcgcgactgcgtcacctaccagactgagtaccgctgggaggtgtatcgcaccgccagctgccagcggccggggcgcccagcgcgtgtggccctgcccggcgtggacgtgagccggcctcggctggtgctgccgcggctggcgctgcctgtggggcactactgctttgtgtttgtcgtgtcatttggggacacgccactgacacagagcatccaggccaatgtgacggtggcccccgagcgcctggtgcccatcattgagggtggctcataccgcgtgtggtcagacacacgggacctggtgctggatgggagcgagtcctacgaccccaacctggaggacggcgaccagacgccgctcagtttccactgggcctgtgtggcttcgacacagagggaggctggcgggtgtgcgctgaactttgggccccgcgggagcagcacggtcaccattccacgggagcggctggcggctggcgtggagtacaccttcagcctgaccgtgtggaaggccggccgcaaggaggaggccaccaaccagacggtgctgatccggagtggccgggtgcccattgtgtccttggagtgtgtgtcctgcaaggcacaggccgtgtacgaagtgagccgcagctcctacgtgtacttggagggccgctgcctcaattgcagcagcggctccaagcgagggcggtgggctgcacgtacgttcagcaacaagacgctggtgctggatgagaccaccacatccacgggcagtgcaggcatgcgactggtgctgcggcggggcgtgctgcgggacggcgagggatacaccttcacgctcacggtgctgggccgctctggcgaggaggagggctgcgcctccatccgcctgtcccccaaccgcccgccgctggggggctcttgccgcctcttcccactgggcgctgtgcacgccctcaccaccaaggtgcacttcgaatgcacgggctggcatgacgcggaggatgctggcgccccgctggtgtacgccctgctgctgcggcgctgtcgccagggccactgcgaggagttctgtgtctacaagggcagcctctccagctacggagccgtgctgcccccgggtttcaggccacacttcgaggtgggcctggccgtggtggtgcaggaccagctgggagccgctgtggtcgccctcaacaggtctttggccatcaccctcccagagcccaacggcagcgcaacggggctcacagtctggctgcacgggctcaccgctagtgtgctcccagggctgctgcggcaggccgatccccagcacgtcatcgagtactcgttggccctggtcaccgtgctgaacgagtacgagcgggccctggacgtggcggcagagcccaagcacgagcggcagcaccgagcccagatacgcaagaacatcacggagactctggtgtccctgagggtccacactgtggatgacatccagcagatcgctgctgcgctggcccagtgcatggggcccagcagggagctcgtatgccgctcgtgcctgaagcagacgctgcacaagctggaggccatgatgctcatcctgcaggcagagaccaccgcgggcaccgtgacgcccaccgccatcggagacagcatcctcaacatcacaggagacctcatccacctggccagctcggacgtgcgggcaccacagccctcagagctgggagccgagtcaccatctcggatggtggcgtcccaggcctacaacctgacctctgccctcatgcgcatcctcatgcgctcccgcgtgctcaacgaggagcccctgacgctggcgggcgaggagatcgtggcccagggcaagcgctcggacccgcggagcctgctgtgctatggcggcgccccagggcctggctgccacttctccatccccgaggctttcagcggggccctggccaacctcagtgacgtggtgcagctcatctttctggtggactccaatccctttccctttggctatatcagcaactacaccgtctccaccaaggtggcctcgatggcattccagacacaggccggcgcccagatccccatcgagcggctggcctcagagcgcgccatcaccgtgaaggtgcccaacaactcggactgggctgcccggggccaccgcagctccgccaactccgccaactccgttgtggtccagccccaggcctccgtcggtgctgtggtcaccctggacagcagcaaccctgcggccgggctgcatctgcagctcaactatacgctgctggacggccactacctgtctgaggaacctgagccctacctggcagtctacctacactcggagccccggcccaatgagcacaactgctcggctagcaggaggatccgcccagagtcactccagggtgctgaccaccggccctacaccttcttcatttccccggggagcagagacccagcggggagttaccatctgaacctctccagccacttccgctggtcggcgctgcaggtgtccgtgggcctgtacacgtccctgtgccagtacttcagcgaggaggacatggtgtggcggacagaggggctgctgcccctggaggagacctcgccccgccaggccgtctgcctcacccgccacctcaccgccttcggcgccagcctcttcgtgcccccaagccatgtccgctttgtgtttcctgagccgacagcggatgtaaactacatcgtcatgctgacatgtgctgtgtgcctggtgacctacatggtcatggccgccatcctgcacaagctggaccagttggatgccagccggggccgcgccatccctttctgtgggcagcggggccgcttcaagtacgagatcctcgtcaagacaggctggggccggggctcaggtaccacggcccacgtgggcatcatgctgtatggggtggacagccggagcggccaccggcacctggacggcgacagagccttccaccgcaacagcctggacatcttccggatcgccaccccgcacagcctgggtagcgtgtggaagatccgagtgtggcacgacaacaaagggctcagccctgcctggttcctgcagcacgtcatcgtcagggacctgcagacggcacgcagcgccttcttcctggtcaatgactggctttcggtggagacggaggccaacgggggcctggtggagaaggaggtgctggccgcgagcgacgcagcccttttgcgcttccggcgcctgctggtggctgagctgcagcgtggcttctttgacaagcacatctggctctccatatgggaccggccgcctcgtagccgtttcactcgcatccagagggccacctgctgcgttctcctcatctgcctcttcctgggcgccaacgccgtgtggtacggggctgttggcgactctgcctacagcacggggcatgtgtccaggctgagcccgctgagcgtcgacacagtcgctgttggcctggtgtccagcgtggttgtctatcccgtctacctggccatcctttttctcttccggatgtcccggagcaaggtggctgggagcccgagccccacacctgccgggcagcaggtgctggacatcgacagctgcctggactcgtccgtgctggacagctccttcctcacgttctcaggcctccacgctgaggcctttgttggacagatgaagagtgacttgtttctggatgattctaagagtctggtgtgctggccctccggcgagggaacgctcagttggccggacctgctcagtgacccgtccattgtgggtagcaatctgcggcagctggcacggggccaggcgggccatgggctgggcccagaggaggacggcttctccctggccagcccctactcgcctgccaaatccttctcagcatcagatgaagacctgatccagcaggtccttgccgagggggtcagcagcccagcccctacccaagacacccacatggaaacggacctgctcagcagcctgtccagcactcctggggagaagacagagacgctggcgctgcagaggctgggggagctggggccacccagcccaggcctgaactgggaacagccccaggcagcgaggctgtccaggacaggactggtggagggtctgcggaagcgcctgctgccggcctggtgtgcctccctggcccacgggctcagcctgctcctggtggctgtggctgtggctgtctcagggtgggtgggtgcgagcttccccccgggcgtgagtgttgcgtggctcctgtccagcagcgccagcttcctggcctcattcctcggctgggagccactgaaggtcttgctggaagccctgtacttctcactggtggccaagcggctgcacccggatgaagatgacaccctggtagagagcccggctgtgacgcctgtgagcgcacgtgtgccccgcgtacggccaccccacggctttgcactcttcctggccaaggaagaagcccgcaaggtcaagaggctacatggcatgctgcggagcctcctggtgtacatgctttttctgctggtgaccctgctggccagctatggggatgcctcatgccatgggcacgcctaccgtctgcaaagcgccatcaagcaggagctgcacagccgggccttcctggccatcacgcggtctgaggagctctggccatggatggcccacgtgctgctgccctacgtccacgggaaccagtccagcccagagctggggcccccacggctgcggcaggtgcggctgcaggaagcactctacccagaccctcccggccccagggtccacacgtgctcggccgcaggaggcttcagcaccagcgattacgacgttggctgggagagtcctcacaatggctcggggacgtgggcctattcagcgccggatctgctgggggcatggtcctggggctcctgtgccgtgtatgacagcgggggctacgtgcaggagctgggcctgagcctggaggagagccgcgaccggctgcgcttcctgcagctgcacaactggctggacaacaggagccgcgctgtgttcctggagctcacgcgctacagcccggccgtggggctgcacgccgccgtcacgctgcgcctcgagttcccggcggccggccgcgccctggccgccctcagcgtccgcccctttgcgctgcgccgcctcagcgcgggcctctcgctgcctctgctcacctcggtgtgcctgctgctgttcgccgtgcacttcgccgtggccgaggcccgtacttggcacagggaagggcgctggcgcgtgctgcggctcggagcctgggcgcggtggctgctggtggcgctgacggcggccacggcactggtacgcctcgcccagctgggtgccgctgaccgccagtggacccgtttcgtgcgcggccgcccgcgccgcttcactagcttcgaccaggtggcgcagctgagctccgcagcccgtggcctggcggcctcgctgctcttcctgcttttggtcaaggctgcccagcagctacgcttcgtgcgccagtggtccgtctttggcaagacattatgccgagctctgccagagctcctgggggtcaccttgggcctggtggtgctcggggtagcctacgcccagctggccatcctgctcgtgtcttcctgtgtggactccctctggagcgtggcccaggccctgttggtgctgtgccctgggactgggctctctaccctgtgtcctgccgagtcctggcacctgtcacccctgctgtgtgtggggctctgggcactgcggctgtggggcgccctacggctgggggctgttattctccgctggcgctaccacgccttgcgtggagagctgtaccggccggcctgggagccccaggactacgagatggtggagttgttcctgcgcaggctgcgcctctggatgggcctcagcaaggtcaaggagttccgccacaaagtccgctttgaagggatggagccgctgccctctcgctcctccaggggctccaaggtatccccggatgtgcccccacccagcgctggctccgatgcctcgcacccctccacctcctccagccagctggatgggctgagcgtgagcctgggccggctggggacaaggtgtgagcctgagccctcccgcctccaagccgtgttcgaggccctgctcacccagtttgaccgactcaaccaggccacagaggacgtctaccagctggagcagcagctgcacagcctgcaaggccgcaggagcagccgggcgcccgccggatcttcccgtggcccatccccgggcctgcggccagcactgcccagccgccttgcccgggccagtcggggtgtggacctggccactggccccagcaggacaccccttcgggccaagaacaaggtccaccccagcagcacttagtcctccttcctggcgggggtgggccgtggagtcggagtggacaccgctcagtattactttctgccgctgtcaaggccgagggccaggcagaatggctgcacgtaggttccccagagagcaggcaggggcatctgtctgtctgtgggcttcagcactttaaagaggctgtgtggccaaccaggacccagggtcccctccccagctcccttgggaaggacacagcagtattggacggtttctagcctctgagatgctaatttatttccccgagtcctcaggtacagcgggctgtgcccggccccaccccctgggcagatgtcccccactgctaaggctgctggcttcagggagggttagcctgcaccgccgccaccctgcccctaagttattacctctccagttcctaccgtactccctgcaccgtctcactgtgtgtctcgtgtcagtaatttatatggtgttaaaatgtgtatatttttgtatgtcactattttcactagggctgaggggcctgcgcccagagctggcctcccccaacacctgctgcgcttggtaggtgtggtggcgttatggcagcccggctgctgcttggatgcgagcttggccttgggccggtgctgggggcacagctgtctgccaggcactctcatcaccccagaggccttgtcatcctcccttgccccaggccaggtagcaagagagcagcgcccaggcctgctggcatcaggtctgggcaagtagcaggactaggcatgtcagaggaccccagggtggttagaggaaaagactcctcctgggggctggctcccagggtggaggaaggtgactgtgtgtgtgtgtgtgtgcgcgcgcgcacgcgcgagtgtgctgtatggcccaggcagcctcaaggccctcggagctggctgtgcctgcttctgtgtaccacttctgtgggcatggccgcttctagagcctcgacacccccccaacccccgcaccaagcagacaaagtcaataaaagagctgtctgactgc

SEQ ID NO: 1305 - protein, 4302 aa, Homo sapiens
MPPAAPARLALALGLGLWLGALAGGPGRGCGPCEPPCLCGPAPGAACRVNCSGRGLRTLGPALRIPADATALDVSHNLLRALDVGLLANLSALAELDISNNKISTLEEGIFANLFNLSEINLSGNPFECDCGLAWLPRWAEEQQVRVVQPEAATCAGPGSLAGQPLLGIPLLDSGCGEEYVACLPDNSSGTVAAVSFSAAHEGLLQPEACSAFCFSTGQGLAALSEQGWCLCGAAQPSSASFACLSLCSGPPPPPAPTCRGPTLLQHVFPASPGATLVGPHGPLASGQLAAFHIAAPLPVTATRWDFGDGSAEVDAAGPAASHRYVLPGRYHVTAVLALGAGSALLGTDVQVEAAPAALELVCPSSVQSDESLDLSIQNRGGSGLEAAYSIVALGEEPARAVHPLCPSDTEIFPGNGHCYRLVVEKAAWLQAQEQCQAWAGAALAMVDSPAVQRFLVSRVTRCLDVWIGFSTVQGVEVGPAPQGEAFSLESCQNWLPGEPHPATAEHCVRLGPTGWCNTDLCSAPHSYVCELQPGGPVQDAENLLVGAPSGDLQGPLTPLAQQDGLSAPHEPVEVMVFPGLRLSREAFLTTAEFGTQELRRPAQLRLQVYRLLSTAGTPENGSEPESRSPDNRTQLAPACMPGGRWCPGANICLPLDASCHPQACANGCTSGPGLPGAPYALWREFLFSVPAGPPAQYSVTLHGQDVLMLPGDLVGLQHDAGPGALLHCSPAPGHPGPRAPYLSANASSWLPHLPAQLEGTWACPACALRLLAATEQLTVLLGLRPNPGLRLPGRYEVRAEVGNGVSRHNLSCSFDVVSPVAGLRVIYPAPRDGRLYVPTNGSALVLQVDSGANATATARWPGGSVSARFENVCPALVATFVPGCPWETNDTLFSVVALPWLSEGEHVVDVVVENSASRANLSLRVTAEEPICGLRATPSPEARVLQGVLVRYSPVVEAGSDMVFRWTINDKQSLTFQNVVFNVIYQSAAVFKLSLTASNHVSNVTVNYNVTVERMNRMQGLQVSTVPAVLSPNATLALTAGVLVDSAVEVAFLWTFGDGEQALHQFQPPYNESFPVPDPSVAQVLVEHNVMHTYAAPGEYLLTVLASNAFENLTQQVPVSVRASLPSVAVGVSDGVLVAGRPVTFYPHPLPSPGGVLYTWDFGDGSPVLTQSQPAANHTYASRGTYHVRLEVNNTVSGAAAQADVRVFEELRGLSVDMSLAVEQGAPVVVSAAVQTGDNITWTFDMGDGTVLSGPEATVEHVYLRAQNCTVTVGAASPAGHLARSLHVLVFVLEVLRVEPAACIPTQPDARLTAYVTGNPAHYLFDWTFGDGSSNTTVRGCPTVTHNFTRSGTFPLALVLSSRVNRAHYFTSICVEPEVGNVTLQPERQFVQLGDEAWLVACAWPPFPYRYTWDFGTEEAAPTRARGPEVTFIYRDPGSYLVTVTASNNISAANDSALVEVQEPVLVTSIKVNGSLGLELQQPYLFSAVGRGRPASYLWDLGDGGWLEGPEVTHAYNSTGDFTVRVAGWNEVSRSEAWLNVTVKRRVRGLVVNASRTVVPLNGSVSFSTSLEAGSDVRYSWVLCDRCTPIPGGPTISYTFRSVGTFNIIVTAENEVGSAQDSIFVYVLQLIEGLQVVGGGRYFPTNHTVQLQAVVRDGTNVSYSWTAWRDRGPALAGSGKGFSLTVLEAGTYHVQLRATNMLGSAWADCTMDFVEPVGWLMVAASPNPAAVNTSVTLSAELAGGSGVVYTWSLEEGLSWETSEPFTTHSFPTPGLHLVTMTAGNPLGSANATVEVDVQVPVSGLSIRASEPGGSFVAAGSSVPFWGQLATGTNVSWCWAVPGGSSKRGPHVTMVFPDAGTFSIRLNASNAVSWVSATYNLTAEEPIVGLVLWASSKVVAPGQLVHFQILLAAGSAVTFRLQVGGANPEVLPGPRFSHSFPRVGDHVVSVRGKNHVSWAQAQVRIVVLEAVSGLQVPNCCEPGIATGTERNFTARVQRGSRVAYAWYFSLQKVQGDSLVILSGRDVTYTPVAAGLLEIQVRAFNALGSENRTLVLEVQDAVQYVALQSGPCFTNRSAQFEAATSPSPRRVAYHWDFGDGSPGQDTDEPRAEHSYLRPGDYRVQVNASNLVSFFVAQATVTVQVLACREPEVDVVLPLQVLMRRSQRNYLEAHVDLRDCVTYQTEYRWEVYRTASCQRPGRPARVALPGVDVSRPRLVLPRLALPVGHYCFVFVVSFGDTPLTQSIQANVTVAPERLVPIIEGGSYRVWSDTRDLVLDGSESYDPNLEDGDQTPLSFHWACVASTQREAGGCALNFGPRGSSTVTIPRERLAAGVEYTFSLTVWKAGRKEEATNQTVLIRSGRVPIVSLECVSCKAQAVYEVSRSSYVYLEGRCLNCSSGSKRGRWAARTFSNKTLVLDETTTSTGSAGMRLVLRRGVLRDGEGYTFTLTVLGRSGEEEGCASIRLSPNRPPLGGSCRLFPLGAVHALTTKVHFECTGWHDAEDAGAPLVYALLLRRCRQGHCEEFCVYKGSLSSYGAVLPPGFRPHFEVGLAVVVQDQLGAAVVALNRSLAITLPEPNGSATGLTVWLHGLTASVLPGLLRQADPQHVIEYSLALVTVLNEYERALDVAAEPKHERQHRAQIRKNITETLVSLRVHTVDDIQQIAAALAQCMGPSRELVCRSCLKQTLHKLEAMMLILQAETTAGTVTPTAIGDSILNITGDLIHLASSDVRAPQPSELGAESPSRMVASQAYNLTSALMRILMRSRVLNEEPLTLAGEEIVAQGKRSDPRSLLCYGGAPGPGCHFSIPEAFSGALANLSDVVQLIFLVDSNPFPFGYISNYTVSTKVASMAFQTQAGAQIPIERLASERAITVKVPNNSDWAARGHRSSANSANSVVVQPQASVGAVVTLDSSNPAAGLHLQLNYTLLDGHYLSEEPEPYLAVYLHSEPRPNEHNCSASRRIRPESLQGADHRPYTFFISPGSRDPAGSYHLNLSSHFRWSALQVSVGLYTSLCQYFSEEDMVWRTEGLLPLEETSPRQAVCLTRHLTAFGASLFVPPSHVRFVFPEPTADVNYIVMLTCAVCLVTYMVMAAILHKLDQLDASRGRAIPFCGQRGRFKYEILVKTGWGRGSGTTAHVGIMLYGVDSRSGHRHLDGDRAFHRNSLDIFRIATPHSLGSVWKIRVWHDNKGLSPAWFLQHVIVRDLQTARSAFFLVNDWLSVETEANGGLVEKEVLAASDAALLRFRRLLVAELQRGFFDKHIWLSIWDRPPRSRFTRIQRATCCVLLICLFLGANAVWYGAVGDSAYSTGHVSRLSPLSVDTVAVGLVSSVVVYPVYLAILFLFRMSRSKVAGSPSPTPAGQQVLDIDSCLDSSVLDSSFLTFSGLHAEAFVGQMKSDLFLDDSKSLVCWPSGEGTLSWPDLLSDPSIVGSNLRQLARGQAGHGLGPEEDGFSLASPYSPAKSFSASDEDLIQQVLAEGVSSPAPTQDTHMETDLLSSLSSTPGEKTETLALQRLGELGPPSPGLNWEQPQAARLSRTGLVEGLRKRLLPAWCASLAHGLSLLLVAVAVAVSGWVGASFPPGVSVAWLLSSSASFLASFLGWEPLKVLLEALYFSLVAKRLHPDEDDTLVESPAVTPVSARVPRVRPPHGFALFLAKEEARKVKRLHGMLRSLLVYMLFLLVTLLASYGDASCHGHAYRLQSAIKQELHSRAFLAITRSEELWPWMAHVLLPYVHGNQSSPELGPPRLRQVRLQEALYPDPPGPRVHTCSAAGGFSTSDYDVGWESPHNGSGTWAYSAPDLLGAWSWGSCAVYDSGGYVQELGLSLEESRDRLRFLQLHNWLDNRSRAVFLELTRYSPAVGLHAAVTLRLEFPAAGRALAALSVRPFALRRLSAGLSLPLLTSVCLLLFAVHFAVAEARTWHREGRWRVLRLGAWARWLLVALTAATALVRLAQLGAADRQWTRFVRGRPRRFTSFDQVAQLSSAARGLAASLLFLLLVKAAQQLRFVRQWSVFGKTLCRALPELLGVTLGLVVLGVAYAQLAILLVSSCVDSLWSVAQALLVLCPGTGLSTLCPAESWHLSPLLCVGLWALRLWGALRLGAVILRWRYHALRGELYRPAWEPQDYEMVELFLRRLRLWMGLSKVKEFRHKVRFEGMEPLPSRSSRGSKVSPDVPPPSAGSDASHPSTSSSQLDGLSVSLGRLGTRCEPEPSRLQAVFEALLTQFDRLNQATEDVYQLEQQLHSLQGRRSSRAPAGSSRGPSPGLRPALPSRLARASRGVDLATGPSRTPLRAKNKVHPSST

SEQ ID NO: 1306 - DNA, 14138 bp, Homo sapiens
gcactgcagcgccagcgtccgagcgggcggccgagctcccggagcggcctggccccgagccccgagcgggcgtcgctcagcagcaggtcgcggccgcagccccatccagccccgcgcccgccatgccgtccgcgggccccgcctgagctgcggcctccgcgcgcgggcgggcctggggacggcggggccatgcgcgcgctgccctaacgatgccgcccgccgcgcccgcccgcctggcgctggccctgggcctgggcctgtggctcggggcgctggcggggggccccgggcgcggctgcgggccctgcgagcccccctgcctctgcggcccagcgcccggcgccgcctgccgcgtcaactgctcgggccgcgggctgcggacgctcggtcccgcgctgcgcatccccgcggacgccacagcgctagacgtctcccacaacctgctccgggcgctggacgttgggctcctggcgaacctctcggcgctggcagagctggatataagcaacaacaagatttctacgttagaagaaggaatatttgctaatttatttaatttaagtgaaataaacctgagtgggaacccgtttgagtgtgactgtggcctggcgtggctgccgcgatgggcggaggagcagcaggtgcgggtggtgcagcccgaggcagccacgtgtgctgggcctggctccctggctggccagcctctgcttggcatccccttgctggacagtggctgtggtgaggagtatgtcgcctgcctccctgacaacagctcaggcaccgtggcagcagtgtccttttcagctgcccacgaaggcctgcttcagccagaggcctgcagcgccttctgcttctccaccggccagggcctcgcagccctctcggagcagggctggtgcctgtgtggggcggcccagccctccagtgcctcctttgcctgcctgtccctctgctccggccccccgccacctcctgcccccacctgtaggggccccaccctcctccagcacgtcttccctgcctccccaggggccaccctggtggggccccacggacctctggcctctggccagctagcagccttccacatcgctgccccgctccctgtcactgccacacgctgggacttcggagacggctccgccgaggtggatgccgctgggccggctgcctcgcatcgctatgtgctgcctgggcgctatcacgtgacggccgtgctggccctgggggccggctcagccctgctggggacagacgtgcaggtggaagcggcacctgccgccctggagctcgtgtgcccgtcctcggtgcagagtgacgagagcctcgacctcagcatccagaaccgcggtggttcaggcctggaggccgcctacagcatcgtggccctgggcgaggagccggcccgagcggtgcacccgctctgcccctcggacacggagatcttccctggcaacgggcactgctaccgcctggtggtggagaaggcggcctggctgcaggcgcaggagcagtgtcaggcctgggccggggccgccctggcaatggtggacagtcccgccgtgcagcgcttcctggtctcccgggtcaccaggagcctagacgtgtggatcggcttctcgactgtgcagggggtggaggtgggcccagcgccgcagggcgaggccttcagcctggagagctgccagaactggctgcccggggagccacacccagccacagccgagcactgcgtccggctcgggcccaccgggtggtgtaacaccgacctgtgctcagcgccgcacagctacgtctgcgagctgcagcccggaggcccagtgcaggatgccgagaacctcctcgtgggagcgcccagtggggacctgcagggacccctgacgcctctggcacagcaggacggcctctcagccccgcacgagcccgtggaggtcatggtattcccgggcctgcgtctgagccgtgaagccttcctcaccacggccgaatttgggacccaggagctccggcggcccgcccagctgcggctgcaggtgtaccggctcctcagcacagcagggaccccggagaacggcagcgagcctgagagcaggtccccggacaacaggacccagctggcccccgcgtgcatgccagggggacgctggtgccctggagccaacatctgcttgccgctggacgcctcctgccacccccaggcctgcgccaatggctgcacgtcagggccagggctacccggggccccctatgcgctatggagagagttcctcttctccgttcccgcggggccccccgcgcagtactcggtcaccctccacggccaggatgtcctcatgctccctggtgacctcgttggcttgcagcacgacgctggccctggcgccctcctgcactgctcgccggctcccggccaccctggtccccgggccccgtacctctccgccaacgcctcgtcatggctgccccacttgccagcccagctggagggcacttgggcctgccctgcctgtgccctgcggctgcttgcagccacggaacagctcaccgtgctgctgggcttgaggcccaaccctggactgcggctgcctgggcgctatgaggtccgggcagaggtgggcaatggcgtgtccaggcacaacctctcctgcagctttgacgtggtctccccagtggctgggctgcgggtcatctaccctgccccccgcgacggccgcctctacgtgcccaccaacggctcagccttggtgctccaggtggactctggtgccaacgccacggccacggctcgctggcctgggggcagtgtcagcgcccgctttgagaatgtctgccctgccctggtggccaccttcgtgcccggctgcccctgggagaccaacgataccctgttctcagtggtagcactgccgtggctcagtgagggggagcacgtggtggacgtggtggtggaaaacagcgccagccgggccaacctcagcctgcgggtgacggcggaggagcccatctgtggcctccgcgccacgcccagccccgaggcccgtgtactgcagggagtcctagtgaggtacagccccgtggtggaggccggctcggacatggtcttccggtggaccatcaacgacaagcagtccctgaccttccagaacgtggtcttcaatgtcatttatcagagcgcggcggtcttcaagctctcactgacggcctccaaccacgtgagcaacgtcaccgtgaactacaacgtaaccgtggagcggatgaacaggatgcagggtctgcaggtctccacagtgccggccgtgctgtcccccaatgccacgctagcactgacggcgggcgtgctggtggactcggccgtggaggtggccttcctgtggacctttggggatggggagcaggccctccaccagttccagcctccgtacaacgagtccttcccggttccagacccctcggtggcccaggtgctggtggagcacaatgtcatgcacacctacgctgccccaggtgagtacctcctgaccgtgctggcatctaatgccttcgagaacctgacgcagcaggtgcctgtgagcgtgcgcgcctccctgccctccgtggctgtgggtgtgagtgacggcgtcctggtggccggccggcccgtcaccttctacccgcacccgctgccctcgcctgggggtgttctttacacgtgggacttcggggacggctcccctgtcctgacccagagccagccggctgccaaccacacctatgcctcgaggggcacctaccacgtgcgcctggaggtcaacaacacggtgagcggtgcggcggcccaggcggatgtgcgcgtctttgaggagctccgcggactcagcgtggacatgagcctggccgtggagcagggcgcccccgtggtggtcagcgccgcggtgcagacgggcgacaacatcacgtggaccttcgacatgggggacggcaccgtgctgtcgggcccggaggcaacagtggagcatgtgtacctgcgggcacagaactgcacagtgaccgtgggtgcggccagccccgccggccacctggcccggagcctgcacgtgctggtcttcgtcctggaggtgctgcgcgttgaacccgccgcctgcatccccacgcagcctgacgcgcggctcacggcctacgtcaccgggaacccggcccactacctcttcgactggaccttcggggatggctcctccaacacgaccgtgcgggggtgcccgacggtgacacacaacttcacgcggagcggcacgttccccctggcgctggtgctgtccagccgcgtgaacagggcgcattacttcaccagcatctgcgtggagccagaggtgggcaacgtcaccctgcagccagagaggcagtttgtgcagctcggggacgaggcctggctggtggcatgtgcctggcccccgttcccctaccgctacacctgggactttggcaccgaggaagccgcccccacccgtgccaggggccctgaggtgacgttcatctaccgagacccaggctcctatcttgtgacagtcaccgcgtccaacaacatctctgctgccaatgactcagccctggtggaggtgcaggagcccgtgctggtcaccagcatcaaggtcaatggctcccttgggctggagctgcagcagccgtacctgttctctgctgtgggccgtgggcgccccgccagctacctgtgggatctgggggacggtgggtggctcgagggtccggaggtcacccacgcttacaacagcacaggtgacttcaccgttagggtggccggctggaatgaggtgagccgcagcgaggcctggctcaatgtgacggtgaagcggcgcgtgcgggggctcgtcgtcaatgcaagccgcacggtggtgcccctgaatgggagcgtgagcttcagcacgtcgctggaggccggcagtgatgtgcgctattcctgggtgctctgtgaccgctgcacgcccatccctgggggtcctaccatctcttacaccttccgctccgtgggcaccttcaatatcatcgtcacggctgagaacgaggtgggctccgcccaggacagcatcttcgtctatgtcctgcagctcatagaggggctgcaggtggtgggcggtggccgctacttccccaccaaccacacggtacagctgcaggccgtggttagggatggcaccaacgtctcctacagctggactgcctggagggacaggggcccggccctggccggcagcggcaaaggcttctcgctcaccgtgctcgaggccggcacctaccatgtgcagctgcgggccaccaacatgctgggcagcgcctgggccgactgcaccatggacttcgtggagcctgtggggtggctgatggtggccgcctccccgaacccagctgccgtcaacacaagcgtcaccctcagtgccgagctggctggtggcagtggtgtcgtatacacttggtccttggaggaggggctgagctgggagacctccgagccatttaccacccatagcttccccacacccggcctgcacttggtcaccatgacggcagggaacccgctgggctcagccaacgccaccgtggaagtggatgtgcaggtgcctgtgagtggcctcagcatcagggccagcgagcccggaggcagcttcgtggcggccgggtcctctgtgcccttttgggggcagctggccacgggcaccaatgtgagctggtgctgggctgtgcccggcggcagcagcaagcgtggccctcatgtcaccatggtcttcccggatgctggcaccttctccatccggctcaatgcctccaacgcagtcagctgggtctcagccacgtacaacctcacggcggaggagcccatcgtgggcctggtgctgtgggccagcagcaaggtggtggcgcccgggcagctggtccattttcagatcctgctggctgccggctcagctgtcaccttccgcctgcaggtcggcggggccaaccccgaggtgctccccgggccccgtttctcccacagcttcccccgcgtcggagaccacgtggtgagcgtgcggggcaaaaaccacgtgagctgggcccaggcgcaggtgcgcatcgtggtgctggaggccgtgagtgggctgcaggtgcccaactgctgcgagcctggcatcgccacgggcactgagaggaacttcacagcccgcgtgcagcgcggctctcgggtcgcctacgcctggtacttctcgctgcagaaggtccagggcgactcgctggtcatcctgtcgggccgcgacgtcacctacacgcccgtggccgcggggctgttggagatccaggtgcgcgccttcaacgccctgggcagtgagaaccgcacgctggtgctggaggttcaggacgccgtccagtatgtggccctgcagagcggcccctgcttcaccaaccgctcggcgcagtttgaggccgccaccagccccagcccccggcgtgtggcctaccactgggactttggggatgggtcgccagggcaggacacagatgagcccagggccgagcactcctacctgaggcctggggactaccgcgtgcaggtgaacgcctccaacctggtgagcttcttcgtggcgcaggccacggtgaccgtccaggtgctggcctgccgggagccggaggtggacgtggtcctgcccctgcaggtgctgatgcggcgatcacagcgcaactacttggaggcccacgttgacctgcgcgactgcgtcacctaccagactgagtaccgctgggaggtgtatcgcaccgccagctgccagcggccggggcgcccagcgcgtgtggccctgcccggcgtggacgtgagccggcctcggctggtgctgccgcggctggcgctgcctgtggggcactactgctttgtgtttgtcgtgtcatttggggacacgccactgacacagagcatccaggccaatgtgacggtggcccccgagcgcctggtgcccatcattgagggtggctcataccgcgtgtggtcagacacacgggacctggtgctggatgggagcgagtcctacgaccccaacctggaggacggcgaccagacgccgctcagtttccactgggcctgtgtggcttcgacacagagggaggctggcgggtgtgcgctgaactttgggccccgcgggagcagcacggtcaccattccacgggagcggctggcggctggcgtggagtacaccttcagcctgaccgtgtggaaggccggccgcaaggaggaggccaccaaccagacggtgctgatccggagtggccgggtgcccattgtgtccttggagtgtgtgtcctgcaaggcacaggccgtgtacgaagtgagccgcagctcctacgtgtacttggagggccgctgcctcaattgcagcagcggctccaagcgagggcggtgggctgcacgtacgttcagcaacaagacgctggtgctggatgagaccaccacatccacgggcagtgcaggcatgcgactggtgctgcggcggggcgtgctgcgggacggcgagggatacaccttcacgctcacggtgctgggccgctctggcgaggaggagggctgcgcctccatccgcctgtcccccaaccgcccgccgctggggggctcttgccgcctcttcccactgggcgctgtgcacgccctcaccaccaaggtgcacttcgaatgcacgggctggcatgacgcggaggatgctggcgccccgctggtgtacgccctgctgctgcggcgctgtcgccagggccactgcgaggagttctgtgtctacaagggcagcctctccagctacggagccgtgctgcccccgggtttcaggccacacttcgaggtgggcctggccgtggtggtgcaggaccagctgggagccgctgtggtcgccctcaacaggtctttggccatcaccctcccagagcccaacggcagcgcaacggggctcacagtctggctgcacgggctcaccgctagtgtgctcccagggctgctgcggcaggccgatccccagcacgtcatcgagtactcgttggccctggtcaccgtgctgaacgagtacgagcgggccctggacgtggcggcagagcccaagcacgagcggcagcaccgagcccagatacgcaagaacatcacggagactctggtgtccctgagggtccacactgtggatgacatccagcagatcgctgctgcgctggcccagtgcatggggcccagcagggagctcgtatgccgctcgtgcctgaagcagacgctgcacaagctggaggccatgatgctcatcctgcaggcagagaccaccgcgggcaccgtgacgcccaccgccatcggagacagcatcctcaacatcacaggagacctcatccacctggccagctcggacgtgcgggcaccacagccctcagagctgggagccgagtcaccatctcggatggtggcgtcccaggcctacaacctgacctctgccctcatgcgcatcctcatgcgctcccgcgtgctcaacgaggagcccctgacgctggcgggcgaggagatcgtggcccagggcaagcgctcggacccgcggagcctgctgtgctatggcggcgccccagggcctggctgccacttctccatccccgaggctttcagcggggccctggccaacctcagtgacgtggtgcagctcatctttctggtggactccaatccctttccctttggctatatcagcaactacaccgtctccaccaaggtggcctcgatggcattccagacacaggccggcgcccagatccccatcgagcggctggcctcagagcgcgccatcaccgtgaaggtgcccaacaactcggactgggctgcccggggccaccgcagctccgccaactccgccaactccgttgtggtccagccccaggcctccgtcggtgctgtggtcaccctggacagcagcaaccctgcggccgggctgcatctgcagctcaactatacgctgctggacggccactacctgtctgaggaacctgagccctacctggcagtctacctacactcggagccccggcccaatgagcacaactgctcggctagcaggaggatccgcccagagtcactccagggtgctgaccaccggccctacaccttcttcatttccccggggagcagagacccagcggggagttaccatctgaacctctccagccacttccgctggtcggcgctgcaggtgtccgtgggcctgtacacgtccctgtgccagtacttcagcgaggaggacatggtgtggcggacagaggggctgctgcccctggaggagacctcgccccgccaggccgtctgcctcacccgccacctcaccgccttcggcgccagcctcttcgtgcccccaagccatgtccgctttgtgtttcctgagccgacagcggatgtaaactacatcgtcatgctgacatgtgctgtgtgcctggtgacctacatggtcatggccgccatcctgcacaagctggaccagttggatgccagccggggccgcgccatccctttctgtgggcagcggggccgcttcaagtacgagatcctcgtcaagacaggctggggccggggctcaggtaccacggcccacgtgggcatcatgctgtatggggtggacagccggagcggccaccggcacctggacggcgacagagccttccaccgcaacagcctggacatcttccggatcgccaccccgcacagcctgggtagcgtgtggaagatccgagtgtggcacgacaacaaagggctcagccctgcctggttcctgcagcacgtcatcgtcagggacctgcagacggcacgcagcgccttcttcctggtcaatgactggctttcggtggagacggaggccaacgggggcctggtggagaaggaggtgctggccgcgagcgacgcagcccttttgcgcttccggcgcctgctggtggctgagctgcagcgtggcttctttgacaagcacatctggctctccatatgggaccggccgcctcgtagccgtttcactcgcatccagagggccacctgctgcgttctcctcatctgcctcttcctgggcgccaacgccgtgtggtacggggctgttggcgactctgcctacagcacggggcatgtgtccaggctgagcccgctgagcgtcgacacagtcgctgttggcctggtgtccagcgtggttgtctatcccgtctacctggccatcctttttctcttccggatgtcccggagcaaggtggctgggagcccgagccccacacctgccgggcagcaggtgctggacatcgacagctgcctggactcgtccgtgctggacagctccttcctcacgttctcaggcctccacgctgagcaggcctttgttggacagatgaagagtgacttgtttctggatgattctaagagtctggtgtgctggccctccggcgagggaacgctcagttggccggacctgctcagtgacccgtccattgtgggtagcaatctgcggcagctggcacggggccaggcgggccatgggctgggcccagaggaggacggcttctccctggccagcccctactcgcctgccaaatccttctcagcatcagatgaagacctgatccagcaggtccttgccgagggggtcagcagcccagcccctacccaagacacccacatggaaacggacctgctcagcagcctgtccagcactcctggggagaagacagagacgctggcgctgcagaggctgggggagctggggccacccagcccaggcctgaactgggaacagccccaggcagcgaggctgtccaggacaggactggtggagggtctgcggaagcgcctgctgccggcctggtgtgcctccctggcccacgggctcagcctgctcctggtggctgtggctgtggctgtctcagggtgggtgggtgcgagcttccccccgggcgtgagtgttgcgtggctcctgtccagcagcgccagcttcctggcctcattcctcggctgggagccactgaaggtcttgctggaagccctgtacttctcactggtggccaagcggctgcacccggatgaagatgacaccctggtagagagcccggctgtgacgcctgtgagcgcacgtgtgccccgcgtacggccaccccacggctttgcactcttcctggccaaggaagaagcccgcaaggtcaagaggctacatggcatgctgcggagcctcctggtgtacatgctttttctgctggtgaccctgctggccagctatggggatgcctcatgccatgggcacgcctaccgtctgcaaagcgccatcaagcaggagctgcacagccgggccttcctggccatcacgcggtctgaggagctctggccatggatggcccacgtgctgctgccctacgtccacgggaaccagtccagcccagagctggggcccccacggctgcggcaggtgcggctgcaggaagcactctacccagaccctcccggccccagggtccacacgtgctcggccgcaggaggcttcagcaccagcgattacgacgttggctgggagagtcctcacaatggctcggggacgtgggcctattcagcgccggatctgctgggggcatggtcctggggctcctgtgccgtgtatgacagcgggggctacgtgcaggagctgggcctgagcctggaggagagccgcgaccggctgcgcttcctgcagctgcacaactggctggacaacaggagccgcgctgtgttcctggagctcacgcgctacagcccggccgtggggctgcacgccgccgtcacgctgcgcctcgagttcccggcggccggccgcgccctggccgccctcagcgtccgcccctttgcgctgcgccgcctcagcgcgggcctctcgctgcctctgctcacctcggtgtgcctgctgctgttcgccgtgcacttcgccgtggccgaggcccgtacttggcacagggaagggcgctggcgcgtgctgcggctcggagcctgggcgcggtggctgctggtggcgctgacggcggccacggcactggtacgcctcgcccagctgggtgccgctgaccgccagtggacccgtttcgtgcgcggccgcccgcgccgcttcactagcttcgaccaggtggcgcagctgagctccgcagcccgtggcctggcggcctcgctgctcttcctgcttttggtcaaggctgcccagcagctacgcttcgtgcgccagtggtccgtctttggcaagacattatgccgagctctgccagagctcctgggggtcaccttgggcctggtggtgctcggggtagcctacgcccagctggccatcctgctcgtgtcttcctgtgtggactccctctggagcgtggcccaggccctgttggtgctgtgccctgggactgggctctctaccctgtgtcctgccgagtcctggcacctgtcacccctgctgtgtgtggggctctgggcactgcggctgtggggcgccctacggctgggggctgttattctccgctggcgctaccacgccttgcgtggagagctgtaccggccggcctgggagccccaggactacgagatggtggagttgttcctgcgcaggctgcgcctctggatgggcctcagcaaggtcaaggagttccgccacaaagtccgctttgaagggatggagccgctgccctctcgctcctccaggggctccaaggtatccccggatgtgcccccacccagcgctggctccgatgcctcgcacccctccacctcctccagccagctggatgggctgagcgtgagcctgggccggctggggacaaggtgtgagcctgagccctcccgcctccaagccgtgttcgaggccctgctcacccagtttgaccgactcaaccaggccacagaggacgtctaccagctggagcagcagctgcacagcctgcaaggccgcaggagcagccgggcgcccgccggatcttcccgtggcccatccccgggcctgcggccagcactgcccagccgccttgcccgggccagtcggggtgtggacctggccactggccccagcaggacaccccttcgggccaagaacaaggtccaccccagcagcacttagtcctccttcctggcgggggtgggccgtggagtcggagtggacaccgctcagtattactttctgccgctgtcaaggccgagggccaggcagaatggctgcacgtaggttccccagagagcaggcaggggcatctgtctgtctgtgggcttcagcactttaaagaggctgtgtggccaaccaggacccagggtcccctccccagctcccttgggaaggacacagcagtattggacggtttctagcctctgagatgctaatttatttccccgagtcctcaggtacagcgggctgtgcccggccccaccccctgggcagatgtcccccactgctaaggctgctggcttcagggagggttagcctgcaccgccgccaccctgcccctaagttattacctctccagttcctaccgtactccctgcaccgtctcactgtgtgtctcgtgtcagtaatttatatggtgttaaaatgtgtatatttttgtatgtcactattttcactagggctgaggggcctgcgcccagagctggcctcccccaacacctgctgcgcttggtaggtgtggtggcgttatggcagcccggctgctgcttggatgcgagcttggccttgggccggtgctgggggcacagctgtctgccaggcactctcatcaccccagaggccttgtcatcctcccttgccccaggccaggtagcaagagagcagcgcccaggcctgctggcatcaggtctgggcaagtagcaggactaggcatgtcagaggaccccagggtggttagaggaaaagactcctcctgggggctggctcccagggtggaggaaggtgactgtgtgtgtgtgtgtgtgcgcgcgcgcacgcgcgagtgtgctgtatggcccaggcagcctcaaggccctcggagctggctgtgcctgcttctgtgtaccacttctgtgggcatggccgcttctagagcctcgacacccccccaacccccgcaccaagcagacaaagtcaataaaagagctgtctgactgc

SEQ ID NO: 1307 - protein, 4303 aa, Homo sapiens
MPPAAPARLALALGLGLWLGALAGGPGRGCGPCEPPCLCGPAPGAACRVNCSGRGLRTLGPALRIPADATALDVSHNLLRALDVGLLANLSALAELDISNNKISTLEEGIFANLFNLSEINLSGNPFECDCGLAWLPRWAEEQQVRVVQPEAATCAGPGSLAGQPLLGIPLLDSGCGEEYVACLPDNSSGTVAAVSFSAAHEGLLQPEACSAFCFSTGQGLAALSEQGWCLCGAAQPSSASFACLSLCSGPPPPPAPTCRGPTLLQHVFPASPGATLVGPHGPLASGQLAAFHIAAPLPVTATRWDFGDGSAEVDAAGPAASHRYVLPGRYHVTAVLALGAGSALLGTDVQVEAAPAALELVCPSSVQSDESLDLSIQNRGGSGLEAAYSIVALGEEPARAVHPLCPSDTEIFPGNGHCYRLVVEKAAWLQAQEQCQAWAGAALAMVDSPAVQRFLVSRVTRSLDVWIGFSTVQGVEVGPAPQGEAFSLESCQNWLPGEPHPATAEHCVRLGPTGWCNTDLCSAPHSYVCELQPGGPVQDAENLLVGAPSGDLQGPLTPLAQQDGLSAPHEPVEVMVFPGLRLSREAFLTTAEFGTQELRRPAQLRLQVYRLLSTAGTPENGSEPESRSPDNRTQLAPACMPGGRWCPGANICLPLDASCHPQACANGCTSGPGLPGAPYALWREFLFSVPAGPPAQYSVTLHGQDVLMLPGDLVGLQHDAGPGALLHCSPAPGHPGPRAPYLSANASSWLPHLPAQLEGTWACPACALRLLAATEQLTVLLGLRPNPGLRLPGRYEVRAEVGNGVSRHNLSCSFDVVSPVAGLRVIYPAPRDGRLYVPTNGSALVLQVDSGANATATARWPGGSVSARFENVCPALVATFVPGCPWETNDTLFSVVALPWLSEGEHVVDVVVENSASRANLSLRVTAEEPICGLRATPSPEARVLQGVLVRYSPVVEAGSDMVFRWTINDKQSLTFQNVVFNVIYQSAAVFKLSLTASNHVSNVTVNYNVTVERMNRMQGLQVSTVPAVLSPNATLALTAGVLVDSAVEVAFLWTFGDGEQALHQFQPPYNESFPVPDPSVAQVLVEHNVMHTYAAPGEYLLTVLASNAFENLTQQVPVSVRASLPSVAVGVSDGVLVAGRPVTFYPHPLPSPGGVLYTWDFGDGSPVLTQSQPAANHTYASRGTYHVRLEVNNTVSGAAAQADVRVFEELRGLSVDMSLAVEQGAPVVVSAAVQTGDNITWTFDMGDGTVLSGPEATVEHVYLRAQNCTVTVGAASPAGHLARSLHVLVFVLEVLRVEPAACIPTQPDARLTAYVTGNPAHYLFDWTFGDGSSNTTVRGCPTVTHNFTRSGTFPLALVLSSRVNRAHYFTSICVEPEVGNVTLQPERQFVQLGDEAWLVACAWPPFPYRYTWDFGTEEAAPTRARGPEVTFIYRDPGSYLVTVTASNNISAANDSALVEVQEPVLVTSIKVNGSLGLELQQPYLFSAVGRGRPASYLWDLGDGGWLEGPEVTHAYNSTGDFTVRVAGWNEVSRSEAWLNVTVKRRVRGLVVNASRTVVPLNGSVSFSTSLEAGSDVRYSWVLCDRCTPIPGGPTISYTFRSVGTFNIIVTAENEVGSAQDSIFVYVLQLIEGLQVVGGGRYFPTNHTVQLQAVVRDGTNVSYSWTAWRDRGPALAGSGKGFSLTVLEAGTYHVQLRATNMLGSAWADCTMDFVEPVGWLMVAASPNPAAVNTSVTLSAELAGGSGVVYTWSLEEGLSWETSEPFTTHSFPTPGLHLVTMTAGNPLGSANATVEVDVQVPVSGLSIRASEPGGSFVAAGSSVPFWGQLATGTNVSWCWAVPGGSSKRGPHVTMVFPDAGTFSIRLNASNAVSWVSATYNLTAEEPIVGLVLWASSKVVAPGQLVHFQILLAAGSAVTFRLQVGGANPEVLPGPRFSHSFPRVGDHVVSVRGKNHVSWAQAQVRIVVLEAVSGLQVPNCCEPGIATGTERNFTARVQRGSRVAYAWYFSLQKVQGDSLVILSGRDVTYTPVAAGLLEIQVRAFNALGSENRTLVLEVQDAVQYVALQSGPCFTNRSAQFEAATSPSPRRVAYHWDFGDGSPGQDTDEPRAEHSYLRPGDYRVQVNASNLVSFFVAQATVTVQVLACREPEVDVVLPLQVLMRRSQRNYLEAHVDLRDCVTYQTEYRWEVYRTASCQRPGRPARVALPGVDVSRPRLVLPRLALPVGHYCFVFVVSFGDTPLTQSIQANVTVAPERLVPIIEGGSYRVWSDTRDLVLDGSESYDPNLEDGDQTPLSFHWACVASTQREAGGCALNFGPRGSSTVTIPRERLAAGVEYTFSLTVWKAGRKEEATNQTVLIRSGRVPIVSLECVSCKAQAVYEVSRSSYVYLEGRCLNCSSGSKRGRWAARTFSNKTLVLDETTTSTGSAGMRLVLRRGVLRDGEGYTFTLTVLGRSGEEEGCASIRLSPNRPPLGGSCRLFPLGAVHALTTKVHFECTGWHDAEDAGAPLVYALLLRRCRQGHCEEFCVYKGSLSSYGAVLPPGFRPHFEVGLAVVVQDQLGAAVVALNRSLAITLPEPNGSATGLTVWLHGLTASVLPGLLRQADPQHVIEYSLALVTVLNEYERALDVAAEPKHERQHRAQIRKNITETLVSLRVHTVDDIQQIAAALAQCMGPSRELVCRSCLKQTLHKLEAMMLILQAETTAGTVTPTAIGDSILNITGDLIHLASSDVRAPQPSELGAESPSRMVASQAYNLTSALMRILMRSRVLNEEPLTLAGEEIVAQGKRSDPRSLLCYGGAPGPGCHFSIPEAFSGALANLSDVVQLIFLVDSNPFPFGYISNYTVSTKVASMAFQTQAGAQIPIERLASERAITVKVPNNSDWAARGHRSSANSANSVVVQPQASVGAVVTLDSSNPAAGLHLQLNYTLLDGHYLSEEPEPYLAVYLHSEPRPNEHNCSASRRIRPESLQGADHRPYTFFISPGSRDPAGSYHLNLSSHFRWSALQVSVGLYTSLCQYFSEEDMVWRTEGLLPLEETSPRQAVCLTRHLTAFGASLFVPPSHVRFVFPEPTADVNYIVMLTCAVCLVTYMVMAAILHKLDQLDASRGRAIPFCGQRGRFKYEILVKTGWGRGSGTTAHVGIMLYGVDSRSGHRHLDGDRAFHRNSLDIFRIATPHSLGSVWKIRVWHDNKGLSPAWFLQHVIVRDLQTARSAFFLVNDWLSVETEANGGLVEKEVLAASDAALLRFRRLLVAELQRGFFDKHIWLSIWDRPPRSRFTRIQRATCCVLLICLFLGANAVWYGAVGDSAYSTGHVSRLSPLSVDTVAVGLVSSVVVYPVYLAILFLFRMSRSKVAGSPSPTPAGQQVLDIDSCLDSSVLDSSFLTFSGLHAEQAFVGQMKSDLFLDDSKSLVCWPSGEGTLSWPDLLSDPSIVGSNLRQLARGQAGHGLGPEEDGFSLASPYSPAKSFSASDEDLIQQVLAEGVSSPAPTQDTHMETDLLSSLSSTPGEKTETLALQRLGELGPPSPGLNWEQPQAARLSRTGLVEGLRKRLLPAWCASLAHGLSLLLVAVAVAVSGWVGASFPPGVSVAWLLSSSASFLASFLGWEPLKVLLEALYFSLVAKRLHPDEDDTLVESPAVTPVSARVPRVRPPHGFALFLAKEEARKVKRLHGMLRSLLVYMLFLLVTLLASYGDASCHGHAYRLQSAIKQELHSRAFLAITRSEELWPWMAHVLLPYVHGNQSSPELGPPRLRQVRLQEALYPDPPGPRVHTCSAAGGFSTSDYDVGWESPHNGSGTWAYSAPDLLGAWSWGSCAVYDSGGYVQELGLSLEESRDRLRFLQLHNWLDNRSRAVFLELTRYSPAVGLHAAVTLRLEFPAAGRALAALSVRPFALRRLSAGLSLPLLTSVCLLLFAVHFAVAEARTWHREGRWRVLRLGAWARWLLVALTAATALVRLAQLGAADRQWTRFVRGRPRRFTSFDQVAQLSSAARGLAASLLFLLLVKAAQQLRFVRQWSVFGKTLCRALPELLGVTLGLVVLGVAYAQLAILLVSSCVDSLWSVAQALLVLCPGTGLSTLCPAESWHLSPLLCVGLWALRLWGALRLGAVILRWRYHALRGELYRPAWEPQDYEMVELFLRRLRLWMGLSKVKEFRHKVRFEGMEPLPSRSSRGSKVSPDVPPPSAGSDASHPSTSSSQLDGLSVSLGRLGTRCEPEPSRLQAVFEALLTQFDRLNQATEDVYQLEQQLHSLQGRRSSRAPAGSSRGPSPGLRPALPSRLARASRGVDLATGPSRTPLRAKNKVHPSST

SEQ ID NO: 1308 - DNA, 1641 bp, Homo sapiens
gccgccgccgccgccgccgccgccgccgccgccaggggaagggttcgggtccgggtcgggctcggcgggcgcggggtgcgggacggcccagggcacggcggctgcagcgggagcacactgagcgcccgcccgccatgtccaggaagaagacccccaagagcaaaggggccagcacccccgctgcctccacgctgcccaccgccaacggggcccgaccggcgcgctccgggactgcgctttccggccccgacgcgccgcccaacgggcccttgcagcccggccggccctcgcttggcggcggtgtcgacttctacgacgtcgccttcaaggtcatgctggtgggggactcgggtgtggggaagacctgtctgctggtgcgattcaaggatggtgctttcctggcggggaccttcatctccaccgtaggcattgacttccggaacaaagttctggacgtggatggtgtgaaggtgaagctgcagatgtgggacacagctggtcaggagcggttccgcagtgttacccatgcctactaccgggatgctcatgctctgctgctgctctacgatgtcaccaacaaggcctcctttgacaacatccaggcctggctgaccgagatccacgagtacgcccagcacgacgtggcgctcatgctgctggggaacaaggtggactctgcccatgagcgtgtggtgaagagggaggacggggagaagctggccaaggagtatggactgcccttcatggagaccagcgccaagacgggcctcaacgtggacttggccttcacagccatagcaaaggagttgaagcagcgctccatgaaggctcccagcgagccgcgcttccggctgcatgattacgttaagagggagggtcgaggggcctcctgctgccgcccttgaacctggctgagctcagtcctctggaggaagccgcccagtccctagaaggctggacagagggtctccaggcccttctgactttgttgcccagtggccaacgcccgagtgtctgttttcaggagccccaggtcaagccttgtcccttcctcctcccagcaacagtcccaacaagcaggcttctgagagcccgtggccgcacactggccgccacggaaaagcagtcttctgcacgggacggggagcggcaagtggacagactttgccacggtgctctgctgccccctcctgggcacgtccaggtgagggagggctggggctggcaccacgcacagtgcctaaccctagaaaagccatgtcttcagccgcacatgctcaggcagctaagggaggacgcctgcccacgcctgggacagaaggcttcactgctaatcacatcgtgcatctgtgtgtcctgggagctgcctgctcccggcccaccctctaggaggctctggctcaaacagcaatagggtcttcctcactgaccttggaggatgcctgtggccttgtgataaaatgtgggaaatcacagaaaacaccagaaacaacaactgccagcccggcctggccacaggtgaggtctgtgatttccgagcacgctccaccttgcactcaacttggccttttgattgcacaagcctttgttttcagtcctagtgaataaagttgtgttttctggaaaaaaaaaaaaaaaaaa

SEQ ID NO: 1309 - protein, 256 aa, Homo sapiens
MSRKKTPKSKGASTPAASTLPTANGARPARSGTALSGPDAPPNGPLQPGRPSLGGGVDFYDVAFKVMLVGDSGVGKTCLLVRFKDGAFLAGTFISTVGIDFRNKVLDVDGVKVKLQMWDTAGQERFRSVTHAYYRDAHALLLLYDVTNKASFDNIQAWLTEIHEYAQHDVALMLLGNKVDSAHERVVKREDGEKLAKEYGLPFMETSAKTGLNVDLAFTAIAKELKQRSMKAPSEPRFRLHDYVKREGRGASCCRP

SEQ ID NO: 1310 - DNA, 83 bp, Homo sapiens
agtctgtgatgaattgctttgacttctgacacctcgtatgaaaactgcacgtgcagtctgattatttagcaagactgaggctt

SEQ ID NO: 1311 - DNA, 3676 bp, Homo sapiens
ggccgagggggcatcatgaagcgggctggcggcgctgccgctcccgggcggccgcgggcgggaggtgcttcccaaggaccgtagatgcctctctagagcatgagctcaggcaagagtgcccgctacaaccgcttctccggggggcccagcaatcttcccaccccagacgtcaccacagggaccagaatggaaacgaccttcggacccgccttttcagccgtcaccaccatcacaaaagctgacgggaccagcacctacaagcagcactgcaggacaccctcctcctccagcacccttgcctactccccgcgggacgaggaggacagcatgccccccatcagcactccccgccgctccgactccgccatctctgtccgctccctgcactcagagtccagcatgtctctgcgctccacattctcactgcccgaggaggaggaggagccggagccactggtgtttgcggagcagccctcggtgaagctgtgctgtcagctctgctgcagcgtcttcaaagaccccgtgatcaccacgtgtgggcacacgttctgtaggagatgcgccttgaagtcagagaagtgtcccgtggacaacgtcaaactgaccgtggtggtgaacaacatcgcggtggccgagcagatcggggagctcttcatccactgccggcacggctgccgggtagcgggcagcgggaagccccccatctttgaggtggacccccgagggtgccccttcaccatcaagctcagcgcccggaaggaccacgagggcagctgtgactacaggcctgtgcggtgtcccaacaaccccagctgccccccgctgctcaggatgaacctggaggcccacctcaaggagtgcgagcacatcaaatgcccccactccaagtacgggtgcacgttcatcgggaaccaggacacttacgagacccacctggagacttgccgcttcgagggcctgaaggagtttctgcagcagacggatgaccgcttccacgagatgcacgtggctctggcccagaaggaccaggagatcgccttcctgcgctccatgctgggaaagctctcggagaagatcgaccagctagagaagagcctggagctcaagtttgacgtcctggacgaaaaccagagcaagctcagcgaggacctcatggagttccggcgggacgcatccatgttaaatgacgagctgtcccacatcaacgcgcggctgaacatgggcatcctaggctcctacgaccctcagcagatcttcaagtgcaaagggacctttgtgggccaccagggccctgtgtggtgtctctgcgtctactccatgggtgacctgctcttcagtggctcctctgacaagaccatcaaggtgtgggacacatgtaccacctacaagtgtcagaagacactggagggccatgatggcatcgtgctggctctctgcatccaggggtgcaaactctacagcggctctgcagactgcaccatcattgtgtgggacatccagaacctgcagaaggtgaacaccatccgggcccatgacaacccggtgtgcacgctggtctcctcacacaacgtgctcttcagcggctccctgaaggccatcaaggtctgggacatcgtgggcactgagctgaagttgaagaaggagctcacaggcctcaaccactgggtgcgggccctggtggctgcccagagctacctgtacagcggctcctaccagacaatcaagatctgggacatccgaacccttgactgcatccacgtcctgcagacgtctggtggcagcgtctactccattgctgtgacaaatcaccacattgtctgtggcacctacgagaacctcatccacgtgtgggacattgagtccaaggagcaggtgcggaccctcacgggccacgtgggcaccgtgtatgccctggcggtcatctcgacgccagaccagaccaaagtcttcagtgcatcctacgaccggtccctcagggtctggagtatggacaacatgatctgcacgcagaccctgctgcgtcaccagggcagtgtcaccgcgctggctgtgtcccggggccgactcttctcaggggctgtggatagcactgtgaaggtttggacttgctaacaggatccaggccaggctgtggtttcccctgaaccagccctggacctttctgagccaggctggccacatggggtggtctcggggtttctgcctgccccgtgggcataggtggacaggctctggcagccgggcagtgccctccccgtcccatgctcggcgagcctccctctactcggcactgtccttgctgcccagcccctctctgggtgccaggtacgacgcttgccccggcccaccctccatccccaccctccatccccaccctagatggagcgagggcctttttactcaccttttctaccgtttttagactgtatgtagatttggttacctcctggttgaaataaatgctccacagactgtggctgtgagtggggacagctcctcgggacaagggggctgtgtgtggccttgaggttggtgtgcacaggcactggctgctgtgagtgggggggcatggggcagtttcctttggtggaccccaggacttcggcccactccggggcctcccctccctgctaggaggcaactcgtcacacccaagctgctggcctccagtcccatctcccccaacacatgtgcccccaaaaagtgagccaggcacctctgtttcctgctgtttattgacagccgacggcagcgccttgcccagacctcccctgcccacctgctggagcccagcctgtgccgccctctgaggagaggcctggggggacagctgggcacgtccactcgcagggaaacacggggtgagacagcaggaaggggccctgcacgccgggacgccacctccgccagccgcctccacccgccccacaccacaatcgctggttttcggcattttttaaattttttttttaagaaacgtcaaagttgtgcccaacactgtggatcagcaaacacgatagaggagaccagtcagtacttcttggagggggcaggaggagagaggaaaagggagggcgagaatgaccacacaacacagccttggaccatgagcagaagcgtccgtgggaactccactggggtggatgggctgcctgcacagcccctggagagggggccaggcacaccctcagaggagctgcaagcccgtggcctggcctgctacatgccctgcttccacgtggctgccacgctgacacacccacattcaccaaacccacccgcgccctgggacgcagccacgccaggaggaggacacggccgccgagagcaaggcacaacctcgagttcttggggcgcagagaacttaggagagaagcacggaggagcccccggcagagcacccgcccccgggccccagccttccacctgtgctagcagcctggggcctccactctggccggaggaaggaccgcaggcagacagcctgggcctctaacagcttttgtccggagctagacttcgtgtcctttcagttggtaaatggttttctatagaatcaataatatttctttctttaaatatatatttgttaaagttatacctttttgtttctctggggaaatccgcctcagctcattcccaataaattaatactcttgatagcttaaaaaaaaaa

SEQ ID NO: 1312 - protein, 670 aa, Homo sapiens
MSSGKSARYNRFSGGPSNLPTPDVTTGTRMETTFGPAFSAVTTITKADGTSTYKQHCRTPSSSSTLAYSPRDEEDSMPPISTPRRSDSAISVRSLHSESSMSLRSTFSLPEEEEEPEPLVFAEQPSVKLCCQLCCSVFKDPVITTCGHTFCRRCALKSEKCPVDNVKLTVVVNNIAVAEQIGELFIHCRHGCRVAGSGKPPIFEVDPRGCPFTIKLSARKDHEGSCDYRPVRCPNNPSCPPLLRMNLEAHLKECEHIKCPHSKYGCTFIGNQDTYETHLETCRFEGLKEFLQQTDDRFHEMHVALAQKDQEIAFLRSMLGKLSEKIDQLEKSLELKFDVLDENQSKLSEDLMEFRRDASMLNDELSHINARLNMGILGSYDPQQIFKCKGTFVGHQGPVWCLCVYSMGDLLFSGSSDKTIKVWDTCTTYKCQKTLEGHDGIVLALCIQGCKLYSGSADCTIIVWDIQNLQKVNTIRAHDNPVCTLVSSHNVLFSGSLKAIKVWDIVGTELKLKKELTGLNHWVRALVAAQSYLYSGSYQTIKIWDIRTLDCIHVLQTSGGSVYSIAVTNHHIVCGTYENLIHVWDIESKEQVRTLTGHVGTVYALAVISTPDQTKVFSASYDRSLRVWSMDNMICTQTLLRHQGSVTALAVSRGRLFSGAVDSTVKVWTC

SEQ ID NO: 1313 - DNA, 5695 bp, Homo sapiens
cgcagccgcgtcgctgcggccccggccgcgcaatggggaaggagcaggagctggtgcaggcggtgaaggcggaggacgtagggaccgcgcagaggctgctgcagaggccgcggcccgggaaggccaagctcctgggttccaccaagaagatcaatgtcaacttccaggacccggatgggttctcggctctgcaccatgcggccctgaacggcaacacggaattgatcagcctgctgctggaggcccaggccgctgtggacatcaaggacaacaaaggcatgcggccgctgcactatgcggcctggcagggccggaaggagcccatgaagctggtgctgaaggcgggctcggccgtgaacatcccgtctgatgagggccacatccccctgcacctggcggcccagcatggtcactatgatgtgtctgagatgctgctacagcaccagtctaacccgtgcatggtggacaactcggggaagacgcccctggacctggcctgcgagttcggccgcgttggggtggtccagctgctcctcagcagcaatatgtgtgcggcgctgctggagccccggccgggagacgccaccgaccccaacggcaccagccctttgcacctcgcagctaaaaacggccacatcgacatcatcaggctcctcctccaagccggcatcgacattaaccgccagaccaagtccggcacggccctgcacgaggctgcgctctgcggaaagacagaggtggtgcggctgctgctggatagcgggatcaatgcccacgtgaggaacacctacagccagacagccctggacatcgtgcaccagttcaccacgtcccaggccagcagggagatcaagcagctgttgcgagaggcctcagcggccctgcaggtccgggcgaccaaggattattgcaacaattacgacctgaccagcctcaacgtgaaggcaggggacatcatcacagtcctcgagcagcatccggatggccggtggaagggctgcatccatgacaaccggacgggcaatgaccgggtgggctacttcccgtcctccctgggcgaggccattgtcaagcgagcaggttcccgagcaggcactgaaccaagcctgccccagggaagcagctcatcgggaccctctgcacccccagaggagatctgggtgctgaggaagccttttgcaggtggggaccgaagcggcagcattagcggcatggctggcggccggggcagcgggggtcacgccctacacgcgggctctgaaggcgtcaagctcctggcaacggtgctttcccagaagtccgtctctgagtccggcccgggggacagccccgccaagcctccggaaggctctgcaggtgtggcccggtcccagcctccagtggcccacgccgggcaggtctatggggagcagccgcccaagaagctggagccagcatcggagggcaagagctctgaggccgtgagccagtggctcaccgcgttccagctgcagctctacgcccccaacttcatcagcgccggctacgacctgcccaccatcagccgcatgactcccgaggacctcacggccattggtgtcaccaagccgggccaccggaagaagatcgcggcagagatcagcggcctaagcatccctgactggctgcctgagcacaaacccgctaacctggccgtgtggctgtccatgatcggcctggcccagtactacaaggtgttggtggacaatggctacgagaacattgatttcatcaccgacatcacctgggaggacctgcaggagatcggcatcaccaagctggggcaccagaagaagctgatgctcgctgtgaggaagctggcagagctgcagaaggctgaatacgccaagtatgaggggggccccctgcgccggaaggcgccccagtctcttgaagtgatggccatcgagtcgccgcccccgcctgagcccacaccggccgactgccagtcccctaaaatgaccaccttccaggacagcgagctcagtgacgagctgcaggctgccatgactggcccggctgaggtggggcccaccactgagaagccctccagccacctgccacccaccccgagggccaccacgcggcaggactccagcctgggtggtcgggcacggcacatgagcagctcgcaggagctgctgggagatgggccccctgggcccagcagccccatgtctcgaagccaggagtacctcctggatgagggccccgcccccggcaccccgcccagggaggcccggcccggccgccacggccacagcatcaagagggccagcgtgccccccgtgcctggcaagccacggcaggtcctcccaccaggcactagccacttcacgcccccccagacgcccaccaaaacccgaccaggctctccccaggcccttgggggacctcatggtccagccccagctacggccaaggtgaagcccaccccgcagctgctgccgccgacagagcgccccatgtcaccccgctccctgcctcagtcaccgacgcaccgcggctttgcctacgtgctgccccagcccgtggagggcgaggtggggccggctgccccggggcctgcgcccccacccgtgccgacggctgtgcccacactgtgcctgccccctgaggccgacgcggagccggggcggcccaagaagcgggcccacagcctgaatcgctatgcggcgtccgacagcgagccggagcgggacgagctgctggtgcctgcggctgccggcccctatgccacggtccagcggcgcgtgggccgcagccactcagtgagggcgcccgcaggtgccgacaagaacgtcaaccgcagccagtcctttgccgtgcggccccgaaagaaggggcccccgccgcccccacccaagcgctccagctcggccctggctagtgccaacctggcggatgagccggtgcctgacgccgagcctgaggatggcctgctgggggtccgggcacagtgccggcgggccagtgacctggccggcagcgtggacacgggtagtgccggcagtgtgaagagcatcgcggccatgctggagctgtcctccattgggggtgggggccgggctgcccgcaggcctcctgagggccaccccactccccgccctgccagcccagagccgggccgggtggccaccgtgctggcctcagtgaaacacaaagaggccatcgggcctggcggggaggtggtgaaccggcgccgcacgctcagcgggccagtcaccggacttctggccactgcccgccgggggcctggggagtcggcagacccaggcccctttgtggaggatggcactggccggcagcggcctcggggtccctccaagggcgaggcgggtgtcgaaggcccgcccttggccaaggtggaagccagcgccacactcaagaggcgcatccgggccaagcagaaccagcaggagaacgtcaagttcatcctgaccgagtctgacacggtcaagcgcaggcccaaggccaaggagcgggaggccgggcctgagccaccaccgccactgtccgtgtaccataatggcactggcaccgtgcgccgccgaccggcctcggagcaggctgggcctccggagctgcctccaccgcccccgcctgccgaacccccgcccaccgacctggcgcacctacccccattgcccccgcccgagggcgaagcccggaagccggccaagccgcctgtctctcccaagcccgtcctgacgcagcctgtgcccaagctccagggctcgcccacacccacctccaagaaggtgccgctgccaggccctggcagcccagaggtgaagcgcgcccacggcacgccaccgcccgtgtctcccaagccgccgccgccgcccacagcgcccaagcccgtcaaggcggtcgcggggctgccttcgggcagcgccggcccttcacccgcaccctcgcccgcgcgacagccgcccgccgccctcgccaagccgcccggtacgccgccctcgctgggcgccagccccgccaagcccccgtcccccggcgcgcccgcgctgcacgtgcccgccaagcccccgcgagccgccgccgccgccgccgccgccgccgccgcgccccccgccccgcccgaaggcgcctcgccaggggacagcgcccggcagaaactggaggagacaagcgcgtgcctggccgcggcgctgcaggcggtggaggagaagatccggcaggaggacgcgcagggcccgcgcgactcggcggcggaaaagagcactggcagcatcctggacgacatcggcagcatgttcgacgacctggccgaccagctggatgccatgctggagtgaacgccgcctggccgggccctcccgcgccgcccgggccctccccgcacactgacctatacctcaggatgggcgcgtctgggcgcggcgcgagcggccgggcagggccctgcagaagcacaactccggcccctggacccgggccggggcgcccaccggggaccgcctggccgggggctccaagggctctaggcagaccctgcgcccgcgggtcctccccacctgctgctccccgtgcaatacctgctgggcctcctgcccgcgcgggaggggagggcgccccgggaccagggatggggcagcgcacaggcccgggcccagcacagaactgcccatcgggacgcccggccagccgctcgggcgcagcacaagggacaggggaccaaggtcagggcccccctgccccaccgcacccccagaatataagctatcaagagtattaatttattgggaatgagctgaggcggatttccccagagaaacaaaaaggtataactttaacaaatatatatttaaagaaagaaatattattgattctatagaaaaccatttaccaactgaaaggacacgaagtctagctccggacaaaagctgttagaggcccaggctgtctgcctgcggtccttcctccggccagagtggaggccccaggctgctagcacaggtggaaggctggggcccgggggcgggtgctctgccgggggctcctccgtgcttctctcctaagttctctgcgccccaagaactcgaggttgtgccttgctctcggcggccgtgtcctcctcctggcgtggctgcgtcccagggcgcgggtgggtttggtgaatgtgggtgtgtcagcgtggcagccacgtggaagcagggcatgtagcaggccaggccacgggcttgcagctcctctgagggtgtgcctggccccctctccaggggctgtgcaggcagcccatccaccccagtggagttcccacggacgcttctgctcatggtccaaggctgtgttgtgtggtcattctcgccctcccttttcctctctcctcctgccccctccaagaagtactgactggtctcctctatcgtgtttgctgatccacagtgttgggcacaactttgacgtttcttaaaaaaaaaatttaaaaaatgccgaaaaccagcgattgtggtgtggggcgggtggaggcggctggcggaggtggcgtcccggcgtgcagggccccttcctgctgtctcaccccgtgtttccctgcgagtggacgtgcccagctgtccccccaggcctctcctcagagggcggcacaggctgggctccagcaggtgggcaggggaggtctgggcaaggcgctgccgtcggctgtcaataaacagcaggaaac

SEQ ID NO: 1314 - protein, 1431 aa, Homo sapiens
MGKEQELVQAVKAEDVGTAQRLLQRPRPGKAKLLGSTKKINVNFQDPDGFSALHHAALNGNTELISLLLEAQAAVDIKDNKGMRPLHYAAWQGRKEPMKLVLKAGSAVNIPSDEGHIPLHLAAQHGHYDVSEMLLQHQSNPCMVDNSGKTPLDLACEFGRVGVVQLLLSSNMCAALLEPRPGDATDPNGTSPLHLAAKNGHIDIIRLLLQAGIDINRQTKSGTALHEAALCGKTEVVRLLLDSGINAHVRNTYSQTALDIVHQFTTSQASREIKQLLREASAALQVRATKDYCNNYDLTSLNVKAGDIITVLEQHPDGRWKGCIHDNRTGNDRVGYFPSSLGEAIVKRAGSRAGTEPSLPQGSSSSGPSAPPEEIWVLRKPFAGGDRSGSISGMAGGRGSGGHALHAGSEGVKLLATVLSQKSVSESGPGDSPAKPPEGSAGVARSQPPVAHAGQVYGEQPPKKLEPASEGKSSEAVSQWLTAFQLQLYAPNFISAGYDLPTISRMTPEDLTAIGVTKPGHRKKIAAEISGLSIPDWLPEHKPANLAVWLSMIGLAQYYKVLVDNGYENIDFITDITWEDLQEIGITKLGHQKKLMLAVRKLAELQKAEYAKYEGGPLRRKAPQSLEVMAIESPPPPEPTPADCQSPKMTTFQDSELSDELQAAMTGPAEVGPTTEKPSSHLPPTPRATTRQDSSLGGRARHMSSSQELLGDGPPGPSSPMSRSQEYLLDEGPAPGTPPREARPGRHGHSIKRASVPPVPGKPRQVLPPGTSHFTPPQTPTKTRPGSPQALGGPHGPAPATAKVKPTPQLLPPTERPMSPRSLPQSPTHRGFAYVLPQPVEGEVGPAAPGPAPPPVPTAVPTLCLPPEADAEPGRPKKRAHSLNRYAASDSEPERDELLVPAAAGPYATVQRRVGRSHSVRAPAGADKNVNRSQSFAVRPRKKGPPPPPPKRSSSALASANLADEPVPDAEPEDGLLGVRAQCRRASDLAGSVDTGSAGSVKSIAAMLELSSIGGGGRAARRPPEGHPTPRPASPEPGRVATVLASVKHKEAIGPGGEVVNRRRTLSGPVTGLLATARRGPGESADPGPFVEDGTGRQRPRGPSKGEAGVEGPPLAKVEASATLKRRIRAKQNQQENVKFILTESDTVKRRPKAKEREAGPEPPPPLSVYHNGTGTVRRRPASEQAGPPELPPPPPPAEPPPTDLAHLPPLPPPEGEARKPAKPPVSPKPVLTQPVPKLQGSPTPTSKKVPLPGPGSPEVKRAHGTPPPVSPKPPPPPTAPKPVKAVAGLPSGSAGPSPAPSPARQPPAALAKPPGTPPSLGASPAKPPSPGAPALHVPAKPPRAAAAAAAAAAAPPAPPEGASPGDSARQKLEETSACLAAALQAVEEKIRQEDAQGPRDSAAEKSTGSILDDIGSMFDDLADQLDAMLE

SEQ ID NO: 1315 - DNA, 1655 bp, Homo sapiens
cgatcgactcgctccggctcccctcgccgtcctggacacggcggagtgcggagccgcccgtaagatgctctgacctttgacccctgccgttcagctctagggcccgtgcaggccacaccatgaacacctccccaggcacggtgggcagtgacccggtcatcctggccactgcaggctacgaccacaccgtgcgcttctggcaggcccacagcggcatctgcacccggacggtgcagcaccaggactcccaggtgaatgccttggaggtcacaccggaccgcagcatgattgctgctgcaggttaccagcacatccgcatgtatgatctcaactccaataaccctaaccccatcatcagctacgacggcgtcaacaagaacatcgcgtctgtgggcttccacgaagacggccgctggatgtacacgggcggcgaggactgcacagccaggatctgggacctcaggtcccggaacctgcagtgccagcggatcttccaggtgaacgcacccattaactgcgtgtgcctgcaccccaaccaggcagagctcatcgtgggtgaccagagcggggctatccacatctgggacttgaaaacagaccacaacgagcagctgatccctgagcccgaggtctccatcacgtccgcccacatcgatcccgacgccagctacatggcagctgtcaatagcaccggaaactgctatgtctggaatctgacggggggcattggtgacgaggtgacccagctcatccccaagactaagatccctgcccacacgcgctacgccctgcagtgtcgcttcagccccgactccacgctcctcgccacctgctcggctgatcagacgtgcaagatctggaggacgtccaacttctccctgatgacggagctgagcatcaagagcggcaaccccggggagtcctcccgcggctggatgtggggctgcgccttctcgggggactcccagtacatcgtcactgcttcctcggacaacctggcccggctctggtgtgtggagactggagagatcaagagagagtatggcggccaccagaaggctgttgtctgcctggccttcaatgacagtgtgctgggctagcctgtgacccctcgggactgcctggtgcaggtggtggcagctggagggacccatgcagcacccaggtcagagcagaccctcccctgccggcctgcgccagctggacctgatggccccctgtggcgccttgacctgctgggccaggctgccctgggactctcagcccccagttgcttatccagatgtgacagagctcgacccaagccaggctgcacactcctggactgggctagcctgcactgcctgggaaagtcggccgagggcccaaagctgctgaggggtctgaggctggtgcccacccccaagctagtgtgttctctgcccctccctgcccgcgtttcagggcctcggtccatagagaacaccaccaccatggccaggtggaagggtttattagtccctgccagcagctgtcctccctggtgcaggtggcctggccagcccactggattggggacgggccaggctgggccaggtcgggggctcagtctgggaggtaataaaagcagaccgacacgcagatgttgctcgggaagcagaaaaaaaaaaaaaaaa

SEQ ID NO: 1316 - protein, 326 aa, Homo sapiens
MNTSPGTVGSDPVILATAGYDHTVRFWQAHSGICTRTVQHQDSQVNALEVTPDRSMIAAAGYQHIRMYDLNSNNPNPIISYDGVNKNIASVGFHEDGRWMYTGGEDCTARIWDLRSRNLQCQRIFQVNAPINCVCLHPNQAELIVGDQSGAIHIWDLKTDHNEQLIPEPEVSITSAHIDPDASYMAAVNSTGNCYVWNLTGGIGDEVTQLIPKTKIPAHTRYALQCRFSPDSTLLATCSADQTCKIWRTSNFSLMTELSIKSGNPGESSRGWMWGCAFSGDSQYIVTASSDNLARLWCVETGEIKREYGGHQKAVVCLAFNDSVLG

SEQ ID NO: 1317 - DNA, 1013 bp, Homo sapiens
gacaggcatcccccaggtgggaggaggggctgtcctggctctgacctggatatcagatccagagctgagggggaggtgcagggtcaggaggggaggggttctgttctgagtttcccctggccaaggctgcagacaagggacgcagacaatcggcacattgtgagcaggggctgcaggatggaaccagcaagctgctgtgctgagcgccccaaacctgggcctacaggggtgaagaccaagccctcctgcgggggctggagagccgtgggcctgctcctgctgctgctgctgctggtgctggccgctgtggggattgtggctggagggcttcttggctctgctcagggccctcccaagccaaggctgcagacgctgcgaatgaccctcccgagcccccacatgccccggcccaaccaaaccatcctggtggacgtggcccggaacgcggcgaccatcacagtgaccccacctcagagcaaccacagctgggcggtgctgttcgacgggcagagcggctgcatctgttaccgccctgaggagcaccaggtctgcttcctccgcctgatggaggacagtgatcgggagaccctgcggctgctggtggatacctccaaggtccaagaggcttgggtccccagccaggacacccaccacacccaggagctgctggcagtgcaggggagcctcgaagtggaccccgcccaggcgggggctttggtgcagcgcctgtgcatgaggacccccatctactgggcccggcgagcagaggggccccggagacagcggctgatttatctctgcatcgacatctgcttcccgagcaacatctgcgtgtcggtctgcttttattacctcccagactgagcccccgacctggcccagcctggcccgtccccaatccagtgggctggccaggccacctgcaccagggaggacagctgctggcagggactaataaacccttccacctggcaaaaaaaaaaaaaaaaaaaaaaaaaaaaaaaaaaaaaaaa

SEQ ID NO: 1318 - protein, 228 aa, Homo sapiens
MEPASCCAERPKPGPTGVKTKPSCGGWRAVGLLLLLLLLVLAAVGIVAGGLLGSAQGPPKPRLQTLRMTLPSPHMPRPNQTILVDVARNAATITVTPPQSNHSWAVLFDGQSGCICYRPEEHQVCFLRLMEDSDRETLRLLVDTSKVQEAWVPSQDTHHTQELLAVQGSLEVDPAQAGALVQRLCMRTPIYWARRAEGPRRQRLIYLCIDICFPSNICVSVCFYYLPD

SEQ ID NO: 1319 - DNA, 2573 bp, Homo sapiens
atgacgacatggtcgtaaatccgccatcttcctgcggcgcgttgcgacatggagggcgcgatggcagtgcgggtgacggccgctcatacggcagaagcccaggccgaagccgggcgggaagcgggcgagggtgcagttgcggcggtggcggcggccttggcccccagcggcttcctcggcctcccggcgcccttcagcgaggaagatgaggacgatgtgcacagatgcggccgctgccaggcagagttcaccgccttggaggattttgttcagcacaagattcagaaggcctgccagcgggcccctccggaggccctgcctgccacccctgccaccacagcgttgctgggccaggaggtggtgccggcagcaccaggcccagaggagcccatcactgtggcccacatcgtggtggaggcggcctctctggcagcagacatcagccacgcatctgaccttgttggtggtgggcacatcaaagaggtcatcgtggctgctgaggcggagctgggagacggtgagatggccgaggccccgggcagcccccgccagcaggggctggggctcgcaggggagggtgagcaggcccaggtgaagctactggtgaacaaggatggccgctatgtgtgtgcgctgtgccacaagaccttcaagacgggcagcatcctcaaggcccacatggtcactcacagcagccgcaaggaccacgagtgcaagctctgtggggcctccttccgcaccaagggctcactcatccggcaccaccggcggcacacggatgagcgcccctacaagtgctccaagtgtggaaagagcttccgggagtcgggtgcactgacccggcacctcaagtctctcaccccctgcacagagaaaatccgcttcagtgtgagcaaggacgtggttgtcagcaaagaggacgcacgtgcaggttctggagctggagctgccggcttggggacagccacatcatcggtgacaggcgagcctatagagacttcacccgtgattcacctggtgacagatgccaagggcaccgtcatccacgaagtccacgtccagatgcaggagctgtccctgggcatgaaagccctggccccagagccccccgtctcccaggagctcccctgctccagcgagggcagccgtgagaacctgctgcaccaggccatgcagaactccggcatcgtccttgagcgcgctgctggggaggagggtgccctggagccagctcctgctgccgggtccagtccccagcccctggcagtggcagccccgcagctgccggtactggaagtgcagccgctggagacacaggtggccagcgaggcctcagcggtgcccaggacccacccatgtcctcagtgcagtgagaccttcccgacagcagccaccctggaggcccacaagaggggccacaccgggccgaggccgttcgcctgcgcgcagtgtggcaaggccttccccaaggcctacctgctcaagaagcaccaggaggtgcacgtgcgtgagcgccgcttccgctgtggcgactgcgggaagctctacaagaccattgcccatgtgcgtggccaccggcgcgtccactcagacgagcggccctacccttgtcccaagtgtggcaagcgctacaagactaagaacgcacagcaggtgcacttcaggacacacctggaggagaagccgcacgtgtgccagttctgcagccgtggcttccgagagaagggctcactggtgcggcacgtgcgacaccacacaggcgagaagccgttcaagtgctacaagtgcggccgtggcttcgccgagcacggcacgctgaaccggcacctgcgcaccaaagggggctgcctgctggaggtggaggagttgctggtgtctgaggacagccccgcggcagccaccaccgtcctcacggaagacccgcacacagtgttggtggagttctcgtccgtggtagctgacacccaggagtatatcatcgaggccactgcggacgatgcggagaccagtgaggccacggagatcatcgagggcacccagacagaggtggacagccacatcatgaaggtggtgcagcagatcgtgcaccaggctagcgccggccaccagatcatcgtgcagaacgtcaccatggacgaggagacggcgctgggcccagaggcggctgccgccgacaccatcaccatcgccacccccgagagcctgacagagcaggtggccatgacgctggcctcggccatcagcgagggcactgtgcttgccgcccgggcagggacaagtggcactgaacaggccactgtgaccatggtgtcatcagaggacatcgagatcctggagcatgcaggcgagctggtcatcgcctcgccggagggccagctggaggtgcagacggtcatcgtctagcatgaggtctgcggggtcctggccgggcagggacagggcagaggactctgagcgccccacccatgcctgcctggcctggtagagaagatggcacaggatggaggcgccccaagacggacagtgtacataagagtttcttgttgctttacaataaaacatgagaacctgca

SEQ ID NO: 1320 - protein, 784 aa, Homo sapiens
MEGAMAVRVTAAHTAEAQAEAGREAGEGAVAAVAAALAPSGFLGLPAPFSEEDEDDVHRCGRCQAEFTALEDFVQHKIQKACQRAPPEALPATPATTALLGQEVVPAAPGPEEPITVAHIVVEAASLAADISHASDLVGGGHIKEVIVAAEAELGDGEMAEAPGSPRQQGLGLAGEGEQAQVKLLVNKDGRYVCALCHKTFKTGSILKAHMVTHSSRKDHECKLCGASFRTKGSLIRHHRRHTDERPYKCSKCGKSFRESGALTRHLKSLTPCTEKIRFSVSKDVVVSKEDARAGSGAGAAGLGTATSSVTGEPIETSPVIHLVTDAKGTVIHEVHVQMQELSLGMKALAPEPPVSQELPCSSEGSRENLLHQAMQNSGIVLERAAGEEGALEPAPAAGSSPQPLAVAAPQLPVLEVQPLETQVASEASAVPRTHPCPQCSETFPTAATLEAHKRGHTGPRPFACAQCGKAFPKAYLLKKHQEVHVRERRFRCGDCGKLYKTIAHVRGHRRVHSDERPYPCPKCGKRYKTKNAQQVHFRTHLEEKPHVCQFCSRGFREKGSLVRHVRHHTGEKPFKCYKCGRGFAEHGTLNRHLRTKGGCLLEVEELLVSEDSPAAATTVLTEDPHTVLVEFSSVVADTQEYIIEATADDAETSEATEIIEGTQTEVDSHIMKVVQQIVHQASAGHQIIVQNVTMDEETALGPEAAAADTITIATPESLTEQVAMTLASAISEGTVLAARAGTSGTEQATVTMVSSEDIEILEHAGELVIASPEGQLEVQTVIV

SEQ ID NO: 1321 - DNA, 1365 bp, Homo sapiens
gtgcagtcctgtgtcggacacgcccgcagcctggacccgggatccccatccccctaggatctctgagcctcgggcctctgcacccacatccaaggcggcagcgtctgtccctcccagcctctcgctccgcgccatgggcgggccccgggctctgctggccgcactctgggcgctggaagccgccgggaccgccgcgcttcgcatcggagccttcaacattcagagcttcggtgacagcaaagtgtcggaccccgcttgcggcagcatcatcgcgaagatcctggctggctatgacctcgcgctggtgcaggaggtgcgagacccagacctcagcgccgtgtccgcgctcatggagcagatcaacagcgtgtccgagcacgagtacagctttgtgagcagccagcccctgggccgggaccagtacaaggagatgtacctgttcgtgtacaggaaagacgcggtgtcggtcgtggacacctacctgtacccagaccccgaggacgtcttcagccgcgagcccttcgtggtcaagttctcggcccccggcaccggtgagcgggccccgcccctcccctcccgccgagctctgacgcccccaccccttcccgcagcagcacagaacctggtgctgatcccgctgcacgcggcgccgcatcaagccgtggcggagatcgacgcgctctacgacgtgtacctggacgtgatcgacaagtggggcaccgacgacatgctgttcctgggcgacttcaacgccgactgcagctatgtgcgggcgcaggactgggccgccatccgtctgaggagcagtgaggtcttcaagtggctcatccctgacagcgccgacaccacggtgggcaactcagactgcgcctacgaccgcattgtggcctgtggcgcccgcctgcgccggagcctgaagccccagtcggccaccgtgcacgacttccaggaggaattcggcctggaccagactcaggctcttgccatcagcgaccactttccagtggaggtgaccctcaagttccaccgatgactcgaggcctggctggggcatgccacctgcagaccctggctctgaggaatggcccaacagtggccccttcagggtggcagccacccttcagtgaggccccaaggcagagtcggctgggcgtggaccaggggccatggacacgtgatgtgctgctctgtacctccgttccccatctgtgggacgggctgcatccagcgacctcatggggtgttgtgagccccatgaggggtgcagggggcactgcccggcagatgtctgctcaataaatgagctgctcccggtcgggccccacaaaaaaaaaaaaaaaaaaaaaaaaaaaaaaaaaaaaaaaa

SEQ ID NO: 1322 - protein, 299 aa, Homo sapiens
MGGPRALLAALWALEAAGTAALRIGAFNIQSFGDSKVSDPACGSIIAKILAGYDLALVQEVRDPDLSAVSALMEQINSVSEHEYSFVSSQPLGRDQYKEMYLFVYRKDAVSVVDTYLYPDPEDVFSREPFVVKFSAPGTGERAPPLPSRRALTPPPLPAAAQNLVLIPLHAAPHQAVAEIDALYDVYLDVIDKWGTDDMLFLGDFNADCSYVRAQDWAAIRLRSSEVFKWLIPDSADTTVGNSDCAYDRIVACGARLRRSLKPQSATVHDFQEEFGLDQTQALAISDHFPVEVTLKFHR

SEQ ID NO: 1323 - DNA, 1043 bp, Homo sapiens
cagcccgcgacctttatcccgcgcgttgcggtcaagatggcgctggtggcttctgtgcgagtcccggcgcgcgttctgctccgcgcgggggcccggctcccgggcgcggccctcgggcggacggagcgggcggccggcggcggagacggcgcgcggcgcttcgggagccagcgggtgctggtggagccggacgcgggcgcaggggtcgctgtgatgaaattcaagaaccccccagtgaacagcctgagcctggagtttctgacggagctggtcatcagcctggagaagctggagaatgacaagagcttccgcggtgtcattctgacctcggaccgcccgggtgtcttctcggccggcctggacctgacggagatgtgtgggaggagccccgcccactacgctgggtactggaaggccgttcaggagctgtggctgcggttgtaccagtccaacctggtgctggtctccgccatcaacggagcctgccccgctggaggctgcctggtggccctgacctgtgactaccgcatcctggcggacaaccccaggtactgcataggactcaatgagacccagctgggcatcatcgcccctttctggttgaaagacaccctggagaacaccatcgggcaccgggcggcggagcgtgccctgcagctggggctgctcttcccgccggcggaggccctgcaggtgggcatagtggaccaggtggtcccggaggagcaggtgcagagcactgcgctgtcagcgatagcccagtggatggccattccagaccatgctcgacagctgaccaaggccatgatgcgaaaggccacggccagccgcctggtcacgcagcgcgatgcggacgtgcagaacttcgtcagcttcatctccaaagactccatccagaagtccctgcagatgtacttagagaggctcaaagaagaaaaaggctaacgattgggctgccacaggcttacggccacacgtgcccctgtgggtcccagggaggtcttaaacaaggtatttttcaacttaaaaaaaaaaaaaaaaaa

SEQ ID NO: 1324 - protein, 302 aa, Homo sapiens
MALVASVRVPARVLLRAGARLPGAALGRTERAAGGGDGARRFGSQRVLVEPDAGAGVAVMKFKNPPVNSLSLEFLTELVISLEKLENDKSFRGVILTSDRPGVFSAGLDLTEMCGRSPAHYAGYWKAVQELWLRLYQSNLVLVSAINGACPAGGCLVALTCDYRILADNPRYCIGLNETQLGIIAPFWLKDTLENTIGHRAAERALQLGLLFPPAEALQVGIVDQVVPEEQVQSTALSAIAQWMAIPDHARQLTKAMMRKATASRLVTQRDADVQNFVSFISKDSIQKSLQMYLERLKEEKG

SEQ ID NO: 1325 - DNA, 7732 bp, Homo sapiens
gcggccgcggcgggagcggcggcgcactcggggggaagcaggccccactagacgggccgcgccgacgggctccgcgcactcgcagcccggggcgcccccacccccagcgcccgccgccgcgggcagggccggcccggagcgcggggggcggccggggagcgcgagccgggggcgcccgccgaagctcgctgctccgggtcggggtccgggcccggggccggccgcgcgccgcctttgacgcatcggagcgcggctcctgcaggatggagggctccgcgccgccagcggagttgtttgtgcgcaggcggctcgcggggctgggagcgctcaaggtctgaacttccctccggagccgcagctggaggaggcgagcgcgcgaggaggagaagccgcgcggcgcggaggccaccctcggggcgagaggcgcggaaggcgagcgagcaaagcggtcccggagccacggcggccacgcggcggggacccccgggcgttctaggtactggtgaccccggccggggcaggccccgggactcgacaacatggcttccccaccccaccagcagctgctgcatcaccacagcaccgaggtgagctgcgactccagcggggacagcaacagcgtgcgcgtcaagatcaaccccaagcagctgtcctccaacagccaccccaagcactgcaaatacagcatctcctctagctgcagcagctctggggactccgggggcgtcccccggcgagtgggcggcggaggccggctgcgcaggcagaagaagctgccccagctgttcgagagggcctccagccgctggtgggaccccaagttcgactcggtgaacctggaggaggcctgcctggagcgctgcttcccgcagacccagcgccggttccggtatgcgctcttctacatcggcttcgcctgccttctgtggagcatctattttgcggtccacatgagatccagactgatcgtcatggtcgcccccgcgctgtgcttcctcctggtgtgtgtgggcttctttctgtttaccttcaccaagctgtacgcccggcattacgcgtggacctcgctggctctcaccctgctggtgttcgccctgaccctggctgcgcagttccaggtcttgacgcctgtctcaggacgcggcgacagctccaaccttacggccacagcccggcccacagatacttgcttatctcaagtggggagcttctccatgtgcatcgaagtgctctttttgctctataccgtcatgcacttacctttgtacctgagtttgtgtctgggggtggcctactctgtccttttcgagacctttggctaccatttccgggatgaagcctgcttcccctcgcccggagccggggccctgcactgggagctgctgagcagggggctgctccacggctgcatccacgccatcggggtccacctgttcgtcatgtcccaggtgaggtccaggagcaccttcctcaaggtggggcaatccattatgcacgggaaggacctggaagtggaaaaagccctcaaagagaggatgattcattccgtgatgccaagaatcatagccgatgacttaatgaagcagggagatgaggagagtgagaattctgtcaagaggcatgccacctcgagccccaagaacaggaagaaaaagtcttccatccaaaaagctcctatagccttccgcccttttaagatgcagcagatcgaagaagtcagtattttatttgcagatatcgtgggcttcaccaagatgagtgccaacaagtctgcccacgccctggtgggtctcctgaacgatctgttcggtcgcttcgaccgcctgtgtgaggagaccaagtgtgagaaaatcagcaccctgggagactgttactactgcgtggcgggctgtcccgagccccgggccgaccatgcctactgctgcatcgagatgggcctgggcatgatcaaggccatcgagcagttctgccaggagaagaaggagatggtgaacatgagagtcggggtgcacacgggcaccgtcctttgcggcatcctgggcatgaggaggtttaaatttgacgtgtggtccaacgatgtgaacctggccaatctcatggagcagctgggagtggccggcaaagttcacatttctgaggccaccgcaaaatacttagatgaccggtacgaaatggaagatgggaaagttattgaacggctgggccagagcgtggttgctgaccagttgaaaggtttgaagacatacctgatatcgggtcagagagccaaggagtctcgctgcagctgtgcagaggccttgctttctggctttgaggtcattgacggctcacaggtgtcctcaggccctaggggacaggggacagcgtcatcagggaatgtcagtgacttggcgcagactgtcaaaacctttgataaccttaagacctgcccttcgtgcggaatcacatttgctcccaaatctgaagccggcgccgagggaggagcacctcaaaacggctgccaagacgagcataaaaacagcaccaaggcttctggaggacctaatcccaaaactcagaacgggctcctcagccctccccaagaggagaagctcaccaacagtcagacttctctgtgtgagatcttgcaggagaagggaaggtgggcaggggtgagcctggaccagtcggctctccttccgctgaggttcaagaacatccgggagaaaacggacgcccactttgtggacgttatcaaagaagacagcctgatgaaagattacttttttaagccgcccattaatcagttcagcctgaacttcctggatcaggagctggagcgatcctacaggaccagctatcaggaagaggtcataaagaactcccccgtgaagacgtttgctagtcccaccttcagctccctcctggatgtgtttctgtcgaccacagtgtttctgacgctgtccaccacctgcttcctgaagtacgaggcggccaccgtgcctcccccgcccgccgccctggcggtcttcagtgcagccctgctgctggaggtgctgtccctcgcggtgtccatcaggatggtgttcttcctggaggacgtcatggcctgcaccaagcgcctgctggagtggatcgccggctggctaccacgtcactgcatcggggccatcctggtgtcgcttcccgcactggccgtctactcccatgtcacctccgaatatgagaccaacatacacttcccagtgttcacaggctcggccgcgctgattgccgtcgtgcactactgtaacttctgccagctcagctcctggatgaggtcctccctcgccaccgtcgtgggggccgggccgctgctcctgctctacgtctccctgtgcccagacagttctgtattaacttcgccccttgacgcagtacagaatttcagttccgagaggaacccgtgcaatagttcggtgccgcgtgacctccggcggcccgccagcctcatcggccaggaggtggttctcgtcttctttctcctgctcttgttggtctggttcctgaatcgcgaatttgaagtcagctaccgcctccactaccacggagacgtggaagcggatcttcaccgcaccaagatccagagcatgcgggaccaggcagactggctgctgaggaacatcatcccctaccacgtggctgagcagctgaaggtgtcccagacctactccaagaaccatgacagcggaggggtgatcttcgccagcatcgtcaacttcagcgagttctacgaggagaactacgagggcggcaaggagtgctaccgggtcctcaacgagctcatcggggactttgacgagctcctaagcaagccggactacagcagcatcgagaagatcaagaccatcggagccacgtacatggcggcgtcagggctgaacaccgcgcaggcccaggacggcagccacccgcaggagcacctgcagatcctgttcgagttcgccaaggagatgatgcgcgtggtggacgacttcaacaacaacatgctgtggttcaacttcaagctccgcgtcggcttcaaccatgggcccctcacggccggggtcatcggcaccaccaagctgctgtacgacatctggggagacaccgtcaacatcgccagcaggatggacaccaccggcgtggagtgccgcatccaggtgagcgaagagagctaccgcgtcttgagcaagatgggctatgacttcgactacagagggaccgtgaatgtcaaggggaaaggccagatgaagacctacctgtacccaaagtgcacggatcacagggtcatcccacagcaccagctgtccatctccccagacatccgcgtccaggtggatggcagcatcggacggtctcccacagacgagattgccaacctggtgccttctgtccagtatgtggacaagacatctctgggttctgacagcagcacgcaggccaaggatgcccacctgtcccccaagagaccgtggaaggagcccgtcaaagccgaagaaaggggtcgatttggcaaagccatagagaaagacgactgtgacgaaacaggaatagaagaagccaacgaactcaccaagctcaacgtttcaaagagtgtgtgaggcggcgcccacccgctgcccgaggtgctctgtttgtcgaaacacagtaatatttgtatttggctgttgtgctttccaagcgccacagttgccctccccggacgtggtgttatgtggtcatttcagccctaacttctgtgtggatcacagttattcagggttcattttcatccattcttccctttcgctcccttccctggaaaccccgctgcctctgggtcatccgttcagcacgtggtggagaacaagtgccttcagggctggcctcggcctcgagtctcgggacagaggccgccagtggagatcatggctttgggtattatttgacttttagaacaaaagctgtggttaagatctcatttttattgctttttcccacgtcccacgagacactattttcggttctctggctaataccctgtttttgagtttattttgtttctgtctatgtcacagtgttcctctacgacccgacctctctatgtaagcacacatgcgcacacacacttgcattcatgaatctgatataaagtgccagtaatccgccaagagggggtgcgaagggggcatgtcacgacagctccgccaccccccattgcccacccgcactttcccgagcaccgcgccccgtgggctgtgggtgagccgcgctccctgcactgagcgggtttaggggctcgcccacatgcatgcaggccaagacagcaaatgccagccgggcacgacgcccgtgtgcccaggcctcgggggtctcagagccgcctctcacccccgaccctccacccaggggtctccccatcgggagtggaggtgttggtcctggaagctgactcatcggagagggaaataccaaataaacatccgaggttgcatttatttatttatttatttacccggaagcatgtgcgctcccgggaggggtgctgggtcctcagggtggggggtcatagccacaggggagggcagttcccaggaaggtaaccagatgtctcttttgtgttttggccacctggggccgcccccaacctccccaccccaagaggggtctgagtgggacctcaaagcatggccagtgcaattctgaggctaggggaataggagaagcccaccagctgcccctgccacccacgggggctcctccctgccggggtccagctcagaaccacgggggtctgtgccggcagcaccggtgccatcttggcttccacaaattccagaagtttcttggctgcctcccgctctcagatggcacagggcctatcagtggcaggatttaatctggggagcaaattccagctctgaaatggagttctcacaccgtatctagggacagaggcatctggatgcaaacgcggggtttgttaggggcggaatcccgagggtggtgtgggggagctccgtccgggcagttggctgctggtcctgtctgattatgttttgccatattgagtctgaagtttgtgtggaagtgagctcgcccgagttgtccggtcggagttgtagccagtctttcaggggaccccgggacgctgatgaggcccagggtgcactccttgtcagtcttgcccgttgtccctgtgcattttgctttccgctgtcaaatctcactgtctcgttttcacaccgcatcagtccccatcatcactactcctccccagagacatacagattgccctccccggcatgaagaagtcacaattctgacccgccacctctccaggggcggtgcctgggatggccacccatcaggacagccagagccagggtcccggcgtcctgagagtccagggcacctccccccattagctgtaaggtttcctgtcaggtgtgactgtcagtttgctggtcttccaataccgaagaaagggtggttgtgacaatacctcttgcttctaaagaatgtattataaaacaccgcagatttttttttttccttaaaaaacactacctgatgctttccttgttcgtggggattgtggtcacatgaagctctttctgcatcagtattaaggtgtatatttgaatgtcctcccctcccctttcccctccaggctgtgtagctttgaggggctgggcgtttgctcacgaccttgctgtctcgctcagaacatgctccgcaaagttctccgcacacacttcttccccatcaagcccatttccttccccaaccacaaaggtgtttgtgattcctcaccccgggaaaccaaggagctgcaaagtggagtctggttcagccccgtgcagactcacccagagcttaacgttgtctttcaaacaccctgagccttcctaaacagccagtgcagacgttctctctgggccacgaagcccctcgggtcctccccgtcccctgctccgatgcatacctcagtgcagaaccacagaatctctgcagcggaaacgccgtgcatctcttgtctgttggcagcgagcacatcgtgctggagacacgagtttctaagcagctggcacgagggctgctgacggcatgggtcgtgcttcagggtggcaatacctcttaggaacttagggcaggaagcaatacttcagcattgaatgtgtgtaaatagttgctttgagttgcaattgctattttcttctcagtcccagctcagatcgaattatatatccatatatatatatatatatatatatatatatatatatatatatatatggtaaacaagcacacacaattttatccaatgcaaacaaatgtagagcatcagttacaaaaccctcgaatagcttgagagccccacaggctctgccacacccgtgacttcatccacactgacgtcacccgcgggggctccccctgcacatttgcacacgatccggagagccgaaggccgcgtgcttcctgtcacatgggctgtaatcatttgtagtttccaaagacacgtctgcatttgaatttctagattttcgaggtaaggagttttttttaattggttgtttggaaaatcacatcatgcctagaatctgaaattgaattagcaagaaccgactgtttgcattttccatatatccttttatctgctctttttaaattgttaattctaataatttcaaaatgcattcactgaagaaatggacattaaaatattctaaaatttaaataaaaaaaa

SEQ ID NO: 1326 - protein, 1353 aa, Homo sapiens
MASPPHQQLLHHHSTEVSCDSSGDSNSVRVKINPKQLSSNSHPKHCKYSISSSCSSSGDSGGVPRRVGGGGRLRRQKKLPQLFERASSRWWDPKFDSVNLEEACLERCFPQTQRRFRYALFYIGFACLLWSIYFAVHMRSRLIVMVAPALCFLLVCVGFFLFTFTKLYARHYAWTSLALTLLVFALTLAAQFQVLTPVSGRGDSSNLTATARPTDTCLSQVGSFSMCIEVLFLLYTVMHLPLYLSLCLGVAYSVLFETFGYHFRDEACFPSPGAGALHWELLSRGLLHGCIHAIGVHLFVMSQVRSRSTFLKVGQSIMHGKDLEVEKALKERMIHSVMPRIIADDLMKQGDEESENSVKRHATSSPKNRKKKSSIQKAPIAFRPFKMQQIEEVSILFADIVGFTKMSANKSAHALVGLLNDLFGRFDRLCEETKCEKISTLGDCYYCVAGCPEPRADHAYCCIEMGLGMIKAIEQFCQEKKEMVNMRVGVHTGTVLCGILGMRRFKFDVWSNDVNLANLMEQLGVAGKVHISEATAKYLDDRYEMEDGKVIERLGQSVVADQLKGLKTYLISGQRAKESRCSCAEALLSGFEVIDGSQVSSGPRGQGTASSGNVSDLAQTVKTFDNLKTCPSCGITFAPKSEAGAEGGAPQNGCQDEHKNSTKASGGPNPKTQNGLLSPPQEEKLTNSQTSLCEILQEKGRWAGVSLDQSALLPLRFKNIREKTDAHFVDVIKEDSLMKDYFFKPPINQFSLNFLDQELERSYRTSYQEEVIKNSPVKTFASPTFSSLLDVFLSTTVFLTLSTTCFLKYEAATVPPPPAALAVFSAALLLEVLSLAVSIRMVFFLEDVMACTKRLLEWIAGWLPRHCIGAILVSLPALAVYSHVTSEYETNIHFPVFTGSAALIAVVHYCNFCQLSSWMRSSLATVVGAGPLLLLYVSLCPDSSVLTSPLDAVQNFSSERNPCNSSVPRDLRRPASLIGQEVVLVFFLLLLLVWFLNREFEVSYRLHYHGDVEADLHRTKIQSMRDQADWLLRNIIPYHVAEQLKVSQTYSKNHDSGGVIFASIVNFSEFYEENYEGGKECYRVLNELIGDFDELLSKPDYSSIEKIKTIGATYMAASGLNTAQAQDGSHPQEHLQILFEFAKEMMRVVDDFNNNMLWFNFKLRVGFNHGPLTAGVIGTTKLLYDIWGDTVNIASRMDTTGVECRIQVSEESYRVLSKMGYDFDYRGTVNVKGKGQMKTYLYPKCTDHRVIPQHQLSISPDIRVQVDGSIGRSPTDEIANLVPSVQYVDKTSLGSDSSTQAKDAHLSPKRPWKEPVKAEERGRFGKAIEKDDCDETGIEEANELTKLNVSKSV

SEQ ID NO: 1327 - DNA, 2219 bp, Homo sapiens
gacccgaggccccggtccaatatggcgacctccacgggtcgctggcttctcctccggcttgcactattcggcttcctctgggaagcgtccggcggcctcgactcgggggcctcccgcgacgacgacttgctactgccctatccacgcgcgcgcgcgcgcctcccccgggactgcacacgggtgcgcgccggcaaccgcgagcacgagagttggcctccgcctcccgcgactcccggcgccggcggtctggccgtgcgcaccttcgtgtcgcacttcagggaccgcgcggtggccggccacctgacgcgggccgttgagcccctgcgcaccttctcggtgctggagcccggtggacccggcggctgcgcggcgagacgacgcgccaccgtggaggagacggcgcgggcggccgactgccgtgtcgcccagaacggcggcttcttccgcatgaactcgggcgagtgcctggggaacgtggtgagcgacgagcggcgggtgagcagctccggggggctgcagaacgcgcagttcgggatccgccgcgacgggaccctggtcaccgggtacctgtctgaggaggaggtgctggacactgagaacccatttgtgcagctgctgagtggggtcgtgtggctgattcgtaatggaagcatctacatcaacgagagccaagccacagagtgtgacgagacacaggagacaggttcctttagcaaatttgtgaatgtgatatcagccaggacggccattggccacgaccggaaagggcagctggtgctctttcatgcagacggccaaacggagcagcgtggcatcaacctgtgggaaatggcggagttcctgctgaaacaggacgtggtcaacgccatcaacctggatgggggtggctctgccacctttgtgctcaacgggaccttggccagttacccgtcagatcactgccaggacaacatgtggcgctgtccccgccaagtgtccaccgtggtgtgtgtgcacgaaccccgctgccagccgcctgactgccacggccacgggacctgcgtggacgggcactgccaatgcaccgggcacttctggcggggtcccggctgtgatgagctggactgtggcccctctaactgcagccagcacggactgtgcacggagaccggctgccgctgtgatgccggatggaccgggtccaactgcagtgaagagtgtccccttggctggcatgggccgggctgccagaggccttgtaagtgtgagcaccattgtccctgtgaccccaagactggcaactgcagcgtctccagagtaaagcagtgtctccagccacctgaagccaccctgagggcgggagaactctcctttttcaccaggaccgcctggctagccctcaccctggcgctggccttcctcctgctgatcagcactgcagcaaacctgtccttgctcctgtccagagcagagaggaaccggcgcctgcatggggactatgcataccacccgctgcaggagatgaacggggagcctctggccgcagagaaggagcagccagggggcgcccacaaccccttcaaggactgaagcctcaagctgcccggggtggcacgtcgcgaaagcttgtttccccacggtctggcttctgcaggggaaatttcaaggccactggcgtggaccatctgggtgtcctcagcccctgtggggcagccaagttcctgatagcacttgtgcctcagcccctcacctggccacctgccagggcacctgcaaccctagcaataccatgctcgctggagaggctcagctgcctgcttctggcctgcctgtgtctgctgccgagaagcccgtgcccccgggagggctgccgcactgccaaagagtctccctcctcctggggaaggggctgccaacgaaccagactcagtgaccacgtcatgacagaacagcacatcctggccagcacccctggctggagtgggttaaagggacgagtctgccttcctggctgtgacacgggaccccttttctacagacctcatcactggatttgccaactagaattcgatttcctgtcataggaagctccttggaagaagggatggggggatgagatcatgtttacagacctgttttgtcatcctgctgccaagaagttttttaatcacttgaataaattgatataataaaaggagccaccaggtggtgtgtggattctgaaaaaaaaaaaaaaaaaa

SEQ ID NO: 1328 - protein, 515 aa, Homo sapiens
MATSTGRWLLLRLALFGFLWEASGGLDSGASRDDDLLLPYPRARARLPRDCTRVRAGNREHESWPPPPATPGAGGLAVRTFVSHFRDRAVAGHLTRAVEPLRTFSVLEPGGPGGCAARRRATVEETARAADCRVAQNGGFFRMNSGECLGNVVSDERRVSSSGGLQNAQFGIRRDGTLVTGYLSEEEVLDTENPFVQLLSGVVWLIRNGSIYINESQATECDETQETGSFSKFVNVISARTAIGHDRKGQLVLFHADGQTEQRGINLWEMAEFLLKQDVVNAINLDGGGSATFVLNGTLASYPSDHCQDNMWRCPRQVSTVVCVHEPRCQPPDCHGHGTCVDGHCQCTGHFWRGPGCDELDCGPSNCSQHGLCTETGCRCDAGWTGSNCSEECPLGWHGPGCQRPCKCEHHCPCDPKTGNCSVSRVKQCLQPPEATLRAGELSFFTRTAWLALTLALAFLLLISTAANLSLLLSRAERNRRLHGDYAYHPLQEMNGEPLAAEKEQPGGAHNPFKD

SEQ ID NO: 1329 - DNA, 2603 bp, Homo sapiens
attaatccctgagacaaaggtactgaaggcaagtggctgaagaacaggcttgattggacagatgacttggagatgttcactggacagggacagccttgtgaagatctttgtgaatacccgacctcgcaagctccagagactacaataattcacttgccctaggttccaaagccagcaagtggaaaacggagactggaattccgcccacaggactccaaagcctgtgcagcaacaccccactcccccggcaggatcaccagcaggacgcgcgggagccaggaagtaagatccgtacctccaaggctcccatgggcccaagcctccgcatcaacagactgggagggattacgtggggtcccagggccggctctgaggcgggaaaactttctggaggcggcggcctcaggccggagcgggcgcacaccgactggaggggtcggattcagggatgtgggtggaccgcatttccccatcttccccgccgcgcacttcctctggtgcaatctccacaccccgcgccggcccgcctgcaacgcgccctggcactcaccggtgggcgaaatttccccgcctccacgtgagagccagctccgccgtgacccggaagtccacttcgagtcgccggcccaccctctcgggttccggcttcttccgggtcgcggccttccggcgaacgcggttaccgtggaaaccgcggccatggcggcaccgcggcaaatccccagccacatagtgcgcctcaagcccagctgctctacagactcgtcgttcacccggacgccggtgcccaccgtgtctctcgcgtcccgcgagctgcctgtctcgtcgtggcaggtcaccgagccgtcaagcaagaatctgtgggagcagatctgcaaggagtatgaagctgagcagcctccctttccagaaggatataaagtcaaacaggagcctgtgattacggttgcgccagtagaggaaatgctttttcatggcttcagtgcagagcactattttccggtttcccatttcaccatgatctcacgtacaccctgtcctcaagataaatcggaaacaatcaacccaaaaacatgttctcccaaagaatatttggaaactttcatctttcctgttctgcttcccggaatggctagcctgcttcaccaagcgaagaaagaaaaatgttttgagaggaaaagaaccaaattcattgcctgtgattttctgactgagtggttatacaaccaaaatccaaagagggcaggggagccattcacagaatttttctccattccatttgtggaggagcggctaaagcaacacccacggccgccaatcccactctcgctcctgctgacagaagaggaagcagccctctacattcaatccttctggagagcctgtgtggttcgctgtgatcctgagattcaagaactgcgtcagtggcagaagaaacttcgcgaggccaagcacattcaccagcaagtcaaaattttctgggccaagcaagaacaaaaagtgaaatgcaaaatggaggacgatgcagtacctgcagccaagatgaaaattccatcatcttaaccatagctaagacgtatctttgcccattcgagcacaagttaccttgtgcaaggaaaatgtccaaatgatgctctctctcttgtgatttctttaacaagacttggaacatgtgcaaatggaatcttttctgtacaagataggattcattgcaaacaagctttaatgcaaatagtttagaaaagaaaggaccagtcttcactttctgcattatccccacattttattcattcatccagattacttcttcagtgcctcaggagtattcttctacaccagctgctgttaaaatgtacaatgaactctagtcccaaggaatacagaagtgctcttattaccagttttcccacttgtggccgcctttgcaaagatccatattctaatttaagtccccaacctctgaatttggttttaagtttacctagtgactgactactctctttataaaaaagaccttatacttaatgatcatttccaaaggagaccactccttaacttttactgcaaacccaacaagatgagacacttaaacccagacagatgtaacaaaggatttttgttgtctaagtcccaaagtattatatagaaagttcctgcttttatgggtaaacttattaccttaatatgttctgtggtttgctgttaaccaagattctcccatttaaaatgccacagaccgaccctcaaggcagatccgaaagcctagtagttagttgcactgggttgttttgacaagctaccacacgtcttaagtaaatagtaaagcctttatttttgtgttaagaacagcattttgaaaataaaacctatctgcccatgctttacagccttttaaatttgtaatatttatatagtcgtttatggtacatattgattgtcttgaaatttctttaacttcttttttataagtatgcaacagtcagccgggggaagataaaggtacattataaaacacacattaatgcatttaataaatatatattatctatcaaaaaaaaaaaaaaaaaaaaaaaaaaaaaaaaaaaaaaaaaaaaaaaaaaaaa

SEQ ID NO: 1330 - protein, 287 aa, Homo sapiens
MAAPRQIPSHIVRLKPSCSTDSSFTRTPVPTVSLASRELPVSSWQVTEPSSKNLWEQICKEYEAEQPPFPEGYKVKQEPVITVAPVEEMLFHGFSAEHYFPVSHFTMISRTPCPQDKSETINPKTCSPKEYLETFIFPVLLPGMASLLHQAKKEKCFERKRTKFIACDFLTEWLYNQNPKRAGEPFTEFFSIPFVEERLKQHPRPPIPLSLLLTEEEAALYIQSFWRACVVRCDPEIQELRQWQKKLREAKHIHQQVKIFWAKQEQKVKCKMEDDAVPAAKMKIPSS

SEQ ID NO: 1331 - DNA, 2870 bp, Homo sapiens
aggtcgcaggcgggcgtgcgtggagcgggggccgcggccgcgccgcagagatgtgactcgggccgaaggccagctggagcgtcggcgctgcggggccgcgggggtcgaatgttcgtggcatcagagagaaagatgagagctcaccaggtgctcaccttcctcctgctcttcgtgatcacctcggtggcctctgaaaacgccagcacatcccgaggctgtgggctggacctcctccctcagtacgtgtccctgtgcgacctggacgccatctggggcattgtggtggaggcggtggccggggcgggcgccctgatcacactgctcctgatgctcatcctcctggtgcggctgcccttcatcaaggagaaggagaagaagagccctgtgggcctccactttctgttcctcctggggaccctgggcctctttgggctgacgtttgccttcatcatccaggaggacgagaccatctgctctgtccgccgcttcctctggggcgtcctctttgcgctctgcttctcctgcctgctgagccaggcatggcgcgtgcggaggctggtgcggcatggcacgggccccgcgggctggcagctggtgggcctggcgctgtgcctgatgctggtgcaagtcatcatcgctgtggagtggctggtgctcaccgtgctgcgtgacacaaggccagcctgcgcctacgagcccatggactttgtgatggccctcatctacgacatggtactgcttgtggtcaccctggggctggccctcttcactctgtgcggcaagttcaagaggtggaagctgaacggggccttcctcctcatcacagccttcctctctgtgctcatctgggtggcctggatgaccatgtacctcttcggcaatgtcaagctgcagcagggggatgcctggaacgaccccaccttggccatcacgctggcggccagcggctgggtcttcgtcatcttccacgccatccctgagatccactgcacccttctgccagccctgcaggagaacacgcccaactacttcgacacgtcgcagcccaggatgcgggagacggccttcgaggaggacgtgcagctgccgcgggcctatatggagaacaaggccttctccatggatgaacacaatgcagctctccgaacagcaggatttcccaacggcagcttgggaaaaagacccagtggcagcttggggaaaagacccagcgctccgtttagaagcaacgtgtatcagccaactgagatggccgtcgtgctcaacggtgggaccatcccaactgctccgccaagtcacacaggaagacacctttggtgaaagactttaagttccagagaatcagaatttctcttaccgatttgcctccctggctgtgtctttcttgagggagaaatcggtaacagttgccgaaccaggccgcctcacagccaggaaatttggaaatcctagccaaggggatttcgtgtaaatgtgaacactgacgaactgaaaagctaacaccgactgcccgcccctcccctgccacacacacagacacgtaataccagaccaacctcaatccccgcaaactaaagcaaagctaattgcaaatagtattaggctcactggaaaatgtggctgggaagactgtttcatcctctgggggtagaacagaaccaaattcacagctggtgggccagactggtgttggttggaggtggggggctcccactcttatcacctctccccagcaagtgctggaccccaggtagcctcttggagatgaccgttgcgttgaggacaaatggggactttgccaccggcttgcctggtggtttgcacatttcaggggggtcaggagagttaaggaggttgtgggtgggattccaaggtgaggcccaactgaatcgtggggtgagctttatagccagtagaggtggagggaccctggcatgtgccaaagaagaggccctctgggtgatgaagtgaccatcacatttggaaagtgatcaaccactgttccttctatggggctcttgctctaatgtctatggtgagaacacaggccccgccccttcccttgtagagccatagaaatattctggcttggggcagcagtcccttcttcccttgatcatctcgccctgttcctacacttacgggtgtatctccaaatcctctcccaattttattcccttattcatttcaagagctccaatggggtctccagctgaaagcccctccgggaggcaggttggaaggcaggcaccacggcaggttttccgcgatgatgtcacctagcagggcttcaggggttcccactaggatgcagagatgacctctcgctgcctcacaagcagtgacacctcgggtcctttccgttgctatggtgaaaattcctggatggaatggatcacatgagggtttcttgttgcttttggagggtgtgggggatattttgttttggtttttctgcaggttccatgaaaacagcccttttccaagcccattgtttctgtcatggtttccatctgtcctgagcaagtcattcctttgttatttagcatttcgaacatctcggccattcaaagcccccatgttctctgcactgtttggccagcataacctctagcatcgattcaaagcagagttttaacctgacggcatggaatgtataaatgagggtgggtccttctgcagatactctaatcactacattgctttttctataaaactacccataagcctttaacctttaaagaaaaatgaaaaaggttagtgtttgggggccgggggaggactgaccgcttcataagccagtacgtctgagctgagtatgtttcaataaaccttttgatatttctcaaaaaaaaaaaaaaaaaaaaaaa

SEQ ID NO: 1332 - protein, 403 aa, Homo sapiens
MFVASERKMRAHQVLTFLLLFVITSVASENASTSRGCGLDLLPQYVSLCDLDAIWGIVVEAVAGAGALITLLLMLILLVRLPFIKEKEKKSPVGLHFLFLLGTLGLFGLTFAFIIQEDETICSVRRFLWGVLFALCFSCLLSQAWRVRRLVRHGTGPAGWQLVGLALCLMLVQVIIAVEWLVLTVLRDTRPACAYEPMDFVMALIYDMVLLVVTLGLALFTLCGKFKRWKLNGAFLLITAFLSVLIWVAWMTMYLFGNVKLQQGDAWNDPTLAITLAASGWVFVIFHAIPEIHCTLLPALQENTPNYFDTSQPRMRETAFEEDVQLPRAYMENKAFSMDEHNAALRTAGFPNGSLGKRPSGSLGKRPSAPFRSNVYQPTEMAVVLNGGTIPTAPPSHTGRHLW

SEQ ID NO: 1333 - DNA, 1238 bp, Homo sapiens
gagcagaggggatcacggccaagggtaggagccagtcctgcggggagagaggcgctgctgctccagctgccgctgcctccgccgccgccaccaccgagccggcgaccagagtcgggctggcaggccgggcgcgaagcggcaaggggagcgaggggcgcgctcatggagcacacgcacgcccacctcgcagccaacagctcgctgtcttggtggtcccccggctcggcctgcggcttgggtttcgtgcccgtggtctactacagcctcttgctgtgcctcggtttaccagcaaatatcttgacagtgatcatcctctcccagctggtggcaagaagacagaagtcctcctacaactatctcttggcactcgctgctgccgacatcttggtcctctttttcatagtgtttgtggacttcctgttggaagatttcatcttgaacatgcagatgcctcaggtccccgacaagatcatagaagtgctggaattctcatccatccacacctccatatggattactgtaccgttaaccattgacaggtatatcgctgtctgccacccgctcaagtaccacacggtctcatacccagcccgcacccggaaagtcattgtaagtgtttacatcacctgcttcctgaccagcatcccctattactggtggcccaacatctggactgaagactacatcagcacctctgtgcatcacgtcctcatctggatccactgcttcaccgtctacctggtgccctgctccatcttcttcatcttgaactcaatcattgtgtacaagctcaggaggaagagcaattttcgtctccgtggctactccacggggaagaccaccgccatcttgttcaccattacctccatctttgccacactttgggccccccgcatcatcatgattctttaccacctctatggggcgcccatccagaaccgctggctggtacacatcatgtccgacattgccaacatgctagcccttctgaacacagccatcaacttcttcctctactgcttcatcagcaagcggttccgcaccatggcagccgccacgctcaaggctttcttcaagtgccagaagcaacctgtacagttctacaccaatcataacttttccataacaagtagcccctggatctcgccggcaaactcacactgcatcaagatgctggtgtaccagtatgacaaaaatggaaaacctataaaagtatccccgtgattccataggtgtgg

SEQ ID NO: 1334 - protein, 353 aa, Homo sapiens
MEHTHAHLAANSSLSWWSPGSACGLGFVPVVYYSLLLCLGLPANILTVIILSQLVARRQKSSYNYLLALAAADILVLFFIVFVDFLLEDFILNMQMPQVPDKIIEVLEFSSIHTSIWITVPLTIDRYIAVCHPLKYHTVSYPARTRKVIVSVYITCFLTSIPYYWWPNIWTEDYISTSVHHVLIWIHCFTVYLVPCSIFFILNSIIVYKLRRKSNFRLRGYSTGKTTAILFTITSIFATLWAPRIIMILYHLYGAPIQNRWLVHIMSDIANMLALLNTAINFFLYCFISKRFRTMAAATLKAFFKCQKQPVQFYTNHNFSITSSPWISPANSHCIKMLVYQYDKNGKPIKVSP

SEQ ID NO: 1335 - DNA, 2597 bp, Homo sapiens
gtgcttccccgcccctgaacctgctccctcccagtcggtctcgccgcgctcgccgggtgtcccagtgtcaccaacactcggccgccgccgccagcttggcgcgcaccgccgcctccgccaccgccgacagcgcgcatcctccgtgtccccgctccgccgcccgagcaggtgccactatgcacgtgaagaagtacctgctgaagggcctgcatcggctgcagaagggccccggctacacgtacaaggagctgctggtgtggtactgcgacaacaccaacacccacggccccaagcgcatcatctgtgaggggcccaagaagaaagccatgtggttcctgctcaccctgctcttcgccgccctcgtctgctggcagtggggcatcttcatcaggacctacttgagctgggaggtcagcgtctccctctccgtaggcttcaagaccatggacttccctgccgtcaccatctgcaatgctagccccttcaagtattccaaaatcaagcatttgctgaaggacctggatgagctgatggaagctgtcctggagagaatcctggctcctgagctaagccatgccaatgccaccaggaacctgaacttctccatctggaaccacacacccctggtccttattgatgaacggaacccccaccaccccatggtccttgatctctttggagacaaccacaatggcttaacaagcagctcagcatcagaaaagatctgtaatgcccacgggtgcaaaatggccatgagactatgtagcctcaacaggacccagtgtaccttccggaacttcaccagtgctacccaggcattgacagagtggtacatcctgcaggccaccaacatctttgcacaggtgccacagcaggagctagtagagatgagctaccccggcgagcagatgatcctggcctgcctattcggagctgagccctgcaactaccggaacttcacgtccatcttctaccctcactatggcaactgttacatcttcaactggggcatgacagagaaggcacttccttcggccaaccctggaactgaattcggcctgaagttgatcctggacataggccaggaagactacgtccccttccttgcgtccacggccggggtcaggctgatgcttcacgagcagaggtcataccccttcatcagagatgagggcatctacgccatgtcggggacagagacgtccatcggggtactcgtggacaagcttcagcgcatgggggagccctacagcccgtgcaccgtgaatggttctgaggtccccgtccaaaacttctacagtgactacaacacgacctactccatccaggcctgtcttcgctcctgcttccaagaccacatgatccgtaactgcaactgtggccactacctgtacccactgccccgtggggagaaatactgcaacaaccgggacttcccagactgggcccattgctactcagatctacagatgagcgtggcgcagagagagacctgcattggcatgtgcaaggagtcctgcaatgacacccagtacaagatgaccatctccatggctgactggccttctgaggcctccgaggactggattttccacgtcttgtctcaggagcgggaccaaagcaccaatatcaccctgagcaggaagggaattgtcaagctcaacatctacttccaagaatttaactatcgcaccattgaagaatcagcagccaataacatcgtctggctgctctcgaatctgggtggccagtttggcttctggatggggggctctgtgctgtgcctcatcgagtttggggagatcatcatcgactttgtgtggatcaccatcatcaagctggtggccttggccaagagcctacggcagcggcgagcccaagccagctacgctggcccaccgcccaccgtggccgagctggtggaggcccacaccaactttggcttccagcctgacacggccccccgcagccccaacactgggccctaccccagtgagcaggccctgcccatcccaggcaccccgccccccaactatgactccctgcgtctgcagccgctggacgtcatcgagtctgacagtgagggtgatgccatctaaccctgcccctgcccaccccgggcggctgaaactcactgagcagccaagactgttgcccgaggcctcactgtatggtgccctctccaaagggtcgggagggtagctctccaggccagagcttgtgtccttcaacagagaggccagcggcaactggtccgttactggccaagggctctgtagaatcacggtgctggtacaggatgcaggaataaattgtatcttcacctggttcctaccctcgtccctacctgtcctgatcctggtcctgaagacccctcggaacaccctctcctggtggcaggccacttccctcccagtgccagtctccatccaccccagagaggaacaggcgggtgggccatgtggttttctccttcctggccttggctggcctctggggcaggggtggtggagagatggaagggcatcaggtgtagggaccctgccaagtggcacctgatttactctagaaaataaaagtagaaaatactgagtcca

SEQ ID NO: 1336 - protein, 640 aa, Homo sapiens
MHVKKYLLKGLHRLQKGPGYTYKELLVWYCDNTNTHGPKRIICEGPKKKAMWFLLTLLFAALVCWQWGIFIRTYLSWEVSVSLSVGFKTMDFPAVTICNASPFKYSKIKHLLKDLDELMEAVLERILAPELSHANATRNLNFSIWNHTPLVLIDERNPHHPMVLDLFGDNHNGLTSSSASEKICNAHGCKMAMRLCSLNRTQCTFRNFTSATQALTEWYILQATNIFAQVPQQELVEMSYPGEQMILACLFGAEPCNYRNFTSIFYPHYGNCYIFNWGMTEKALPSANPGTEFGLKLILDIGQEDYVPFLASTAGVRLMLHEQRSYPFIRDEGIYAMSGTETSIGVLVDKLQRMGEPYSPCTVNGSEVPVQNFYSDYNTTYSIQACLRSCFQDHMIRNCNCGHYLYPLPRGEKYCNNRDFPDWAHCYSDLQMSVAQRETCIGMCKESCNDTQYKMTISMADWPSEASEDWIFHVLSQERDQSTNITLSRKGIVKLNIYFQEFNYRTIEESAANNIVWLLSNLGGQFGFWMGGSVLCLIEFGEIIIDFVWITIIKLVALAKSLRQRRAQASYAGPPPTVAELVEAHTNFGFQPDTAPRSPNTGPYPSEQALPIPGTPPPNYDSLRLQPLDVIESDSEGDAI

SEQ ID NO: 1337 - DNA, 2792 bp, Homo sapiens
ccacgcgtccgaactgagtgcgctgagcggggaagcgcaaaggggcaagttacccgtcctggcgtttctggggttcgcctcggaggctagcctcggtgctctcgcaggctcgctcgcttctgcatccccgttgccgcccggagccaactcttaagttctggacgccaggcctgaggcagttccgccatggacttctccaagttcctggcagacgacttcgacgtgaaggagtggatcaatgcggccttcagggccggctccaaggaggcggcgtccgggaaggcggatggccacgcagccaccctggtgatgaagctgcagctgttcatccaagaggtgaaccacgccgtggaggaaacaagtcaccaagctctccagaacatgcccaaagtgctccgtgatgttgaagccctaaaacaggaggcatctttcctgaaagaacagatgattcttgtcaaggaggacattaaaaaatttgaacaggacacatctcaatccatgcaggtgttggtagaaattgaccaagtgaagtccagaatgcaacttgctgccgaatctcttcaggaagcagataagtggagcacgttgagcgccgatattgaggagacatttaagactcaggacatagctgtgatttctgccaagctaacaggtatgcagaacagcttaatgatgcttgttgatacaccagactactcagaaaagtgtgtgcacttggaggcactgaagaacaggctggaggccctagccagtccacagattgtagcggcattcacctctcaggctgtagatcagtccaaagtgtttgtgaaggtgtttactgaaattgaccggatgccccagctcctggcctactactacaagtgtcacaaggtgcagcttttagcagcctggcaagagctgtgtcaaagtgacctatccctggaccggcagcttaccggactctatgatgccttgcttggtgcttggcacacacaaatccagtgggctacacaggttttccagaagccccacgaggtggtaatggtgctgctgattcagaccctgggggccctcatgccctcgctgccctcctgcctcagcaacggcgtggagagggcagggcccgagcaggagctcaccaggctgctggagttctacgacgccaccgcccacttcgccaagggcttggagatggcactgctcccccacctacatgaacacaatctggtaaaagtcacggagctggtggatgctgtgtatgatccatacaaaccctaccagctgaagtatggcgacatggaagagagcaacctcctcatccagatgagtgctgtgcctctggagcatggggaagtgattgactgtgtgcaggagctgagccactccgtgaacaagctgtttggtctggcgtctgcagccgttgacagatgcgtcagattcaccaatggcctggggacctgcggcctgttgtcagccctgaaatccctctttgccaagtatgtgtctgatttcaccagcactctccagtccatacgaaagaagtgcaaactggaccacattcctcccaactccctcttccaggaagattggacggcttttcagaactccattaggataatagccacctgtggagagcttttgcggcattgtggggacttcgagcagcagctagccaacaggattttgtccacagctgggaagtatctatctgattcctgcagcccccggagcctggctggttttcaggagagcatcttgacagacaagaagaactctgccaagaacccatggcaagaatataattacctccagaaagataaccctgctgaatatgccagtttaatggaaatactttatacccttaaggaaaaagggtcaagcaaccacaacctgctggctgcacctcgagcagcgctgactcggcttaaccagcaggcccaccagctggctttcgattccgtgttcctgcgcatcaaacaacagctgttgcttatttcgaagatggacagctggaatacggctggcatcggagaaaccctcacagatgaactgcccgcctttagtctcacccctctcgagtacatcagcaacatcgggcagtacatcatgtccctccccctgaatcttgagccatttgtgactcaggaggactctgccttagagttggcattgcacgctggaaagctgccatttcctcctgagcagggggatgaattgcccgagctggacaacatggctgacaactggctgggctcgatcgccagagccacaatgcagacctactgtgatgcgatcctacagatccctgagctgagcccacactctgccaagcagctggccactgacatcgactatctgatcaacgtgatggatgccctgggcctgcagccgtcccgcaccctccagcacatcgtgacgctactgaagaccaggcctgaggactatagacaggtcagcaaaggcctgccccgtcgcctggccaccaccgtggccaccatgcggagtgtgaattactgaccccaccacacaccggaccaccaagagagccagggctgctgtttcgcgactcaccagcacagatttgctcagaaactctgcccaagattgggcagaagttactttaaaaagacttggttcagctggtcacggtggctcacgcctgtaatcccagcactttgggaggccaagccagatggatcatgaagccaggagttcgagaccagcctgaccaacatggtgaaaccccatctctactaaaaatacaaaaattaacagcagagcgagactctgtctcaaaaaaaaaaaaaaaa

SEQ ID NO: 1338 - protein, 770 aa, Homo sapiens
MDFSKFLADDFDVKEWINAAFRAGSKEAASGKADGHAATLVMKLQLFIQEVNHAVEETSHQALQNMPKVLRDVEALKQEASFLKEQMILVKEDIKKFEQDTSQSMQVLVEIDQVKSRMQLAAESLQEADKWSTLSADIEETFKTQDIAVISAKLTGMQNSLMMLVDTPDYSEKCVHLEALKNRLEALASPQIVAAFTSQAVDQSKVFVKVFTEIDRMPQLLAYYYKCHKVQLLAAWQELCQSDLSLDRQLTGLYDALLGAWHTQIQWATQVFQKPHEVVMVLLIQTLGALMPSLPSCLSNGVERAGPEQELTRLLEFYDATAHFAKGLEMALLPHLHEHNLVKVTELVDAVYDPYKPYQLKYGDMEESNLLIQMSAVPLEHGEVIDCVQELSHSVNKLFGLASAAVDRCVRFTNGLGTCGLLSALKSLFAKYVSDFTSTLQSIRKKCKLDHIPPNSLFQEDWTAFQNSIRIIATCGELLRHCGDFEQQLANRILSTAGKYLSDSCSPRSLAGFQESILTDKKNSAKNPWQEYNYLQKDNPAEYASLMEILYTLKEKGSSNHNLLAAPRAALTRLNQQAHQLAFDSVFLRIKQQLLLISKMDSWNTAGIGETLTDELPAFSLTPLEYISNIGQYIMSLPLNLEPFVTQEDSALELALHAGKLPFPPEQGDELPELDNMADNWLGSIARATMQTYCDAILQIPELSPHSAKQLATDIDYLINVMDALGLQPSRTLQHIVTLLKTRPEDYRQVSKGLPRRLATTVATMRSVNY

SEQ ID NO: 1339 - DNA, 5203 bp, Homo sapiens
gcagaggagagcgccaggacgctacagcagctgaagaggcagtggcgcccgcggccgcagcgtcggggctggagcgatggcggcgaccgcggtggcggcggctgtggcgggaaccgagtcggcccagggtcccccgggcccggcagcgtcgctggagctgtggctcaacaaagccacagacccaagcatgtcggaacaggattggtcagctatccagaatttctgtgagcaggtgaacactgaccccaatggccccacacatgcgccctggctactggcccacaagatccagtctccgcaagagaaggaagctctttatgccttaacggtgctggagatgtgcatgaaccactgtggggagaagttccacagcgaggtggccaaatttcgtttcctgaacgaactgatcaaagtgttgtccccaaagtacctggggtcctgggccacaggaaaagttaaaggaagagtcattgaaatactcttcagttggacagtctggtttccggaagacatcaagattcgagacgcttatcagatgctgaagaaacaaggaattataaaacaagaccctaaactaccagtggataaaatcttacccccaccatctccctggcccaagagctccatctttgatgctgatgaagaaaagtccaagcttctgacaaggcttctaaagagcaaccaccccgaggaccttcaggctgcaaaccggttaatcaagaatttggtcaaggaggaacaagaaaaatcggagaaggtgtccaagagggtcagtgcggtggaggaagtgcgaagccatgtgaaggtgctgcaggagatgctgagcatgtaccgcaggccagggcaggccccgcccgaccaggaggccctgcaggtcgtgtatgagaggtgtgaaaagctgcggcccacgctgttccggttggcgagtgacaccactgatgacgatgatgcactcgcggaaattctccaggcaaatgacctcctcacccaaggagttctgctgtacaaacaggtgatggagggccgggtcacctttggaaacagagtgaccagctcattgggagacatccctgtctccagagtctttcagaatccagcaggctgcatgaagacctgccccctgattgacttggaggtggacaatggacctgcgcagatggggactgtggtgccatctttgcttcatcaggacctggcagccttgggaatcagtgatgctcctgttacaggcatggtttctggtcagaattgctgtgaggaaaagaggaatccctcctccagcacgctgccaggcggtggtgttcagaacccttctgcagacaggaatttgctggacctcctctcagcacagccagctccgtgccctctgaattatgtttcgcagaaaagtgtccccaaggaagtgccaccaggtactaagtcctctccaggttggtcctgggaggctggcccgttggctccttccccatcttcacagaatacacctctggctcaagtgtttgtccctttggagtctgttaagcccagcagcctgccgcctctcattgtgtatgaccggaatggattcagaattctgctccacttctcccagacgggagcccctgggcacccagaggtacaggtgctgctcttgaccatgatgagcacggctccccagcctgtctgggatatcatgtttcaagtggctgtgccaaagtcaatgagagtgaagctgcagccggcatccagctccaagcttcctgcattcagtcctttgatgcctccagctgtgatatctcagatgctgctgcttgacaatccacacaaagaacctatccgcttacggtacaagctgacattcaaccaaggtggacagcctttcagcgaagtaggagaagtgaaagacttcccagacctggctgtcttgggcgcagcctaacttttcacaagatggacccttcatttcaagcttaggctggcgttacttttgctgtctagtcaggactaatcacggtgtttcagtgcggagtgccaagagtcctatcctgacgtcaggctctgggtgtcaacctctgacttattctgcagatgctctgtgtgtgtgtgtgtgtgtgtgtgtgtgtgtgtgtgtgtgtgtgtgttcggggagagggtggtagcacagggcttgggatatcggcagtgtgggaaatgcgaagcatttctcatcatcatcatctctgctacagtcatgtttctgcatgtcagcgagcgacactgtccctgcctcaggttggaggttttatcagccaaagtgtttttttcatgtatcgttcgttccattcatccactctgtgccttgtcagcctttgaaaggcttggttgctcccaggctgctgttctcagggaccttaaaagggacctggttagtcttggggcagagagtatctacttgggcactctcttccaagaaagaccttgtctccattttcattagacaatgcttcttgtgtgtgttctggaagatcttctaaatggaatgcttgttgcactgttcccaggcgagtggctgccatgagacctgaggaccacacttgggggaccaatcatgtccttcaccactgtgccttagaatcgcccctggacagagttcctgggcagaggggaaagcagctcccaggccttactcaggcctcaggtccatgggttgggcagccagtctgggcccttctcaggatcctcatctccatcctcatcctcttccttcacagcatttacttggagctctttgtgacacaccatgtcagtcatgatgaatcggccaacagccagcccttgccagctgacgtcacagtctaagatgggaaactgtggtacagatagacatgaagagagcttagcagtgattgaggtggtgactaaatatacagtcattgaataaataccatgtagcaagtgtactttgtggagtgttgagtaagtggaaaatggaaagccagttgcatttagagatgataggcctaaagggaactgtcttctgtcgagaagtaaaggaaacttcatgaaggatgtagaagcttagctgcctcagagaagagagaacctgaagatctgaggcaagctggacaggagaggtggatatttgttgatggaagaattcaagtttataatcaattcccacttagcacctactgtgtgctaggaacttgaatgtgtatgtttgacaagtcctgcttggcctgatgggtgggagaaggaacctgagcctggctgagatggctaggcggagggctttgaagtccaagcagctgaactggctgggtgggtttctacctttgaaactgcaagacttgtttggagctcttaattacaatatctgatatttttacagtctgatcttttgacttctacatatagtggaaatctgccaatactaattggtggagatgggaactgtaaaagatcaagtatgctaattttaagcaaatgtaaaaactcataaaacaggtaaacagtggggtgatttcatttgccataattcacataagacgaattttaatctaaaagtactttcttgcttgtattctgtgtggcttttttttgttttttgaggccatatctcactctgtcactcaggctggagtgcggtggtataatctcagctcactgcaatctctgcctaccaggttcaagcgattctcgtgcctcagcctctcgagtagctgggactacaggcgtgagccagcacgcccagctaatttttgtatttttagtagagacaggatttcaccatgttggccaggctggtctcgaactcctgacctcaggtgatccgcctgccttggcctcccagagtgctgggattacaggcgtgagccaccgcacccggcctctgtgtagcttttataggctctgttactgttgcgtagtcttgaagaggtacccatcataatgacagcatctccctctgaagggttttggtcaaaatgggtgaatgagacttatacataaagacaggctttctcccctatagttaggaggtgaactcacacatgtgtacctgaacattcttgcttttgaggagacagactcccagtggtactactatgcttaggtgttggacaggataggggtaggaggagaggaggcaggctgctgtcctgaaagtggctgtggtttatggcatcactcccttctaatcagcaagtccagtggccacttagagcccagctcctacctcttcattcacttaacaagtagttattggctgtgcacagtggctcacgcctataatcccagcattttgggaggctgagtgggatgaccgcttgagcccaggatttcaagtccagcctgggctacatagtgagaccgtgtctctgtttttttaaaagctagttgttgaccagctaccctgagccaggcaccaccctgaaggagcttcttttcctctggggagaagcaaattcatgatgtgtgtgctggagatctggcactcatggccagtgctttccagtatcttgaactcttcgggggtcctgttgacccatttcgtgacctacctccgtgactgctctttttcctctgtctcttaagtgtgatggttttccagagtccaatcctcaggactttcccgtccacacacaggcctggtagtcaggtggctctaaaccattaggtgggttgtagacctctctcaagctgccacctccttgctgtcgccagatcgtatttcagtctgtcaggggttatctgtatctggaggttccactgttgcttcagtctcagttacttagaatggaacccagagtcctgcccctttccacctacatgctcttacttgaaagcacctgagacttattgggtccctgattcctgcttcgtctgtatccgcagagtagttgcatgtcatttggcctgttttctaaataatcccacatcatgtcctccctgcacttacattgccactgctctgatttgggcttttttttttttgggacaatgcctctgtcccaattctgagtaacagctctggttcttgccactaccagagttctctagcaaatctgagcatctgacagggtgaaaaattctgaatggcttcctgatgcctgactttatgggatcaaattcaagttgcacgctggcactcagtgcccttctggtatcatctgccaagaccagggcctgcttcaccacagccacaataaagtcctttcaagccctgaaaaaaaaaaaaaaaaaa

SEQ ID NO: 1340 - protein, 613 aa, Homo sapiens
MAATAVAAAVAGTESAQGPPGPAASLELWLNKATDPSMSEQDWSAIQNFCEQVNTDPNGPTHAPWLLAHKIQSPQEKEALYALTVLEMCMNHCGEKFHSEVAKFRFLNELIKVLSPKYLGSWATGKVKGRVIEILFSWTVWFPEDIKIRDAYQMLKKQGIIKQDPKLPVDKILPPPSPWPKSSIFDADEEKSKLLTRLLKSNHPEDLQAANRLIKNLVKEEQEKSEKVSKRVSAVEEVRSHVKVLQEMLSMYRRPGQAPPDQEALQVVYERCEKLRPTLFRLASDTTDDDDALAEILQANDLLTQGVLLYKQVMEGRVTFGNRVTSSLGDIPVSRVFQNPAGCMKTCPLIDLEVDNGPAQMGTVVPSLLHQDLAALGISDAPVTGMVSGQNCCEEKRNPSSSTLPGGGVQNPSADRNLLDLLSAQPAPCPLNYVSQKSVPKEVPPGTKSSPGWSWEAGPLAPSPSSQNTPLAQVFVPLESVKPSSLPPLIVYDRNGFRILLHFSQTGAPGHPEVQVLLLTMMSTAPQPVWDIMFQVAVPKSMRVKLQPASSSKLPAFSPLMPPAVISQMLLLDNPHKEPIRLRYKLTFNQGGQPFSEVGEVKDFPDLAVLGAA

SEQ ID NO: 1341 - DNA, 4931 bp, Homo sapiens
cggacccgcccccttcagcttgggaaagcgaaagcgtggcaggggccggacctgggagcggaggaggcgggtctccatagaaacctccacctgtttccggccgggctgtgagagattaggggctgctgcgggggccaatctcagccagctcgcctcttcccagcggcctctgcgggagcggtgggtgttgtacacaatcatcatggcggcggccggggccccggatggcatggaggaacctggcatggacacggaggccgagactgtggctactgaggctcccgcgcggcccgtcaactgcctggaggctgaagccgcggcgggggcggcggccgaggactccggcgccgcacgaggcagcctgcagccggccccggcccagccccctggggaccccgcagcccaggcctcggtcagcaacggcgaagacgcgggcggcggcgcgggcagggagctggtggacttgaagatcatctggaataagaccaagcatgacgtgaagttccccctggacagcacaggctccgagctgaaacagaagatccactcgattacaggtctcccgcctgccatgcagaaagtcatgtataagggactcgtccccgaggataaaacattgagagaaataaaagtgaccagtggggccaagatcatggtggttggctccaccatcaatgatgttttagcagtaaacacacccaaagatgctgcgcagcaggatgcaaaggccgaagagaacaagaaggagcctctctgcaggcagaaacaacacaggaaagtgttggataaaggaaaacctgaagatgtgatgccatctgttaagggggcccaggagcgcctgccaacggtaccgctgtccggcatgtacaataaatctggaggaaaagtgagactcacctttaaactagaacaagaccagctgtggattggcactaaagagcggactgagaaattgcccatgggctccataaaaaatgtggtcagtgaacctatcgaaggacatgaagactaccacatgatggcgtttcagttgggccccacggaagcctcttactactgggtgtactgggttccaactcaatatgtggatgcaatcaaagacactgtgctggggaaatggcagtatttttgaaagcactttcacctctggcccaggagactgacccaaagtgaaggacattgccgggagaggcctgcagcatccctggatttcagagttctggaactttgttcataaaaaatctatattcaatctgaggtgatgtggtgactgaagccagaggtgatgtactttcaccattagcttaattttaacttaaaattaccagttccctttcttgcagtcagcttcataccatttttaaagtcaatacgatggaaatcaataaatctgaattccgaacatgttgtgtggaatactcttaagtgtgtttgagagtagatctgccaattatgttgacaagggaatgatcaaaagctttgttttttttaaaaaaaaaaaaagcagtttcaattgaaatattttcatacatctttggttgcaaacatttggactgcattgcaatgagttggggtgttttttttttccttttttgtataaaattgtatgcaaaatgggggtgggttagtaagccacatatttctgtccattgattcagatttaattctttccctttttcattctctcgcttcctcaatttgagtttttgttttaagaacccaaagatgtcagttcttcttttggtacctcatcaacgcttcctttcctgggctccctcccgccgtgctgctgctgcctgtgaacgcacggtgggagaggaagagctgctcagtcttgggcaaggagctctcacacttgctgtggtgttcgttgagcagcagagtatctcccagtgactcctgtttaaatgtcttgccctttgggcccccatctccaaggagttccattgctggttggatgattgtctgcacccctcactgagcttggcctagaggcccagcctggcatggttgtgcctgggctgtgccgctcaacagccccagctcccaagcagacaaagacctcttccaggaggagccaggtagaagatagttatacagccatatagctgcagatccagataaccttctttctttggaagttttcaagaaattcttaagcagtccaaggatgatttcaattatgcttctccattgggtccttctgctcatgcattcagttcaagtgtcctttatcccaggttcagagatgctgcctttctgaagaagacatctgaccctagcaggttggccagtgttattgaacaacaaaaatgggataaattgctttcatgattagctcaccttcttctggttttagcccttctgttctctgtacacgtgaacttctgtcatctccttctggcttggttgcctctgaaaggagggaaagtctcttggtaaattatctcttttgtgctgtttgctgtttctctgctgccgtctttgcagttctcctctcactggttgcaggctttcatagtaaggtttggcgagaaatgttccaaacatcacattttggattctaggctgtcacccctcattctgtgaaacgtattagcatgtgttcgcccaagatgactattccttgtgagccagttaatgatgatattctacgcccttcccttctaagctgtagttcaggaatccagcccacatagacagactcttgctttccatggtgtagtcaatgccaagtgatgcatctaggcaggaaaatctactctttgcttttttgggggcaattagtacatttgtgaagtgcagcatccaagaaacagcctgttttttcatcccttgagaaaggagcagtcattgcagcttttctgtccttgtcggcctgcagttcctggggaaaagagtacatctgagctacttgtccaagcctctgtctgcaggtgacaggttttgggggaaatgagatgcattaagtagaacatcatctcgggtcagacattgccccttttgtttgccaatgccccagtcctagagacttgtcctgacagtgccgcacacctacttttgatctctcagagcaggtggctccatccccagactagcctggctgctctccgaggcccctccacctgctccccttattgccccattcttgtggcttgccgggccacttggcctcccttcttgccggtgacagcgttccatcatctccccgctccccaagggccaactgcttctcactcaggctggtgtcatttcaggaggaccaaagcctgcgtgagcctttttattttcagtaaaatggtgcttttttccttacttcgagatactatatataaataataatgtaaatgacaccttttcgtacggagctgtttgagtattgctttacagagctcactaaatcagcttcaacaatcttgagctctgtggctcctcaccctgtctgcatggaagaccttgctggacgctctcgggagagcagacatagcaccagaagccactgggagaagtgttttcgatccgtgtctgggccacagtagtattcactgtttagtctttgagttccgtaagcagtctcttcatacatttcttacagtctggagtgtactgactaaatctgtgtaagcaaattgaaatactctttcttttaggtagcgtcacagtggttttttttttcctcaggataatttctatacaatttccttactgtcagagggaccagatctttccctcactgtggcaggggccgtgcaggtggataaaggaagagctggtttccggagagtgactgtaacagcgttgactcgaagctagagatggagggggtggccgtctcttagacattggacacctctcagagcctcctgagggcttctttgtcttctagaatctctaccggtggtcctcctgcaggttctggctcacagacatcatcatgcctttttttccctccctgaggcgccttggcagaagagcgtgaccctgtgagccaggccccccttagctctgcttcagatcacagaacacagacagactcgcgagttgctggacctctttggtattaagtgtttgaatccatggtgggccttttgcaagtagcgttagctctttttaaatgttgaactgagctaaggatgcactttcttgtggacatagaaggggcccacgtaaggccctgagtaggctccttagttgctgctttacctgatgagggccaaagagattaactctgcctcgttgccatgtctcagaaaagttgccatatttcacccagaaggggcttgttttcctcttactcttactttaaccatgtgcctggaggagccattctgggctcttgcacttgcccagcctttctttgccaggggcagagaagggaaagggggtagattgagtgtgccaagggccgtgcaagggcaggcttgctttccacccatctgctgagggagccctctcctctcgctccttgcctctgttcacacctgttgtcttggaagaggatggtccctttgtcttaaggctttgtgataaagtcatctccagttaggatctgcacctgtttccttcgtaatagtgcctggcggcctttctgaagttacaggtggttgggagccctctcgcatgcagaacatctggtagattgatctgccaggctgggtggttctactgctttctcaatttctaagaaccttttttttttcttaaagagttctgctgaattatttgacaatatttgtaagtaccatgtttccttgtggtgtatgctctgttctggtttctgttttcaaatcaaatgcctgtttgggaggagatgaacgtatttagtctattagatttgcactgctggattttttttttaaagtgtaaccttgaatagctgtcttattgtttatcctgtaagattagtcaatcgattaaagtttgataattaa

SEQ ID NO: 1342 - protein, 309 aa, Homo sapiens
MAAAGAPDGMEEPGMDTEAETVATEAPARPVNCLEAEAAAGAAAEDSGAARGSLQPAPAQPPGDPAAQASVSNGEDAGGGAGRELVDLKIIWNKTKHDVKFPLDSTGSELKQKIHSITGLPPAMQKVMYKGLVPEDKTLREIKVTSGAKIMVVGSTINDVLAVNTPKDAAQQDAKAEENKKEPLCRQKQHRKVLDKGKPEDVMPSVKGAQERLPTVPLSGMYNKSGGKVRLTFKLEQDQLWIGTKERTEKLPMGSIKNVVSEPIEGHEDYHMMAFQLGPTEASYYWVYWVPTQYVDAIKDTVLGKWQYF

SEQ ID NO: 1343 - DNA, 804 bp, Homo sapiens
gcgcagtgcatcctgggttggcgtagccatggcgtctcgtgtcctttcagcctatgtcagccgcctgcccgcggcctttgcgccgctgccccgggtccggatgctggccgtggcccggcctctcagcaccgctctctgctccgcggggacccagacgaggctcgggactttgcagccggccttagtgctcgcgcaggttcctggtagagttacacagttgtgccgccagtatagcgacatgcctcctttgacgttagagggcatccaggaccgtgttctttacgtattgaaactctatgacaagattgacccagagaagctttcagtaaattctcattttatgaaagacctgggcttagacagtttggaccaagtggagattatcatggccatggaagacgaatttgggtttgaaattcctgatatagatgctgaaaagttaatgtgtccacaagaaattgtagattacattgcagataagaaggatgtatatgaataaagtatcagaccctttggctttgctgagagaggactcagatgatagtgacgaatgtctggcagtgaggacacattttggcattcttgctgactctgacagagtgattctgatggacttgtatttaaattgtatgtgttttactctttgaaaataaatctataaaaccaaaaaaaaaaaaaaaaaaaaaaaaaaaaaaaaaaaaaaaaaaaaaaaaaaaaaaaaaaaaaaaaaaaaaaaaaaaaaaaaaaaaaaaaaaaaaaaaaaaaaaaaaaaaaaaaaaaaaaaaaaaaaaaaaaaaaaaaaaa

SEQ ID NO: 1344 - protein, 156 aa, Homo sapiens
MASRVLSAYVSRLPAAFAPLPRVRMLAVARPLSTALCSAGTQTRLGTLQPALVLAQVPGRVTQLCRQYSDMPPLTLEGIQDRVLYVLKLYDKIDPEKLSVNSHFMKDLGLDSLDQVEIIMAMEDEFGFEIPDIDAEKLMCPQEIVDYIADKKDVYE

SEQ ID NO: 1345 - DNA, 4069 bp, Homo sapiens
gcaggccgaatggtggatttaattggccggagtttagggcgcgcttggcccgcgtgggtcagctgatcgcgcactgagggtgcgatcccgggctccccattccttcctggggcgcctccccggcccagggccaactgggtcccggtgtcggcaggcctggggtcggcgacggctgctcttttcgttctgtcgcctgcccgatggacgagcctcccgggaagcccctcagctgtgaggagaaggaaaagttaaaggagaaattagcattcttgaaaagggaatacagcaagacactagcccgccttcagcgtgcccaaagagctgaaaagattaagcattctattaagaaaacagtagaagaacaagattgtttgtctcagcaggatctctcaccgcagctaaaacactcagaacctaaaaataaaatatgtgtttatgacaagttacacatcaaaacccatcttgatgaagaaactggagaaaagacatctatcacacttgatgttgggcctgagtcctttaaccctggagatggcccaggaggattacctatacaaagaacagatgacacccaagaacattttccccacagggtcagtgaccctagtggtgagcaaaagcagaagctgccaagcagaagaaagaagcagcagaagaggacatttatttcacaggagagagactgtgtctttggcactgattcactcagattgtctgggaaaagactaaaggaacaggaagaaatcagtagcaaaaatcctgctagatcaccagtaactgaaataagaactcaccttttaagtcttaaatctgaacttccagattctccagaaccagttacagaaattaatgaagacagtgtattaattccaccaactgcccaaccagaaaaaggtgttgatacattcctaagaagacctaatttcaccagggcgactacagttcctttacagactctatcagatagcggtagtagtcagcaccttgaacacattcctcctaaaggtagcagtgaacttactactcacgacctaaaaaacattagatttacttcacctgtaagtttggaggcacaaggcaaaaaaatgactgtctctacagataacctccttgtaaataaagctataagtaaaagtggccaactgcccacaagttctaatttagaggcaaatatttcatgttctctaaatgaactcacctacaataacttaccagcaaatgaaaaccaaaacttaaaagaacaaaatcaaacagagaaatctttaaaatctcccagtgacactcttgatggcaggaatgaaaatcttcaggaaagtgagattctaagtcaacctaagagtcttagcctggaagcaacctctcctctttctgcagaaaaacattcttgcacagtgcctgaaggccttctgtttcctgcagaatattatgttagaacaacacgaagcatgtccaattgccagaggaaagtagccgtggaggctgtcattcagagtcatttggatgtcaagaaaaaagggtttaaaaataaaaataaggatgcaagtaaaaatttaaacctttccaatgaggaaactgaccaaagtgaaattaggatgtctggcacatgcacaggacaaccaagttcaagaacctctcagaaacttctctcattaactaaagtcagctctcccgctgggcccactgaagataatgacttgtctaggaaggcagttgcccaagcacctggtagaagatacacaggaaaaagaaaatcagcctgcaccccagcatcagatcattgtgaaccacttttgccaacttctagcctgtcgattgttaacaggtccaaggaagaagtcacctcacacaaatatcagcacgaaaaattatttattcaagtgaaagggaagaaaagtcgtcatcaaaaagaggattccctttcttggagtaatagtgcttatttatccttggatgatgatgctttcacggctccatttcatagggatggaatgctgagtttaaagcaactactgtcttttctcagtatcacagactttcagttacctgatgaagactttggacctcttaagcttgaaaaagtgaagtcctgctcagaaaaaccagtggagccctttgagtcaaaaatgtttggagagagacatcttaaagagggaagctgtatttttccagaggaactgagtcctaaacgcatggatacagaaatggaggacttagaagaggaccttattgttctaccaggaaaatcacatcccaaaaggccaaactcgcaaagccagcatacaaagacgggcctttcttcatccatattactttatactcctttaaatacggttgcgcctgatgataatgacaggcctaccacagacatgtgttcacctgctttccccatcttaggtactactccagcctttggccctcaaggctcctatgaaaaagcatctacagaagttgctggacgaacttgctgcacaccccaacttgctcatttgaaagactcagtctgtcttgccagtgatactaaacaattcgacagttcaggcagcccagcaaaaccacataccaccctgcaagtgtcaggcaggcaaggacaacctacctgtgactgtgactctgtcccgccaggaacacctccacccattgagtcattcacttttaaagaaaatcagctctgtagaaacacatgccaggagctgcataaacattccgtcgaacagactgaaacagcagagcttcctgcttctgatagcataaacccaggcaacctacaattggtttcagagttaaagaatccttcaggttcctgttccgtagatgtgagtgccatgttttgggaaagagccggttgtaaagagccatgtatcataactgcttgcgaagatgtagtttctctttggaaagctctggatgcttggcagtgggaaaaactttatacctggcacttcgcagaggttccagtattacagatagttccagtgcctgatgtgtataatctcgtgtgtgtagctttgggaaatttggaaatcagagagatcagggcattgttttgttcctctgatgatgaaagtgaaaagcaagtactactgaagtctggaaatataaaagctgtgcttggcctgacaaagaggaggctagttagtagcagtgggaccctttctgatcaacaagtagaagtcatgacgtttgcagaagatggaggaggcaaagaaaaccaatttttgatgccccctgaggagactatactaacttttgctgaggtccaagggatgcaagaagctctgcttggtactactattatgaacaacattgttatttggaatttaaaaactggtcaactcctgaaaaagatgcacattgatgattcttaccaagcttcagtctgtcacaaagcctattctgaaatggggcttctctttattgtcctgagtcatccctgtgccaaagagagtgagtcgttgcgaagccctgtgtttcagctcattgtgattaaccctaagacgactctcagcgtgggtgtgatgctgtactgtcttcctccagggcaggctggcaggttcctggaaggtgacgtgaaagatcactgtgcagcagcaatcttgacttctggaacaattgccatttgggacttacttctcggtcagtgtactgccctcctcccacctgtctctgaccaacattggtcttttgtgaaatggtcgggtacagactctcatttgctggctggacaaaaagatggaaatatatttgtataccactattcataagttagggtaaagtgaaaacacaattttctggatatattgggcctcttagtattttttggagttttaaatataaaggagaatatctgaatgacacttaaaatgattgcttgtttatgtccagacagacttattttttattctaatgatggtagcaccactgatcttggatgtacatttatgtatactttgagaaaaagggttttaggttgatttttgtaatttcccacatttgtacatgtgcttttaaaggtgtacataaagcttcaaatggcaataaatatttatttttatacattcaaaaaaaaaaa

SEQ ID NO: 1346 - protein, 1186 aa, Homo sapiens [sequence omitted]

SEQ ID NO: 1347 - DNA, 3377 bp, Homo sapiens
aaagactgaccgactgactctgacaggatccggggctgagggaaggaggcggcggccatggagttgggcgagctgctctacaacaagtctgagtacatcgagacggcatctgggaacaaagtcagtcgccagtcagtgttgtgtggaagccagaacatcgttctcaatggcaagaccattgtgatgaatgactgtattatccgaggggatctggcaaatgtaagagttggacgtcattgtgttgtgaaaagtcgtagtgtcataaggccaccattcaagaagttcagcaaaggtgttgcattctttcctttacatattggagaccatgtctttattgaggaagattgtgtggtcaacgcagcacagattggttcctatgttcatgttgggaagaactgtgtgattgggcgccgatgtgtgttgaaagactgctgcaaaattcttgacaacacagtattacctccagaaactgtggttccaccattcactgtcttctcaggctgcccaggactcttctcaggggagctcccggagtgcactcaggagctgatgattgacgtcaccaagagctactaccagaagtttttgcccctgacgcaagtctagcatctctgcctcatgtcttgaatctgcttgagctctaagatgaacctggggacaaagtgagccagtcagcacctacaaagagcttttgtgtctttgacatctaccaccctcctccttttaaaaaatttctttagaatttctcaatcttcaaggctctaagtgcttaagaattcactaacagacagaccatctggaggagctgtcttcaaatgctgtgcttacaccttatctatgaacagtcactttgtaccattatctgtggaacacagaatcatctgttcccaacactccagccccttggtcctgtggatggctggatcccgcctgaaacggacctgcagagcagcagcacccttccggtgtggaggctatgtagctggtgcgctgctcacggccattcactgcccatgctgagcgcctctcacacaggtaatgcccagcttttctgctgctaacacatttggccagttgttgcagttgctcatcatcttgggaaaggtgtttgtgacttttcagagcccagattcctgttgtctattaaaacttgaagggaggggtgaatagtgtttctctcttcttcccaaaatgaccttagctgtcctaggatagttagtaaaagactttttagcattttgacctagggcctttggctttcactaaaagtggggacctcagtatcccagattgtaattttgccaagtgttagatttgagtctctcatgtggatgcattagtcaggtggttactccttgcttcaaggtacttaccttatttcattgaagacaccgcatttgtgaactcttgcttcctggcctagaaccattcagcctaccctgtatttgccataaactccacaattcacaccaaaatgtctgtacttagagctaattcgcatatatacaggaagggctcttagaatcagtttgtgggcacagagcctcaggagtaaatgaagttactagggctgttcttaccatctccttctggccaaatagcacaacatttcctcgttctgctctgacctcttagcttagaaggaagattcagaagtgaggggctaagaaggttgtccttgcctaatgctctgatctgtaagtgaatagggcagaacagttcagccttgaggttagaatttagcaggagctatcctgacttaatatccagttgtggggtttgcaaaacaaaacagctgtatgtaatcattgccactagttccatctagaactcctttctagtttgttatttttaaaatgtttatacataaaaccaccaaaatacatagcttcgacaagatggaagtttatttctctctcccataacagtgcagtgatagtcagctggtccaggccaggcaaggggctggtccatgatgtcatcaggcacccaggttcctactgtcttgccatgtggccacagttagcaacaaaggaggctgtaaatttagtttctacttgggcagccaaaactctgaggaaggagattctgctagtaaaaaggagtgggggaagaatggccattgggagacaacaagcagactcaaccaggcctctttgttggcttcctttcctcctgctgcacatgagccttcgccttgcatttggagccatgacagctgatagctccagacctgcatcctcctagcttgggggctctgaatgaaaggtttcttcccttccagttcgaatttggaaactcccaaagttctcaatggtttgttgtgagttccatgtcctcttggatcagtcactgtggccatgcatgtttggccacatgattaatccagtctgggtcatgaccttttcttcatccaaaacaaggtgatgggaagacaaaaacaatagctactacaaacaataggagtttataattatgtgctgatgtattcgaagatgtgttgacagtcgtgagtgtgtatcctaggaaaggcgagctggactctgtctccatggtggctctcaccccagggacctaggaacagcctgtcaccacacaattacttttataaccctggagatgaaaatctccttgtcctcaaaatacttccagaagaacaaccagatgggaaggaccttggttgggactctttccagttcacttggggcagagggaatttaatggctcacgtagctgaaaaggatgggctagattgggcttcaggctgcatcccaggactccaaacagggatctgtctctttggctctcagctctgctttcatttgagttggctttattcttgggcttcacagtgtggccccacagcaccagttattgataaaaagagctcccctttgctgacagaactgctggatttggttctcattggtccagacgaggaaggtatccagcctcaagtcatcattgtggccaggaagatggaatacaccaaatggacaggcctggcatgtacccacagagactgagagttggtgctggtggttgtggtggcagatgatattacctgaagaagggacgaatgggtgctgggcaggacaaagcatcagctgtccagttcaggcctctcctctttccctggtgtcttcattttcctccgtctccctgctgtcccttaccctctgcccaatctctcattactcctggtcttgggagttgccttctgaggatactccactgggggtacctgagcctggattagagggcagggggaggatattgcctagccaaagtgggtgttcaataaagaaccatttggagatggtaaaaaaaaaaaaaaaaaaaaaaaaaaaaaaaaaaaaaaaaaaaaaaaaaaaaaa

SEQ ID NO: 1348 - protein, 182 aa, Homo sapiens
MELGELLYNKSEYIETASGNKVSRQSVLCGSQNIVLNGKTIVMNDCIIRGDLANVRVGRHCVVKSRSVIRPPFKKFSKGVAFFPLHIGDHVFIEEDCVVNAAQIGSYVHVGKNCVIGRRCVLKDCCKILDNTVLPPETVVPPFTVFSGCPGLFSGELPECTQELMIDVTKSYYQKFLPLTQV

SEQ ID NO: 1349 - DNA, 2808 bp, Homo sapiens
atggcccggtggcccgcacctcctccgcctccgcctccgcctccacctctggccgcgccgccgccgcccggcgcctctgctaaggggccgccggcgcgcaagctgctttttatgtgcaccttgtccctgtctgtcacctacctgtgctacagcctcctgggcggctcgggctccctgcaattccctctggcgctgcaggagtcgccgggcgccgccgccgagcccccgccgagcccgccgccaccctctctgctgcctacccccgtgcgcctcggcgccccctcgcagccgcccgcgccgccgccgctggacaacgcgagccacggggagccgcccgagcccccagagcagccagccgcccccgggaccgacggctgggggctgccgagcggcggcggaggcgcccaggacgcctggctccggaccccgctggcccccagcgagatgatcacggctcagagcgcgctgccggagagggaagcgcaggagtccagcaccaccgacgaggatctcgcaggccggagagcggccaacgggagcagcgagaggggcggcgccgtcagcacccccgactatggggagaagaagctgccacaggcgctcatcatcggggtcaagaaaggagggacccgcgcgctgctggaggcgatccgcgtgcacccggacgtgcgggcggtgggcgtagagccgcacttcttcgacaggaactacgaaaaggggttggagtggtacagaaatgtgatgcccaagactttggatgggcaaataaccatggagaagactccaagttactttgtgacaaatgaggctcccaagcgcattcactccatggccaaggacatcaaactgattgtggtggtgagaaaccccgtgaccagggccatctctgactacacgcagacactgtcaaagaaacccgagatccccacctttgaggtgctggccttcaaaaaccggaccctcgggctgatcgatgcttcctggagtgccattcgaatagggatctatgcgctgcatctggaaaactggctccagtatttccccctctcccagatcctctttgtcagtggtgagcgactcattgtggaccccgccggggaaatggccaaagtacaggattttctaggcctcaaacgtgttgtgactgagaagcatttctatttcaacaaaaccaaggggttcccttgcctaaagaagccagaagacagcagtgccccgaggtgcttaggcaagagcaaaggtcggactcatcctcgcattgacccagatgtcatccacagactgaggaaattctacaaacccttcaacttgatgttttaccaaatgactggtcaagattttcagtgggaacaggaagagggtgataaatgaggctagagaggcagaggaaggctagtcaataagctaaggaggctccttgcctgagtccttgaataccccagcttctgcagcttcacttgctggagtgccaagtagatctcctcctccttcatgcagccaggattgcctccagtgctgttagcttaggcaaacaggtggatcccatggcatccccatggaggaaccaggcccatctgggcagcagcatctggttgaccagatggccaccagaacccactgttcattcttatcttctgctagttaatatagcctgaagacagaggataaatagttgtcaatgtcagagacagtgctattaatgtatatgtgagcgacaaaaaaggtctgctttataggggttctcactctagcttggggagccagggttctagccctgtatctgtcatgggcacctgctgtctaaacctctgcttgggcttctccccagaatgcactttgtggctgagtgctccaggactcctagggagcaaggtcctccctctaaggtgtttctagtcttctctttaaaggtctcatcccacaacccctgacttcctccctccccacatcatgaaggcagaggcatgcacattcctcactgaaaaagaaaacacacacccacccacacacacacacacagaagaaaatgaaagctgacacacctcgaagccttctttccaagagccctctaaatggggttgggtctcactcttcatgagtatcctgggttgtgcagaagcttagcatatgcccttgtgttcggatcaggcccacagggctgctcaaagagtagagtaattgtaaccgaggtcagagctctggggttggcagagatgagtggccatatctgggggtaaaagaagaaatcctgtcctcttggtgggaggttaccttacctgaagaccatctctcccaagcactgtagttctgagcatgtttttggggtggactctgtcccctagggtccctagaagggcaaagaccagagagttgacaagtctgttattaggaataatccttagccatgtaatggagaaaggagcagtcagcattcttccaatttgccccaccaccacctcctcgggcttcattttctctatttagagatggcagagagtgaggtagtggcgagaaagctgactccattcatcagatccagtttatgagggttgggggtgagcaagggctgtctgcagaaacccccatcaagagctgctgaatgaagtgtcccttcccatcagtttgattcaattaaaatgcatcatttgacataaagcacttgttcacagatctccaaaaccaggaattgttctagtaaaactggaaatttgtatgagtggggggagttaaatctgttcagctgttattaaactgtcatttctcccgctaaatgaaaaccgtgttgttataaagcttaatgcaacctga

SEQ ID NO: 1350 - protein, 456 aa, Homo sapiens
MARWPAPPPPPPPPPPLAAPPPPGASAKGPPARKLLFMCTLSLSVTYLCYSLLGGSGSLQFPLALQESPGAAAEPPPSPPPPSLLPTPVRLGAPSQPPAPPPLDNASHGEPPEPPEQPAAPGTDGWGLPSGGGGAQDAWLRTPLAPSEMITAQSALPEREAQESSTTDEDLAGRRAANGSSERGGAVSTPDYGEKKLPQALIIGVKKGGTRALLEAIRVHPDVRAVGVEPHFFDRNYEKGLEWYRNVMPKTLDGQITMEKTPSYFVTNEAPKRIHSMAKDIKLIVVVRNPVTRAISDYTQTLSKKPEIPTFEVLAFKNRTLGLIDASWSAIRIGIYALHLENWLQYFPLSQILFVSGERLIVDPAGEMAKVQDFLGLKRVVTEKHFYFNKTKGFPCLKKPEDSSAPRCLGKSKGRTHPRIDPDVIHRLRKFYKPFNLMFYQMTGQDFQWEQEEGDK

SEQ ID NO: 1351 - DNA, 6822 bp, Homo sapiens
gcagcagccgccagttccatgcactggcggagcagctctaggcggcggcttctactttcagtttcgtgcagagcgcggaggagccgcgagcgctgagggagtctgcactatggaaacaacctgtcaatccagctcaaggcacacatagcccagacacccatgagaccctctccgtggggaccctagagcacctatcatgaacgaggagaccaaggctggctcctcatggaccccgttggcctccagctcggcaacaagaacctgtggagctgtcttgtgaggctgctcaccaaagacccagaatggctgaacgccaagatgaagttcttcctccccaacacggacctggattccaggaacgagaccttggaccctgaacagagagtcatcctgcaactcaacaagctgcatgtccagggttcggacacctggcagtctttcattcattgtgtgtgcatgcagctggaggtgcctctggacctggaggtgctgctgctgagtacttttggctatgatgatgggttcaccagccagctgggagctgaggggaaaagccaacctgaatctcagctccaccatggcctgaagcgcccacatcagagctgtgggtcctcaccccgccggaagcagtgcaagaagcagcagctagagttggccaagaagtacctgcagctcctgcggacctctgcccagcagcgctacaggagccaaatccctgggtcagggcagccccacgccttccaccaggtctatgtccctccaatcctgcgccgggccacagcatccttagacactccggagggggccattatgggggacgtcaaggtggaagatggtgctgacgtgagcatctcggacctcttcaacaccagggttaacaagggcccgagggtgaccgtgcttttggggaaggctggcatgggcaagaccacgctggcccaccggctctgccagaagtgggcagagggccatctgaactgtttccaggccctgttcctttttgaattccgccagctcaacttgatcacgaggttcctgacaccgtccgagctcctttttgatctgtacctgagccctgaatcggaccacgacactgtcttccagtacctggagaagaacgctgaccaagtcctgctgatctttgatgggctagatgaggccctccagcctatgggtcctgatggcccaggcccagtcctcacccttttctcccatctctgcaatgggaccctcctgcctggctgccgggtgatggctacctcccgtccagggaagctgcctgcctgcctgcctgcagaggcagccatggtccacatgttgggctttgatgggccacgggtggaagaatatgtgaatcacttcttcagcgcccagccatcgcgggagggggccctggtggagttacagacaaatggacgtctccgaagcctgtgtgcggtgcccgcactgtgccaagtcgcctgtctctgcctccaccatctgcttcctgaccacgccccaggccagtctgtggccctcctgcccaacatgactcagctctatatgcagatggtgctcgccctcagcccccctgggcacttgcccacctcgtccctactggacctgggggaggtggccctgaggggcctggagacagggaaggttatcttctatgcaaaagatattgctccacccttgatagcttttggggccactcacagcctgctgacttccttctgcgtctgcacaggccctgggcaccagcagacaggctatgctttcacccacctcagcctgcaggagtttcttgctgccctgcacctgatggccagccccaaggtgaacaaagacacacttacccagtatgttaccctccattcccgctgggtacagcggaccaaagctagactgggcctctcagaccacctccccaccttcctggcgggcctggcatcctgcacctgccgccccttccttagccacctggcgcagggcaatgaggactgtgtgggtgccaagcaggctgctgtagtgcaggtgttgaagaagttggccacccgcaagctcacagggccaaaggttgtagagctgtgtcactgtgtggatgagacacaggagcctgagctggccagtctcaccgcacaaagcctcccctatcaactgcccttccacaatttcccactgacctgcaccgacctggccaccctgaccaacatcctagagcacagggaggcccccatccacctggattttgatggctgtcccctggagccccactgccctgaggctctggtaggctgtgggcagatagagaatctcagctttaagagcaggaagtgtggggatgcctttgcagaagccctctccaggagcttgccgacaatggggaggctgcagatgctggggttagcaggaagtaaaatcactgcccgaggcatcagccacctggtgaaagctttgcctctctgtccacagctgaaagaagtcagttttcgggacaaccagctcagtgaccaggtggtgctgaacattgtggaggttctccctcacctaccacggctccggaagcttgacctgagcagcaacagcatctgcgtgtcaaccctactctgcttggcaagggtggcagtcacgtgtcctaccgtcaggatgcttcaggccagggaggcggacctcatcttccttctttccccgcccacagagacaactgcagagctacaaagagctccagacctgcaggaaagtgacggccagaggaaaggggctcagagcagaagcttgacgctcaggctgcagaagtgtcagctccaggtccacgatgcggaggccctcatagccctgctccaggaaggccctcacctggaggaagtggacctctcagggaaccagctggaagatgaaggctgtcggctgatggcagaggctgcatcccagctgcacatcgccaggaagctggacctcagtgacaacgggctttctgtggccggggtgcattgtgtgctgagggccgtgagtgcgtgctggaccctggcagagctgcacatcagcctgcagcacaaaactgtgatcttcatgtttgcccaggagccagaggagcagaaggggccccaggagagggctgcatttcttgacagcctcatgctccagatgccctctgagctgcctctgagctcccgaaggatgaggctgacacattgtggcctccaagaaaagcacctagagcagctctgcaaggctctgggaggaagctgccacctcggtcacctccacctcgacttctcaggcaatgctctgggggatgaaggtgcagcccggctggctcagctgctcccagggctgggagctctgcagtccttgaacctcagtgagaacggtttgtccctggatgccgtgttgggtttggttcggtgcttctccactctgcagtggctcttccgcttggacatcagctttgaaagccaacacatcctcctgagaggggacaagacaagcagggatatgtgggccactggatctttgccagacttcccagctgcagccaagttcttagggttccgtcagcgctgcatccccaggagcctctgcctcagtgagtgtcctctggagcccccaagcctcacccgcctctgtgccactctgaaggactgcccgggacccctggaactgcaattgtcctgtgagttcctgagtgaccagagcctggagactctactggactgcttacctcaactccctcagctgagcctgctgcagctgagccagacgggactgtccccgaaaagccccttcctgctggccaacaccttaagcctgtgtccacgggttaaaaaggtggatctcaggtccctgcaccatgcaactttgcacttcagatccaacgaggaggaggaaggcgtgtgctgtggcaggttcacaggctgcagcctcagccaggagcacgtagagtcactctgctggttgctgagcaagtgtaaagacctcagccaggtggatctctcagcaaacctgctgggcgacagcggactcagatgccttctggaatgtctgccgcaggtgcccatctccggtttgcttgatctgagtcacaacagcatttctcaggaaagtgccctgtacctgctggagacactgccctcctgcccacgtgtccgggaggcctcagtgaacctgggctctgagcagagcttccggattcacttctccagagaggaccaggctgggaagacactcaggctaagtgagtgcagcttccggccagagcacgtgtccaggctggccaccggcttgagcaagtccctgcagctgacggagctcacgctgacccagtgctgcctgggccagaagcagctggccatcctcctgagcttggtggggcgacccgcagggctgttcagcctcagggtgcaggagccgtgggcggacagagccagggttctctccctgttagaagtctgcgcccaggcctcaggcagtgtcactgaaatcagcatctccgagacccagcagcagctctgtgtccagctggaatttcctcgccaggaagagaatccagaagctgtggcactcaggttggctcactgtgaccttggagcccaccacagccttcttgtcgggcagctgatggagacatgtgccaggctgcagcagctcagcttgtctcaggttaacctctgtgaggacgatgatgccagttccctgctgctgcagagcctcctgctgtccctctctgagctgaagacatttcggctgacctccagctgtgtgagcaccgagggcctcgcccacctggcatctggtctgggccactgccaccacttggaggagctggacttgtctaacaatcaatttgatgaggagggcaccaaggcgctgatgagggcccttgaggggaaatggatgctaaagaggctggacctcagtcaccttctgctgaacagctccaccttggccttgcttactcacagactaagccagatgacctgcctgcagagcctcagactgaacaggaacagtatcggtgatgtcggttgctgccacctttctgaggctctcagggctgccaccagcctagaggagctggacttgagccacaaccagattggagacgctggtgtccagcacttagctaccatcctgcctgggctgccagagctcaggaagatagacctctcagggaatagcatcagctcagccgggggagtgcagttggcagagtctctcgttctttgcaggcgcctggaggagttgatgcttggctgcaatgccctgggggatcccacagccctggggctggctcaggagctgccccagcacctgagggtcctacacctaccattcagccatctgggcccaggtggggccctgagcctggcccaggccctggatggatccccccatttggaagagatcagcttggcggaaaacaacctggctggaggggtcctgcgtttctgtatggagctcccgctgctcagacagatagacctggtttcctgtaagattgacaaccagactgccaagctcctcacctccagcttcacgagctgccctgccctggaagtaatcttgctgtcctggaatctcctcggggatgaggcagctgccgagctggcccaggtgctgccgcagatgggccggctgaagagagtggacctggagaagaatcagatcacagctttgggggcctggctcctggctgaaggactggcccaggggtctagcatccaagtcatccgcctctggaataaccccattccctgcgacatggcccagcacctgaagagccaggagcccaggctggactttgccttctttgacaaccagccccaggccccttggggtacttgatggccccctcaagacctttggaatccagccaagtgatgcacccaaatgatccacctttcgcccactgggataattgactcaggaaagaagagcctcggcagggcgctctgcactccacccaggaggaaggatacgtgtgtcctgctgcagtcctcagggagaacttttttgggaaccaggagctgggtctggacaaaggagtaccctgcattacgtgggatatgtgtgatcaattggggacatgcgacacacaatgagggtgtcatgacaatgcatgacacgtacggttatatgtggcagtgtgaccccttgacatgtggcgttacatgaaagtcagtgtggcacgtgttctgtggcatgggtgctggcatcccaagtagcaggatacatgattgttggtctatatatgacacatgacaaatgtccatgtcacaggactcatggctggccagatgacctcaggctggcccaagatctaatttattaatttttaaagcaaatacatatttatagattgtgtgtatggagcagctaagtcaggaaaagtcttccgcccgagctgggaggggagagtgtccatgcactgaccagtccaggggctcaagggccagggctctggaacaagccagggactcagccattaagtcccctcctgcctcaatcctcagcctacccatctataaacttgatgactcctcccttacttacatactagcttccaaggacaggtggaggtagggccagcctggcgggagtggagaagcccagtctgtcctatgtaagggacaaagccaggtctaatggtactgggtagggggcactgccaagacaataagctaggctactgggtccagctactactttggtgggattcaggtgagtctccatgcacttcacatgttacccagtgttcttgttacttccaaggagaaccaagaatggctctgtcacactcgaagccaggcttgatcaataaacacaatggtattccacgtc

SEQ ID NO: 1352 - protein, 1866 aa, Homo sapiens
MDPVGLQLGNKNLWSCLVRLLTKDPEWLNAKMKFFLPNTDLDSRNETLDPEQRVILQLNKLHVQGSDTWQSFIHCVCMQLEVPLDLEVLLLSTFGYDDGFTSQLGAEGKSQPESQLHHGLKRPHQSCGSSPRRKQCKKQQLELAKKYLQLLRTSAQQRYRSQIPGSGQPHAFHQVYVPPILRRATASLDTPEGAIMGDVKVEDGADVSISDLFNTRVNKGPRVTVLLGKAGMGKTTLAHRLCQKWAEGHLNCFQALFLFEFRQLNLITRFLTPSELLFDLYLSPESDHDTVFQYLEKNADQVLLIFDGLDEALQPMGPDGPGPVLTLFSHLCNGTLLPGCRVMATSRPGKLPACLPAEAAMVHMLGFDGPRVEEYVNHFFSAQPSREGALVELQTNGRLRSLCAVPALCQVACLCLHHLLPDHAPGQSVALLPNMTQLYMQMVLALSPPGHLPTSSLLDLGEVALRGLETGKVIFYAKDIAPPLIAFGATHSLLTSFCVCTGPGHQQTGYAFTHLSLQEFLAALHLMASPKVNKDTLTQYVTLHSRWVQRTKARLGLSDHLPTFLAGLASCTCRPFLSHLAQGNEDCVGAKQAAVVQVLKKLATRKLTGPKVVELCHCVDETQEPELASLTAQSLPYQLPFHNFPLTCTDLATLTNILEHREAPIHLDFDGCPLEPHCPEALVGCGQIENLSFKSRKCGDAFAEALSRSLPTMGRLQMLGLAGSKITARGISHLVKALPLCPQLKEVSFRDNQLSDQVVLNIVEVLPHLPRLRKLDLSSNSICVSTLLCLARVAVTCPTVRMLQAREADLIFLLSPPTETTAELQRAPDLQESDGQRKGAQSRSLTLRLQKCQLQVHDAEALIALLQEGPHLEEVDLSGNQLEDEGCRLMAEAASQLHIARKLDLSDNGLSVAGVHCVLRAVSACWTLAELHISLQHKTVIFMFAQEPEEQKGPQERAAFLDSLMLQMPSELPLSSRRMRLTHCGLQEKHLEQLCKALGGSCHLGHLHLDFSGNALGDEGAARLAQLLPGLGALQSLNLSENGLSLDAVLGLVRCFSTLQWLFRLDISFESQHILLRGDKTSRDMWATGSLPDFPAAAKFLGFRQRCIPRSLCLSECPLEPPSLTRLCATLKDCPGPLELQLSCEFLSDQSLETLLDCLPQLPQLSLLQLSQTGLSPKSPFLLANTLSLCPRVKKVDLRSLHHATLHFRSNEEEEGVCCGRFTGCSLSQEHVESLCWLLSKCKDLSQVDLSANLLGDSGLRCLLECLPQVPISGLLDLSHNSISQESALYLLETLPSCPRVREASVNLGSEQSFRIHFSREDQAGKTLRLSECSFRPEHVSRLATGLSKSLQLTELTLTQCCLGQKQLAILLSLVGRPAGLFSLRVQEPWADRARVLSLLEVCAQASGSVTEISISETQQQLCVQLEFPRQEENPEAVALRLAHCDLGAHHSLLVGQLMETCARLQQLSLSQVNLCEDDDASSLLLQSLLLSLSELKTFRLTSSCVSTEGLAHLASGLGHCHHLEELDLSNNQFDEEGTKALMRALEGKWMLKRLDLSHLLLNSSTLALLTHRLSQMTCLQSLRLNRNSIGDVGCCHLSEALRAATSLEELDLSHNQIGDAGVQHLATILPGLPELRKIDLSGNSISSAGGVQLAESLVLCRRLEELMLGCNALGDPTALGLAQELPQHLRVLHLPFSHLGPGGALSLAQALDGSPHLEEISLAENNLAGGVLRFCMELPLLRQIDLVSCKIDNQTAKLLTSSFTSCPALEVILLSWNLLGDEAAAELAQVLPQMGRLKRVDLEKNQITALGAWLLAEGLAQGSSIQVIRLWNNPIPCDMAQHLKSQEPRLDFAFFDNQPQAPWGT

SEQ ID NO: 1353 - DNA, 506 bp, Homo sapiens
cagccctgacgcttccttggggccacttccttctttttttcctagcaacggcgggtagcgtttttgacatcccgggaggctgtgccgccggcctgagcccagagtttcgcggcctccgcgatggcagaggtggaggaaaccttaaagaggatccagagtcataaaggggttattggaactatggttgtaaatgcagaaggtattcccatccgaacaaccttggacaactcaacaactgttcaatatgcaggccttcttcatcacctgacaatgaaagccaaaagcacagttcgtgatattgatcctcagaacgacctgacttttcttaggatcagatcaaagaaacatgaaatcatggtagctccagataaggaatatcttctgatcgtcattcagaatccatgtgaatagacctgcgatggccaaggctgtttaagcgacactgggttggaaacacttggctctctcatgagtattaaaattctatttcaatctaaaaaaaaaaa

SEQ ID NO: 1354 - protein, 96 aa, Homo sapiens
MAEVEETLKRIQSHKGVIGTMVVNAEGIPIRTTLDNSTTVQYAGLLHHLTMKAKSTVRDIDPQNDLTFLRIRSKKHEIMVAPDKEYLLIVIQNPCE

SEQ ID NO: 1355 - DNA, 2236 bp, Homo sapiens
acacacgcgcgcacacacacgcgcacaccggaccccgcgcgcacacgcacggagggcgcgagcgagcagacgcgcacaccggcgagccaagttccgcagcctggcatggcttctggggacctttacgaggttgaaaggattgtagacaagaggaagaacaagaaaggaaaatgggagtatcttatccgatggaaaggctacgggagcaccgaggacacgtgggagccggagcaccacctcttgcactgtgaggagtttattgatgaattcaatgggttgcacatgtccaaggacaagaggatcaagtcagggaagcagtccagtacctccaagctgctgcgtgacagtcgaggcccgtcggttgagaaactgtcccacagaccttcagatcctggaaagagcaaggggacctcccataaacggaagcgaattaaccctcccctggccaagccaaaaaaagggtattcaggcaagccctcttcaggaggtgacagggccaccaagacggtgtcttacaggactacccccagtggtttgcaaataatgcccctgaaaaagtctcagaacgggatggaaaatggggacgccggctctgagaaggatgagaggcactttggaaatgggtcccatcagcctggcttggatttgaatgatcatgttggagagcaagatatgggtgaatgtgacgtgaatcacgctacactggcggagaacgggctcggctctgctctgaccaacgggggattgaacctgcacagtccagtgaagaggaagctggaagcggagaaggactacgtctttgacaaaaggctcagatacagtgtccgccagaatgaaagcaactgtcggtttcgagacatcgttgtgcggaaggaagaagggttcacgcacatcctgctgtccagtcagacctcggataacaatgccctgacacctgagatcatgaaagaagtccggcgagcgctctgcaacgcagccacagacgacagcaaactgctgctcctcagcgcagtggggagcgtgttctgcagcggcctggattattcctacctaattggccggttgtccagcgaccggcgaaaggagagcactcggattgcagaagccatcagggactttgtgaaggcctttatccagtttaagaagcctatcgtggtggccatcaatgggccggccctgggcctgggtgcctccatcctgcccctctgtgacatcgtgtgggccagtgagaaggcctggttccagacgccctacgccaccatccgcctcacgcctgctggctgctcctcctacaccttcccccagatcctgggcgtcgcgctggccaatgagatgctgttctgtgggcggaagctcaccgcccaggaggcctgcagcagggggctggtgtcgcaggtcttctggcccaccacgttcagccaggaggtcatgctgcgggtcaaggagatggcatcctgcagtgccgtggtgttagaggagtccaaatgcctcgtgcggagcttcctgaaatcagtgctggaagacgtgaacgagaaggaatgcctcatgctcaagcagctctggagctcctccaaaggccttgactcccttttcagctacctgcaggacaaaatttatgaagtctgaggggccccagctcacgggcccccaacttccagctctgccctgtgtttcggaaaccagagcacagtgtctgccccggccaaggagtttgtcaaggtgtctctttatacgtagggttgtgtccatttcctcgtgtcctttggttgctcctccttggtttgattttgtgtaatggatggaaaacgcagcatacttggcctcccccacctccctgcccttcctggccagagagctgtccaaggctgtatcttcccagggctccgccaagcaccgctgtcctttccccacttgctgaaatgcaccatgacggtccaggaaggggaagaccactttcacattcttctgactcaggctgtgtctacacagtgcctctgacttggagacttggccatcatggctctctctggttgtatttagatcgggtgtcagaggacgaccaatcttagggaatttccagaccaatgagcaaaatgattgtgcacacctggcctcagtctcctttccgacgcaaatctgtgtgactattagggcttggtcttaaaacccaattgagtgatttgcaaacccagatattgtacatttagaaatgttttgttaaatatatatttttaaa

SEQ ID NO: 1356 - protein, 506 aa, Homo sapiens
MASGDLYEVERIVDKRKNKKGKWEYLIRWKGYGSTEDTWEPEHHLLHCEEFIDEFNGLHMSKDKRIKSGKQSSTSKLLRDSRGPSVEKLSHRPSDPGKSKGTSHKRKRINPPLAKPKKGYSGKPSSGGDRATKTVSYRTTPSGLQIMPLKKSQNGMENGDAGSEKDERHFGNGSHQPGLDLNDHVGEQDMGECDVNHATLAENGLGSALTNGGLNLHSPVKRKLEAEKDYVFDKRLRYSVRQNESNCRFRDIVVRKEEGFTHILLSSQTSDNNALTPEIMKEVRRALCNAATDDSKLLLLSAVGSVFCSGLDYSYLIGRLSSDRRKESTRIAEAIRDFVKAFIQFKKPIVVAINGPALGLGASILPLCDIVWASEKAWFQTPYATIRLTPAGCSSYTFPQILGVALANEMLFCGRKLTAQEACSRGLVSQVFWPTTFSQEVMLRVKEMASCSAVVLEESKCLVRSFLKSVLEDVNEKECLMLKQLWSSSKGLDSLFSYLQDKIYEV

SEQ ID NO: 1357 - DNA, 4128 bp, Homo sapiens
ggcttcttggatgggctgggcgtgcatggcataaccgtttgagaacaacaaaccaagccggccgggctgccgctctgtttcctgcgaggagggaagttacagatctccgccctggcgtccggggaaggatgggacaggctgctgagccaactgggtacatggaaaactcagtctcctacagcgcaattgaagacgttcagctgctgtcctgggagaatgccccgaagtactgtttacagctcacgattcctgggggaactgtcttactgcaggctgccaatagctacctgcgagaccagtggttccattctctgcaatggaagaaaaagatttacaaatataagaaagtgctgagtaacccaagccgctgggaagttgtcttgaaagagatccggaccctggtggacatggccctgacatcccccctgcaggatgactccatcaaccaggccccactggaaatcgtctcgaaactgctctcagagaacacaaacttgaccacccaggagcatgaaaacatcattgtggcaatcgctcctttgctggaaaacaaccacccaccaccagatctctgtgaattcttttgcaagcactgcagagagcggccccggtccatggtggtcatcgaggtgttcacccccgtggtgcagcgaatcctcaagcataacatggactttgggaagtgcccgcgactgaggctgtttactcaggagtacatccttgccttgaacgagctcaacgcggggatggaagtggtgaagaagttcattcagagcatgcacggccccacagggcactgcccccacccccgggtcctgcccaacctggtggccgtgtgcctggctgccatctactcctgctatgaagagttcatcaacagccgcgacaattccccaagcctgaaggaaatccggaacggctgccagcagccgtgcgaccggaagcccactttacctctgcgccttctgcaccccagcccggacctggtgtctcaggaagccacgctgtctgaggcccggctcaagtcggtggtcgtggcctccagtgagatccacgtggaggtggaacgcaccagcactgccaagccggcgctgacggccagcgcaggcaacgacagcgagcccaacctcatcgactgcctcatggtcagccccgcctgcagcaccatgagcatcgagctgggcccccaggccgaccgcacgctcggctgctacgtggaaatcctcaagctgctgtcagactatgatgactggagaccgtctctggccagtttgcttcaacccattccattccccaaagaagctctcgcacatgagaagttcaccaaggaactgaagtacgtgattcagaggttcgccgaagaccccaggcaagaggtccactcatgcctgctgagcgtgcgggccggcaaagatggctggttccagctctacagccccggaggggtggcctgcgacgatgacggggagctgttcgccagcatggtgcacatcctcatgggctcctgttacaagaccaaaaaattcctgctctccctggcagaaaacaagctgggtccctgcatgctcctggcactgagggggaaccagaccatggtggagatcctgtgcttgatgctggaatacaacatcatcgacaacaacgacacccaactgcagatcatctcaaccctggagagcacagacgtggggaagcgcatgtacgagcagctgtgtgaccggcagcgggagctgaaggagctgcaaaggaaaggcgggcccaccaggctaacactgccctccaagtccacagacgctgacttggctcgtttgctgagctccggctccttcggaaacctggagaacctcagtttggccttcaccaatgtaaccagtgcctgcgccgagcacctcatcaaactgccttcgctcaagcagctgaacctgtggtccactcagtttggagacgctggccttcggctcctgtcggaacacctcaccatgctccaggtgctgaacctgtgcgagaccccggtcacagacgctggcctgctggccctgagctccatgaagagtctctgcagtttaaacatgaacagcaccaagctctcagctgacacctacgaagatctgaaggccaagcttcccaatttgaaggaagtggacgtccgctacaccgaagcctggtgaagctcccagctcaaggcaggaagacgtttgcaaccgcgacaaaataactcttgactaacagccgcagagcagccggtcctggggtcccaccctggtgccctggctgtgagatagatggggagtctttctgggggcggaggggggagggggtggggagggggcccacaagcacgcccagcccccgccgaattcttttagcttcgtaattggaacctttgacctgatctaaagtggactttgtagcaacaagaggagcatcagcgggtcggggaggggtttgggggtgggctggggggtgggggaccctttgtggattttctttgcctttgtgtttgatgccgtcgtgtgggaaaagtcaactccgatgccaccattgcgggccggacgaaggatgctttcttcctagaggctccgagctgagctgcgaactcgccccccgcccttgggacaagaagacccagtcacatcactgcacccgtcctgtgtcctcaccattgctatgcaaagtgattcttgttgtacataagatttaaataatgcacctatttaagacatgttgacaaattgcgggtctgggacccgcctcttatttatgaagtctttgaccgtcccccccgcccgaccccaccgccctcccgcccccacctggcgtgtagtactgtataaaccagtcagctgtcgggttagtggtagtattattgttatttttttaaaggaaacaaacagacaacaaaaagaagaaaaaaaaaaagaacctccttggaaaaattaattgctttttcgtaatggattctctatgctaatgctctctcgtctgtctgtctgtctgcccactcccccacccaccactgtgcgtttctgatttccaaatgtctccaactccctcacgaggtggggctcaggctggaggaggagggattaagatccccttgctccactaaggcccaagctctttctctcggcaccttttagacttgaatgggaggctgctaacccgccctctccagtccaccccggtaaaagagctgttccccacccccagggagctcctgtccctgtcagcctttgctgtcccctgtccccaacggagactctgtcacccctgggctccccctgccatcgtgtgcttcacgtggccccatgcatgcccgcctctctgcatggtctcttgggaaaagagagatgtgtcgcctccgccagtccgactgccctccccaccccacccccgccaccccccacatgtgaccactgcaacgaagacactccttctgtccccacctgctccgaagacaaaccaacctccgtttcttttataaacagtcggctttttcttaataagccctcactgtacagaacagcccgttgatggtttatttggggtccccctctccccccagcccttttttctgttggtttagcacaaatacttccctcctccggcacctccaaacctaccccacagtcagtgtacttgttttatatatatttaatcttattcaatggaaaccatgcttttgtcgttttatactttgctaggtagactttattacccccccactatgccctcatttttttaaaaaaggaaaaaaaaaagaaactgggttccagtcttaattcattttccgtgccaggttttatttcgtgtgtgtgtgagtgtgttctgttttgtgttttgttttttgttgttgttttcagttgtttggttttcttttctttcccccctccggtcccatacttcacagcactctggtgcgggaagaagcagaagcaaaaaaaataaaaataaaaaaataaataaaaataaaaaaaataaaaaaggaaaaaaaaaaagaagaaacaagacatgccacctttcccctcgcactgttgcttttcctgatggttaatactactgtcacgtagctgtgtacaaagagatgtgaaatactttcaggcaaaaataaactgtaagtgactcatc

SEQ ID NO: 1358 - protein, 679 aa, Homo sapiens
MGQAAEPTGYMENSVSYSAIEDVQLLSWENAPKYCLQLTIPGGTVLLQAANSYLRDQWFHSLQWKKKIYKYKKVLSNPSRWEVVLKEIRTLVDMALTSPLQDDSINQAPLEIVSKLLSENTNLTTQEHENIIVAIAPLLENNHPPPDLCEFFCKHCRERPRSMVVIEVFTPVVQRILKHNMDFGKCPRLRLFTQEYILALNELNAGMEVVKKFIQSMHGPTGHCPHPRVLPNLVAVCLAAIYSCYEEFINSRDNSPSLKEIRNGCQQPCDRKPTLPLRLLHPSPDLVSQEATLSEARLKSVVVASSEIHVEVERTSTAKPALTASAGNDSEPNLIDCLMVSPACSTMSIELGPQADRTLGCYVEILKLLSDYDDWRPSLASLLQPIPFPKEALAHEKFTKELKYVIQRFAEDPRQEVHSCLLSVRAGKDGWFQLYSPGGVACDDDGELFASMVHILMGSCYKTKKFLLSLAENKLGPCMLLALRGNQTMVEILCLMLEYNIIDNNDTQLQIISTLESTDVGKRMYEQLCDRQRELKELQRKGGPTRLTLPSKSTDADLARLLSSGSFGNLENLSLAFTNVTSACAEHLIKLPSLKQLNLWSTQFGDAGLRLLSEHLTMLQVLNLCETPVTDAGLLALSSMKSLCSLNMNSTKLSADTYEDLKAKLPNLKEVDVRYTEAW

SEQ ID NO: 1359 - DNA, 4235 bp, Homo sapiens
cgaggagaccaagccgctgctggggggcgacgtgtcggcccccgaaggcacgaagatgggcgccgtgccctgccgccgggctcttctgctttgcaacgggatgaggtacaaactgctgcaggagggcgacattcaggtctgtgtcatccggcacccgcggacctttctcagcaagatcctcacctcgaaattcctgaggcgctgggagccgcaccacctaacgctggccgacaacagcctggcgtccgccacgccaactgggtacatggaaaactcagtctcctacagcgcaattgaagacgttcagctgctgtcctgggagaatgccccgaagtactgtttacagctcacgattcctgggggaactgtcttactgcaggctgccaatagctacctgcgagaccagtggttccattctctgcaatggaagaaaaagatttacaaatataagaaagtgctgagtaacccaagccgctgggaagttgtcttgaaagagatccggaccctggtggacatggccctgacatcccccctgcaggatgactccatcaaccaggccccactggaaatcgtctcgaaactgctctcagagaacacaaacttgaccacccaggagcatgaaaacatcattgtggcaatcgctcctttgctggaaaacaaccacccaccaccagatctctgtgaattcttttgcaagcactgcagagagcggccccggtccatggtggtcatcgaggtgttcacccccgtggtgcagcgaatcctcaagcataacatggactttgggaagtgcccgcgactgaggctgtttactcaggagtacatccttgccttgaacgagctcaacgcggggatggaagtggtgaagaagttcattcagagcatgcacggccccacagggcactgcccccacccccgggtcctgcccaacctggtggccgtgtgcctggctgccatctactcctgctatgaagagttcatcaacagccgcgacaattccccaagcctgaaggaaatccggaacggctgccagcagccgtgcgaccggaagcccactttacctctgcgccttctgcaccccagcccggacctggtgtctcaggaagccacgctgtctgaggcccggctcaagtcggtggtcgtggcctccagtgagatccacgtggaggtggaacgcaccagcactgccaagccggcgctgacggccagcgcaggcaacgacagcgagcccaacctcatcgactgcctcatggtcagccccgcctgcagcaccatgagcatcgagctgggcccccaggccgaccgcacgctcggctgctacgtggaaatcctcaagctgctgtcagactatgatgactggagaccgtctctggccagtttgcttcaacccattccattccccaaagaagctctcgcacatgagaagttcaccaaggaactgaagtacgtgattcagaggttcgccgaagaccccaggcaagaggtccactcatgcctgctgagcgtgcgggccggcaaagatggctggttccagctctacagccccggaggggtggcctgcgacgatgacggggagctgttcgccagcatggtgcacatcctcatgggctcctgttacaagaccaaaaaattcctgctctccctggcagaaaacaagctgggtccctgcatgctcctggcactgagggggaaccagaccatggtggagatcctgtgcttgatgctggaatacaacatcatcgacaacaacgacacccaactgcagatcatctcaaccctggagagcacagacgtggggaagcgcatgtacgagcagctgtgtgaccggcagcgggagctgaaggagctgcaaaggaaaggcgggcccaccaggctaacactgccctccaagtccacagacgctgacttggctcgtttgctgagctccggctccttcggaaacctggagaacctcagtttggccttcaccaatgtaaccagtgcctgcgccgagcacctcatcaaactgccttcgctcaagcagctgaacctgtggtccactcagtttggagacgctggccttcggctcctgtcggaacacctcaccatgctccaggtgctgaacctgtgcgagaccccggtcacagacgctggcctgctggccctgagctccatgaagagtctctgcagtttaaacatgaacagcaccaagctctcagctgacacctacgaagatctgaaggccaagcttcccaatttgaaggaagtggacgtccgctacaccgaagcctggtgaagctcccagctcaaggcaggaagacgtttgcaaccgcgacaaaataactcttgactaacagccgcagagcagccggtcctggggtcccaccctggtgccctggctgtgagatagatggggagtctttctgggggcggaggggggagggggtggggagggggcccacaagcacgcccagcccccgccgaattcttttagcttcgtaattggaacctttgacctgatctaaagtggactttgtagcaacaagaggagcatcagcgggtcggggaggggtttgggggtgggctggggggtgggggaccctttgtggattttctttgcctttgtgtttgatgccgtcgtgtgggaaaagtcaactccgatgccaccattgcgggccggacgaaggatgctttcttcctagaggctccgagctgagctgcgaactcgccccccgcccttgggacaagaagacccagtcacatcactgcacccgtcctgtgtcctcaccattgctatgcaaagtgattcttgttgtacataagatttaaataatgcacctatttaagacatgttgacaaattgcgggtctgggacccgcctcttatttatgaagtctttgaccgtcccccccgcccgaccccaccgccctcccgcccccacctggcgtgtagtactgtataaaccagtcagctgtcgggttagtggtagtattattgttatttttttaaaggaaacaaacagacaacaaaaagaagaaaaaaaaaaagaacctccttggaaaaattaattgctttttcgtaatggattctctatgctaatgctctctcgtctgtctgtctgtctgcccactcccccacccaccactgtgcgtttctgatttccaaatgtctccaactccctcacgaggtggggctcaggctggaggaggagggattaagatccccttgctccactaaggcccaagctctttctctcggcaccttttagacttgaatgggaggctgctaacccgccctctccagtccaccccggtaaaagagctgttccccacccccagggagctcctgtccctgtcagcctttgctgtcccctgtccccaacggagactctgtcacccctgggctccccctgccatcgtgtgcttcacgtggccccatgcatgcccgcctctctgcatggtctcttgggaaaagagagatgtgtcgcctccgccagtccgactgccctccccaccccacccccgccaccccccacatgtgaccactgcaacgaagacactccttctgtccccacctgctccgaagacaaaccaacctccgtttcttttataaacagtcggctttttcttaataagccctcactgtacagaacagcccgttgatggtttatttggggtccccctctccccccagcccttttttctgttggtttagcacaaatacttccctcctccggcacctccaaacctaccccacagtcagtgtacttgttttatatatatttaatcttattcaatggaaaccatgcttttgtcgttttatactttgctaggtagactttattacccccccactatgccctcatttttttaaaaaaggaaaaaaaaaagaaactgggttccagtcttaattcattttccgtgccaggttttatttcgtgtgtgtgtgagtgtgttctgttttgtgttttgttttttgttgttgttttcagttgtttggttttcttttctttcccccctccggtcccatacttcacagcactctggtgcgggaagaagcagaagcaaaaaaaataaaaataaaaaaataaataaaaataaaaaaaataaaaaaggaaaaaaaaaaagaagaaacaagacatgccacctttcccctcgcactgttgcttttcctgatggttaatactactgtcacgtagctgtgtacaaagagatgtgaaatactttcaggcaaaaataaactgtaagtgactcatc

SEQ ID NO: 1360 - protein, 739 aa, Homo sapiens
MGAVPCRRALLLCNGMRYKLLQEGDIQVCVIRHPRTFLSKILTSKFLRRWEPHHLTLADNSLASATPTGYMENSVSYSAIEDVQLLSWENAPKYCLQLTIPGGTVLLQAANSYLRDQWFHSLQWKKKIYKYKKVLSNPSRWEVVLKEIRTLVDMALTSPLQDDSINQAPLEIVSKLLSENTNLTTQEHENIIVAIAPLLENNHPPPDLCEFFCKHCRERPRSMVVIEVFTPVVQRILKHNMDFGKCPRLRLFTQEYILALNELNAGMEVVKKFIQSMHGPTGHCPHPRVLPNLVAVCLAAIYSCYEEFINSRDNSPSLKEIRNGCQQPCDRKPTLPLRLLHPSPDLVSQEATLSEARLKSVVVASSEIHVEVERTSTAKPALTASAGNDSEPNLIDCLMVSPACSTMSIELGPQADRTLGCYVEILKLLSDYDDWRPSLASLLQPIPFPKEALAHEKFTKELKYVIQRFAEDPRQEVHSCLLSVRAGKDGWFQLYSPGGVACDDDGELFASMVHILMGSCYKTKKFLLSLAENKLGPCMLLALRGNQTMVEILCLMLEYNIIDNNDTQLQIISTLESTDVGKRMYEQLCDRQRELKELQRKGGPTRLTLPSKSTDADLARLLSSGSFGNLENLSLAFTNVTSACAEHLIKLPSLKQLNLWSTQFGDAGLRLLSEHLTMLQVLNLCETPVTDAGLLALSSMKSLCSLNMNSTKLSADTYEDLKAKLPNLKEVDVRYTEAW

SEQ ID NO: 1361 - DNA, 665 bp, Homo sapiens
atggtcaaccccactgtgttctctgacatcgctgtcaacggcgagcccttgggccgcatctccttcgagctgtttgcaaacaagtttccaaagacagcagaaaactttcacgctctgagcactggagagaaaggagttggttataagggttcctgctttcacaggaacattccagggtttatgtatcagggtggtgacttcacacgccgtaatggcactggtggcaagtccatctatggggagaaatttgaagatgagaacttcatcctaaagcatacaggtcccggcatcttgtccatggcaaatgctggacccaacacaaacggttcccagttttccacacgcactgccaagactgagtggttgaacgcaagcacgtggtctccggcaaggtgaaagaagacgtgaagactgtggaggccatggagcactttgggtccaggaatggcaagaccagcaagaagatcactattgctaactgtggacaacttgaataaagtttgacttatgttttatcttttttttttttttttgagaaggagtctcactctgtcacccacgctggagcgcagtggagcaatctcagctcactgcaagctctgcctcccgggttcatgccattctcctgcctcagcctcccaagtagctgagactacaggcgcccc

SEQ ID NO: 1362 - DNA, 1101 bp, Homo sapiens
atgtgcggtgaggctcgcggccggagtgcggcgctgggcggaagctaccatggcggccgagcgaaagacaaggttgtccaagaatctactgcgcatgaagtttatgcaaaggggactggactcagaaaccaagaaacaactagaagaagaagaaaagaaaatcattagtgaagagcactggtacttggatttgccagagcttaaagagaaagagagtttcataatagaagagcagagtttcttactatgtgaagatcttctctatggaagaatgtcattcagaggatttaatcctgaggttgagaaattgatgcttcagatgaatgctaagcacaaagcagaagaagttgaagatgaaacagtagagcttgatgtgtcagatgaagagatggctagaagatatgagaccttggtggggacaattgggaaaaagtttgccagaaagagagaccatgccaattatgaagaagatgaaaatggagacataacaccaattaaagcaaagaagatgttcttaaagccccaggattaagatggatgccttaagcgatggcccaggggtgcttggtggaagtcagcagggcatctggagctcatcccaatggtgtctctatagttattaatactgtaacgtttacttgtaaagagattatcattttagaaacatgctgtttttgaaacagatgtgtgatggatgttgtacatcctttgcttcttggtattcattcagagtggatttttagcccctgatctacaaatgtacattgttacagggctgcttcctaaagattttttttacctcaggtttctcttaatatagttctccagtcactgaccttgaattgacttacataaactactgccaatgtttaaattgcccttatgtttatatttattatgtcaagccaattcgtacatacaatttggaatcaaatgtcataagaatttattatataaatttatcaagaataaaaatgcctctccagccttaagtatttacatgctcccaggtcattgtcagtttatggtattatgttgttttatttaaagcattgaattgatagaaaaatttgctctgtaataaaaatctactttcacata

SEQ ID NO: 1363 - protein, 160 aa, Homo sapiens
MAAERKTRLSKNLLRMKFMQRGLDSETKKQLEEEEKKIISEEHWYLDLPELKEKESFIIEEQSFLLCEDLLYGRMSFRGFNPEVEKLMLQMNAKHKAEEVEDETVELDVSDEEMARRYETLVGTIGKKFARKRDHANYEEDENGDITPIKAKKMFLKPQD

SEQ ID NO: 1364 - DNA, 3183 bp, Homo sapiens
cggcggccccgtggccaacatgcttcgcaaagggtgctgtgtggagttgctgctgctgttggtagctgcggagctgcccctgggtggtggctgcccacgggactgtgtgtgctacccggcgcccatgacggtcagctgccaggcgcacaactttgcagccatcccggagggcatccccgtggacagcgagcgcgtcttcctgcagaacaaccgcatcggcctcctccagcccggccacttcagccccgccatggtcaccctgtggatctactcgaacaacatcacctacatccaccccagcaccttcgagggcttcgtgcacctggaggagctggacctcggcgacaaccggcagctgcggacgctggcacccgagaccttccagggcctggtgaagcttcacgccctctacctctacaagtgtgggctcagcgccttgccggccggcgtctttggcggcctgcacagcctgcagtacctctacctgcaggacaaccacatcgagtacctccaggacgacatcttcgtggacctggtcaacctcagccacctgtttctccacggcaacaagctgtggagtctgggcccgggcaccttccggggcctggtgaacctggaccgtcttttgctgcacgagaaccagctgcagtgggtccaccacaaggcattccacgacctccgcaggctgaccaccctcttcctcttcaacaacagcctctcggagctgcagggtgagtgcctggccccgctgggggccctggagttcctccgcctcaacggcaacccctgggactgtggttgtcgcgcgcgctccctgtgggaatggctgcagaggttccggggctccagctccgctgtcccctgtgtgtcccctgggctgcggcacggccaggacctgaagctgctgagggccgaggacttccggaactgcacgggaccagcgtccccgcaccagatcaagtcacacacgctcaccaccaccgacagggccgcccgcaaggaacaccactcaccccacggccccaccaggagcaagggccacccgcacggcccccggcccggccacaggaagccggggaagaactgcaccaaccccaggaaccgcaatcagatctctaaggcgggcgccgggaaacaggcccccgagctgccagactatgccccagactaccagcacaagttcagttttgacatcatgcctacggcccggcccaagaggaagggcaagtgtgcccgcaggacccccatccgtgcccccagcggggtgcagcaggcctcctcggccagttccctgggggcctccctcctggcctggacactggggctggcggtcactctccgctgaggacccagggcgtcagcacccagcactgccacatgtccaccaaggaacagaatttattttcttctttttttaacaagtggaagatctgctgggtttcaggaaaaggctggtagaggcttcggctgctgtctggacgtctggaccctgccatgtggattataaacccaaagtgtacagccctaggcgggagggggtggcgcttctcagccggctgtcccagccagccccgcagagcgcccacggacagtgtccactctggcaaggtgggaaaaggcactccaagtgcatcctccactggcaacagtgggacaattgcccccgacggcggcaccggggctctgtggaatcccgatcgttccgagaggtctggagggccccgtggttcctggagaaagcaggacgcagagaagaacaaatgaggctcacccacgaggctgggtggccagcagtctgggcacacacgagcaggtggcatcttggctcttgcctgaggccagtcaccctgccctgaattctaccctactccaccttcagcccctccctcgggggtagcgcctctcattcctgatgtctcaggcaaccctggcagacccaggtccaactgctggggtccaagaaccaattaccaaaggaaagatcatcagaggctgaaatctagaacttcatcccgggcaatgaggttctcacagaaggtgcagttttataactaactacgtccacttatatatattcacactctacatatatatatatatatatatatatatatatatatatatatatacacaaatgcacagtccccctcccactccgttacctaactgtacgtcttttcatgtttataaactatacagaaaactgtatttgctgaactaaggattgtattggtgatttctagcaaaaacaaagtgatagaatttttgtctagaatcccaaactggcaacgatagtctccaagggacctggccttgccaagggcctggggcaaggtgtcggcgggacggtgaggaagggggaggcagcaagagtcactttgggggaccaatattcttagatatttagagcatcaccttgtttttatatgcaacacaagcctgtctgccaccctggagcgccctgtcacccctgctgtcgtagctgttggcttcagggtgagaagtgagaagcagcttattgtatatgagggagccaggccccgagggtgagcgagatggagaaggggaaggaaggggctttgggatctggaaaccagcaggccaggcagcatccacagtgttagtccaaagggtcggaccgtgtcgtcagcctagcgtttggtcagtgacggcctggacgggccaaggagactccgggcttgagcccaggcctcccgcacggctcagctgctgaatttttccttgaggctgtttggtgtgtgacccagcaagggccctgtgtgggacagcaggagggaggcgtcgggggccttagcagaaggggaacaatgagggcatttcatgaaccatctcaggcacttctgcatcacggaagacctggccctcccagccgtcctggggatgctcagggtgcaggcagaggctcgggaggccggactcaggggtcagaagcagggactggggcaggcgagcccggacagggaagaggggctccgatcaaagccggccgtgctgctggccgggggcccaggtgggtacaagctcctttgtgctttgcacaaacctgaatcccccaccagagaggatgtgtgtgaggagccagaaacgctgaatccaattaagagagaaaaataataataacaataaatgatcttggacaagaaaaaaaaaaaaaaaaaaaaa

SEQ ID NO: 1365 - protein, 441 aa, Homo sapiens
MLRKGCCVELLLLLVAAELPLGGGCPRDCVCYPAPMTVSCQAHNFAAIPEGIPVDSERVFLQNNRIGLLQPGHFSPAMVTLWIYSNNITYIHPSTFEGFVHLEELDLGDNRQLRTLAPETFQGLVKLHALYLYKCGLSALPAGVFGGLHSLQYLYLQDNHIEYLQDDIFVDLVNLSHLFLHGNKLWSLGPGTFRGLVNLDRLLLHENQLQWVHHKAFHDLRRLTTLFLFNNSLSELQGECLAPLGALEFLRLNGNPWDCGCRARSLWEWLQRFRGSSSAVPCVSPGLRHGQDLKLLRAEDFRNCTGPASPHQIKSHTLTTTDRAARKEHHSPHGPTRSKGHPHGPRPGHRKPGKNCTNPRNRNQISKAGAGKQAPELPDYAPDYQHKFSFDIMPTARPKRKGKCARRTPIRAPSGVQQASSASSLGASLLAWTLGLAVTLR

SEQ ID NO: 1366 - DNA, 375 bp, Homo sapiens
atggcgtcgggcgccccttcccggcaggtcccgtccagcgggtcccgcggcgcccacggcttcccgcctctgcgagcggagctgtcctctcaggaccgggggggcggggcctcccaggggccgcgtgcctggtcgcgagcgccgggcggggcagggcgggagacgcaggggaggcggagcagcagagcccccagccggggcagccggggcgaccggggcaccccgcccggacagcgcgccggcaccttggctctagactgcttactgcccgggccgccctcaggccccgcccccggcccgctgcctgcgccgccgctgtccgcggtgctgatcaacgcaggcgccgccatcgggccgccccgtccgggtccctag

SEQ ID NO: 1367 - protein, 124 aa, Homo sapiens
MASGAPSRQVPSSGSRGAHGFPPLRAELSSQDRGGGASQGPRAWSRAPGGAGRETQGRRSSRAPSRGSRGDRGTPPGQRAGTLALDCLLPGPPSGPAPGPLPAPPLSAVLINAGAAIGPPRPGP

SEQ ID NO: 1368 - DNA, 3174 bp, Homo sapiens
ggctgagacgcgaccaggacgcggggaggacggaccagcaggacagaccgaccgggggcccggcgggcggagggcagcgcagccacgtcccccctggatccgccgtcagccgggcccggggctttcgacatgccccccaggagagtgtgctgggcagacgatgctggacacgatggaggcgcccggccactccaggcagctgctgctgcagctcaacaaccagcgcaccaagggcttcttgtgcgacgtgatcatcgtggtgcagaacgccctcttccgcgcgcacaagaacgtgctggcggccagcagcgcctacctcaagtccctggtggtgcatgacaacctgctcaacctggaccatgacatggtgagcccggccgtgttccgcctggtgctggacttcatctacaccggccgcctggctgacggcgcagaggcggctgcggccgcggccgtggccccgggggctgagccgagcctgggcgccgtgctggccgccgccagctacctgcagatccccgacctcgtggcgctgtgcaagaaacgcctcaagcgccacggcaagtactgccacctgcggggcggcggcggcggcggcggcggctacgcgccctatggtcggccgggccggggcctgcgggccgccacgccggtcatccaggcctgctacccgtccccagtcgggcctccgccgccgcctgccgcggagccgccctcgggcccagaggccgcggtcaacacgcactgcgccgagctgtacgcgtcgggacccggcccggccgccgcactctgtgcctcggagcgccgctgctcccctctttgtggcctggacctgtccaagaagagcccgccgggctccgcggcgccagagcggccgctggctgagcgcgagctgcccccgcgcccggacagccctcccagcgccggccccgccgcctacaaggagccgcctctcgccctgccgtcgctgccgccgctgcccttccagaagctggaggaggccgcaccgccttccgacccatttcgcggcggcagcggcagcccgggacccgagccccccggccgccccgacgggcctagtctcctctatcgctggatgaagcacgagccgggcctgggtagctatggcgacgagctgggccgggagcgcggctcccccagcgagcgctgcgaagagcgtggtggggacgcggccgtctcgcccggggggcccccgctcggcctggcgccgccgccgcgctaccctggcagcctggacgggcccggcgcgggcggcgacggcgacgactacaagagcagcagcgaggagaccggtagcagcgaggaccccagcccgcctggcggccacctcgagggctacccatgcccgcacctggcctatggcgagcccgagagcttcggtgacaacctgtacgtgtgcattccgtgcggcaagggcttccccagctctgagcagctgaacgcgcacgtggaggctcacgtggaggaggaggaagcgctgtacggcagggccgaggcggccgaagtggccgctggggccgccggcctagggcccccttttggaggcggcggggacaaggtcgccggggctccgggtggcctgggagagctgctgcggccctaccgctgcgcgtcgtgcgacaagagctacaaggacccggccacgctgcggcagcacgagaagacgcactggctgacccggccctacccatgcaccatctgcgggaagaagttcacgcagcgtgggaccatgacgcgccacatgcgcagccacctgggcctcaagcccttcgcgtgcgacgcgtgcggcatgcggttcacgcgccagtaccgcctcacggagcacatgcgcatccactcgggcgagaagccctacgagtgccaggtgtgcggcggcaagttcgcacagcaacgcaacctcatcagccacatgaagatgcacgccgtggggggcgcggccggcgcggccggggcgctggcgggcttgggggggctccccggcgtccccggccccgacggcaagggcaagctcgacttccccgagggcgtctttgctgtggctcgcctcacggccgagcagctgagcctgaagcagcaggacaaggcggccgcggccgagctgctggcgcagaccacgcacttcctgcacgaccccaaggtggcgctggagagcctctacccgctggccaagttcacggccgagctgggcctcagccccgacaaggcggccgaggtgctgagccagggcgctcacctggcggccgggcccgacggccggaccatcgaccgtttctctcccacctagagcgcccctcgccagcccgctctgtcgctgctgcgcggccctggcccgcaccccagggagcggcgggggcggcgcgcagggcccactgtgcccgggacaaccgcagcgtcgccacagtggcggctccacctctcggcggcctcacctggcctcactgcttcgtgccttagctcgggggtcgggggagaaccccgggacgggggtgggatggggtaagggaaatttatatttttgatatcagctttgaccaaaggagaccccaggcccctcccgcctcttcctgtggttcgtcggccccctcccccggctccgcgctgctcttagagggggaggggtgtcactgtcggggcactcctagccctacctccggcccttgcgaccacacccattctcactgtgaatctccccgctggggtcggagcgtcgggcagagttggggagtggggaggggactgagccggccggagggccccccgcacccccgctcccacccaccccgggactgataatgtgaagttcctcattttgcacaagtggcactagccccagggccaacccttccttcctcagtcaccaagggcggggagttctggagtcggaaggcgaagagcctaccaccaggtctcccactcccgcggtgccctcccttcccttccctgcggccccggaccatatttattgcatgcgccccggcggccccccatcccgagcccaggctgggctgggctggaacgcggtctctttagctccctcctcttcgtttgtatatttcctaccttgtacacaggctcttccagagccgcttccattttctatactcgaaccaaacagcaataaagcagtaaccaaggaaaaaaaaaaaaaaaaaa

SEQ ID NO: 1369 - protein, 714 aa, Homo sapiens
MLDTMEAPGHSRQLLLQLNNQRTKGFLCDVIIVVQNALFRAHKNVLAASSAYLKSLVVHDNLLNLDHDMVSPAVFRLVLDFIYTGRLADGAEAAAAAAVAPGAEPSLGAVLAAASYLQIPDLVALCKKRLKRHGKYCHLRGGGGGGGGYAPYGRPGRGLRAATPVIQACYPSPVGPPPPPAAEPPSGPEAAVNTHCAELYASGPGPAAALCASERRCSPLCGLDLSKKSPPGSAAPERPLAERELPPRPDSPPSAGPAAYKEPPLALPSLPPLPFQKLEEAAPPSDPFRGGSGSPGPEPPGRPDGPSLLYRWMKHEPGLGSYGDELGRERGSPSERCEERGGDAAVSPGGPPLGLAPPPRYPGSLDGPGAGGDGDDYKSSSEETGSSEDPSPPGGHLEGYPCPHLAYGEPESFGDNLYVCIPCGKGFPSSEQLNAHVEAHVEEEEALYGRAEAAEVAAGAAGLGPPFGGGGDKVAGAPGGLGELLRPYRCASCDKSYKDPATLRQHEKTHWLTRPYPCTICGKKFTQRGTMTRHMRSHLGLKPFACDACGMRFTRQYRLTEHMRIHSGEKPYECQVCGGKFAQQRNLISHMKMHAVGGAAGAAGALAGLGGLPGVPGPDGKGKLDFPEGVFAVARLTAEQLSLKQQDKAAAAELLAQTTHFLHDPKVALESLYPLAKFTAELGLSPDKAAEVLSQGAHLAAGPDGRTIDRFSPT

SEQ ID NO: 1370 - DNA, 5968 bp, Homo sapiens
cctggctgcgcgcggcggtggcggagccgctacggctgtagcagcagccgcgaagatggcggaagggctggagcgtgtgcggatctccgcgtcggagctgcgcgggatcctggctactctggccccgcaggccgggagcagagaaaacatgaaggaattaaaggaggccaggccgcgcaaagataacaggcgtccagatctggaaatctataagcctggcctttctcggctaaggaacaagcccaaaatcaaggaaccccctgggagtgaggaattcaaagatgaaattgttaatgaccgagattgctctgctgttgaaaatggtacacagcccgttaaagatgtctgcaaggaactgaacaaccaagagcagaatggtcctatagacccagaaaataatcggggacaagaatcctttcctaggactgctggacaagaggatcgtagtctaaaaattatcaaaagaacaaagaaacccgacctgcagatctatcagcctggacgacgtttgcagactgttagcaaagaatccgccagtcgggtggaggaggaagaagtcctcaaccaggtagaacaactgagagtagaggaagatgagtgtaggggaaatgttgcgaaggaggaagttgcgaataaaccagacagggctgagatagaaaagagcccaggtggtgggagagtaggggctgcaaaaggagaaaaaggaaagaggatgggaaaaggggagggggtgagggaaacccacgacgacccagcccgcgggaggccgggctccgcaaagcgctactcccgctcagacaaacgaaggaatcgctaccgcacgcgcagcaccagctcagctggcagcaacaacagcgctgagggagctggcctgacggataatggatgtcgccgccgccgacaggataggaccaaggagaggccacgactgaagaagcaagtgtctgtgtcctcaaccgattccttagacgaggacagaattgatgagcctgatggattaggacccaggagaagttcagaaaggaagagacatttagaaagaaactggtctggccgtggggagggtgagcagaaaaacagtgctaaagaatatcgaggcactcttcgtgtcactttcgatgcagaagccatgaacaaagagtctcccatggtgaggtcagccagggatgatatggatagaggaaagcctgacaaaggcttgagcagtgggggcaaaggctctgagaagcaggagtccaaaaacccgaaacaagaacttcggggtcgtggtcgtggcattctgattttgcctgcccataccaccctatctgtcaattcagcaggttctccagagtccgcgcctttgggacctcggcttttgtttggatctggtagtaagggatctcggagttggggccgtggaggcaccacacgccgattgtgggacccaaacaatcctgatcagaaacctgctctaaagactcagacgccccagctacatttcttggacactgatgatgaagtcagccctacatcttggggtgactcacgccaggctcaggcatcttactataagtttcaaaactctgacaacccctattattacccccggacaccaggccctgcctcccagtatccctatacgggctataaccctctacagtacccagtgggccctacgaatggtgtgtacccagggccttactacccaggctacccgactccgtcaggacagtatgtgtgtagccctctacctaccagcaccatgagtcccgaggaggtagagcagcacatgaggaacctgcagcaacaggagctgcacaggcttctccgggtggctgacaaccaggaactgcagctcagcaacctgctctccagggaccgcatcagtccggagggcctggagaagatggcgcaactcagagctgaactgctgcagctatatgagcgctgtattctattagatattgagttctctgataatcagaatgtggatcagatcctgtggaagaatgctttctatcaggtgattgagaagttcaggcaacttgtcaaggatccgaatgttgagaacccagaacagattcggaacagacttttggagctcttggatgagggtagtgacttctttgatagtttgcttcagaagctgcaggttacttacaagttcaaactggaagactacatggatggtcttgccattcgcagcaagccattacgcaagacagtaaaatatgccttgatcagtgcccagcgatgcatgatatgccaaggagatattgctaggtaccgggagcaagccagtgatacagcgaattatgggaaagcacgcagttggtacctgaaggcccagcacattgctcccaagaatgggcgcccctataaccagttggctttgctggcagtgtatacgaggaggaagcttgacgctgtctattactatatgcgcagtttagctgccagcaaccctatcctgactgccaaggagagtctcatgagcttgtttgaagagaccaagcggaaggcagaacagatggaaaagaagcaacatgaggaatttgacctgagccctgaccagtggcggaaaggaaagaagtctactttccggcatgttggagatgacaccactcgcctggagatctggattcatccatcccatccacggtcttcccagggcactgagtctgggaaggattctgagcaagagaatgggctgggcagcctgagtcccagtgatctgaacaaaaggttcatcctcagttttctccatgcccatgggaagctgtttacccggattgggatggagacattccctgcagtggctgagaaggtcctcaaggagttccaggtgttactgcagcacagcccctctcccattggaagtacccgcatgctgcagcttatgaccatcaatatgtttgcagtacacaactcccagctgaaagactgcttctcggaggagtgccgctctgtgatccaggaacaagccgcagctctgggcttggccatgttttctctactggtccgccgctgcacctgcttacttaaggagtccgccaaagctcagctgtcctctcctgaggaccaggatgaccaagacgacatcaaggtgtcttcctttgtcccggacctgaaggagctgctccccagtgtcaaagtctggtcagattggatgctcggctacccggacacctggaatcctcctcccacatccctggatctgccctcgcatgttgctgtggatgtatggtcgacgctggctgatttctgtaacatactgactgcagtgaatcagtctgaggtgccactgtacaaggacccggatgatgacctcacccttcttatcctggaagaggatcggcttctctcgggctttgtccccttgctggctgcccctcaggacccctgctacgtggagaaaacctcggataaggttattgcagctgactgcaaaagggtcacagtgctgaagtattttctggaagccctttgtggacaagaagagcctctgctggcattcaagggtggaaagtatgtgtcagtggcacccgtcccagacaccatgggaaaggaaatgggaagccaagagggaacacgactggaagatgaggaggaggatgtggtgattgaagactttgaggaagattcagaggctgaaggcagcggaggcgaggatgacatcagggagcttcgggccaagaagctggctctggccaggaagatagctgagcagcagcgtcgccaggaaaagatccaggctgtcctggaggaccacagtcagatgaggcagatggagctcgaaatcagacctttgttcctcgtaccagacaccaacggcttcattgaccacctggccagtctggcgcggctgctggagagcaggaagtacatcctggtggtgcccctcatcgtgatcaatgagctggacggcctggccaaggggcaggagacagaccaccgggctgggggctacgcccgtgtggtacaagagaaggcccgcaagtccatcgagttcctcgagcagcgattcgagagtcgggactcttgcctgcgagccctgaccagccgtggcaatgaactcgaatccatcgccttccgcagtgaggacatcactggccagctgggtaacaacgatgatctcatcctgtcctgctgcctccactactgcaaagacaaggctaaggacttcatgcccgccagcaaagaggagccaatccggctactgcgggaggtggtgctgttgacggatgaccggaacctgcgtgtgaaggcgctcacaaggaatgttcctgtacgggacatcccagccttcctcacgtgggcccaggtgggctgagggagccacactggggccccccccccgtggaaccgttcctgaaaggccaccaggcgcccagtgtagcacggaagatgcccacgtgcctgagccaccaatccacccagacaataaaccatcctcttccaacccacgccacggccatgctgtgggggacctgctcctcacagagcccctcccaaggatcgggcggaagctgctgggaccctcctgggctgccaggatttagcagggaggtggctggctacagcaacagcagctgggcaagccagataggccgcccatgctctcagcctttctccctcccccgtctcattccaaggctgagggagggccttctcgcctggggacgcagccactttctccagtggagacagggcaggggttctgagtttccgtcagatgcagtgaaatcacagttccctttcatcttcagaacctctgtcgtgaatgtgttcaagaggctttggttaagtcaggaagaagtgcccagggtgtgtgtccccagtctccctgaggcctggactcgcccatgaacccaagtcggcttctagacagcatgtccctaacagcagccctgggcccccacctcttctaccatccaccccagacttaccacacacccttcctgctgctcctcttcctgcccttatcaacctgggtccctcacacttcgccagttgcgtccccgtggacagtcatgagtctagaggaaaggggcatctggtctcaggcccgtgctctcgggtggcctccacctgctccctctctcctcactggcctttctttccgtctagcttcctcttcaggaaatgtcctgactcccctcagctcccccttcacccctccttgcccgcctaccctccctccagaatagcccctcacccttcttccccttctagttgatccttttcacctccctgatccccttcatttcttcaccgcggttcctcgtcataggggttctcactctgaactttccctctctactacccatggcaggaacctagtacaggtctcccacccagggccttccaccctcggctcctgtgctgggagaaacttccaggcgtggacagcccagcctgaggcattccagtgctggggcaccgtcgcctaacctggtttctagctttgccctcactccccggaaaaactgacactgacacaggggccctttccttgcccctttagctggtacctcagtggggaggcttccttaccaagaatgagttcctgaaacccagggccagagacaaggacaacttaggggaagacggggttttcggtggagccaggggcaaatcttaatgggaccagtgggggataccccagagcccatggcctgactgcacagcctgcctggaggatgggtgcgcagctctgccctccctgaggcccaggactatgccagaagcgatggggtaccgtgtaggggagccaaggccagtagtttgggggtaggagtcccctagagtctcagaagactgggctctttggagtacagggtccccggcctctcctttaagattctctccccagctggaaggccgatgactgggtggtcgggagggagacccagctctcctttctgtcccgtttgcagcactggttttgtttccttaataaatttttagttatgaaacatacctg

SEQ ID NO: 1371 - protein, 1419 aa, Homo sapiens
MAEGLERVRISASELRGILATLAPQAGSRENMKELKEARPRKDNRRPDLEIYKPGLSRLRNKPKIKEPPGSEEFKDEIVNDRDCSAVENGTQPVKDVCKELNNQEQNGPIDPENNRGQESFPRTAGQEDRSLKIIKRTKKPDLQIYQPGRRLQTVSKESASRVEEEEVLNQVEQLRVEEDECRGNVAKEEVANKPDRAEIEKSPGGGRVGAAKGEKGKRMGKGEGVRETHDDPARGRPGSAKRYSRSDKRRNRYRTRSTSSAGSNNSAEGAGLTDNGCRRRRQDRTKERPRLKKQVSVSSTDSLDEDRIDEPDGLGPRRSSERKRHLERNWSGRGEGEQKNSAKEYRGTLRVTFDAEAMNKESPMVRSARDDMDRGKPDKGLSSGGKGSEKQESKNPKQELRGRGRGILILPAHTTLSVNSAGSPESAPLGPRLLFGSGSKGSRSWGRGGTTRRLWDPNNPDQKPALKTQTPQLHFLDTDDEVSPTSWGDSRQAQASYYKFQNSDNPYYYPRTPGPASQYPYTGYNPLQYPVGPTNGVYPGPYYPGYPTPSGQYVCSPLPTSTMSPEEVEQHMRNLQQQELHRLLRVADNQELQLSNLLSRDRISPEGLEKMAQLRAELLQLYERCILLDIEFSDNQNVDQILWKNAFYQVIEKFRQLVKDPNVENPEQIRNRLLELLDEGSDFFDSLLQKLQVTYKFKLEDYMDGLAIRSKPLRKTVKYALISAQRCMICQGDIARYREQASDTANYGKARSWYLKAQHIAPKNGRPYNQLALLAVYTRRKLDAVYYYMRSLAASNPILTAKESLMSLFEETKRKAEQMEKKQHEEFDLSPDQWRKGKKSTFRHVGDDTTRLEIWIHPSHPRSSQGTESGKDSEQENGLGSLSPSDLNKRFILSFLHAHGKLFTRIGMETFPAVAEKVLKEFQVLLQHSPSPIGSTRMLQLMTINMFAVHNSQLKDCFSEECRSVIQEQAAALGLAMFSLLVRRCTCLLKESAKAQLSSPEDQDDQDDIKVSSFVPDLKELLPSVKVWSDWMLGYPDTWNPPPTSLDLPSHVAVDVWSTLADFCNILTAVNQSEVPLYKDPDDDLTLLILEEDRLLSGFVPLLAAPQDPCYVEKTSDKVIAADCKRVTVLKYFLEALCGQEEPLLAFKGGKYVSVAPVPDTMGKEMGSQEGTRLEDEEEDVVIEDFEEDSEAEGSGGEDDIRELRAKKLALARKIAEQQRRQEKIQAVLEDHSQMRQMELEIRPLFLVPDTNGFIDHLASLARLLESRKYILVVPLIVINELDGLAKGQETDHRAGGYARVVQEKARKSIEFLEQRFESRDSCLRALTSRGNELESIAFRSEDITGQLGNNDDLILSCCLHYCKDKAKDFMPASKEEPIRLLREVVLLTDDRNLRVKALTRNVPVRDIPAFLTWAQVG

SEQ ID NO: 1372 - DNA, 5614 bp, Homo sapiens
agggcgttggggcagctcctgtgacagacggagctggagcggcggggcggcggcggagtccggcggccgggagagcgagtgagcgagcggaggagcagcgacacgggagtctagggagcgagaaggagaaggaggggagcgctcgggcgcgagcgagagaaaccgcgagcgccgagcttggactcgagccccggaacggctgaggagcccgcccgctcccctcccctccccctccccgggcccgggcccagcgcgccatcctcccccctccttccctccctccctccttcctccctcccctctccctccccctcccccgccggtggatgggagtgaaggacggaagaggccctgcggaggcggcggtgcagcgctccggtggaatgaatcttacttgttgaatatcttctggttactagttggattcatttgtgaaagaatcattttcccctgtgtggaagacacttagtggcatatttaaattataagtccacggatcaaaaagctttttgatttcccaaaggagggacataccactatatcagataagcttgacattacagccaagatggtgctgtcccagagacaacgagatgaactaaatcgagctatagcagattatcttcgttcaaatggctatgaagaggcatattcagtttttaaaaaggaagctgaattagatgtgaatgaagaattagataaaaagtatgctggtcttttggaaaaaaaatggacatctgttattagattacaaaagaaggttatggaattagaatcaaagctaaatgaagcaaaagaagaatttacgtcaggtggacctcttggtcagaaacgagacccaaaagaatggattccccgtccgccagaaaaatatgcattgagtggtcacaggagtccagtcactcgagtcattttccatcctgtgttcagtgttatggtctctgcttcagaggatgctacaattaaggtgtgggattatgagactggagattttgaacgaactcttaaaggacatacagactctgtacaggacatttcattcgaccacagcggcaagcttctggcttcctgttctgcagatatgaccattaaactatgggattttcagggctttgaatgcatcagaaccatgcacggccatgaccacaatgtttcttcagtagccatcatgcccaatggagatcatatagtgtctgcctcaagggataaaactataaaaatgtgggaagtgcaaactggctactgtgtgaagacattcacaggacacagagaatgggtacgtatggtacggccaaatcaagatggcactctgatagccagctgttccaatgaccagactgtgcgtgtatgggtcgtagcaacaaaggaatgcaaggctgagctccgagagcatgagcatgtggtagaatgcatttcctgggctccagaaagctcatattcctccatctctgaagcaacaggatctgagactaaaaaaagtggtaaacctgggccattcttgctgtctggatccagagacaagactattaagatgtgggatgtcagtactggcatgtgccttatgaccctcgtgggtcatgataactgggtacgtggagttctgttccattctggggggaagtttattttgagttgtgctgatgacaagaccctacgcgtatgggattacaagaacaagcgatgcatgaagaccctcaatgcgcatgaacactttgttacctccttggatttccacaagacggcaccctatgtcgtcactggcagcgtagatcaaacagtaaaagtgtgggagtgccgttgattgtgtctccttcggcccctcctccctcttttcctctggatgcactctgatgataccatggttaccccattgagctctgtttaaataaatattgtcctttcatgtaaattattctggatgtagattgagcttattaaatgttacacacaaagtattcatgcatggtgaatccaaattgtatactgtaaatttacatacgttgtctagaagtaccatagggtttaaaaacctgggctggcattggtcacaccaggcctaagaaggcagaagttgaatcaattgaactagggcactaaactgaatagttgacagtgtcattttatgttggattattaattcctgtttttctttctgctatctgttggtgcctgacttgatggcctcatttggggaaaagtggtggttattagggctttttctgaaatgtgtatctatgtaacatcacttaagtgtgcttaataaatcttctgtaaggattttagatgataaggctacaattcagaatcttctgaaccatctatgtaatgaatggggattatacattggaatttttgtcatgacacatttgccaaatcagtaggatatatttgttttggcagcctatcacgcagaggctagtggtatatttatgtaagaaaatgactgtaaatctcaagaaaaatctcagcagctaatagcaactcatttatttcattttggtcttaatgctttgtaaacaggtcaaaaaatactgtcatactctaagcttctattttccacactggacatacttctagttgtattctccatactattagactgtgtagtgatgtgacttccaagtagaatttaatctccccattgagtgtgtcatggtacaaatcactattcgtttttggtgttttttagggatgtgcaatgtgcattacataatgacagaaatactgagaaggttctgtgtgcccatttgaaaggagtgggaggaatacagcagtttgtttttcaacatgaatctgatattgatttaaactgtgtttcacttacaagttttaaaaaaatgacagggtttaatggagcgtgcataaaaatgtactgttttcaccttttgtttatatgtaaatgtttgtaagtatatgggcctatctgtaagtggataagtctgtatgtgtgtatcatacacatcaacctccatgtccttagtcctgggtttttgaaaaagtgctaaaacggacaagtagaataaatgttgctgtggaatgccatgctttagaacaaaccctttttgatcttaatgcttctgaaaactaggtctgactctggggatttttttccagccgaaggaaaatcacttccgttatgtccccctctaatttagccgctcgacattttacacaacccggatatgttgtatattttgacccaaagttacaggtaggtttaagagaatttttagccatgacttttggagcactattccattgtcagttattaataaagaattccattgcttagctaaccaacaggttttttttgtttccaagagagttatttgaaaagttaacagaacaatgagataacagtgacagtttaacaaagataaaattctgaactgcgttttattcatttgtgtactatgtgattttttaaatgtcccctttagtatttaatggaaaattggttcctgcaaaagacaaagggtgagagttagcgtcctgtagatacacacagagactaggccgtatattaactagaagcagctttatgtctagcttgtgtctttttgtttgtttgcttgtttgtttttagattcctgagagatgtctctggaagggaaagttttgagaactaatggctatttttgaggacaaaaattacatcttaagctaattccttaaatacatacagtaggtgaattttcaggacaatattgcctcacaaccctgcttacattgaaaagtctttttcccttagctcttctgactggatttttctacaaaaactatggaaaatatctttgttcttgtttgctgctattttctgtcctattttgagaaatataaatacatagaaatggtgcatcttaacatttgtttgtacatgtataaatgtcttgtattttaattcatttttagcatgaattgtttaagggtaagccacaacatctagaaatcactcatagatattgaacaataaaggagaatggtaccgatgcaggaggaagcaagcgtgtcttcccctgcagcacacagcgacttgcgttgacaaaggaggaggaaacgattactctgtaaacaaagttatccttacttgggagattgccacagcctgctgctgagttgagttaccagacatcctccatgtgagaagcagcgaacattgaatctcagggatggcccacaactgggtccacatgtaatgagccctgtttaataacgaaggggtgggggagagcagtccgtctacaacctggaatcagatttgcaaaatttcctgcactgctgtctgacactgtcctgttgatgccctttctgactgtgttctctgttttctctgtctgctgtctaaccctgtgccttgcctgggataaggacaatgatgaggttactggtttggattgtaagtagaggacttttattaattggtttagaggttcactgctgctttgtcactttctcaatcaaattggccacttaagaaataaagagctggtagaattgcatcctcagatgattattgactgtgtgtgtgtgtgaaaacagacattccagtgccacccaaatatatatctgtaacgtgcccaagaaatcctagctgcgctcttgagagtgcatgccatggagactggtttagacaccgcgtggagcctagttgcctgttgtcacggcatcttgcactttaggagactaagaccgtcctggttcgtctgtgtgtggtgtgaccaatggtgtgcccagagcactactctcaaaatcactagtgttagcaagtcgtcccgggctggggagcgttcgccgtagtctttggaagctttggctttagatttaccaagccccgcctccccgctgccagtgccctgctctcccgttcgcctctttctgtttctgtgtgaactttcccggtaatatcactcgttaaataggttttctttaaacttaattaaagaaaaactatttaaaggtaaaggatattttgttgacatcggtggctcgatcatccttaagcaactgaagttaaaattgttgaaggaaaaggcacttaaattggttactttcatgtccagctgtatataagtccagtgtgttcatctagatgacgcaaagaatctcctggtagagaagcgacatgtaaaaaactggtggaaaaaggttttggattttttttccagtggggtggggggagggcaagctggatttacaggtcacggctggactgaatgggcctttttatcttcccactgtatcatggaagtagctgcttgcttgtactgtccatccttcaggcatccctaaagctcactctgaagatgttagagacaaacacaaactcttcgagttaaagttgatcctgacactgacatgaaggcaagccttgatttcgtatgaacgttgctgaagtggtaattgaggaaaacagttccccagattgttaagagttcactgaagatattgacacaattttaaaaaatcagtaaaggaatgtatataatattgctctcgtgttttacagtaagatttgttgctctcagactgtgtaaaacaaaatttattcatgttttctgcatattaaaaaatcttattgtaccaactggtaaactattaaatgcctataaaacta

SEQ ID NO: 1373 - protein, 410 aa, Homo sapiens
MVLSQRQRDELNRAIADYLRSNGYEEAYSVFKKEAELDVNEELDKKYAGLLEKKWTSVIRLQKKVMELESKLNEAKEEFTSGGPLGQKRDPKEWIPRPPEKYALSGHRSPVTRVIFHPVFSVMVSASEDATIKVWDYETGDFERTLKGHTDSVQDISFDHSGKLLASCSADMTIKLWDFQGFECIRTMHGHDHNVSSVAIMPNGDHIVSASRDKTIKMWEVQTGYCVKTFTGHREWVRMVRPNQDGTLIASCSNDQTVRVWVVATKECKAELREHEHVVECISWAPESSYSSISEATGSETKKSGKPGPFLLSGSRDKTIKMWDVSTGMCLMTLVGHDNWVRGVLFHSGGKFILSCADDKTLRVWDYKNKRCMKTLNAHEHFVTSLDFHKTAPYVVTGSVDQTVKVWECR

SEQ ID NO: 1374 - DNA, 930 bp, Homo sapiens
atgaagaaagaaaatcaatcctttaacctggattttattctcctgggagttactagtcagcaagaacagaataatgtcttctttgtgatttttttgtgcatttaccccatcacactgactggaaatctgctcatcatcttggccatctgtgctgacattcgccttcacaaccccatgtattttctccttgccaacctctccttggttgacatcatcttctcatccgtaaccatccctaaggtgctggccaaccatctcttgggcagcaagttcatctcctttgggggatgcctaatgcagatgtatttcatgatagccttggccaaggcagacagctataccttggctgcaatggcatacgatcgagctgtggccatcagctgcccacttcattacacaacaattatgagtccacggtcttgtatcctgcttattgctgggtcttgggtgattggaaacaccagtgctctcccccacactctgctcacagctagtttgtccttctgtggcaaccaggaagtagccaatttctactgtgacattatgcctttgctgaagttgtcctgttctgacgtccactttaatgtgaagatgatgtacctaggggtcggcgttttctctttgccattactatgcatcattgtctcctatgttcaggtcttttccacagtcttccaagttccatctaccaagagtctattcaaagccttctgcacctgtggctcccacctcacagttgtttttttatattatggtacaacgatgggcatgtatttccgccctctgaccagttacagccccaaagatgcagtgataactgtgatgtatgtggcagtgaccccagcattaaatcctttcatctatagtctgagaaattgggatatgaaggcagccctacagaaactcttcagcaagagaatctcctcatag

SEQ ID NO: 1375 - protein, 309 aa, Homo sapiens
MKKENQSFNLDFILLGVTSQQEQNNVFFVIFLCIYPITLTGNLLIILAICADIRLHNPMYFLLANLSLVDIIFSSVTIPKVLANHLLGSKFISFGGCLMQMYFMIALAKADSYTLAAMAYDRAVAISCPLHYTTIMSPRSCILLIAGSWVIGNTSALPHTLLTASLSFCGNQEVANFYCDIMPLLKLSCSDVHFNVKMMYLGVGVFSLPLLCIIVSYVQVFSTVFQVPSTKSLFKAFCTCGSHLTVVFLYYGTTMGMYFRPLTSYSPKDAVITVMYVAVTPALNPFIYSLRNWDMKAALQKLFSKRISS

SEQ ID NO: 1376 - DNA, 930 bp, Homo sapiens
atgagggaaaataaccagtcctctacactggaattcatcctcctgggagttactggtcagcaggaacaggaagatttcttctacatcctcttcctgttcatttaccccatcacattgattggaaacctgctcattgtcctagccatttgctctgatgttcgccttcacaaccccatgtattttctccttgccaacctctccttggttgacatcttcttctcatcggtaaccatccctaagatgctggccaaccatctcttgggcagcaaatccatctcttttgggggatgcctaacgcagatgtatttcatgatagccttgggtaacacagacagctatattttggctgcaatggcatatgatcgagctgtggccatcagccacccacttcactacacaacaattatgagtccacggtcttgtatctggcttattgctgggtcttgggtgattggaaatgccaatgccctcccccacactctgctcacagctagtctgtccttctgtggcaaccaggaagtggccaacttctactgtgacattacccccttgctgaagttatcctgttctgacatccactttcatgtgaagatgatgtacctaggggttggcattttctctgtgccattactatgcatcattgtctcctatattcgagtcttctccacagtcttccaggttccttccaccaagggcgtgctcaaggccttctccacctgtggttcccacctcacggttgtctctttgtattatggtacagtcatgggcacgtatttccgccctttgaccaattatagcctaaaagacgcagtgatcactgtaatgtacacggcagtgaccccaatgttaaatcctttcatctacagtctgagaaatcgggacatgaaggctgccctgcggaaactcttcaacaagagaatctcctcgtaa

SEQ ID NO: 1377 - protein, 309 aa, Homo sapiens
MRENNQSSTLEFILLGVTGQQEQEDFFYILFLFIYPITLIGNLLIVLAICSDVRLHNPMYFLLANLSLVDIFFSSVTIPKMLANHLLGSKSISFGGCLTQMYFMIALGNTDSYILAAMAYDRAVAISHPLHYTTIMSPRSCIWLIAGSWVIGNANALPHTLLTASLSFCGNQEVANFYCDITPLLKLSCSDIHFHVKMMYLGVGIFSVPLLCIIVSYIRVFSTVFQVPSTKGVLKAFSTCGSHLTVVSLYYGTVMGTYFRPLTNYSLKDAVITVMYTAVTPMLNPFIYSLRNRDMKAALRKLFNKRISS

SEQ ID NO: 1378 - DNA, 1085 bp, Homo sapiens
taagtgaactgagtgaactgatacctcccctgctgggacatgtccttacagaaactcatggagccagaagctgggaccaataggaccgctgttgctgagttcattctactgggcctagtgcaaacagaagagatgcagccagttgtctttgtgctcctcctctttgcctatctggtcacaactgggggcaacctcagcatcctggcagccgtcttggtggagcccaaactccacgcccccatgtacttcttcctggggaacctgtcagtgctggatgtcggatgtatcactgtcactgttcctgcaatgttgggtcgtctcttgtcccacaagtccacaatttcctatgacgcctgcctctcccagctcttcttcttccaccttctggctgggatggactgcttcctgctgaccgccatggcctatgaccgactcctggccatctgccagcccctcacctacagcacccgcatgagtcagacagtccagaggatgttggtggctgcgtccttggcttgtgccttcaccaacgcactgacccacactgtggccatgtccacgctcaacttctgtggccccaatgaggtcaatcacttctactgtgacctcccacagctcttccagctctcctgctccagcacccaactcaatgagctgctgctctttgctgtgggtttcatcatggcaggcacacctttggttctcatcatcactgcctacagccacgtggcagctgcagttctacgaatccgttcagtggagggccgaaagaaggccttctccacgtgtggctcccacctcaccgtggtttgtcttttctttggaagaggtatcttcaactacatgagactgggttcagaggaggcttcagacaaggataaaggggttggagttttcaacactgttatcaaccctatgctgaaccctcttatctacagcctcagaaaccctgatgttcagggtgctctgtggcaaatatttttggggaggagatcactgacctgagaggtaatggggtccctcctttcctgccttttctggactgaggaaaatttcccatgaagacagtaaccaggaaaaattca

SEQ ID NO: 1379 - protein, 321 aa, Homo sapiens
MSLQKLMEPEAGTNRTAVAEFILLGLVQTEEMQPVVFVLLLFAYLVTTGGNLSILAAVLVEPKLHAPMYFFLGNLSVLDVGCITVTVPAMLGRLLSHKSTISYDACLSQLFFFHLLAGMDCFLLTAMAYDRLLAICQPLTYSTRMSQTVQRMLVAASLACAFTNALTHTVAMSTLNFCGPNEVNHFYCDLPQLFQLSCSSTQLNELLLFAVGFIMAGTPLVLIITAYSHVAAAVLRIRSVEGRKKAFSTCGSHLTVVCLFFGRGIFNYMRLGSEEASDKDKGVGVFNTVINPMLNPLIYSLRNPDVQGALWQIFLGRRSLT

SEQ ID NO: 1380 - DNA, 2910 bp, Homo sapiens
acttgaggagtcgactgagagctttatctttgcccctgtgacgggtggcctgtggtttcctgccaacaactcctgtttccggaggcccaacaaggcccacgcagagccaggaggggcagtggggctgggcctgggtggccccaccagccccgccccatctatctttgggaatttatttgtccatgggcgaggctggcctgcagtctgttgccttccaggggccaagagctgctctgatcacccagggattctctctccaacccaagtgcctccagctgacctctggctcctgtcctctggctccacctgcaccgccctgctcttcctaaggggccaggaagcccccagaagctctaccatcgacgtgggtggtggcacccggctcaccctgagagcagaggccgtgcagggggctcagttctgagccccagccggcccaccatggcacggcggttccaggaggagctggccgccttcctcttcgagtatgacaccccccgcatggtgctggtgcgtaataagaaggtgggcgttatcttccgactgatccagctggtggtcctggtctacgtcatcgggtgggtgtttctctatgagaagggctaccagacctcgagcggcctcatcagcagtgtctctgtgaaactcaagggcctggccgtgacccagctccctggcctcggcccccaggtctgggatgtggctgactacgtcttcccagcccagggggacaactccttcgtggtcatgaccaatttcatcgtgaccccgaagcagactcaaggctactgcgcagagcacccagaagggggcatatgcaaggaagacagtggctgtacccctgggaaggccaagaggaaggcccaaggcatccgcacgggcaagtgtgtggccttcaacgacactgtgaagacgtgtgagatctttggctggtgccccgtggaggtggatgacgacatcccgcgccctgcccttctccgagaggccgagaacttcactcttttcatcaagaacagcatcagctttccacgcttcaaggtcaacaggcgcaacctggtggaggaggtgaatgctgcccacatgaagacctgcctctttcacaagaccctgcaccccctgtgcccagtcttccagcttggctacgtggtgcaagagtcaggccagaacttcagcaccctggctgagaagggtggagtggttggcatcaccatcgactggcactgtgacctggactggcacgtacggcactgcagacccatctatgagttccatgggctgtacgaagagaaaaatctctccccaggcttcaacttcaggtttgccaggcactttgtggagaacgggaccaactaccgtcacctcttcaaggtgtttgggattcgctttgacatcctggtggacggcaaggccgggaagtttgacatcatccctacaatgaccaccatcggctctggaattggcatctttggggtggccacagttctctgtgacctgctgctgcttcacatcctgcctaagaggcactactacaagcagaagaagttcaaatacgctgaggacatggggccaggggcggctgagcgtgacctcgcagctaccagctccaccctgggcctgcaggagaacatgaggacatcctgatgctcgggccccaactcctgactgggtgcagcgtgaggcttcagcctggagccctggtgggtcccagccagggcagaggggcctccccaggaagtctcctaccctctcagccaggcagagagcagtttgccagaagctcagggtgcatagtaggagagacctgtgcaaatctgagctccggctccgaccccacacaccctgagggagccctaccctagcctcagccgctcctggtggggaatggctggggctgggcaggaccctcccacacacctgcaccctagcttcgtgcttctctctccggactctcattatccaacccgctgcctccatttctctagatctgtgctctccgatgtggcagtcagtaaccataggtgactaaattaaactaaaataaaatagaatgaaacacaaaattcaattcctcggctgaactagccacatttcaactgctcagtagatacgtgtggttagtggctgccatactggacagctcggggcattttcactgtcaaagaaagttctattagacagccctgcttgagccctgtttcttcctggccttcggtttccctggggaacttatcgacaatgcaagctcctgggcccacccccagacctcctgaaccaaaagctccagggctggccgtatgatctgtgtggatggcaaactccccaggccattctgggacctaagtttaagaagtgccgtcctcgaactttctgactctaagctcctgagcgggagtcagacttagccctgagcctgcacttcctgttcaggtgcagacactgaacagggtctcaaacaccttcagcatgtgtgttgtgtgctcacgtgccacacagtgtctcatgcacacaacccagtgtacacaccacctacgtgcacacagcatccttccacactgtgtatgtgaacagcttgggccctgcaaacacaaccatctacacacatctacacccccaagcacacacacatggtccgtgccatgtcacctccatagggaaaggcttctctccaagtgtgccaggccaggacagccctcccagccatgaatccttactcagctacctcgggttggggtgggagccccagccaaatcctgggctccctgcctgtggctcagccccagctcccaaggcctgcctggctctgtctgaacagaaggtctgggggaagcgacgggtggagtacaataaagggaatgaggacaaacaaaaaaaaaaaaaaaaaaaaaaaaaaaaaaaaaaaaaaaaaaaaaa

SEQ ID NO: 1381 - protein, 399 aa, Homo sapiens
MARRFQEELAAFLFEYDTPRMVLVRNKKVGVIFRLIQLVVLVYVIGWVFLYEKGYQTSSGLISSVSVKLKGLAVTQLPGLGPQVWDVADYVFPAQGDNSFVVMTNFIVTPKQTQGYCAEHPEGGICKEDSGCTPGKAKRKAQGIRTGKCVAFNDTVKTCEIFGWCPVEVDDDIPRPALLREAENFTLFIKNSISFPRFKVNRRNLVEEVNAAHMKTCLFHKTLHPLCPVFQLGYVVQESGQNFSTLAEKGGVVGITIDWHCDLDWHVRHCRPIYEFHGLYEEKNLSPGFNFRFARHFVENGTNYRHLFKVFGIRFDILVDGKAGKFDIIPTMTTIGSGIGIFGVATVLCDLLLLHILPKRHYYKQKKFKYAEDMGPGAAERDLAATSSTLGLQENMRTS

SEQ ID NO: 1382 - DNA, 4698 bp, Homo sapiens
ccgccgccactgccgtcgggtaaggtcccagcacggacatggcctcgcgcggcgcccgcccgggcccgagtcccccgcgccccgctttgtagccccccggcggagaggcggcctcgacggtgcggacggcgcagacggccgggcgggcggcatggaggcggcgcatctgctcccggccgccgacgtgctgcgccacttctcggtgacagccgagggcggcctgagcccggcgcaggtgaccggcgcgcgggagcgctacggccccaacgagctcccgagtgaggaagggaagtccctgtgggagctggtgctggaacagtttgaggacctcctggtgcgcatcctgctgctggctgcccttgtctcctttgtcctggcctggttcgaggagggcgaggagaccacgaccgccttcgtggagcccctggtcatcatgctgatcctcgtggccaacgccattgtgggcgtgtggcaggaacgcaacgccgagagtgccatcgaggccctgaaggagtatgagcctgagatgggcaaggtgatccgctcggaccgcaagggcgtgcagaggatccgtgcccgggacatcgtcccaggggacattgtagaagtggcagtgggggacaaagtgcctgctgacctccgcctcatcgagatcaagtccaccacgctgcgagtggaccagtccatcctgacgggtgaatctgtgtccgtgaccaagcacacagaggccatcccagaccccagagctgtgaaccaggacaagaagaacatgctgttttctggcaccaatatcacatcgggcaaagcggtgggtgtggccgtggccaccggcctgcacacggagctgggcaagatccggagccagatggcggcagtcgagcccgagcggacgccgctgcagcgcaagctggacgagtttggacggcagctgtcccacgccatctctgtgatctgcgtggccgtgtgggtcatcaacatcggccacttcgccgacccggcccacggtggctcctggctgcgtggcgctgtctactacttcaagatcgccgtggccctggcggtggcggccatccccgagggcctcccggctgtcatcactacatgcctggcactgggcacgcggcgcatggcacgcaagaacgccatcgtgcgaagcctgccgtccgtggagaccctgggctgcacctcagtcatctgctccgacaagacgggcacgctcaccaccaatcagatgtctgtctgccggatgttcgtggtagccgaggccgatgcgggctcctgccttttgcacgagttcaccatctcgggtaccacgtatacccccgagggcgaagtgcggcagggggatcagcctgtgcgctgcggccagttcgacgggctggtggagctggcgaccatctgcgccctgtgcaacgactcggctctggactacaacgaggccaagggtgtgtatgagaaggtgggagaggccacggagacagctctgacttgcctggtggagaagatgaacgtgttcgacaccgacctgcaggctctgtcccgggtggagcgagctggcgcctgtaacacggtcatcaagcagctgatgcggaaggagttcaccctggagttctcccgagaccggaaatccatgtccgtgtactgcacgcccacccgccctcaccctactggccagggcagcaagatgtttgtgaagggggctcctgagagtgtgatcgagcgctgtagctcagtccgcgtggggagccgcacagcacccctgacccccacctccagggagcagatcctggcaaagatccgggattggggctcaggctcagacacgctgcgctgcctggcactggccacccgggacgcgcccccaaggaaggaggacatggagctggacgactgcagcaagtttgtgcagtacgagacggacctgaccttcgtgggctgcgtaggcatgctggacccgccgcgacctgaggtggctgcctgcatcacacgctgctaccaggcgggcatccgcgtggtcatgatcacgggggataacaaaggcactgccgtggccatctgccgcaggcttggcatctttggggacacggaagacgtggcgggcaaggcctacacgggccgcgagtttgatgacctcagccccgagcagcagcgccaggcctgccgcaccgcccgctgcttcgcccgcgtggagcccgcacacaagtcccgcatcgtggagaacctgcagtcctttaacgagatcactgctatgactggcgatggagtgaacgacgcaccagccctgaagaaagcagagatcggcatcgccatgggctcaggcacggccgtggccaagtcggcggcagagatggtgctgtcagatgacaactttgcctccatcgtggctgcggtggaggagggccgggccatctacagcaacatgaagcaattcatccgctacctcatctcctccaatgttggcgaggtcgtctgcatcttcctcacggcaattctgggcctgcccgaagccctgatccctgtgcagctgctctgggtgaacctggtgacagacggcctacctgccacggctctgggcttcaacccgccagacctggacatcatggagaagctgccccggagcccccgagaagccctcatcagtggctggctcttcttccgatacctggctatcggagtgtacgtaggcctggccacagtggctgccgccacctggtggtttgtgtatgacgccgagggacctcacatcaacttctaccagctgaggaacttcctgaagtgctccgaagacaacccgctctttgccggcatcgactgtgaggtgttcgagtcacgcttccccaccaccatggccttgtccgtgctcgtgaccattgaaatgtgcaatgccctcaacagcgtctcggagaaccagtcgctgctgcggatgccgccctggatgaacccctggctgctggtggctgtggccatgtccatggccctgcacttcctcatcctgctcgtgccgcccctgcctctcattttccaggtgaccccactgagcgggcgccagtgggtggtggtgctccagatatctctgcctgtcatcctgctggatgaggccctcaagtacctgtcccggaaccacatgcacgaagaaatgagccagaagtgagcgctgggaacagagtggagtctccggtgtgtacctcagactgatggtgcccatgtgttcgcctccgccccccacccttgccaccacactcgcccacttgcccaccgggtcccgccggataaatgacaggcccgaggtcagaatggccatccccgggccccgtcctggggtctctgtccccacttccttctggcctgggaggtctgtaattcctgtctcctggactctcctgggaagttccctgctctgcagctctggcccaggagctgcaggctgggagggggcagccaagaagccggagctggcagcatacccagagatccggggcccccccacccccaaatcacgagtgcagctggagcttgctcccccttgttcggaagctggacgttcacttggtgactggtgcctctgcactgacggaggactctgggggtccttcttaccggctctgacctctctcttcgtgcctggtctgggactgggtcagccctgggggatcagaaggggccatctgggcccagctgtgtacagcgagggtgggcagccccctccactccactctgcttccacaaagtcggctcccgagagctcgaggctgcttctgtttatatgtgcagggcccgggcgggtgaagggtcagagagacggacacaaggagccggcaggagggcggagcgaggatgtcctttcccgggagacaagtcgggaaagcctggctggactgcctcagccccgcgcgcctcctggactcagggttccccgtcctgagctcgggagatgttcagagtcacactgccgcccggtctgccacgcagaggtccaacttgccacccgcgtccctggtacctgagaccaccgacatcctcaggttcctgaccgtggcgcccttctacccagcccagtgtgcggccgccgcgctgtctgcacagctgggggcctctgagcctggtgggcttcctggactcttggcctcactccttgccccctccccacgacacccatgagccgaaaggatgtcactaaggatggctgattccccaagggcacccgctctccctccctccctgctggaggaacacgtcatatcagatgagaggaagatggcctctgatggacagaatttttctcttaactcagcttttgctactttggcaaaaactagcgaggggtagcagaaacctgcaccaaggattgtccctatgtcttggccactcctagagcgtgtgcagactgatgattttatatgtaaatcaagactcacatccctttcctagtcccccacatccaaagcccctcagcctgccttgcagaccaatgggctccatgttctgtagccccctcccctacgcctcacccctcctccctctcacaggttctgggcggccagtgagagaaacgcagtgggggaggcagggagtctggtgcctgcagagattctctgcttctttcctggggggaggtggggaggtcttagcaggagcgggccctgtacccacctgctgacctgctgtttggtagagaaataaaggttgtgtgactggggg

SEQ ID NO: 1383 - protein, 999 aa, Homo sapiens
MEAAHLLPAADVLRHFSVTAEGGLSPAQVTGARERYGPNELPSEEGKSLWELVLEQFEDLLVRILLLAALVSFVLAWFEEGEETTTAFVEPLVIMLILVANAIVGVWQERNAESAIEALKEYEPEMGKVIRSDRKGVQRIRARDIVPGDIVEVAVGDKVPADLRLIEIKSTTLRVDQSILTGESVSVTKHTEAIPDPRAVNQDKKNMLFSGTNITSGKAVGVAVATGLHTELGKIRSQMAAVEPERTPLQRKLDEFGRQLSHAISVICVAVWVINIGHFADPAHGGSWLRGAVYYFKIAVALAVAAIPEGLPAVITTCLALGTRRMARKNAIVRSLPSVETLGCTSVICSDKTGTLTTNQMSVCRMFVVAEADAGSCLLHEFTISGTTYTPEGEVRQGDQPVRCGQFDGLVELATICALCNDSALDYNEAKGVYEKVGEATETALTCLVEKMNVFDTDLQALSRVERAGACNTVIKQLMRKEFTLEFSRDRKSMSVYCTPTRPHPTGQGSKMFVKGAPESVIERCSSVRVGSRTAPLTPTSREQILAKIRDWGSGSDTLRCLALATRDAPPRKEDMELDDCSKFVQYETDLTFVGCVGMLDPPRPEVAACITRCYQAGIRVVMITGDNKGTAVAICRRLGIFGDTEDVAGKAYTGREFDDLSPEQQRQACRTARCFARVEPAHKSRIVENLQSFNEITAMTGDGVNDAPALKKAEIGIAMGSGTAVAKSAAEMVLSDDNFASIVAAVEEGRAIYSNMKQFIRYLISSNVGEVVCIFLTAILGLPEALIPVQLLWVNLVTDGLPATALGFNPPDLDIMEKLPRSPREALISGWLFFRYLAIGVYVGLATVAAATWWFVYDAEGPHINFYQLRNFLKCSEDNPLFAGIDCEVFESRFPTTMALSVLVTIEMCNALNSVSENQSLLRMPPWMNPWLLVAVAMSMALHFLILLVPPLPLIFQVTPLSGRQWVVVLQISLPVILLDEALKYLSRNHMHEEMSQK

SEQ ID NO: 1384 - DNA, 4857 bp, Homo sapiens
ccgccgccactgccgtcgggtaaggtcccagcacggacatggcctcgcgcggcgcccgcccgggcccgagtcccccgcgccccgctttgtagccccccggcggagaggcggcctcgacggtgcggacggcgcagacggccgggcgggcggcatggaggcggcgcatctgctcccggccgccgacgtgctgcgccacttctcggtgacagccgagggcggcctgagcccggcgcaggtgaccggcgcgcgggagcgctacggccccaacgagctcccgagtgaggaagggaagtccctgtgggagctggtgctggaacagtttgaggacctcctggtgcgcatcctgctgctggctgcccttgtctcctttgtcctggcctggttcgaggagggcgaggagaccacgaccgccttcgtggagcccctggtcatcatgctgatcctcgtggccaacgccattgtgggcgtgtggcaggaacgcaacgccgagagtgccatcgaggccctgaaggagtatgagcctgagatgggcaaggtgatccgctcggaccgcaagggcgtgcagaggatccgtgcccgggacatcgtcccaggggacattgtagaagtggcagtgggggacaaagtgcctgctgacctccgcctcatcgagatcaagtccaccacgctgcgagtggaccagtccatcctgacgggtgaatctgtgtccgtgaccaagcacacagaggccatcccagaccccagagctgtgaaccaggacaagaagaacatgctgttttctggcaccaatatcacatcgggcaaagcggtgggtgtggccgtggccaccggcctgcacacggagctgggcaagatccggagccagatggcggcagtcgagcccgagcggacgccgctgcagcgcaagctggacgagtttggacggcagctgtcccacgccatctctgtgatctgcgtggccgtgtgggtcatcaacatcggccacttcgccgacccggcccacggtggctcctggctgcgtggcgctgtctactacttcaagatcgccgtggccctggcggtggcggccatccccgagggcctcccggctgtcatcactacatgcctggcactgggcacgcggcgcatggcacgcaagaacgccatcgtgcgaagcctgccgtccgtggagaccctgggctgcacctcagtcatctgctccgacaagacgggcacgctcaccaccaatcagatgtctgtctgccggatgttcgtggtagccgaggccgatgcgggctcctgccttttgcacgagttcaccatctcgggtaccacgtatacccccgagggcgaagtgcggcagggggatcagcctgtgcgctgcggccagttcgacgggctggtggagctggcgaccatctgcgccctgtgcaacgactcggctctggactacaacgaggccaagggtgtgtatgagaaggtgggagaggccacggagacagctctgacttgcctggtggagaagatgaacgtgttcgacaccgacctgcaggctctgtcccgggtggagcgagctggcgcctgtaacacggtcatcaagcagctgatgcggaaggagttcaccctggagttctcccgagaccggaaatccatgtccgtgtactgcacgcccacccgccctcaccctactggccagggcagcaagatgtttgtgaagggggctcctgagagtgtgatcgagcgctgtagctcagtccgcgtggggagccgcacagcacccctgacccccacctccagggagcagatcctggcaaagatccgggattggggctcaggctcagacacgctgcgctgcctggcactggccacccgggacgcgcccccaaggaaggaggacatggagctggacgactgcagcaagtttgtgcagtacgagacggacctgaccttcgtgggctgcgtaggcatgctggacccgccgcgacctgaggtggctgcctgcatcacacgctgctaccaggcgggcatccgcgtggtcatgatcacgggggataacaaaggcactgccgtggccatctgccgcaggcttggcatctttggggacacggaagacgtggcgggcaaggcctacacgggccgcgagtttgatgacctcagccccgagcagcagcgccaggcctgccgcaccgcccgctgcttcgcccgcgtggagcccgcacacaagtcccgcatcgtggagaacctgcagtcctttaacgagatcactgctatgactggcgatggagtgaacgacgcaccagccctgaagaaagcagagatcggcatcgccatgggctcaggcacggccgtggccaagtcggcggcagagatggtgctgtcagatgacaactttgcctccatcgtggctgcggtggaggagggccgggccatctacagcaacatgaagcaattcatccgctacctcatctcctccaatgttggcgaggtcgtctgcatcttcctcacggcaattctgggcctgcccgaagccctgatccctgtgcagctgctctgggtgaacctggtgacagacggcctacctgccacggctctgggcttcaacccgccagacctggacatcatggagaagctgccccggagcccccgagaagccctcatcagtggctggctcttcttccgatacctggctatcggagtgtacgtaggcctggccacagtggctgccgccacctggtggtttgtgtatgacgccgagggacctcacatcaacttctaccagctgaggaacttcctgaagtgctccgaagacaacccgctctttgccggcatcgactgtgaggtgttcgagtcacgcttccccaccaccatggccttgtccgtgctcgtgaccattgaaatgtgcaatgccctcaacagcgtctcggagaaccagtcgctgctgcggatgccgccctggatgaacccctggctgctggtggctgtggccatgtccatggccctgcacttcctcatcctgctcgtgccgcccctgcctctcattttccaggtgaccccactgagcgggcgccagtgggtggtggtgctccagatatctctgcctgtcatcctgctggatgaggccctcaagtacctgtcccggaaccacatgcacgcctgtctttatccaggccttctcaggacagtctcgcaggcctggagtaggcagccgctgaccacctcttggaccccagaccacaccgggttggcctctttgggccagggacacagcatcgtctcgctgtcagagctgctcagagagggaggaagcagggaagaaatgagccagaagtgagcgctgggaacagagtggagtctccggtgtgtacctcagactgatggtgcccatgtgttcgcctccgccccccacccttgccaccacactcgcccacttgcccaccgggtcccgccggataaatgacaggcccgaggtcagaatggccatccccgggccccgtcctggggtctctgtccccacttccttctggcctgggaggtctgtaattcctgtctcctggactctcctgggaagttccctgctctgcagctctggcccaggagctgcaggctgggagggggcagccaagaagccggagctggcagcatacccagagatccggggcccccccacccccaaatcacgagtgcagctggagcttgctcccccttgttcggaagctggacgttcacttggtgactggtgcctctgcactgacggaggactctgggggtccttcttaccggctctgacctctctcttcgtgcctggtctgggactgggtcagccctgggggatcagaaggggccatctgggcccagctgtgtacagcgagggtgggcagccccctccactccactctgcttccacaaagtcggctcccgagagctcgaggctgcttctgtttatatgtgcagggcccgggcgggtgaagggtcagagagacggacacaaggagccggcaggagggcggagcgaggatgtcctttcccgggagacaagtcgggaaagcctggctggactgcctcagccccgcgcgcctcctggactcagggttccccgtcctgagctcgggagatgttcagagtcacactgccgcccggtctgccacgcagaggtccaacttgccacccgcgtccctggtacctgagaccaccgacatcctcaggttcctgaccgtggcgcccttctacccagcccagtgtgcggccgccgcgctgtctgcacagctgggggcctctgagcctggtgggcttcctggactcttggcctcactccttgccccctccccacgacacccatgagccgaaaggatgtcactaaggatggctgattccccaagggcacccgctctccctccctccctgctggaggaacacgtcatatcagatgagaggaagatggcctctgatggacagaatttttctcttaactcagcttttgctactttggcaaaaactagcgaggggtagcagaaacctgcaccaaggattgtccctatgtcttggccactcctagagcgtgtgcagactgatgattttatatgtaaatcaagactcacatccctttcctagtcccccacatccaaagcccctcagcctgccttgcagaccaatgggctccatgttctgtagccccctcccctacgcctcacccctcctccctctcacaggttctgggcggccagtgagagaaacgcagtgggggaggcagggagtctggtgcctgcagagattctctgcttctttcctggggggaggtggggaggtcttagcaggagcgggccctgtacccacctgctgacctgctgtttggtagagaaataaaggttgtgtgactggggg

SEQ ID NO: 1385 - protein, 1052 aa, Homo sapiens
MEAAHLLPAADVLRHFSVTAEGGLSPAQVTGARERYGPNELPSEEGKSLWELVLEQFEDLLVRILLLAALVSFVLAWFEEGEETTTAFVEPLVIMLILVANAIVGVWQERNAESAIEALKEYEPEMGKVIRSDRKGVQRIRARDIVPGDIVEVAVGDKVPADLRLIEIKSTTLRVDQSILTGESVSVTKHTEAIPDPRAVNQDKKNMLFSGTNITSGKAVGVAVATGLHTELGKIRSQMAAVEPERTPLQRKLDEFGRQLSHAISVICVAVWVINIGHFADPAHGGSWLRGAVYYFKIAVALAVAAIPEGLPAVITTCLALGTRRMARKNAIVRSLPSVETLGCTSVICSDKTGTLTTNQMSVCRMFVVAEADAGSCLLHEFTISGTTYTPEGEVRQGDQPVRCGQFDGLVELATICALCNDSALDYNEAKGVYEKVGEATETALTCLVEKMNVFDTDLQALSRVERAGACNTVIKQLMRKEFTLEFSRDRKSMSVYCTPTRPHPTGQGSKMFVKGAPESVIERCSSVRVGSRTAPLTPTSREQILAKIRDWGSGSDTLRCLALATRDAPPRKEDMELDDCSKFVQYETDLTFVGCVGMLDPPRPEVAACITRCYQAGIRVVMITGDNKGTAVAICRRLGIFGDTEDVAGKAYTGREFDDLSPEQQRQACRTARCFARVEPAHKSRIVENLQSFNEITAMTGDGVNDAPALKKAEIGIAMGSGTAVAKSAAEMVLSDDNFASIVAAVEEGRAIYSNMKQFIRYLISSNVGEVVCIFLTAILGLPEALIPVQLLWVNLVTDGLPATALGFNPPDLDIMEKLPRSPREALISGWLFFRYLAIGVYVGLATVAAATWWFVYDAEGPHINFYQLRNFLKCSEDNPLFAGIDCEVFESRFPTTMALSVLVTIEMCNALNSVSENQSLLRMPPWMNPWLLVAVAMSMALHFLILLVPPLPLIFQVTPLSGRQWVVVLQISLPVILLDEALKYLSRNHMHACLYPGLLRTVSQAWSRQPLTTSWTPDHTGLASLGQGHSIVSLSELLREGGSREEMSQK

SEQ ID NO: 1386 - DNA, 4844 bp, Homo sapiens
ccgccgccactgccgtcgggtaaggtcccagcacggacatggcctcgcgcggcgcccgcccgggcccgagtcccccgcgccccgctttgtagccccccggcggagaggcggcctcgacggtgcggacggcgcagacggccgggcgggcggcatggaggcggcgcatctgctcccggccgccgacgtgctgcgccacttctcggtgacagccgagggcggcctgagcccggcgcaggtgaccggcgcgcgggagcgctacggccccaacgagctcccgagtgaggaagggaagtccctgtgggagctggtgctggaacagtttgaggacctcctggtgcgcatcctgctgctggctgcccttgtctcctttgtcctggcctggttcgaggagggcgaggagaccacgaccgccttcgtggagcccctggtcatcatgctgatcctcgtggccaacgccattgtgggcgtgtggcaggaacgcaacgccgagagtgccatcgaggccctgaaggagtatgagcctgagatgggcaaggtgatccgctcggaccgcaagggcgtgcagaggatccgtgcccgggacatcgtcccaggggacattgtagaagtggcagtgggggacaaagtgcctgctgacctccgcctcatcgagatcaagtccaccacgctgcgagtggaccagtccatcctgacgggtgaatctgtgtccgtgaccaagcacacagaggccatcccagaccccagagctgtgaaccaggacaagaagaacatgctgttttctggcaccaatatcacatcgggcaaagcggtgggtgtggccgtggccaccggcctgcacacggagctgggcaagatccggagccagatggcggcagtcgagcccgagcggacgccgctgcagcgcaagctggacgagtttggacggcagctgtcccacgccatctctgtgatctgcgtggccgtgtgggtcatcaacatcggccacttcgccgacccggcccacggtggctcctggctgcgtggcgctgtctactacttcaagatcgccgtggccctggcggtggcggccatccccgagggcctcccggctgtcatcactacatgcctggcactgggcacgcggcgcatggcacgcaagaacgccatcgtgcgaagcctgccgtccgtggagaccctgggctgcacctcagtcatctgctccgacaagacgggcacgctcaccaccaatcagatgtctgtctgccggatgttcgtggtagccgaggccgatgcgggctcctgccttttgcacgagttcaccatctcgggtaccacgtatacccccgagggcgaagtgcggcagggggatcagcctgtgcgctgcggccagttcgacgggctggtggagctggcgaccatctgcgccctgtgcaacgactcggctctggactacaacgaggccaagggtgtgtatgagaaggtgggagaggccacggagacagctctgacttgcctggtggagaagatgaacgtgttcgacaccgacctgcaggctctgtcccgggtggagcgagctggcgcctgtaacacggtcatcaagcagctgatgcggaaggagttcaccctggagttctcccgagaccggaaatccatgtccgtgtactgcacgcccacccgccctcaccctactggccagggcagcaagatgtttgtgaagggggctcctgagagtgtgatcgagcgctgtagctcagtccgcgtggggagccgcacagcacccctgacccccacctccagggagcagatcctggcaaagatccgggattggggctcaggctcagacacgctgcgctgcctggcactggccacccgggacgcgcccccaaggaaggaggacatggagctggacgactgcagcaagtttgtgcagtacgagacggacctgaccttcgtgggctgcgtaggcatgctggacccgccgcgacctgaggtggctgcctgcatcacacgctgctaccaggcgggcatccgcgtggtcatgatcacgggggataacaaaggcactgccgtggccatctgccgcaggcttggcatctttggggacacggaagacgtggcgggcaaggcctacacgggccgcgagtttgatgacctcagccccgagcagcagcgccaggcctgccgcaccgcccgctgcttcgcccgcgtggagcccgcacacaagtcccgcatcgtggagaacctgcagtcctttaacgagatcactgctatgactggcgatggagtgaacgacgcaccagccctgaagaaagcagagatcggcatcgccatgggctcaggcacggccgtggccaagtcggcggcagagatggtgctgtcagatgacaactttgcctccatcgtggctgcggtggaggagggccgggccatctacagcaacatgaagcaattcatccgctacctcatctcctccaatgttggcgaggtcgtctgcatcttcctcacggcaattctgggcctgcccgaagccctgatccctgtgcagctgctctgggtgaacctggtgacagacggcctacctgccacggctctgggcttcaacccgccagacctggacatcatggagaagctgccccggagcccccgagaagccctcatcagtggctggctcttcttccgatacctggctatcggagtgtacgtaggcctggccacagtggctgccgccacctggtggtttgtgtatgacgccgagggacctcacatcaacttctaccagctgaggaacttcctgaagtgctccgaagacaacccgctctttgccggcatcgactgtgaggtgttcgagtcacgcttccccaccaccatggccttgtccgtgctcgtgaccattgaaatgtgcaatgccctcaacagcgtctcggagaaccagtcgctgctgcggatgccgccctggatgaacccctggctgctggtggctgtggccatgtccatggccctgcacttcctcatcctgctcgtgccgcccctgcctctcattttccaggtgaccccactgagcgggcgccagtgggtggtggtgctccagatatctctgcctgtcatcctgctggatgaggccctcaagtacctgtcccggaaccacatgcacgcctgtctttatccaggccttctcaggacagtctcgcaggcctggagtaggcagccgctgaccacctcttggaccccagaccacaccggggccagggacacagcatcgtctcgctgtcagagctgctcagagagggaggaagcagggaagaaatgagccagaagtgagcgctgggaacagagtggagtctccggtgtgtacctcagactgatggtgcccatgtgttcgcctccgccccccacccttgccaccacactcgcccacttgcccaccgggtcccgccggataaatgacaggcccgaggtcagaatggccatccccgggccccgtcctggggtctctgtccccacttccttctggcctgggaggtctgtaattcctgtctcctggactctcctgggaagttccctgctctgcagctctggcccaggagctgcaggctgggagggggcagccaagaagccggagctggcagcatacccagagatccggggcccccccacccccaaatcacgagtgcagctggagcttgctcccccttgttcggaagctggacgttcacttggtgactggtgcctctgcactgacggaggactctgggggtccttcttaccggctctgacctctctcttcgtgcctggtctgggactgggtcagccctgggggatcagaaggggccatctgggcccagctgtgtacagcgagggtgggcagccccctccactccactctgcttccacaaagtcggctcccgagagctcgaggctgcttctgtttatatgtgcagggcccgggcgggtgaagggtcagagagacggacacaaggagccggcaggagggcggagcgaggatgtcctttcccgggagacaagtcgggaaagcctggctggactgcctcagccccgcgcgcctcctggactcagggttccccgtcctgagctcgggagatgttcagagtcacactgccgcccggtctgccacgcagaggtccaacttgccacccgcgtccctggtacctgagaccaccgacatcctcaggttcctgaccgtggcgcccttctacccagcccagtgtgcggccgccgcgctgtctgcacagctgggggcctctgagcctggtgggcttcctggactcttggcctcactccttgccccctccccacgacacccatgagccgaaaggatgtcactaaggatggctgattccccaagggcacccgctctccctccctccctgctggaggaacacgtcatatcagatgagaggaagatggcctctgatggacagaatttttctcttaactcagcttttgctactttggcaaaaactagcgaggggtagcagaaacctgcaccaaggattgtccctatgtcttggccactcctagagcgtgtgcagactgatgattttatatgtaaatcaagactcacatccctttcctagtcccccacatccaaagcccctcagcctgccttgcagaccaatgggctccatgttctgtagccccctcccctacgcctcacccctcctccctctcacaggttctgggcggccagtgagagaaacgcagtgggggaggcagggagtctggtgcctgcagagattctctgcttctttcctggggggaggtggggaggtcttagcaggagcgggccctgtacccacctgctgacctgctgtttggtagagaaataaaggttgtgtgactggggg

SEQ ID NO: 1387 - protein, 1044 aa, Homo sapiens
MEAAHLLPAADVLRHFSVTAEGGLSPAQVTGARERYGPNELPSEEGKSLWELVLEQFEDLLVRILLLAALVSFVLAWFEEGEETTTAFVEPLVIMLILVANAIVGVWQERNAESAIEALKEYEPEMGKVIRSDRKGVQRIRARDIVPGDIVEVAVGDKVPADLRLIEIKSTTLRVDQSILTGESVSVTKHTEAIPDPRAVNQDKKNMLFSGTNITSGKAVGVAVATGLHTELGKIRSQMAAVEPERTPLQRKLDEFGRQLSHAISVICVAVWVINIGHFADPAHGGSWLRGAVYYFKIAVALAVAAIPEGLPAVITTCLALGTRRMARKNAIVRSLPSVETLGCTSVICSDKTGTLTTNQMSVCRMFVVAEADAGSCLLHEFTISGTTYTPEGEVRQGDQPVRCGQFDGLVELATICALCNDSALDYNEAKGVYEKVGEATETALTCLVEKMNVFDTDLQALSRVERAGACNTVIKQLMRKEFTLEFSRDRKSMSVYCTPTRPHPTGQGSKMFVKGAPESVIERCSSVRVGSRTAPLTPTSREQILAKIRDWGSGSDTLRCLALATRDAPPRKEDMELDDCSKFVQYETDLTFVGCVGMLDPPRPEVAACITRCYQAGIRVVMITGDNKGTAVAICRRLGIFGDTEDVAGKAYTGREFDDLSPEQQRQACRTARCFARVEPAHKSRIVENLQSFNEITAMTGDGVNDAPALKKAEIGIAMGSGTAVAKSAAEMVLSDDNFASIVAAVEEGRAIYSNMKQFIRYLISSNVGEVVCIFLTAILGLPEALIPVQLLWVNLVTDGLPATALGFNPPDLDIMEKLPRSPREALISGWLFFRYLAIGVYVGLATVAAATWWFVYDAEGPHINFYQLRNFLKCSEDNPLFAGIDCEVFESRFPTTMALSVLVTIEMCNALNSVSENQSLLRMPPWMNPWLLVAVAMSMALHFLILLVPPLPLIFQVTPLSGRQWVVVLQISLPVILLDEALKYLSRNHMHACLYPGLLRTVSQAWSRQPLTTSWTPDHTGARDTASSRCQSCSEREEAGKK

SEQ ID NO: 1388 - DNA, 4786 bp, Homo sapiens
ccgccgccactgccgtcgggtaaggtcccagcacggacatggcctcgcgcggcgcccgcccgggcccgagtcccccgcgccccgctttgtagccccccggcggagaggcggcctcgacggtgcggacggcgcagacggccgggcgggcggcatggaggcggcgcatctgctcccggccgccgacgtgctgcgccacttctcggtgacagccgagggcggcctgagcccggcgcaggtgaccggcgcgcgggagcgctacggccccaacgagctcccgagtgaggaagggaagtccctgtgggagctggtgctggaacagtttgaggacctcctggtgcgcatcctgctgctggctgcccttgtctcctttgtcctggcctggttcgaggagggcgaggagaccacgaccgccttcgtggagcccctggtcatcatgctgatcctcgtggccaacgccattgtgggcgtgtggcaggaacgcaacgccgagagtgccatcgaggccctgaaggagtatgagcctgagatgggcaaggtgatccgctcggaccgcaagggcgtgcagaggatccgtgcccgggacatcgtcccaggggacattgtagaagtggcagtgggggacaaagtgcctgctgacctccgcctcatcgagatcaagtccaccacgctgcgagtggaccagtccatcctgacgggtgaatctgtgtccgtgaccaagcacacagaggccatcccagaccccagagctgtgaaccaggacaagaagaacatgctgttttctggcaccaatatcacatcgggcaaagcggtgggtgtggccgtggccaccggcctgcacacggagctgggcaagatccggagccagatggcggcagtcgagcccgagcggacgccgctgcagcgcaagctggacgagtttggacggcagctgtcccacgccatctctgtgatctgcgtggccgtgtgggtcatcaacatcggccacttcgccgacccggcccacggtggctcctggctgcgtggcgctgtctactacttcaagatcgccgtggccctggcggtggcggccatccccgagggcctcccggctgtcatcactacatgcctggcactgggcacgcggcgcatggcacgcaagaacgccatcgtgcgaagcctgccgtccgtggagaccctgggctgcacctcagtcatctgctccgacaagacgggcacgctcaccaccaatcagatgtctgtctgccggatgttcgtggtagccgaggccgatgcgggctcctgccttttgcacgagttcaccatctcgggtaccacgtatacccccgagggcgaagtgcggcagggggatcagcctgtgcgctgcggccagttcgacgggctggtggagctggcgaccatctgcgccctgtgcaacgactcggctctggactacaacgaggccaagggtgtgtatgagaaggtgggagaggccacggagacagctctgacttgcctggtggagaagatgaacgtgttcgacaccgacctgcaggctctgtcccgggtggagcgagctggcgcctgtaacacggtcatcaagcagctgatgcggaaggagttcaccctggagttctcccgagaccggaaatccatgtccgtgtactgcacgcccacccgccctcaccctactggccagggcagcaagatgtttgtgaagggggctcctgagagtgtgatcgagcgctgtagctcagtccgcgtggggagccgcacagcacccctgacccccacctccagggagcagatcctggcaaagatccgggattggggctcaggctcagacacgctgcgctgcctggcactggccacccgggacgcgcccccaaggaaggaggacatggagctggacgactgcagcaagtttgtgcagtacgagacggacctgaccttcgtgggctgcgtaggcatgctggacccgccgcgacctgaggtggctgcctgcatcacacgctgctaccaggcgggcatccgcgtggtcatgatcacgggggataacaaaggcactgccgtggccatctgccgcaggcttggcatctttggggacacggaagacgtggcgggcaaggcctacacgggccgcgagtttgatgacctcagccccgagcagcagcgccaggcctgccgcaccgcccgctgcttcgcccgcgtggagcccgcacacaagtcccgcatcgtggagaacctgcagtcctttaacgagatcactgctatgactggcgatggagtgaacgacgcaccagccctgaagaaagcagagatcggcatcgccatgggctcaggcacggccgtggccaagtcggcggcagagatggtgctgtcagatgacaactttgcctccatcgtggctgcggtggaggagggccgggccatctacagcaacatgaagcaattcatccgctacctcatctcctccaatgttggcgaggtcgtctgcatcttcctcacggcaattctgggcctgcccgaagccctgatccctgtgcagctgctctgggtgaacctggtgacagacggcctacctgccacggctctgggcttcaacccgccagacctggacatcatggagaagctgccccggagcccccgagaagccctcatcagtggctggctcttcttccgatacctggctatcggagtgtacgtaggcctggccacagtggctgccgccacctggtggtttgtgtatgacgccgagggacctcacatcaacttctaccagctgaggaacttcctgaagtgctccgaagacaacccgctctttgccggcatcgactgtgaggtgttcgagtcacgcttccccaccaccatggccttgtccgtgctcgtgaccattgaaatgtgcaatgccctcaacagcgtctcggagaaccagtcgctgctgcggatgccgccctggatgaacccctggctgctggtggctgtggccatgtccatggccctgcacttcctcatcctgctcgtgccgcccctgcctctcattttccaggtgaccccactgagcgggcgccagtgggtggtggtgctccagatatctctgcctgtcatcctgctggatgaggccctcaagtacctgtcccggaaccacatgcacgcctgtctttatccaggccttctcaggacagtctcgcaggcctggagtaggcagccgctgaccacctcttggaccccagaccacaccggaagaaatgagccagaagtgagcgctgggaacagagtggagtctccggtgtgtacctcagactgatggtgcccatgtgttcgcctccgccccccacccttgccaccacactcgcccacttgcccaccgggtcccgccggataaatgacaggcccgaggtcagaatggccatccccgggccccgtcctggggtctctgtccccacttccttctggcctgggaggtctgtaattcctgtctcctggactctcctgggaagttccctgctctgcagctctggcccaggagctgcaggctgggagggggcagccaagaagccggagctggcagcatacccagagatccggggcccccccacccccaaatcacgagtgcagctggagcttgctcccccttgttcggaagctggacgttcacttggtgactggtgcctctgcactgacggaggactctgggggtccttcttaccggctctgacctctctcttcgtgcctggtctgggactgggtcagccctgggggatcagaaggggccatctgggcccagctgtgtacagcgagggtgggcagccccctccactccactctgcttccacaaagtcggctcccgagagctcgaggctgcttctgtttatatgtgcagggcccgggcgggtgaagggtcagagagacggacacaaggagccggcaggagggcggagcgaggatgtcctttcccgggagacaagtcgggaaagcctggctggactgcctcagccccgcgcgcctcctggactcagggttccccgtcctgagctcgggagatgttcagagtcacactgccgcccggtctgccacgcagaggtccaacttgccacccgcgtccctggtacctgagaccaccgacatcctcaggttcctgaccgtggcgcccttctacccagcccagtgtgcggccgccgcgctgtctgcacagctgggggcctctgagcctggtgggcttcctggactcttggcctcactccttgccccctccccacgacacccatgagccgaaaggatgtcactaaggatggctgattccccaagggcacccgctctccctccctccctgctggaggaacacgtcatatcagatgagaggaagatggcctctgatggacagaatttttctcttaactcagcttttgctactttggcaaaaactagcgaggggtagcagaaacctgcaccaaggattgtccctatgtcttggccactcctagagcgtgtgcagactgatgattttatatgtaaatcaagactcacatccctttcctagtcccccacatccaaagcccctcagcctgccttgcagaccaatgggctccatgttctgtagccccctcccctacgcctcacccctcctccctctcacaggttctgggcggccagtgagagaaacgcagtgggggaggcagggagtctggtgcctgcagagattctctgcttctttcctggggggaggtggggaggtcttagcaggagcgggccctgtacccacctgctgacctgctgtttggtagagaaataaaggttgtgtgactggggg

SEQ ID NO: 1389 - protein, 1043 aa, Homo sapiens
MEAAHLLPAADVLRHFSVTAEGGLSPAQVTGARERYGPNELPSEEGKSLWELVLEQFEDLLVRILLLAALVSFVLAWFEEGEETTTAFVEPLVIMLILVANAIVGVWQERNAESAIEALKEYEPEMGKVIRSDRKGVQRIRARDIVPGDIVEVAVGDKVPADLRLIEIKSTTLRVDQSILTGESVSVTKHTEAIPDPRAVNQDKKNMLFSGTNITSGKAVGVAVATGLHTELGKIRSQMAAVEPERTPLQRKLDEFGRQLSHAISVICVAVWVINIGHFADPAHGGSWLRGAVYYFKIAVALAVAAIPEGLPAVITTCLALGTRRMARKNAIVRSLPSVETLGCTSVICSDKTGTLTTNQMSVCRMFVVAEADAGSCLLHEFTISGTTYTPEGEVRQGDQPVRCGQFDGLVELATICALCNDSALDYNEAKGVYEKVGEATETALTCLVEKMNVFDTDLQALSRVERAGACNTVIKQLMRKEFTLEFSRDRKSMSVYCTPTRPHPTGQGSKMFVKGAPESVIERCSSVRVGSRTAPLTPTSREQILAKIRDWGSGSDTLRCLALATRDAPPRKEDMELDDCSKFVQYETDLTFVGCVGMLDPPRPEVAACITRCYQAGIRVVMITGDNKGTAVAICRRLGIFGDTEDVAGKAYTGREFDDLSPEQQRQACRTARCFARVEPAHKSRIVENLQSFNEITAMTGDGVNDAPALKKAEIGIAMGSGTAVAKSAAEMVLSDDNFASIVAAVEEGRAIYSNMKQFIRYLISSNVGEVVCIFLTAILGLPEALIPVQLLWVNLVTDGLPATALGFNPPDLDIMEKLPRSPREALISGWLFFRYLAIGVYVGLATVAAATWWFVYDAEGPHINFYQLRNFLKCSEDNPLFAGIDCEVFESRFPTTMALSVLVTIEMCNALNSVSENQSLLRMPPWMNPWLLVAVAMSMALHFLILLVPPLPLIFQVTPLSGRQWVVVLQISLPVILLDEALKYLSRNHMHACLYPGLLRTVSQAWSRQPLTTSWTPDHTGRNEPEVSAGNRVESPVCTSD

SEQ ID NO: 1390 - DNA, 4799 bp, Homo sapiens
ccgccgccactgccgtcgggtaaggtcccagcacggacatggcctcgcgcggcgcccgcccgggcccgagtcccccgcgccccgctttgtagccccccggcggagaggcggcctcgacggtgcggacggcgcagacggccgggcgggcggcatggaggcggcgcatctgctcccggccgccgacgtgctgcgccacttctcggtgacagccgagggcggcctgagcccggcgcaggtgaccggcgcgcgggagcgctacggccccaacgagctcccgagtgaggaagggaagtccctgtgggagctggtgctggaacagtttgaggacctcctggtgcgcatcctgctgctggctgcccttgtctcctttgtcctggcctggttcgaggagggcgaggagaccacgaccgccttcgtggagcccctggtcatcatgctgatcctcgtggccaacgccattgtgggcgtgtggcaggaacgcaacgccgagagtgccatcgaggccctgaaggagtatgagcctgagatgggcaaggtgatccgctcggaccgcaagggcgtgcagaggatccgtgcccgggacatcgtcccaggggacattgtagaagtggcagtgggggacaaagtgcctgctgacctccgcctcatcgagatcaagtccaccacgctgcgagtggaccagtccatcctgacgggtgaatctgtgtccgtgaccaagcacacagaggccatcccagaccccagagctgtgaaccaggacaagaagaacatgctgttttctggcaccaatatcacatcgggcaaagcggtgggtgtggccgtggccaccggcctgcacacggagctgggcaagatccggagccagatggcggcagtcgagcccgagcggacgccgctgcagcgcaagctggacgagtttggacggcagctgtcccacgccatctctgtgatctgcgtggccgtgtgggtcatcaacatcggccacttcgccgacccggcccacggtggctcctggctgcgtggcgctgtctactacttcaagatcgccgtggccctggcggtggcggccatccccgagggcctcccggctgtcatcactacatgcctggcactgggcacgcggcgcatggcacgcaagaacgccatcgtgcgaagcctgccgtccgtggagaccctgggctgcacctcagtcatctgctccgacaagacgggcacgctcaccaccaatcagatgtctgtctgccggatgttcgtggtagccgaggccgatgcgggctcctgccttttgcacgagttcaccatctcgggtaccacgtatacccccgagggcgaagtgcggcagggggatcagcctgtgcgctgcggccagttcgacgggctggtggagctggcgaccatctgcgccctgtgcaacgactcggctctggactacaacgaggccaagggtgtgtatgagaaggtgggagaggccacggagacagctctgacttgcctggtggagaagatgaacgtgttcgacaccgacctgcaggctctgtcccgggtggagcgagctggcgcctgtaacacggtcatcaagcagctgatgcggaaggagttcaccctggagttctcccgagaccggaaatccatgtccgtgtactgcacgcccacccgccctcaccctactggccagggcagcaagatgtttgtgaagggggctcctgagagtgtgatcgagcgctgtagctcagtccgcgtggggagccgcacagcacccctgacccccacctccagggagcagatcctggcaaagatccgggattggggctcaggctcagacacgctgcgctgcctggcactggccacccgggacgcgcccccaaggaaggaggacatggagctggacgactgcagcaagtttgtgcagtacgagacggacctgaccttcgtgggctgcgtaggcatgctggacccgccgcgacctgaggtggctgcctgcatcacacgctgctaccaggcgggcatccgcgtggtcatgatcacgggggataacaaaggcactgccgtggccatctgccgcaggcttggcatctttggggacacggaagacgtggcgggcaaggcctacacgggccgcgagtttgatgacctcagccccgagcagcagcgccaggcctgccgcaccgcccgctgcttcgcccgcgtggagcccgcacacaagtcccgcatcgtggagaacctgcagtcctttaacgagatcactgctatgactggcgatggagtgaacgacgcaccagccctgaagaaagcagagatcggcatcgccatgggctcaggcacggccgtggccaagtcggcggcagagatggtgctgtcagatgacaactttgcctccatcgtggctgcggtggaggagggccgggccatctacagcaacatgaagcaattcatccgctacctcatctcctccaatgttggcgaggtcgtctgcatcttcctcacggcaattctgggcctgcccgaagccctgatccctgtgcagctgctctgggtgaacctggtgacagacggcctacctgccacggctctgggcttcaacccgccagacctggacatcatggagaagctgccccggagcccccgagaagccctcatcagtggctggctcttcttccgatacctggctatcggagtgtacgtaggcctggccacagtggctgccgccacctggtggtttgtgtatgacgccgagggacctcacatcaacttctaccagctgaggaacttcctgaagtgctccgaagacaacccgctctttgccggcatcgactgtgaggtgttcgagtcacgcttccccaccaccatggccttgtccgtgctcgtgaccattgaaatgtgcaatgccctcaacagcgtctcggagaaccagtcgctgctgcggatgccgccctggatgaacccctggctgctggtggctgtggccatgtccatggccctgcacttcctcatcctgctcgtgccgcccctgcctctcattttccaggtgaccccactgagcgggcgccagtgggtggtggtgctccagatatctctgcctgtcatcctgctggatgaggccctcaagtacctgtcccggaaccacatgcacgcctgtctttatccaggccttctcaggacagtctcgcaggcctggagtaggcagccgctgaccacctcttggaccccagaccacaccgggttggcctctttgaagaaatgagccagaagtgagcgctgggaacagagtggagtctccggtgtgtacctcagactgatggtgcccatgtgttcgcctccgccccccacccttgccaccacactcgcccacttgcccaccgggtcccgccggataaatgacaggcccgaggtcagaatggccatccccgggccccgtcctggggtctctgtccccacttccttctggcctgggaggtctgtaattcctgtctcctggactctcctgggaagttccctgctctgcagctctggcccaggagctgcaggctgggagggggcagccaagaagccggagctggcagcatacccagagatccggggcccccccacccccaaatcacgagtgcagctggagcttgctcccccttgttcggaagctggacgttcacttggtgactggtgcctctgcactgacggaggactctgggggtccttcttaccggctctgacctctctcttcgtgcctggtctgggactgggtcagccctgggggatcagaaggggccatctgggcccagctgtgtacagcgagggtgggcagccccctccactccactctgcttccacaaagtcggctcccgagagctcgaggctgcttctgtttatatgtgcagggcccgggcgggtgaagggtcagagagacggacacaaggagccggcaggagggcggagcgaggatgtcctttcccgggagacaagtcgggaaagcctggctggactgcctcagccccgcgcgcctcctggactcagggttccccgtcctgagctcgggagatgttcagagtcacactgccgcccggtctgccacgcagaggtccaacttgccacccgcgtccctggtacctgagaccaccgacatcctcaggttcctgaccgtggcgcccttctacccagcccagtgtgcggccgccgcgctgtctgcacagctgggggcctctgagcctggtgggcttcctggactcttggcctcactccttgccccctccccacgacacccatgagccgaaaggatgtcactaaggatggctgattccccaagggcacccgctctccctccctccctgctggaggaacacgtcatatcagatgagaggaagatggcctctgatggacagaatttttctcttaactcagcttttgctactttggcaaaaactagcgaggggtagcagaaacctgcaccaaggattgtccctatgtcttggccactcctagagcgtgtgcagactgatgattttatatgtaaatcaagactcacatccctttcctagtcccccacatccaaagcccctcagcctgccttgcagaccaatgggctccatgttctgtagccccctcccctacgcctcacccctcctccctctcacaggttctgggcggccagtgagagaaacgcagtgggggaggcagggagtctggtgcctgcagagattctctgcttctttcctggggggaggtggggaggtcttagcaggagcgggccctgtacccacctgctgacctgctgtttggtagagaaataaaggttgtgtgactggggg

SEQ ID NO: 1391 - protein, 1029 aa, Homo sapiens
MEAAHLLPAADVLRHFSVTAEGGLSPAQVTGARERYGPNELPSEEGKSLWELVLEQFEDLLVRILLLAALVSFVLAWFEEGEETTTAFVEPLVIMLILVANAIVGVWQERNAESAIEALKEYEPEMGKVIRSDRKGVQRIRARDIVPGDIVEVAVGDKVPADLRLIEIKSTTLRVDQSILTGESVSVTKHTEAIPDPRAVNQDKKNMLFSGTNITSGKAVGVAVATGLHTELGKIRSQMAAVEPERTPLQRKLDEFGRQLSHAISVICVAVWVINIGHFADPAHGGSWLRGAVYYFKIAVALAVAAIPEGLPAVITTCLALGTRRMARKNAIVRSLPSVETLGCTSVICSDKTGTLTTNQMSVCRMFVVAEADAGSCLLHEFTISGTTYTPEGEVRQGDQPVRCGQFDGLVELATICALCNDSALDYNEAKGVYEKVGEATETALTCLVEKMNVFDTDLQALSRVERAGACNTVIKQLMRKEFTLEFSRDRKSMSVYCTPTRPHPTGQGSKMFVKGAPESVIERCSSVRVGSRTAPLTPTSREQILAKIRDWGSGSDTLRCLALATRDAPPRKEDMELDDCSKFVQYETDLTFVGCVGMLDPPRPEVAACITRCYQAGIRVVMITGDNKGTAVAICRRLGIFGDTEDVAGKAYTGREFDDLSPEQQRQACRTARCFARVEPAHKSRIVENLQSFNEITAMTGDGVNDAPALKKAEIGIAMGSGTAVAKSAAEMVLSDDNFASIVAAVEEGRAIYSNMKQFIRYLISSNVGEVVCIFLTAILGLPEALIPVQLLWVNLVTDGLPATALGFNPPDLDIMEKLPRSPREALISGWLFFRYLAIGVYVGLATVAAATWWFVYDAEGPHINFYQLRNFLKCSEDNPLFAGIDCEVFESRFPTTMALSVLVTIEMCNALNSVSENQSLLRMPPWMNPWLLVAVAMSMALHFLILLVPPLPLIFQVTPLSGRQWVVVLQISLPVILLDEALKYLSRNHMHACLYPGLLRTVSQAWSRQPLTTSWTPDHTGLASLKK

SEQ ID NO: 1392 - DNA, 4695 bp, Homo sapiens
ccgccgccactgccgtcgggtaaggtcccagcacggacatggcctcgcgcggcgcccgcccgggcccgagtcccccgcgccccgctttgtagccccccggcggagaggcggcctcgacggtgcggacggcgcagacggccgggcgggcggcatggaggcggcgcatctgctcccggccgccgacgtgctgcgccacttctcggtgacagccgagggcggcctgagcccggcgcaggtgaccggcgcgcgggagcgctacggccccaacgagctcccgagtgaggaagggaagtccctgtgggagctggtgctggaacagtttgaggacctcctggtgcgcatcctgctgctggctgcccttgtctcctttgtcctggcctggttcgaggagggcgaggagaccacgaccgccttcgtggagcccctggtcatcatgctgatcctcgtggccaacgccattgtgggcgtgtggcaggaacgcaacgccgagagtgccatcgaggccctgaaggagtatgagcctgagatgggcaaggtgatccgctcggaccgcaagggcgtgcagaggatccgtgcccgggacatcgtcccaggggacattgtagaagtggcagtgggggacaaagtgcctgctgacctccgcctcatcgagatcaagtccaccacgctgcgagtggaccagtccatcctgacgggtgaatctgtgtccgtgaccaagcacacagaggccatcccagaccccagagctgtgaaccaggacaagaagaacatgctgttttctggcaccaatatcacatcgggcaaagcggtgggtgtggccgtggccaccggcctgcacacggagctgggcaagatccggagccagatggcggcagtcgagcccgagcggacgccgctgcagcgcaagctggacgagtttggacggcagctgtcccacgccatctctgtgatctgcgtggccgtgtgggtcatcaacatcggccacttcgccgacccggcccacggtggctcctggctgcgtggcgctgtctactacttcaagatcgccgtggccctggcggtggcggccatccccgagggcctcccggctgtcatcactacatgcctggcactgggcacgcggcgcatggcacgcaagaacgccatcgtgcgaagcctgccgtccgtggagaccctgggctgcacctcagtcatctgctccgacaagacgggcacgctcaccaccaatcagatgtctgtctgccggatgttcgtggtagccgaggccgatgcgggctcctgccttttgcacgagttcaccatctcgggtaccacgtatacccccgagggcgaagtgcggcagggggatcagcctgtgcgctgcggccagttcgacgggctggtggagctggcgaccatctgcgccctgtgcaacgactcggctctggactacaacgaggccaagggtgtgtatgagaaggtgggagaggccacggagacagctctgacttgcctggtggagaagatgaacgtgttcgacaccgacctgcaggctctgtcccgggtggagcgagctggcgcctgtaacacggtcatcaagcagctgatgcggaaggagttcaccctggagttctcccgagaccggaaatccatgtccgtgtactgcacgcccacccgccctcaccctactggccagggcagcaagatgtttgtgaagggggctcctgagagtgtgatcgagcgctgtagctcagtccgcgtggggagccgcacagcacccctgacccccacctccagggagcagatcctggcaaagatccgggattggggctcaggctcagacacgctgcgctgcctggcactggccacccgggacgcgcccccaaggaaggaggacatggagctggacgactgcagcaagtttgtgcagtacgagacggacctgaccttcgtgggctgcgtaggcatgctggacccgccgcgacctgaggtggctgcctgcatcacacgctgctaccaggcgggcatccgcgtggtcatgatcacgggggataacaaaggcactgccgtggccatctgccgcaggcttggcatctttggggacacggaagacgtggcgggcaaggcctacacgggccgcgagtttgatgacctcagccccgagcagcagcgccaggcctgccgcaccgcccgctgcttcgcccgcgtggagcccgcacacaagtcccgcatcgtggagaacctgcagtcctttaacgagatcactgctatgactggcgatggagtgaacgacgcaccagccctgaagaaagcagagatcggcatcgccatgggctcaggcacggccgtggccaagtcggcggcagagatggtgctgtcagatgacaactttgcctccatcgtggctgcggtggaggagggccgggccatctacagcaacatgaagcaattcatccgctacctcatctcctccaatgttggcgaggtcgtctgcatcttcctcacggcaattctgggcctgcccgaagccctgatccctgtgcagctgctctgggtgaacctggtgacagacggcctacctgccacggctctgggcttcaacccgccagacctggacatcatggagaagctgccccggagcccccgagaagccctcatcagtggctggctcttcttccgatacctggctatcggagtgtacgtaggcctggccacagtggctgccgccacctggtggtttgtgtatgacgccgagggacctcacatcaacttctaccagctgaggaacttcctgaagtgctccgaagacaacccgctctttgccggcatcgactgtgaggtgttcgagtcacgcttccccaccaccatggccttgtccgtgctcgtgaccattgaaatgtgcaatgccctcaacagcgtctcggagaaccagtcgctgctgcggatgccgccctggatgaacccctggctgctggtggctgtggccatgtccatggccctgcacttcctcatcctgctcgtgccgcccctgcctctcattttccaggtgaccccactgagcgggcgccagtgggtggtggtgctccagatatctctgcctgtcatcctgctggatgaggccctcaagtacctgtcccggaaccacatgcacgaaatgagccagaagtgagcgctgggaacagagtggagtctccggtgtgtacctcagactgatggtgcccatgtgttcgcctccgccccccacccttgccaccacactcgcccacttgcccaccgggtcccgccggataaatgacaggcccgaggtcagaatggccatccccgggccccgtcctggggtctctgtccccacttccttctggcctgggaggtctgtaattcctgtctcctggactctcctgggaagttccctgctctgcagctctggcccaggagctgcaggctgggagggggcagccaagaagccggagctggcagcatacccagagatccggggcccccccacccccaaatcacgagtgcagctggagcttgctcccccttgttcggaagctggacgttcacttggtgactggtgcctctgcactgacggaggactctgggggtccttcttaccggctctgacctctctcttcgtgcctggtctgggactgggtcagccctgggggatcagaaggggccatctgggcccagctgtgtacagcgagggtgggcagccccctccactccactctgcttccacaaagtcggctcccgagagctcgaggctgcttctgtttatatgtgcagggcccgggcgggtgaagggtcagagagacggacacaaggagccggcaggagggcggagcgaggatgtcctttcccgggagacaagtcgggaaagcctggctggactgcctcagccccgcgcgcctcctggactcagggttccccgtcctgagctcgggagatgttcagagtcacactgccgcccggtctgccacgcagaggtccaacttgccacccgcgtccctggtacctgagaccaccgacatcctcaggttcctgaccgtggcgcccttctacccagcccagtgtgcggccgccgcgctgtctgcacagctgggggcctctgagcctggtgggcttcctggactcttggcctcactccttgccccctccccacgacacccatgagccgaaaggatgtcactaaggatggctgattccccaagggcacccgctctccctccctccctgctggaggaacacgtcatatcagatgagaggaagatggcctctgatggacagaatttttctcttaactcagcttttgctactttggcaaaaactagcgaggggtagcagaaacctgcaccaaggattgtccctatgtcttggccactcctagagcgtgtgcagactgatgattttatatgtaaatcaagactcacatccctttcctagtcccccacatccaaagcccctcagcctgccttgcagaccaatgggctccatgttctgtagccccctcccctacgcctcacccctcctccctctcacaggttctgggcggccagtgagagaaacgcagtgggggaggcagggagtctggtgcctgcagagattctctgcttctttcctggggggaggtggggaggtcttagcaggagcgggccctgtacccacctgctgacctgctgtttggtagagaaataaaggttgtgtgactggggg

SEQ ID NO: 1393 - protein, 998 aa, Homo sapiens
MEAAHLLPAADVLRHFSVTAEGGLSPAQVTGARERYGPNELPSEEGKSLWELVLEQFEDLLVRILLLAALVSFVLAWFEEGEETTTAFVEPLVIMLILVANAIVGVWQERNAESAIEALKEYEPEMGKVIRSDRKGVQRIRARDIVPGDIVEVAVGDKVPADLRLIEIKSTTLRVDQSILTGESVSVTKHTEAIPDPRAVNQDKKNMLFSGTNITSGKAVGVAVATGLHTELGKIRSQMAAVEPERTPLQRKLDEFGRQLSHAISVICVAVWVINIGHFADPAHGGSWLRGAVYYFKIAVALAVAAIPEGLPAVITTCLALGTRRMARKNAIVRSLPSVETLGCTSVICSDKTGTLTTNQMSVCRMFVVAEADAGSCLLHEFTISGTTYTPEGEVRQGDQPVRCGQFDGLVELATICALCNDSALDYNEAKGVYEKVGEATETALTCLVEKMNVFDTDLQALSRVERAGACNTVIKQLMRKEFTLEFSRDRKSMSVYCTPTRPHPTGQGSKMFVKGAPESVIERCSSVRVGSRTAPLTPTSREQILAKIRDWGSGSDTLRCLALATRDAPPRKEDMELDDCSKFVQYETDLTFVGCVGMLDPPRPEVAACITRCYQAGIRVVMITGDNKGTAVAICRRLGIFGDTEDVAGKAYTGREFDDLSPEQQRQACRTARCFARVEPAHKSRIVENLQSFNEITAMTGDGVNDAPALKKAEIGIAMGSGTAVAKSAAEMVLSDDNFASIVAAVEEGRAIYSNMKQFIRYLISSNVGEVVCIFLTAILGLPEALIPVQLLWVNLVTDGLPATALGFNPPDLDIMEKLPRSPREALISGWLFFRYLAIGVYVGLATVAAATWWFVYDAEGPHINFYQLRNFLKCSEDNPLFAGIDCEVFESRFPTTMALSVLVTIEMCNALNSVSENQSLLRMPPWMNPWLLVAVAMSMALHFLILLVPPLPLIFQVTPLSGRQWVVVLQISLPVILLDEALKYLSRNHMHEMSQK

SEQ ID NO: 1394 - DNA, 4205 bp, Homo sapiens
ccgccgccactgccgtcgggtaaggtcccagcacggacatggcctcgcgcggcgcccgcccgggcccgagtcccccgcgccccgctttgtagccccccggcggagaggcggcctcgacggtgcggacggcgcagacggccgggcgggcggcatggaggcggcgcatctgctcccggccgccgacgtgctgcgccacttctcggtgacagccgagggcggcctgagcccggcgcaggtgaccggcgcgcgggagcgctacggccccaacgagctcccgagtgaggaagggaagtccctgtgggagctggtgctggaacagtttgaggacctcctggtgcgcatcctgctgctggctgcccttgtctcctttgtcctggcctggttcgaggagggcgaggagaccacgaccgccttcgtggagcccctggtcatcatgctgatcctcgtggccaacgccattgtgggcgtgtggcaggaacgcaacgccgagagtgccatcgaggccctgaaggagtatgagcctgagatgggcaaggtgatccgctcggaccgcaagggcgtgcagaggatccgtgcccgggacatcgtcccaggggacattgtagaagtggcagtgggggacaaagtgcctgctgacctccgcctcatcgagatcaagtccaccacgctgcgagtggaccagtccatcctgacgggtgaatctgtgtccgtgaccaagcacacagaggccatcccagaccccagagctgtgaaccaggacaagaagaacatgctgttttctggcaccaatatcacatcgggcaaagcggtgggtgtggccgtggccaccggcctgcacacggagctgggcaagatccggagccagatggcggcagtcgagcccgagcggacgccgctgcagcgcaagctggacgagtttggacggcagctgtcccacgccatctctgtgatctgcgtggccgtgtgggtcatcaacatcggccacttcgccgacccggcccacggtggctcctggctgcgtggcgctgtctactacttcaagatcgccgtggccctggcggtggcggccatccccgagggcctcccggctgtcatcactacatgcctggcactgggcacgcggcgcatggcacgcaagaacgccatcgtgcgaagcctgccgtccgtggagaccctgggctgcacctcagtcatctgctccgacaagacgggcacgctcaccaccaatcagatgtctgtctgccggatgttcgtggtagccgaggccgatgcgggctcctgccttttgcacgagttcaccatctcgggtaccacgtatacccccgagggcgaagtgcggcagggggatcagcctgtgcgctgcggccagttcgacgggctggtggagctggcgaccatctgcgccctgtgcaacgactcggctctggactacaacgaggccaagggtgtgtatgagaaggtgggagaggccacggagacagctctgacttgcctggtggagaagatgaacgtgttcgacaccgacctgcaggctctgtcccgggtggagcgagctggcgcctgtaacacggtcatcaagcagctgatgcggaaggagttcaccctggagttctcccgagaccggaaatccatgtccgtgtactgcacgcccacccgccctcaccctactggccagggcagcaagatgtttgtgaagggggctcctgagagtgtgatcgagcgctgtagctcagtccgcgtggggagccgcacagcacccctgacccccacctccagggagcagatcctggcaaagatccgggattggggctcaggctcagacacgctgcgctgcctggcactggccacccgggacgcgcccccaaggaaggaggacatggagctggacgactgcagcaagtttgtgcagtacgagacggacctgaccttcgtgggctgcgtaggcatgctggacccgccgcgacctgaggtggctgcctgcatcacacgctgctaccaggcgggcatccgcgtggtcatgatcacgggggataacaaaggcactgccgtggccatctgccgcaggcttggcatctttggggacacggaagacgtggcgggcaaggcctacacgggccgcgagtttgatgacctcagccccgagcagcagcgccaggcctgccgcaccgcccgctgcttcgcccgcgtggagcccgcacacaagtcccgcatcgtggagaacctgcagtcctttaacgagatcactgctatgactggcgatggagtgaacgacgcaccagccctgaagaaagcagagatcggcatcgccatgggctcaggcacggccgtggccaagtcggcggcagagatggtgctgtcagatgacaactttgcctccatcgtggctgcggtggaggagggccgggccatctacagcaacatgaagcaattcatccgctacctcatctcctccaatgttggcgaggtcgtctgcatcttcctcacggcaattctgggcctgcccgaagccctgatccctgtgcagctgctctgggtgaacctggtgacagacggcctacctgccacggctctgggcttcaacccgccagacctggacatcatggagaagctgccccggagcccccgagaagccctcatcagtggctggctcttcttccgatacctggctatcggagtgtacgtaggcctggccacagtggctgccgccacctggtggtttgtgtatgacgccgagggacctcacatcaacttctaccagctgaggaacttcctgaagtgctccgaagacaacccgctctttgccggcatcgactgtgaggtgttcgagtcacgcttccccaccaccatggccttgtccgtgctcgtgaccattgaaatgtgcaatgccctcaacagcgtctcggagaaccagtcgctgctgcggatgccgccctggatgaacccctggctgctggtggctgtggccatgtccatggccctgcacttcctcatcctgctcgtgccgcccctgcctctcattttccaggtgaccccactgagcgggcgccagtgggtggtggtgctccagatatctctgcctgtcatcctgctggatgaggccctcaagtacctgtcccggaaccacatgcacgcctgtctttatccaggccttctcaggacagtctcgcaggcctggagtaggcagccgctgaccacctcttggaccccagaccacaccgggttggcctctttgaagaaatgagccagaagtgagcgctgggaacagagtggagtctccgggcccgggcgggtgaagggtcagagagacggacacaaggagccggcaggagggcggagcgaggatgtcctttcccgggagacaagtcgggaaagcctggctggactgcctcagccccgcgcgcctcctggactcagggttccccgtcctgagctcgggagatgttcagagtcacactgccgcccggtctgccacgcagaggtccaacttgccacccgcgtccctggtacctgagaccaccgacatcctcaggttcctgaccgtggcgcccttctacccagcccagtgtgcggccgccgcgctgtctgcacagctgggggcctctgagcctggtgggcttcctggactcttggcctcactccttgccccctccccacgacacccatgagccgaaaggatgtcactaaggatggctgattccccaagggcacccgctctccctccctccctgctggaggaacacgtcatatcagatgagaggaagatggcctctgatggacagaatttttctcttaactcagcttttgctactttggcaaaaactagcgaggggtagcagaaacctgcaccaaggattgtccctatgtcttggccactcctagagcgtgtgcagactgatgattttatatgtaaatcaagactcacatccctttcctagtcccccacatccaaagcccctcagcctgccttgcagaccaatgggctccatgttctgtagccccctcccctacgcctcacccctcctccctctcacaggttctgggcggccagtgagagaaacgcagtgggggaggcagggagtctggtgcctgcagagattctctgcttctttcctggggggaggtggggaggtcttagcaggagcgggccctgtacccacctgctgacctgctgtttggtagagaaataaaggttgtgtgactggggg

SEQ ID NO: 1395 - protein, 1029 aa, Homo sapiens; identical to SEQ ID NO: 1391

SEQ ID NO: 1396 - DNA, 11412 bp, Homo sapiens
gacaggtcgaggcggggaggcggcggcggcggctgcagagccaggcgcccaagacggagaccccatggggaacgctccgagtcacagcagtgaagacgaagcggcagctgccggtggcgagggctggggcccacaccaggactgggccgcggtctcgggcacgacccccggcccgggcgtcgcggctccagcgctaccacccgccgcggcgctgctggagccggccaggctgcgagaggctgctgcagcgttgctgcccacacccccctgcgagtcgctggtgtcgaggcatcgcggcgcgttgtttcgctggctggaagagcggctgggccgcggcgaagagtctgtcactctggagcagttccgggagctgctggaggctcgcggcgccggctgctctagcgagcagttcgaggaggcctttgcccagtttgatgctgagggtgatgggacagttgatgccgagaacatgttggaggccctcaagaattccagtggagctaatcttcagggggagctgagccacatcatcagacaactacaggcctgctctctggttccaggtttcacagacatattttcagagtcgaaggagggccttgatattcactcgtcaatgatactgcgcttcctgcaccgcaatcggctctccagcgcggtgatgccctacccgatgctggagcactgcaataacatgtgcaccatgcggtcttccgtcctgaaggagtctctggatcagctggtacaaaaggaaaaggaaagccctggagatctaactagaagtccagagatggataaactcaagtcagtagcaaagtgctatgcttatatagaaacatcctccaactcggcagacattgacaagatgacaaatggagaaacctcatcctactggcagtcagatggcagtgcctgttcacactggattcgtttaaaaatgaagccagatgttgtgcttaggcacctgtccattgcagtggctgccactgaccagagctacatgccacagcaggtgacagtagctgtagggaggaatgccagcgatcttcaggaagtccgagatgtgcacatccccagcaatgtcactggctatgtgacgctgctggaaaatgccaacgtcagtcagctctatgtccagattaacataaagcgttgtcttagcgatggctgcgacactagaattcatggtctcagggctgttggctttcagagagttaagaagtctggggtctcagtctcagatgcttctgcaatatggtattggtctctgctgacatctctggtgacggcttctatggagacaaatcccgcctttgtccagacagtgctgcacaatactcagaaggcgctgcggcacatgcctccactctctctctcaccaggatctacagatttctcaactttcctctcccctaatgtgctggaagaagtggacagtttcctcataaggataactagctgctgttctaccccagaggtagaactgactcttctggcttttgctctcgcaagaggaagtgttgccaaagtcatgagctctctatgcaccatcactgaccatctggacacgcagtatgatgcctcatccctcatcttgtccatggcgtcagtcagacagaacctgctcctcaaatatggtaaacctctccagttgactcttcaggcatgtgatgtcaaaggaaaagaagataagtctggacccgaaaacctccttgttgaaccgtggacaagggatggttttcttacggaaactggaaaaaccagagccagcactattttttctaccggaactgaatctgccttccaagttacacagataagaattatggttcgacgtggtggcattggtgcccagtgtgggttggtgtttgcctataactcatcttcagataaattttgtgcggaagaacacttcaaaaggtttgaaaaatatgacaaatggaagcttcaggagctcaggcaatttgtaaaaagcaggattggttgctcatctgatgaccttggagaggatgatcctattggctggtttgaactggaagaagaatgggatgaagcagatgtgaagctgcaacagtgcagagttgccaaatatttgatggtgaagttcctctgcacccgtcaggagtcagcagagcgcttgggagtgcaaggcttgaccatcagtgggtacctccggcctgcaagagcagaagcagaacagagcgtcacctgtgcacactgcagaaaggacacagaggagagtgtctgtggggccacgttgctcctcaggacccttcagtttatccagcagctcgcccatgacctggtgcagcagaaggaaagtggcttaaaatataaatcttttctggacttcgcgggtcttgatttgcagatcttctggaatttttacagtaaattaaagcaaaacccgagggaagaatgcgtctctgcccaaaccctgcttctgcagctactccagagctgcttctctgtgctgcagggagatgtactggctgcttctgaggaggaaaaggctccaatccaaagccctaaaggagtagaggctgccaaggagctgtacacacacttgtgtgatgtggtggacaaggtggatggagactctgtgcccatggagatactaaaacaagaagtcaggaatacccttctcaatggggctgccatcttctttcctaatcgacagacccgacggaaccatctcttcaccatgatgaatgtcaccgagcaggagcacaagcagtccctgcagctcactttccgttcactgtgcacgtattttagtgacaaggatccaggcggccttcttcttttacctgagaagaacgacctggccaagatgaacatcagtgaagtcctggcggtcatggacactctcgtctctgttgctgctcgagagtgcgagctgttaatgctcagtggggccccaggggaggtgggctctgtgctcttctccctgttctggtccgtccaaggcagcctgctatcctggtgctacctgcagctgaagagcacggactctggagccaaagatcttgccgtggaccttattgaaaaatatgtgggccagtttctggcaagcatgagagcgattttggaatcccttttctcacagtacagtggaaaaaccatagtagaaagattatgtaactcagtgttttcaatggcagctcgtcaactggttatcttcctgctggacttctgcactttagacatcccacactgcgtgctcttgagagagttcagcgtcctcacagaactcctgaagaagctctgtagtggccccgaaggaggactgaggaagctggatgttgagacctggcaacaggaacagcctgtggtgttacatacgtggacgaaggaatctgcccacaactatgaaaataattgccatgaggtatccgtctttgttagcccaggggcaacctattttgaagtggaattcgatgacaggtgtgaaactgaaaaaaggtatgattatctggaatttaccgacgctagaggtcggaaaacacgctatgacacaaaagttggcactgataaatggcccaagaaagtgaccttcaaggccggtcctcggttgcagttcctctttcactctgacagcagtcacaacgaatggggctacaaattcactgtcactgcctgtgggctgcccgatgttgccgtgtcttgggggctggatttacagctcctcgtctcccggctgatgggacgcctggcttcccagtgcatggcgctcaagtctgtgcgccagttaggaagtaacatggtagtacctcaggcaaaaatggcattagtcctaagctccccactgtggaaacctgtcttcaggcatcaggtttgtccagagttggaattagaagcaagctggcccactcacccacaccggaatagtaaggaggttaagaacattcctgacgacccctgccgccattttcttcttgattttgcccagtcagagcctgctcagaacttctgtgggccatattcagaacttttcaaaggattcatacaggcatgtagaaaacaggccccaaagacagatatagttgctggttccactattgatcaagctgtgaacgccacctttgctgctctggtgtatcgcactccagatttatatgagaagctgcaaaaatatgtcaacagtgggggcaaaatagccctgagtgaagagtttgcccaggtttattccttggcagatgggattcgaatatggatgttagagatgaagcagaagtccctgatgagcctggggaatgaagcagaagaaaaacatagttcagaagctactgaggtgaaccctgagagcctggcaaaagagtgcattgagaagagtcttctattactaaaatttctgcccacgggcataagttcaaaagaaagctgcgaaaagttggagactgctgatgaaaccagtcatctccagccactcaacaagcgtcagaggacaagctctgtggtggaagagcatttccaagcctcagtatctcccactgaagccgcaccccctgccacaggagaccagagtcctggcctgggcacccagccaaagctgccatccagcagtggccttcctgctgcagacgtgtcccctgccacagctgaagagcccttgtcaccttccacacccacccgccggcctcccttcacccgagggcgactccggctgctctcctttcgatccatggaggaggccagactggtgcccacagtgaaagagaaataccctgtgctgaaggacgtcatggacttcattaaggatcagtcgctctcgcacaggagtgttgtgaaggttctttccctgaggaaagcccaggcccagagcatcctggaagtcctgaagataactcagcactgtgcagaatcccttgggcagccccactgcttccatccacctttcatacttttcctgttggaacttctgacctgtcagaaagattttaccaattattttggacacctggaaggctgtggtgctgatctacacaaagaaattcgagacacttactatcaacttgttctgtttttggtcaaagcagttaaaggatttagtagcctaaatgacaggtccttgctccctgccttatcctgtgttcagacagccctgcttcatcttttggatatgggctgggaacccaatgatctcgccttctttgttgatattcagttaccagatctcctcatgaaaatgtcacaggagaatataagtgtccatgacagtgtgatcagccaatggagtgaagaagatgagcttgctgatgccaagcagaattcagaatggatggatgagtgtcaggatggcatgtttgaggcctggtatgaaaaaatagcccaggaagatccagagaagcagaggaaaatgcacatgttcattgctcgctactgtgacctgttaaatgtggacatctcttgtgatgggtgtgatgagattgccccctggcatcgataccgctgtctgcagtgcagcgacatggatctctgcaaaacttgcttcctaggtggggtgaagcctgagggccacggagacgaccatgaaatggtcaacatggagtttacctgtgaccactgccagggtttgatcataggccggaggatgaactgcaatgtttgcgatgactttgatctttgctacggatgctatgcagcgaagaaatactcctacggccatttgcctacccacagcatcacggcccacccaatggtaaccattcggatcagtgaccggcagaggctcatccagccatatatccataactactcctggctgctctttgctgccctggctctctatagcgcccacctggccagtgcagaggatgtggatggggagaagctggacccccagacgcgcagcagtgccaccaccctgcggagccagtgcatgcagctcgtcggggactgtctgatgaaggctcatcagggaaaaggccttaaagctctagctttgctgggtgtattgccagatggggactcgagcctagaagatcaggccctaccagtcactgtgcccaccggagcgtcagaggagcagctagagaagaaagctgtccagggtgctgagctgtcagaagcaggcaatggaaagagagctgttcatgaggaaatcagacctgtagatttcaagcagagaaataaggcagataaaggtgtatcattatcgaaggatccttcatgccagacccaaatttcagattcacctgcagatgctagcccacctacaggacttccagatgctgaagattcagaagtgtcatctcagaagcccatagaggaaaaagcagttactccaagccctgagcaagtgtttgctgagtgttcccagaagaggattttgggattactagcagccatgttacctcccttaaagtcgggccccacggttcccctgatagacctggagcacgtccttccactcatgtttcaggttgtcatctcaaacgcaggccacctgaatgaaacctaccatctcaccctgggtcttctcggccagttaattatccgtcttttgccagcagaggtagacgccgcagtgatcaaagtcctctcagccaaacacaacctgtttgctgcaggggacagttccattgtgccagatggctggaaaaccacccacctgctctttagcctgggagctgtgtgtctggacagccgggtgggcttggactgggcgtgctccatggcagagatcctgcggtcactcaacagtgccccactgtggcgtgatgtcattgccaccttcacagaccactgcatcaagcagctgccattccagctgaagcacaccaacatcttcaccctgctcgtgctggttggcttcccccaggtcctctgtgtgggaacccgctgcgtttatatggataatgccaatgaaccccataatgtgatcatcttgaagcactttactgagaagaacagggctgtgattgttgatgtcaaaactcggaagaggaaaacagtgaaggactaccagctggtccagaagggaggaggacaagagtgtggtgactctcgggcccagctgagccagtactcccagcactttgcctttatcgccagtcaccttctgcaaagcagcatggacagccattgtcccgaggcagtagaagcaacttgggtcctgtccctggccctgaaaggattgtataaaacactaaaggctcacggttttgaggagatccgtgctactttccttcagaccgatttgctgaagttgctggtgaaaaagtgcagcaaagggactggctttagtaaaacgtggctcctccgggacctggaaattttgtccatcatgctgtactcctcaaaaaaggagatcaacgctttggctgagcacggagacctagagctggatgagcgaggggaccgagaggaagaggtggaacggccagtcagcagccctggcgacccagagcagaaaaagctggacccccttgagggcctggatgagcccaccagaatatgtttcttgatggctcatgatgccctcaatgcccctctgcacattctccgggccatatacgaactgcagatgaaaaagaccgattatttcttcctggaggttcagaagaggtttgatggtgatgagctcaccacagatgaaaggatacggtccctggctcagcggtggcagcccagtaagagtctgaggctggaagaacagagcgccaaagctgtggatacagacatgattatcctgccatgcttgtcccggcctgcacgctgtgaccaagccactgctgaatcgaaccctgtgacccagaagctgatctccagcacagagagcgaactgcagcagagctatgccaagcagcgccgtagcaagagcgccgccctcctgcacaaggagctgaactgcaagagtaagagggctgtccgggactacctcttccgagtgaacgaggccacagctgtcctgtacgcccgccacgtgcttgcatccctgctcgccgagtggcctagccacgtgccagtgagcgaggacatcctggagctcagtggccctgcccatatgacctacattttggatatgttcatgcagctggaagaaaagcatgagtgggagaagatcctgcagaaagtgctccagggctgccgagaggacatgctggggaccatggccctggctgcatgccagttcatggaggagccaggaatggaggtgcaagtgagggagtcgaaacacccgtataacaacaacaccaacttcgaggataaagttcacattcctggtgccatctacctctcaatcaaattcgactctcagtgcaacacagaggagggctgtgacgagttagccatgtccagcagcagtgacttccagcaagaccgacacagcttcagcgggtctcagcagaagtggaaagattttgaacttccaggagacactctgtattaccgcttcacctccgacatgagcaacaccgagtggggctacagattcaccgtgacggccggacacctggggcggttccagacaggattcgagattttgaagcagatgttgtcagaagaaagggtcgtgcctcatctcccattggcaaaaatttgggaatggctggtgggcgtggcctgtcgccagactggccatcaacgattaaaagccatccacttacttctgaggattgtgcgatgctgcggccacagtgacctgtgtgaccttgcgctgttgaagcccctgtggcagctctttacccacatggagtacggcctgtttgaggacgtgacgcagcccggcatcctccttcccctgcatcgtgccctcactgagctcttcttcgtcaccgagaaccgtgcccaggagcttggcgtgctgcaggattacctgctggccctaaccacggacgaccaccttctccgctgtgcggcacaggctctgcagaacattgctgccatcagcctggccatcaactacccaaacaaggccacccgcctctggaatgtggagtgttagcccttggtggggcgtgcatgggactagttcatctgccacagggattttagagcagacatctaacctcattcaggaaaactcctgtagcgccagtgcccagctctccttgagctgaccactccagttaggatgccaagcagccacgtctccaagagctcccgtgcgtaggctggacacaagcacaggctgtagcatggtgaaaataagccaagcagtgcagaatgcctcagaaagggtgggcagggggcccttaagaaggttcagagaccagccttctccagaggctgtcactgcaggagccgtgggcctgggaagacttggaagcggcctctctcaactggtttctgtctccgtggagctggaactgcctgcacttgccttcagagggaggcacagtccacccagatccacctttccagcaagacccccagtggctgcccagcctgggagcacctctttgcttttcacaccaaaccaaaactggcgagagcccctcctagccaccagtgatccccaagcatccagtacagaaccaggcatcgagctagctccctgcacggccgcaccctcccagagaactccttgaggagaacaagtgcccttggggacagccggcaggcgcccctgtacgtctgctcatgcaccaggcagcacagccgcagttcctcagttgttgttttgacatatttcagtttccacctcacgtttttagagcagaaccacactgtctccctggaggggctcgagggcatgaccggggactgaccattctgtgaaaggagcagaatgtgaggagcacgcgtgagcttatgtaccgtgaagatgatcagaggatatcttattttaagagtaaaaacccacataattttatttctgcttgatagtcatggtagtctgtcatacccacctctgggactctgcgtggctgtttggctgtcacttgtagcaataacgacattagttctagtcagtgctgttttacatttttcttttgatgggtttagtcttgccctggagtgccgatgatgattctccctccagagccacgcttgggaacatgaagcaagtctggcgtgtgggctgcgtgccggccttagtgggacccgtggggttggagcatgcctttaggggcagtgtctgggccgaagcacgtcccaccacacagtgccagagccagagaaggggccccaccaccaaggccaagcttgaccaggtcagcattgccatggcccagtgtgccccgtggcctctgaagatccctctgtgcagggtctgcagggatctggattgcaagggcccaagtctgcaggtctggaagcatcttcctataagagcactttcgccttctgggtcaggactccaaggtgcagcgggcttcacagccctacaattgggttctcagctaagccccagagttctggtagaaccatcccggggcgggtggagggtgggatttaagggagacgggaacacatggggcaggtcctggaacttggtggcctgaggactgaggccattgccctggtggaaaggcctggcctggttcctgtggcttgggacctgaataggcaggtgctgctggctccgtagaaacccttttcccatcttttgctctttgccaaacctaccttgctttgggagctgcctgcaccaccccagagaaggccccaccttcttcatccctcagacccgaggaggcctcccagtaaggagtttcccaagaggggactcacaggaaacaagtcttagtgcttgggagggaggccccgctgcgtgctcagactcacagccaacctggaaggtagacgagatagcgccacccacgcccctccacaccccagactccgagtaaagcgggcggtagggccggagtcacctcccctatggcagtggccgccgctgtactccatcctcccgtcaggaagatcagctgtaaataaacgctgggctccccagagcacctgtccgcccactgcccttgctgttctgggatcttcgctgcagttcacgggaaacaagcctgagtccgctcgcacccgcggctgctctcccggctcggcccggccgcctctgtctccggccaccgggtggcgctgccgagccagagccgccgcgtcccggcgctttccaggagccccaggcccggaggaggcgaagcccgcagagcaaaggtggaaacacgtgcctacgctgtaaagaaatcctgttccagagcatacctgttgtacaaacagacactgttcctaacgagaggagtgacgtattttcatcaccgtttttaatttgttttcttacgggtttacgattttgaatttttcttatttggttgaaagaattttgattctatcagcctgagtgagttcagcctgtaaaaaggatgttaagctgtgggtaaaatatgcaaacgaaaagaaatatattgtacaaattctatataataaggtaaaaaaaaaaaaaaaaaa

SEQ ID NO: 1397 - protein, 2961 aa, Homo sapiens
MGNAPSHSSEDEAAAAGGEGWGPHQDWAAVSGTTPGPGVAAPALPPAAALLEPARLREAAAALLPTPPCESLVSRHRGALFRWLEERLGRGEESVTLEQFRELLEARGAGCSSEQFEEAFAQFDAEGDGTVDAENMLEALKNSSGANLQGELSHIIRQLQACSLVPGFTDIFSESKEGLDIHSSMILRFLHRNRLSSAVMPYPMLEHCNNMCTMRSSVLKESLDQLVQKEKESPGDLTRSPEMDKLKSVAKCYAYIETSSNSADIDKMTNGETSSYWQSDGSACSHWIRLKMKPDVVLRHLSIAVAATDQSYMPQQVTVAVGRNASDLQEVRDVHIPSNVTGYVTLLENANVSQLYVQINIKRCLSDGCDTRIHGLRAVGFQRVKKSGVSVSDASAIWYWSLLTSLVTASMETNPAFVQTVLHNTQKALRHMPPLSLSPGSTDFSTFLSPNVLEEVDSFLIRITSCCSTPEVELTLLAFALARGSVAKVMSSLCTITDHLDTQYDASSLILSMASVRQNLLLKYGKPLQLTLQACDVKGKEDKSGPENLLVEPWTRDGFLTETGKTRASTIFSTGTESAFQVTQIRIMVRRGGIGAQCGLVFAYNSSSDKFCAEEHFKRFEKYDKWKLQELRQFVKSRIGCSSDDLGEDDPIGWFELEEEWDEADVKLQQCRVAKYLMVKFLCTRQESAERLGVQGLTISGYLRPARAEAEQSVTCAHCRKDTEESVCGATLLLRTLQFIQQLAHDLVQQKESGLKYKSFLDFAGLDLQIFWNFYSKLKQNPREECVSAQTLLLQLLQSCFSVLQGDVLAASEEEKAPIQSPKGVEAAKELYTHLCDVVDKVDGDSVPMEILKQEVRNTLLNGAAIFFPNRQTRRNHLFTMMNVTEQEHKQSLQLTFRSLCTYFSDKDPGGLLLLPEKNDLAKMNISEVLAVMDTLVSVAARECELLMLSGAPGEVGSVLFSLFWSVQGSLLSWCYLQLKSTDSGAKDLAVDLIEKYVGQFLASMRAILESLFSQYSGKTIVERLCNSVFSMAARQLVIFLLDFCTLDIPHCVLLREFSVLTELLKKLCSGPEGGLRKLDVETWQQEQPVVLHTWTKESAHNYENNCHEVSVFVSPGATYFEVEFDDRCETEKRYDYLEFTDARGRKTRYDTKVGTDKWPKKVTFKAGPRLQFLFHSDSSHNEWGYKFTVTACGLPDVAVSWGLDLQLLVSRLMGRLASQCMALKSVRQLGSNMVVPQAKMALVLSSPLWKPVFRHQVCPELELEASWPTHPHRNSKEVKNIPDDPCRHFLLDFAQSEPAQNFCGPYSELFKGFIQACRKQAPKTDIVAGSTIDQAVNATFAALVYRTPDLYEKLQKYVNSGGKIALSEEFAQVYSLADGIRIWMLEMKQKSLMSLGNEAEEKHSSEATEVNPESLAKECIEKSLLLLKFLPTGISSKESCEKLETADETSHLQPLNKRQRTSSVVEEHFQASVSPTEAAPPATGDQSPGLGTQPKLPSSSGLPAADVSPATAEEPLSPSTPTRRPPFTRGRLRLLSFRSMEEARLVPTVKEKYPVLKDVMDFIKDQSLSHRSVVKVLSLRKAQAQSILEVLKITQHCAESLGQPHCFHPPFILFLLELLTCQKDFTNYFGHLEGCGADLHKEIRDTYYQLVLFLVKAVKGFSSLNDRSLLPALSCVQTALLHLLDMGWEPNDLAFFVDIQLPDLLMKMSQENISVHDSVISQWSEEDELADAKQNSEWMDECQDGMFEAWYEKIAQEDPEKQRKMHMFIARYCDLLNVDISCDGCDEIAPWHRYRCLQCSDMDLCKTCFLGGVKPEGHGDDHEMVNMEFTCDHCQGLIIGRRMNCNVCDDFDLCYGCYAAKKYSYGHLPTHSITAHPMVTIRISDRQRLIQPYIHNYSWLLFAALALYSAHLASAEDVDGEKLDPQTRSSATTLRSQCMQLVGDCLMKAHQGKGLKALALLGVLPDGDSSLEDQALPVTVPTGASEEQLEKKAVQGAELSEAGNGKRAVHEEIRPVDFKQRNKADKGVSLSKDPSCQTQISDSPADASPPTGLPDAEDSEVSSQKPIEEKAVTPSPEQVFAECSQKRILGLLAAMLPPLKSGPTVPLIDLEHVLPLMFQVVISNAGHLNETYHLTLGLLGQLIIRLLPAEVDAAVIKVLSAKHNLFAAGDSSIVPDGWKTTHLLFSLGAVCLDSRVGLDWACSMAEILRSLNSAPLWRDVIATFTDHCIKQLPFQLKHTNIFTLLVLVGFPQVLCVGTRCVYMDNANEPHNVIILKHFTEKNRAVIVDVKTRKRKTVKDYQLVQKGGGQECGDSRAQLSQYSQHFAFIASHLLQSSMDSHCPEAVEATWVLSLALKGLYKTLKAHGFEEIRATFLQTDLLKLLVKKCSKGTGFSKTWLLRDLEILSIMLYSSKKEINALAEHGDLELDERGDREEEVERPVSSPGDPEQKKLDPLEGLDEPTRICFLMAHDALNAPLHILRAIYELQMKKTDYFFLEVQKRFDGDELTTDERIRSLAQRWQPSKSLRLEEQSAKAVDTDMIILPCLSRPARCDQATAESNPVTQKLISSTESELQQSYAKQRRSKSAALLHKELNCKSKRAVRDYLFRVNEATAVLYARHVLASLLAEWPSHVPVSEDILELSGPAHMTYILDMFMQLEEKHEWEKILQKVLQGCREDMLGTMALAACQFMEEPGMEVQVRESKHPYNNNTNFEDKVHIPGAIYLSIKFDSQCNTEEGCDELAMSSSSDFQQDRHSFSGSQQKWKDFELPGDTLYYRFTSDMSNTEWGYRFTVTAGHLGRFQTGFEILKQMLSEERVVPHLPLAKIWEWLVGVACRQTGHQRLKAIHLLLRIVRCCGHSDLCDLALLKPLWQLFTHMEYGLFEDVTQPGILLPLHRALTELFFVTENRAQELGVLQDYLLALTTDDHLLRCAAQALQNIAAISLAINYPNKATRLWNVEC

SEQ ID NO: 1398 - DNA, 1915 bp, Homo sapiens
gcttcatcctggcgccagtctcaggccaagagctgcaggctggcatggctggggggatgtcagcggagtgccctgagcctgggccaggaggtctgcagggccagtccccagggccaggcaggcagtgtccccctcccatcacgcccacctcctggagcctgcccccgtggagggcctacgtggctgccgccgtcctctgctacatcaacctcctgaattacatgaactggttcatcattgcaggagtgctgctggatatacaggaggttttccagatcagtgacaaccatgctggtttgcttcagactgtcttcgttagctgcctgctgctgtctgcacctgtgtttggctacctgggcgaccgacatagccgcaaggctaccatgagcttcggtatcttgctgtggtcaggagctggcctctctagctccttcatctccccccggtattcttggctcttcttcctgtcccggggcatcgtgggcactggctcggccagctactccaccatcgcgcccaccgtcctgggcgacctcttcgtgagggaccagcgcacccgcgtgctggctgtcttctacatctttatccccgttggaagtggtctgggctacgtgctggggtcggctgtgacgatgctgactgggaactggcgctgggccctccgagtcatgccctgcctggaggccgtggccttgatcctgcttatcctgctggttccagacccaccccggggagctgccgagacacagggggagggggccgtgggaggcttcaggagcagctggtgtgaggacgtcagatacctggggaaaaactggagtttcgtgtggtcgaccctcggagtgaccgccatggcctttgtgactggagccctggggttctgggcccccaagtttctgctcgaggcacgcgtggttcacaggctgcagcctccctgcttccaggagccgtgcagcaaccccgacagcctgatttttggggcactgaccatcatgaccggcgtcattggggtcatcttgggggcagaagctgcgaggaggtacaagaaagtcattccaggagctgagcccctcatctgcgcctccagcctgcttgccacagccccctgcctctacctggctctcgtcctggccccgaccaccctgctggcctcctatgtgttcctgggccttggggagctgcttctgtcctgcaactgggcagtggttgccgacatcctgctgtctgtggtggtgcccagatgccgggggacggcagaggcacttcagatcacggtgggccacatcctgggaggcgctggcagcccctatctcacaggacttatctctagtgtcctgcgggccaggcgccctgactcctatctgcagcgcttccgcagcctgcagcagagcttcctgtgctgcgcctttgtcatcgccctggggggcggctgcttcctgctgactgcgctgtacctggagagagacgagacccgggcctggcagcctgtcacagggaccccagacagcaatgatgtggacagcaatgacctggagagacaaggcctgctttcgggcgctggcgcctctacagaggagccctgaggtccctgcctgcactcgtcctgcctgcaagcctcccgttggtccccacagcagcagtgcctcggttcctctttggctgtcctcggggactccggctgaggcacatctgccacttttgaattcccggctggagagctggcaggaccctgtggctgggctgggaatggagctgtcagcactctgcgtgggaggcctgggcctgtgcctgcatcccgctcaaggctgccccagcctggggtccccagcctggctgctgctgggccctgaataaagagaggccagtacaaagcccatggattttgggcctgtaaaaaaaaaaaaaaaaaaaaaaa

SEQ ID NO: 1399 - protein, 512 aa, Homo sapiens
MAGGMSAECPEPGPGGLQGQSPGPGRQCPPPITPTSWSLPPWRAYVAAAVLCYINLLNYMNWFIIAGVLLDIQEVFQISDNHAGLLQTVFVSCLLLSAPVFGYLGDRHSRKATMSFGILLWSGAGLSSSFISPRYSWLFFLSRGIVGTGSASYSTIAPTVLGDLFVRDQRTRVLAVFYIFIPVGSGLGYVLGSAVTMLTGNWRWALRVMPCLEAVALILLILLVPDPPRGAAETQGEGAVGGFRSSWCEDVRYLGKNWSFVWSTLGVTAMAFVTGALGFWAPKFLLEARVVHRLQPPCFQEPCSNPDSLIFGALTIMTGVIGVILGAEAARRYKKVIPGAEPLICASSLLATAPCLYLALVLAPTTLLASYVFLGLGELLLSCNWAVVADILLSVVVPRCRGTAEALQITVGHILGGAGSPYLTGLISSVLRARRPDSYLQRFRSLQQSFLCCAFVIALGGGCFLLTALYLERDETRAWQPVTGTPDSNDVDSNDLERQGLLSGAGASTEEP

SEQ ID NO: 1400 - DNA, 4273 bp, Homo sapiens
gactcccgggtccccgcgccggactgggactgggagcaggcagcccgggcggagcgggccggtgccgaggacggccccaggcattgctctgccccgggcattgcgcggcgcgcgtgagggggatgcggcaggaggcggcgcggcgggaggagtaggcggcggcgccctcgggagggagctgcgcgcgggccagacggcgcccggaggctccgcagtgccgccgccgtcgcccgggaggctccgcgcgggagccatgtaaccctgcggcgggctccgggctgctccgtccttccccagctcccgggctagcgcggcagcggggccacgatgaagaagcagttcaatcgcatgcgccagctggccaaccagacggtgggcagggctgaaaagacagaagttttgagtgaagaccttcttcaggtggagaagcgtctggagctggtgaaacaggtgtcccacagcacgcacaagaagctcaccgcatgtctgcagggccagcaaggggcagaggctgacaagcgctccaaaaagttgcctttgacaacactggctcagtgtctgatggaggggtcagctatcctgggagatgacacacttcttgggaagatgctgaaactctgtggagagacggaggacaagctggctcaggagctgatacattttgagttgcaagtagagagagacgtgattgagcccctgtttttgctggcggaggtggaaatcccaaatattcaaaagcagaggaaacacttagccaagttggtgctggacatggattcctcacgaaccaggtggcagcagacttccaagtcttcaggtttgtccagcagcttacagcctgcgggtgccaaggctgatgccctcagggaagaaatggaagaggctgccaacagagtggagatttgcagggaccagctctcagctgatatgtacagttttgtggccaaagaaattgactatgcaaactactttcaaacgctaatagaagtgcaagctgaataccacaggaagtccctgacactattgcaggctgtattgcctcagatcaaagcacaacaggaggcctgggtagagaagccttccttcgggaagccgctggaggagcacctcaccatcagcggccgggagatcgccttccccatcgaggcgtgtgtgaccatgctgcttgagtgtgggatgcaggaggagggactcttccgagtagccccctctgcctccaaactgaagaagctgaaagcggccctggactgctgcgtggtggatgtgcaggagtactcggcagacccccacgcaattgcaggagctttgaaatcttacctccgagagttgccagaacctcttatgacctttgaactctatgatgagtggatccaggcttccaatgtccaggagcaagacaagaagcttcaggctctatggaatgcttgtgaaaagttgcccaaggccaatcacaacaacatccgatacttgataaaatttttatccaagctgtcagaatatcaagatgtaaacaagatgactcccagtaatatggcaattgttttaggacccaacctcctatggccacaagcagaagggaacattacagagatgatgaccacagtgtcgctgcaaattgttgggatcattgaacctatcatccagcatgcagactggttcttccctggggagatagagttcaacattactggcaattatgggagtccagtacacgtgaaccataatgccaactacagctcaatgccctccccagacatggaccctgctgaccggcgccagcccgagcaggcccgccggcccctcagcgtcgccacggataatatgatgctggagttttacaaaaaggatggccttaggaaaatccaaagcatgggtgtgagggtcatggacacaaactgggtggctcgaagaggctcctcggccggtcggaaagtgtcctgcgccccgccctccatgcagcctcccgccccgcccgccgagctggctgcgcccctgccttcgccgctgccggagcagcccctggacagccccgcggcccccgcgctctctccatccggcctgggcctccagcctgggcccgagcgcaccagcacaacaaaaagcaaggaactttctccaggctctgcacagaaaggaagtccaggctccagccagggcacagcctgtgcagggactcaaccaggggctcaacctggagctcagccgggcgccagccccagccccagccagccgcctgcagaccagagtcctcacaccctccggaaagtttcaaagaagctggcaccgattccacccaaggtcccctttggccagccgggggctatggcagaccagtccgctggccagccgtccccagtcagcctgtcccccaccccgcccagcaccccgtcaccctatggactgagctaccctcaggggtactccttggcctcgggccagctctccccagctgcagctcctcccctggcctctccttctgtctttacaagcactttgagcaaatcgcggcccactcctaagccgcgacagagacctactctgccgcctcctcagcctcccacagtaaacctctcggcctctagtccacagtccacggaggcccccatgctagatggcatgtcccctggggaaagcatgtctacagatcttgtccactttgatattccctcgatccacatagagctcgggtcgacgctccgcctgagtcccctggagcacatgcggcgacactcagtaactgacaagagggactcggaggaggagtctgagagcaccgccctctgacatgacaccgcccatcctgcctcgcgtgtacatacatcacgggccctaggaacgccgccaggagcagcgtccatgagcttgccaagtgttctctgctggctctttcctgccactgccaacacgaggttggaatttggcagaaaattgtgatctccagtccgtgtggtgatgctggtggtgcaggttttgtttgttcctttcgggtggtgacttcggccttttgtttgacctttgccttttgactttgtgcctcttttgatccactttcagcctccatgccagaaaacacccacctctccatccaaggctggtcaggaacgtcctttgcagggtcggggtggtgcgggagaggctcactttgcctggttagacccaagggctgctaccttttccttggacggctcatgtcaggtcttgcaggatcagtttaatggccacagaaaggaagcaggacagcagggcccctctcacccacaactggaccaggtccaggattctagcagtcctggggcactgacctttgccagctacctgggggagggcttgccactggaaaacctttcaggccgcccccatcagtgggctccaaagtaaatggctgaaaacaaaaatgtttcacttcctaacagttttcctttttccactgtgtgactgaaagctcctatatcattttatatttctgaatctataaaacaaaacaaacaagcctgacagtgtctggaggagccaaaggtggcctccctgtccccaaatatattggctatatgagagtaattttacccctctacgtacctaaaggcacccagttcactagtctgtggggtcctggagcctgtctcttctttctggaggttcaaactgaatagcaataattacgttacccaaagcatgtggaggaaaagtgaaaccagccacggagacgctggcccacgggctcggcctgcggtgtggcctgctttgctcaccagcgtcagccgctcatttccttctcatgaagtcccatctggtcatggggacgagggccgggagggcaccgggtagccttttcacacttggggattaggggagtgagaaaagatttgggccatgcatgcaaagtcaaagtttaaaattttatccttttcaaatagatgatataatatacctatacatgatataatatttgtatatatgaaatctctctatatttgtttaatttgagccattcaatctaaaccaatgtacaggtgtacaatgaaaaatttaaatgcttagttatttttcccaacacagtgtaaagtcaccctcctctgagagtgggatgtgcagagttttgatgttgcagctttgctcacttcctggcaagggcaggtcatgcctcaatttgtaatgggagtctggggtaagggtgggggttgaaagttgttatctttaaatacatgtacaaatcgttgtcaaaagtaacgttattaaaatagatttattatccctgaaaaaaaaaaaaaaaaaa

SEQ ID NO: 1401 - protein, 818 aa, Homo sapiens
MKKQFNRMRQLANQTVGRAEKTEVLSEDLLQVEKRLELVKQVSHSTHKKLTACLQGQQGAEADKRSKKLPLTTLAQCLMEGSAILGDDTLLGKMLKLCGETEDKLAQELIHFELQVERDVIEPLFLLAEVEIPNIQKQRKHLAKLVLDMDSSRTRWQQTSKSSGLSSSLQPAGAKADALREEMEEAANRVEICRDQLSADMYSFVAKEIDYANYFQTLIEVQAEYHRKSLTLLQAVLPQIKAQQEAWVEKPSFGKPLEEHLTISGREIAFPIEACVTMLLECGMQEEGLFRVAPSASKLKKLKAALDCCVVDVQEYSADPHAIAGALKSYLRELPEPLMTFELYDEWIQASNVQEQDKKLQALWNACEKLPKANHNNIRYLIKFLSKLSEYQDVNKMTPSNMAIVLGPNLLWPQAEGNITEMMTTVSLQIVGIIEPIIQHADWFFPGEIEFNITGNYGSPVHVNHNANYSSMPSPDMDPADRRQPEQARRPLSVATDNMMLEFYKKDGLRKIQSMGVRVMDTNWVARRGSSAGRKVSCAPPSMQPPAPPAELAAPLPSPLPEQPLDSPAAPALSPSGLGLQPGPERTSTTKSKELSPGSAQKGSPGSSQGTACAGTQPGAQPGAQPGASPSPSQPPADQSPHTLRKVSKKLAPIPPKVPFGQPGAMADQSAGQPSPVSLSPTPPSTPSPYGLSYPQGYSLASGQLSPAAAPPLASPSVFTSTLSKSRPTPKPRQRPTLPPPQPPTVNLSASSPQSTEAPMLDGMSPGESMSTDLVHFDIPSIHIELGSTLRLSPLEHMRRHSVTDKRDSEEESESTAL

SEQ ID NO: 1402 - DNA, 324 bp, Homo sapiens
atgcacggcgttctccgcacaggcgcacggggaccgccgggccagccggccagccagcctgcggagactcccgggtccccgcgccggactgggactgggagcaggcagcccgggcggagcgggccggtgccgaggacggccccaggcattgctctgccccgggcattgcgcggcgcgcgtgagggggatgcggcaggaggcggcgcggcgggaggagtaggcggcggcgccctcgggagggagctgcgcgcgggccagacggcgcccggaggctccgcagtgccgccgccgtcgcccgggaggctccgcgcgggagccatgtaa

SEQ ID NO: 1403 - protein, 107 aa, Homo sapiens
MHGVLRTGARGPPGQPASQPAETPGSPRRTGTGSRQPGRSGPVPRTAPGIALPRALRGAREGDAAGGGAAGGVGGGALGRELRAGQTAPGGSAVPPPSPGRLRAGAM

SEQ ID NO: 1404 - DNA, 8665 bp, Homo sapiens
ccttcccctccccactcttctccttccctcccctcccctcccttcccctccggagcggctggggctgcggcgccgctgctgacacggatcggccgcggccgccaccgggcggaggctgcgcggcgcagacccagacgggcggccccggagggcgcgcggcgatggcggcggcgggcaggcggcgggcgcggcgggcgaggggtccgggctgagctgcgggccggcccggatggcgggcggcgcgggctggtcgggcgcccccgcggctctgctgcgctccgtgcgccgcctgcgcgaggtgttcgaggtgtgcggccgcgaccccgacggcttcctgcgcgtggagcgcgtcgcggcgctcggactgcgcttcggccagggcgaggaggtggaaaaacttgtgaaatatttggatcccaacgacctggggagaatcaacttcaaggacttttgccggggggtgttcgccatgaaagggtgcgaggagctgctgaaggatgtgctgtcggtggagagcgcggggacgctgccgtgcgcgccagagatcccagactgcgtggagcagggcagcgaggtcacaggccccacctttgctgatggcgagctcatccccagggaacccggcttttttcccgaggacgaggaggaggctatgacgctggcgccacctgagggcccccaggagttgtacacagacagccccatggagagcactcagagcctggaggggtctgtcgggagtcctgccgagaaggacgggggacttgggggcctgtttctgccagaagacaagtccctggtccacactccatccatgacgacctcagacctttctacacactccaccacctcgctcatcagcaatgaggagcagtttgaagactatggggagggtgacgatgtggactgtgcccccagcagcccttgccccgatgatgagaccaggaccaacgtctactcggacctggggtcttcggtgtcttccagtgcggggcagacgcctaggaaaatgcggcacgtgtacaacagcgaattgctagatgtttactgctctcaatgctgcaagaaaatcaacctgctcaatgacttggaagcccgactgaaaaacctgaaggccaacagccccaaccgaaagatctccagcacggcctttggacggcagctcatgcacagcagcaacttcagcagcagcaatggcagcaccgaagacctgttccgggacagcattgactcttgcgacaatgacatcacagagaaggtaagcttcctggaaaagaaggtgacagagctggagaatgacagcctgaccaatggggacctgaagagcaagctgaagcaagagaacacacagctggtgcacagggtgcatgagctggaggagatggtgaaggatcaggagaccacggccgagcaggctctggaggaggaggcgcggcgccaccgcgaggcctacggcaagctggagagggagaaggctaccgaggtggagctgctcaatgccagggtgcagcagttggaggaagaaaatacagagcttagaacaacagtgactcggctcaagtctcaaacagagaaactggatgaggagcggcagcgcatgtctgaccgtctggaggacaccagcctgcggctcaaagatgagatggacctgtacaagcgcatgatggacaagctgcgacagaaccgccttgagttccagaaggagcgggaggcgacgcaggagctcatcgaggacttgcggaaggagctggagcacctgcagatgtacaagctggactgcgagcggccaggcaggggccgcagtgcctcctctggcctaggcgagttcaatgccagggcccgcgaggtggagctcgagcacgaggtcaagcggctcaagcaggagaattataagctgcgggatcagaacgacgacttgaatgggcagattttgagcctcagcctctacgaagcaaaaaacctctttgctgcccagactaaagcccagtctctggctgcggagatagacaccgcctcgcgcgatgagctaatggaagccctgaaggagcaggaggagatcaacttccggctgaggcagtacatggacaagattatcctcgccatcctggaccacaatccctccatcctcgagatcaaacactaaggcacggggctggctgcagagcagccttaggaccctgggaccaagggcagaccctgcccaaggatgcaggcctaagccgggcctcacactcacactgtaaatgtctctctggccaccatgcgttacgtgtacccgtgtatatgtggggaggctgtgcacacgagcgaggggtgagtggccgtggctgtgggcagcatccacacggttagccgtgcatgcactttgtggcccctttgcaaggggcagagggtactggaagtgggaggaggcaaggtctgctatcaggagttactgtaaaaacaagaactggaagctcgtgtttccggtactgggtaaaatgattctacctctggggataaggattcacattcgctctagtacgatgggctctttcaccccactcctagtccccttgggagtgggagcaaaattgtgatctttcctaggagtttgaatgccccatatttgtgtcctcgccagctctttggccacctttcaagccccagtgttcaagctcagagaggatgaaggggcatctggagggtccatgagatggggccctcaccaaatgccttggccaccggccagcagccctctgtgatgtgtgtgcagagtgaacagaggactcaggtttcatagcagctagtgcggggcatcctcatcctgtacctatagagttcgtgcactcccccatccatgctacctacctccccgtttctgtttcagttttaagacaatgaagcagcattcactgcgtcattgtaacatgaagggataaaaatgaaggagaaggagggtttgggatgggtgtctaaggcaggagttgacatcgggcaaccaaagaaatgagttttggggaggaacacaactcccatcccagtcagtttccttcccatggctgcatcttaagatggatgcacggagaaaccgtctgcctggctccctgtcttcattctccacgcagcctggtgatggcaggcctgggtttggatttcagaatcctagctccgggctccactcgtgtggcagcaagactgcttcgttccagcgtttagaaacacacctgtatttgattctcagccaggggagcactcgctgcactggtgggaggcggttgggaaagttgcaggaaaaccttagtcttccatccttctgacccatggtggaaattcacaccatggatttttaatggatctttgttctaggcagctgggaatagacatggtacttaccttagagttttccaatttatctcaattttatatggcttgtgattcattttcttaatccaaatatatataaacgtgtgtggtcttattcttccccctgcagtttcttgctttcttcagcacatcttatagtatgagaaggaaggtttgggcatgttgggaagggcggtggagggggagttgcagaaagagagggcagtgagggtgaggagaggggatctggggacttgggtgtgacacctgcttgacagaggcagggctgtggccaggaccaaccttcaattccattccaatcagcctttgcatttgttggatctcgtggcttctttttaatcttttgttggggattagtttcatgctgcacataatggggttgcactggtctgacccaggactttggagccacccacactgggaagactaggctaggcagtcggtcttctaggagtttctcagccccttaggacgcgggtctccttgggctcccccaagggttctgcgaagaggcagtggaagaaggcatgaggagagggtctcttgagaatttgccaataggaaggagtggccacggctgaaaggaacaagacagatcctgacatagctttggcctgggtgttaggtcagaaggagtactggtgcgtgggggccttaccccagggttgagtattttatctgtaaaatgttatctgccctttggctgcattggaatttcagagaaggctgcagaggcctgggttacacagcctgagtcacaacgtgggaaggaatctctgccacgggaaaggtgggcggaagcagctggcagcctggggcgtgcttcaggctcctccctctaaggggcgccatgggaacaggctccggagggagccggcgtctgaaaggcccccgggacctgctgcagtgccagaggggcctctggagcaggcctggcttttaaatggggggctgaattccagctcacacacacctcaagtccaaccttactttcttcagccagaatacatttcttgtaaaacctggcttgttgcttggcttttaaagatggtgtatgtttgtaaaaatattcttctgggctcaaaagctagcttgagggggcagatgccccaggtgtcccagctccacagcccctggcagatcccagaccccttggtggcaggtcccagagcctaggtggtaggagcttgatctttgtttctgcccttacccctcagtagtggggctgcgaggtagtagacaggatgcccagttaagtttgaatttcagatagaaaataattttagaataaatatgttctatctaatacatgggacagatgttatttttagagataggatcttgctctgttgcccaggctggagtgtagtggtatgatcatagctcaccacaaccttgaactcccaggctcaagcgatcctcccgccttaactgcctgagtagctgggactacaggcatgcaccaccacgcccagctaatttttcttattttttgtagagacagggtctcactgtgttgcctcactcgagctgctgacctcaagtgatcctcccacctcagcctgccaaagcactgggattacaggcatgagccaccatgcctggccaggacatatttgaaatggggagattttaaaaattctgatgattagactgaatcctcagacgttctggtttgattgttgtgggtgtagcccaggcatgggattttttaaagagctgctcaggtaattccaatttaattgcgtgtcctacttgggttttttgtttgtttttattgtttttgctaaacctggcaaccctaccgagtagggattagcagtaacttatctgaaatttagaggtgttttgggggtggggcgagggtttctgtagtagactcagattttacatggccctgagctgcccttgcgttcagttggaagccacgcaaaatgaactgaaccaggagtgagcttcgtgtacattatctattagaaaatgaagtaccttctggttcagctagtccctgtgcgttgagaggctttaagaaacttctagtaaaaatgtttttttcttttagctttgaattggccagagtttatcctagattattttattttaaattggtagaattctttgcgaactgtcacagagaaattccttttcatgactttatttctgacctattaaaacatgaacaggccaggcatggtggctcacgcctgtaatcctagcacttgggaggcagtggcaggcggatcacttgagctcaggagtcctaaaccagcctgggcaacatagtgataccttgtctctaccaaaagttaaaaaaaaaaaaaaaaaagctcaagaacctgcacgagggcctaaaacagtgggctcagctttggctgtgcattggaatcacctggggagatttgtaagcttctgctgtctgggctgaacccccagaggttcggattgaattggtgtggggtgtggtccaggcatcgagatgtgtaaagacctccccaggtgatgatatgcagtccgaggttgagactgccctgtcctgcaaggtcgttggccagaggtagaggaaactggtcaaagtggctgttgggcttgtcaagcccgtggctgaatgacagtgagctctcttgctgggagggttccttttcctgttgttgaatggtcctggcctgcaggatgggaggccagatgccttcaggagctggtggatccagctgttctcaccagcctggaggttagcagaccagagtgggtgggcaggaccttggcctggtgcccctggaatcagtgggtggcatgtgttgggatatactggctacaggctcatctcaaagagcaggtagaacagagtcagcagggaactgacaggtggggctgtccccctgaaagcagccgcagaaacagctgccacctatttgcatagctgagcaggaggacatactgtctttgtgggttttgcttctggtctgtttcctgactgggttgataaagggagtcccagctcgttccctgttagccaaaccagcatcctactcacacaccggacactccaggtgctagtccactggtgctggtgttcaggggagttggggggggggggcgcggggacagaagcgcgggttcttggttccaatgagggacttagcagaagcctccaggggccagcagggccaggtgaaactgggagaaatgaagccctctgtgtcctgtgtgtgtggtggggtttaatgcattagcaaatttaaacttaaaaactaactctaggccgggcacggtggctcacacctgtaatcccagcactttgggaggccaaggcaggtggattgcctgagctcaggagttcgagaccagcctggacaacatggtgaaactcttgtctttatttttttaaaaaaacaaaaagtaactttcgatgtgatcataccaggaaagttttgcgtggtcaccatgccaagaaaatgactttggttgcccagcagatccacagcgactctttctcaagggctactgtggattctagattgaggaaaggggccacttaggactcagtgctggtatcctccacagtcctttctcccagactctggccctccctttgggacccaggaaatcccctctagggtgacgctgctggctaggaagactgaggtctgctgcgccaaggggcctcaagttagaagggccatgccgttcagtggatgactttgagcgctgatcctagggacctgccaggtcctcacttcctgccctgggtgcacacatgaatggggcagccagcaggaagcgggagaggctggaaccaggagcctgccctacctgcatggcaggacaactctgaggcccttctgccatattctctgctacccaccagagaaaataggctgccttctagaaagatttgtttctaaaagcgtagaccctggggaagtataatgtcaccatgctcaccaggcgaggtttcccatatgacctccctgccccgacctcgtaggttgctcctttccccatctgtaaggtagagatgtctgccccggagctaccagctggggatggcatccaggccatgtctcctgcaggatccaagtgctgttgtccccagggtgaccctgcctcctgctggggcccatccgctttgctgtgctgcacaggctgttttcatctgcatggtttggggtctttgtccttgtgccttttcttccccatcgccactgtacaggattttccacattgcccactgcctccttttctacatcgtctcatctccctggcctttcccgagccctgtaaatgtgtactttttcaacgtgcctcccccaggtgaggccagctctcccgggcacattcgtccacaaggatcaggccccacttacccttggctcgctcagcctgtagacttggtaactttgtacagaatctttcattattgtcttaagcatggggggctaggacccacttagtccctcctccagcctgcagctaatttaggagccttgcattccagaaaagggcaactttgtgtaaagcagcttctcccacagagctttccctgcattgttagtgatgtcgggcaaagcatcactctttaacctggggcattggccccagcagggatatcatgggaccgcagccgctccgtgcactgtctctgcccccagaggaagccctgtccatggttcctggtgcacggccacaggcctgccttgaggccaccacatctggtgtctagaacagctgcgggccccacttgggcagaaggaagaggtgctagctgctgcccctgcctgctgtgaacacctgcccagcccttccttgtctgctgaggtgctcagaccagagtgccattaaataccaactgatgtcacggagcggacggtgcattgccaaggactcacagctgtgggctcccttccagctcctcccactttcttggctgggtcttctgaggcctacgtggaatgaactacacatgtggcctcatgcccaagggtttgttagatggcctctgactctgtgggattcaacttgacttttttgccccaggaggctctgtctggaaacaggcttagctttagtgctggggtgggacctgccctgtgggccccagggaggggacagtgggggtgaggccctgaggctgtccagggtctgagctctttgcctccaacctgcttctgccccaaaaggaacaggctgttggtggcaggctcctcccggggagctgtactgtacagaccaaggtgtaaataaacagtttgctcttctcgcaaaaaaaaaaaaaaaaaaaaaaaaaaaaaaaaaaaaaaaa

SEQ ID NO: 1405 - protein, 637 aa, Homo sapiens
MAGGAGWSGAPAALLRSVRRLREVFEVCGRDPDGFLRVERVAALGLRFGQGEEVEKLVKYLDPNDLGRINFKDFCRGVFAMKGCEELLKDVLSVESAGTLPCAPEIPDCVEQGSEVTGPTFADGELIPREPGFFPEDEEEAMTLAPPEGPQELYTDSPMESTQSLEGSVGSPAEKDGGLGGLFLPEDKSLVHTPSMTTSDLSTHSTTSLISNEEQFEDYGEGDDVDCAPSSPCPDDETRTNVYSDLGSSVSSSAGQTPRKMRHVYNSELLDVYCSQCCKKINLLNDLEARLKNLKANSPNRKISSTAFGRQLMHSSNFSSSNGSTEDLFRDSIDSCDNDITEKVSFLEKKVTELENDSLTNGDLKSKLKQENTQLVHRVHELEEMVKDQETTAEQALEEEARRHREAYGKLEREKATEVELLNARVQQLEEENTELRTTVTRLKSQTEKLDEERQRMSDRLEDTSLRLKDEMDLYKRMMDKLRQNRLEFQKEREATQELIEDLRKELEHLQMYKLDCERPGRGRSASSGLGEFNARAREVELEHEVKRLKQENYKLRDQNDDLNGQILSLSLYEAKNLFAAQTKAQSLAAEIDTASRDELMEALKEQEEINFRLRQYMDKIILAILDHNPSILEIKH

SEQ ID NO: 1406 - DNA, 3229 bp, Homo sapiens
atggctccggctcagggcgcggcgccagcgcctgtcatgtcccagctgcgcctctgggtcccacggcacctcctcaggttggcaactacttctcccacccgaatctccctttgcgcttacccccgacccccgcccccaccggcagaccccggggactttgattacctggggtcctctgcttcctcccagatgtcagctccgcctcaggaatcgactgagactttgaccgagactttggttccattcctggacacagattcagctggagagctggccccggggccagagcagttagcggctgcacaccaggacctgaatgacaagctgacttggcaagaaaggctcccagagggggtctcagtgctggactgggatcagaaacagacctttgctcggcctcctcgcctcaaaagaggccccagctcagcctccagaggagtggaaccttctgcgagccaggaggaggccccgactgagcctccaggtcctcctgtggaacctgaacgttcccccggtgagcaggagcagccagctcagccttctatttcttctgggaaggctgaatcttctccagcccagcagaaggccccagctcagcctccagaacatcatgaagtgacagtttcacctccaggtcactgtcaagctcagcattcagatttgcccaatgtcactattaggcctccagacatgcagctcactatagcaacagagcctactgcagaggtgggaagttctccaatccaccaggaggctacagctcaggtctcagggccaggaagtgatgtagaaccttctgccacccagcatggtggtgcacctctgcgtccagagtcatcagaagatgctggacctttagcaggtcaacaggagacttcagttcaatctccagaacctgttaataatgagaacccctctccaacccagcaggaagctgcagctgagcatccacagacccctgaggaggctgagtcttctccagcccagcaagaggcccaacctcagactccagatccccctaaggaggtagaaccttctccagtccagcaagagttcccagctgagccaccagagccccctaaggaggttgaaccatctgcaacccagcagcaagcctcaggtcagcctccaaagtccactgaagaggtcagtcctccaccacagcaggagataccagctcagccatcagagccacctgagaaggtcaaaccatctccagtcctacagcagaccccaactcagcttttagagccacctaaagaggtagaatcctctccagttcagcaggcaggccctgctcagtcctcagaggcccctgtggtcatagaaccctctcggacccagcagatggccccatcttcacctccagagctccctcaggaagtggaaccatctcttaactcagcagggggttccagctcagactccagagccccctatggaggcagaaccttctccaatccagcaggaggccacagttcagactccagagccccctatggaggtagaaccttcaagccagcagctggtcccagctcagcatccagagtcacctaaggaggttgcagctcaacctccagtgcatgagatgacaattccaatagcaggccaggaccaagcccagattccagtatcacccagtgtcacatttcaacctttagacctgggacttaccgtcactccaaaatccactatggaggctgagtattctacaaccccaaggaagactacagctcctccaaaacaccctgaggtgatgcttccacctcctgaccaggttcaggctcagcacacaaacctaacaggtcaggatcaagctcagcattcaacactgtccagtgtcacagttcagcctttgggcctggggcttaccatcactccagaatccatgacagaggttgaactttctccaaccattcaggagaccccaacttagcctcctaaggaagttgtaccccaacctccagcatatcaaggggtaacagttccaacaccaggtcaggatcaagctcagcatccaatgtcacccagcgttacagctcaacctttggacctgggacttaccatcactccagaacccactacagaggttgaacattctacacccctgaagaagattcctcccaagcaccctaaagtgacacttccacatccagaccaggttcagactctccattcgaacctgactcaacatccaacatcacccagagtcacagttcaacctttggatctggggcttaccatcactccagaatccattacaaaggttgaaccgtctacagccctgatgactacagctcctcctccagagcaccttgaggtgacacttccaccgccagacaagggtcaggctcagcattcaaacctgactcaagtcacagttcaacctctggacctggagcttaccataactatagaacctactatagatgttaaaccgtctccaaccacggaggagacctcaactcagtctccagacctggggcttgccatcactccagaacccactacagagattggatattctacagccctggagaagactatagctccacgtccagaccaggttcagactcagcatcgaaacctgactgaagtcacaggtccacctactgaactagaacctactcaggattcactggtgcagtctgaaaattacgcccaaaataaggctttaactgcaccagaggaacagaaggcctccacaagcaccaacatatgtgatctctgtacctgcggagatgagacgctgtcgtgtatcgatctcagcccaaagcagaggctccgctgagtgcctgtgccagagcccaacacctacaatggcaccttcaccatcttaaatttccaaggaaactatatttcttacattggtgaagatgtatggaaagcatacagttggactgagaaactaattttgaggtcggcctgcggatccaccagggggctccgttccttctgggccaaagctgaagaagcggctgctgcaccagagaagtgcatctggatgaaggtggaagcacacgcgggcccgcagaaccgcctaagatatcttcagatgtgtcagaccaccaaatcccatgtctactgctgccctccagaagaaagggtttatacagagccaaacaccaaggcagaaaccaatttccagcatgtggtcctgggctatggaaacctctccttctgcctgggactctcactctccagagacgagttcattcaggtcatctga

SEQ ID NO: 1407 - DNA, 6140 bp, Homo sapiens
gcggccgcagcctgagccagggccccctccctcgtcaggaccggggcagcaagcaggccgggggcaggtccgggcacccaccatgcgaggcgagctctggctcctggtgctggtgctcagggaggctgcccgggcgctgagcccccagcccggagcaggtcacgatgagggcccaggctctggatgggctgccaaagggaccgtgcggggctggaaccggagagcccgagagagccctgggcatgtgtcagagccggacaggacccagctgagccaggacctgggtgggggcaccctggccatggacacgctgccagataacaggaccagggtggtggaggacaaccacagctattatgtgtcccgtctctatggccccagcgagccccacagccgggaactgtgggtagatgtggccgaggccaaccggagccaagtgaagatccacacaatactctccaacacccaccggcaggcttcgagagtggtcttgtcctttgatttccctttctacgggcatcctctgcggcagatcaccatagcaactggaggcttcatcttcatgggggacgtgatccatcggatgctcacagctactcagtatgtggcgcccctgatggccaacttcaaccctggctactccgacaactccacagttgtttactttgacaatgggacagtctttgtggttcagtgggaccacgtttatctccaaggctgggaagacaagggcagtttcaccttccaggcagctctgcaccatgacggccgcattgtctttgcctataaagagatccctatgtctgtcccggaaatcagctcctcccagcatcctgtcaaaaccggcctatcggatgccttcatgattctcaatccatccccggatgtgccagaatctcggcgaaggagcatctttgaataccaccgcatagagctggaccccagcaaggtcaccagcatgtcggccgtggagttcaccccattgccgacctgcctgcagcataggagctgtgacgcctgcatgtcctcagacctgaccttcaactgcagctggtgccatgtcctccagagatgctccagtggctttgaccgctatcgccaggagtggatggactatggctgtgcacaggaggcagagggcaggatgtgcgaggacttccaggatgaggaccacgactcagcctcccctgacacttccttcagcccctatgatggagacctcaccactacctcctcctccctcttcatcgacagcctcaccacagaagatgacaccaagttgaatccctatgcaggaggagacggccttcagaacaacctgtcccccaagacaaagggcactcctgtgcacctgggcaccatcgtgggcatcgtgctggcagtcctcctcgtggcggccatcatcctggctggaatttacatcaatggccaccccacatccaatgctgcgctcttcttcatcgagcgtagacctcaccactggccagccatgaagtttcgcagccaccctgaccattccacctatgcggaggtggagccctcgggccatgagaaggagggcttcatggaggctgagcagtgctgagaacaccaagtctcccctttgaagactttgaggccacagaaaagacagttaaagcaaagaagagaagtgacttttcctggcctctcccagcatgccctgggctgagatgagatggtggtttatggctccagagctgctgttcgcttcgtcagcacaccccgaatattgaagagggggccaaaaaacaaccacatggattttttataggaacaacaacctaatctcatcctgttttgatgcaagggttctcttctgtgtcttgtaaccatgaaacagcagaagaactaacataactaactccatttttgtttaaggggcctttacctattcctgcacctaggctaggataactttagagcactgacataaaacgcaaaaacaggaatcatgccgtttgcaaaactaactctgggattaaaggggaagcatgtaaacagctaactgtttttgttaaagatttataggaatgaggaggtttggctattgtcacatgacagactgttagccaaggacaaagaagttctgcaaacctcccctggacccttgctggtgtccagatgtctgcggttgtcagccccttcctttcccccgacctaaacataaaagacaaggcaaagcccgcataattttaagacggttctttaggacattagtccaccatcttcttggtttgctggctctccgaaataaagtccctttccttgctccaactccttgtctctcaacgtattggctatgacgcagcaagcagaatgaatttggactcagttacaggctgtcaatggtctgctctgtagcagtctcagagcctccccgacccactacctggagatagccagatagccagatgccctgctcctggccacctttaaagcccctgcatatgacacaggttaactaaagtcaagattggggctgctgcattccaggttccctagactcacaagctggtccttggccaggtgcagtggctcacgcctgtaatcccagcactttgggaggctgaggcaggcggatcacctgaagtcagaagtttgagaccagcctggccaacataattaaaatgtctctactaaaaatacaaaaaattagctgggtgtggtgacgcttgcctgtatcccagctactcaggaagctgagacacgagaatcacttgaacctgggaggcagaggttgcagtgagctcagatagtgccactgcactccagcctgggtgacagagcgagactccgtctcaaaaaaaaaaaaagaaagcagaacctcatggctatagagttggcattttagccccagcttctgtagctctgaaagcctaaagaaggtattctctccatctgttaaacacagtatagtggctctcagcccttggggcatgttatcatgggagggaagtcaaataagaggagagaaaagaactcaagggggaaactgcatttttaggctttgctctcttaccttgccctttctactcagaaccaataacttctgcatcaaaacatgttacagcctgcatcaagggctttaccccaacctgcagcccagccttccctgggtgagcttgctatgcgcagccacatttaccatgtggggctccctattctgatggcctgttcggtgccgggtttactcactgccctgttctgatgtcagtgcctgtacatacctccaaaggcaggacttgcctgataaatatttttcctcctctgaactggattttataggcattaaagacaagtcgggtggctagagggctccttgagacatacctagcagggaactgcaggtggattctgttgagaggcaaagcacctgagtggttgggacacaggcagctggcatgggagggactttttttgagacagggtctcactgtgtcgcccagggcaaggatgcccaaagacaccaggttggagaggcacctgccaactacttgctttccctggagcctgcatgtgcctgtggggtggggaggcgtaggggtctacggctgcctgagatgggtgtgcacagtgtgtgaagtacctacctccttgccttgctggactgtcagccagtcgcagggccggccacaagacccatgtctccatctggtcatactccatagctaccaagttaacctgctctaaactttggagaactggatctgtccaataaacgcttatttggccaagcctgatggctcgtgcctgtactcccagcactttgggaggctgaggtgggagggttgcttgagcccaggggtttgagaccagcttgggcaacaacaacaaaaatgccaggtgtggtggggtgcacctgtagtcccagctactagggaggctgagccaggaggatcacttgagcccgggaggttgaggctgcagtggggggtcataatcatgccactgtactccagcctgggtgacagagtgagaccctgtctccgaaaaaaaaaaaaaaaaaagaacggaaaaagaaatgcttacattgtcagggatcctgtagacaatcattaactctatgagatgcttggttctatttttttgggagactttgtccaagtgttttggcttaagaaatccataggcctctcttggtgacacatctctagtactttttgtcataaacaaacaggccatctgccgccaaatacatccactccccatgccactgacatcctatgggtcagccaggcttgctttgactgaggccgaggcatctggaactttctctgcctgcaggggctagcagcagaggcttcaccgcatcaccaccccttcctccactcctgacattctttcccttcagggatccaaaatggttggccgagctcccagtgggaaaacgtgtgctagagttggggagtgagatgagtggtgctgtccatggaatcaggccacagcaggaactgccccactggccatttgagacacacacaggtggtaaatgctctgctggtgggctgtgcttccctcattcagagagctctgttacagcccactgtgtcctttagaagcttgaaaggaacccaactctttgctgcactgtcctttttcttcctcaaattcagaccctccttccaccggcacccccctactccaccctcagctcttccttgcctggtttatcaagcagagctgaggccccacgtttccaactctgattgtcacttgcatcttcacaaaggataaaccacggagcaactggaaaaccatcagccaagcgttcggatgagtctggttattggtccacccccgaccagattcccttacacttaactcacttctttctttggcaatgaccctcatgacatgtataaatgggtatgactaagaagaggctgtgatctaacatttatttgctgccattttttactctggggagaagcagccccaactcatcactgggaaagaactccccctgcaaaccagctaaatttgataatttaaaccccctgcccctaaaacttctcacagagctggggagttggtggcaactttccaagtcaaggtcttgcttagaaagtccttcactacatggccaggtgcagtggctcacgcctgtagtcccaggtacttgggagcctgaggcaggaggattgcttgagctcaggagttcaaggctgcagagagctatgatcatcccactgcatttgtttaaaaataaatttttaaaatttgtgtgttttatcaggggtctcctgtacagtgtatctgtgtatgtttgtgtgtgtgtttgtatacagccttgtttaatgttttgagcaataagatatgcacacacaggtattttgttgctaaagagattggacaaggttgtagctgtgctcaggcttcagcttggtttgttaaattgagagataaacaatgacaagagctgccagccaaccacactattcaaaaagcaaagtgttcaccactaaagctaaccattcatctggttgcaggcaaggctaaggctctctctcctctagttcctggaacagactcacagattggcatgaagcactgatcaggggctgcactcagactccctggccaagcaaacctacaccagaagagtcagtgtcacagatatgatgcggccaatctctgtctccaaaaacctacctgaacttaatggtagaattcaaagatctggggactgagggcacccagccttctaaaacacaatgtattcatgtgtttagtgtaaactctctgcatggattctcagtgttaataataaaaggaagcattcttttacaactcctgctgtgtgcaaaagaaagtgcaaaggatttggagtggcattccgaagatcaccacacataccttggttctgatggctgctgaactccgacttcttcgctgagacatgactgtgggaacagcctccagctatctgctcatcagaggtgctttcctcaacctcctgcaccacctccaagagaaacagcctaaaaagaaaccccagctgtttacttatattggtctgtaaatccctggaagtaaaccccatgcatttttatctactgtctgaggacatacaataaatctgagaaagtctatgctgtcaaaaaaaaaaaaaaaaaaaa

SEQ ID NO: 1408 - protein, 500 aa, Homo sapiens
MRGELWLLVLVLREAARALSPQPGAGHDEGPGSGWAAKGTVRGWNRRARESPGHVSEPDRTQLSQDLGGGTLAMDTLPDNRTRVVEDNHSYYVSRLYGPSEPHSRELWVDVAEANRSQVKIHTILSNTHRQASRVVLSFDFPFYGHPLRQITIATGGFIFMGDVIHRMLTATQYVAPLMANFNPGYSDNSTVVYFDNGTVFVVQWDHVYLQGWEDKGSFTFQAALHHDGRIVFAYKEIPMSVPEISSSQHPVKTGLSDAFMILNPSPDVPESRRRSIFEYHRIELDPSKVTSMSAVEFTPLPTCLQHRSCDACMSSDLTFNCSWCHVLQRCSSGFDRYRQEWMDYGCAQEAEGRMCEDFQDEDHDSASPDTSFSPYDGDLTTTSSSLFIDSLTTEDDTKLNPYAGGDGLQNNLSPKTKGTPVHLGTIVGIVLAVLLVAAIILAGIYINGHPTSNAALFFIERRPHHWPAMKFRSHPDHSTYAEVEPSGHEKEGFMEAEQC

SEQ ID NO: 1409 - DNA, 180 bp, Homo sapiens
atgaggcagctcaaagggaagcccaggaaggagacatggaaggacaagaaggagcagaagcaagccatgcaggaggcccggcagcagatcaccacggtggtgctgcccacgctggccgcggtcgtgctgctgattgtggtgtttgtgtatgcagccacacgccccaccatcaccaagtga

SEQ ID NO: 1410 - protein, 59 aa, Homo sapiens
MRQLKGKPRKETWKDKKEQKQAMQEARQQITTVVLPTLAAVVLLIVVFVYAATRPTITK

SEQ ID NO: 1411 - DNA, 4087 bp, Homo sapiens
gtgttatggagaaataggaggtaagcatgcactgtaagttagatataggatttgaaatgaaggagaaatatttatgtggaaaagacatttccacataaaaatatttatgtagaaaagaaaatattcttgagttctagtctcttctttatttgaaatgatggtgtagattcagtccacatattttatagataaagatggtaaggtaggataagtctggaaagagtaatcaatatattgtatttcagcacgaattcatttatttttaggattcaaacagaaagaaatgactatggcagtgaaacagacttatatggacttgtgtctaacattttggaagaacaagataagtcacagccatattttgctgaagggacctgctcctccaatttaaagtcagtttggccaatgaacacaagcagatttgcagatcaccatgacctcttaacagaaaccaaaaggccaatagatacagtcatctctcagcaagctttttatagtgatgaatctgtgtcagcaatggaaaagcaatacctgcgtaacagtaatctcacaccacaacaaaaaatagatgaacttcatcatggatttactggtttagatcttgaagaacaatggatgtacccctcacgaagtgatcattctaactgtcacaatattcagacaaatgatacagctaagacaacattccaagaatatccacttatcaaaaactgttttacaccccaaactggtctgtctgatatcatgaaagaatcaggagttgatatctaccattatggaagagacagaatatgtactaaaggtcttgaagcaccactacagcaaaaaagggcagagatgtttctttctcaatttaatagatacactgaaaatgtagattattgtagatacccagagtatgttcatcctaataaggctaagcttaataaatgttcaaattttagtgtccaagatagcaaaaaattagccaatggcacacctgaaacaccaactgtagaagcagacacctacacaaagttatttcaggttaagccagcgaatcagaaaaaaatggaggagacaatccctgatcagcagaatttcacatttccaaaaactacgccacatctgacagagaaacagtttgcaaaggaagcagtattcactgctgattttggcttaacatcagaatatggactaaaacctcacacagcttgtcccgctaatgattttgctaacgtcacagaaaagcaacagtttgctaaacctgatcccccacattctgagtattttaaatcagtgaatttattatcaaactcagcaacatcttcaggaggtatcaatttaaacagaccaacttggatgaatgttcaaacaaaaaataacactcctattccttatcgaaatcaaggtaacttgatgaaattaaatagtcatttaagtgcagcttcaaaaggttctaaccattcttcagatttcccccaactatcatccacaaacttaaccccaaatagcaatttatttcagaaatattgccaagaaaacccttcagcattttctagttttgattttagttacagtggtgcagaaagaatccaatctgtcaatcacatagaaggactaacaaagcctggagaagaaaatctcttcaaattggttacggataaaaaaataaagcagccaaatggattttgtgataactattcagctcagaagtatgggataattgaaaatgtaaacaaacataattttcaagccaagccccagagtggacattatgatcctgaggaaggtccaaagcatttagatggcttatcacaaaatacataccaagatctactggagtcacagggtcattctaatagccacagaacgagaggtggagacaatagccgtgtgaatcgcacacaagtgtcatgcttttctaataattatatgatgggagatttaaggcataatcagtgttttcaacaacttggttcaaatgggtttcccctaagatccacccacccatttggccattcagttgttccactgttggattcctatgacttactttcttatgatgacttaagccatttgtacccttattttaatatgatgtatggtgataattctttttctggtctcatgccaacttttggatttcaaagaccaattaaaacccgtagtggaccagccagtgaacttcatattcgtctagaagagtgctgtgaacaatggagagcattagaaaaagagagaaaaaagactgaattagcccttgccaagaattatcctggaaaaaaagtatccagtactaacaacactccagttccaaggctgacttccaacccatctagagttgatcgcttaattgtggatgaacttcgagaactagccagagtaagctgtaaaaatagataacagtggatggattttttgttaaatttttttttaagtttcaggccaggcgtggtggctcactcctgtaatcccaccactttgggaggccgaggcgggcagatcacctgaagtcaggagttcgagaccagcctggccattatggtgaaaccccgtctctactaaaaatacaaaaattagctgggggtggtggcatgcgcctgtagtcccagctacttgggaggctgaggcaggagaatcatttaaacccaggaggcagaggttgcagtgagtgaagatcacgccactgcactccagcctgagtgacagagcgagactctatctcaataaataaataaataaaactctcatcaagttttagagctttgaagggtttttaaatcacatttacatctaactctctgaaatatatttttttcatgtttggtcctagaactataatatttaggaaaggggctgggtgcagtggctcacacctgtaataccagcactttgggaagtggaggtgggagaatcacttgagcccaggagtttgagaccatcctgggcaacatagggagatcctgtctctactaaaaattaaaaattagctggacatggtgtcacatgcttatgctactcaggaggctgaggtgggaagatagcttgagcctgggatgtcagggctacagtgagccataaccacaccattgcattccaacctggggaacagagcaagatcttgtctcaaaaaaaaaaaaaaaaagaaaaaaaaagaaaaaggaaagggaaaatagtcccactcaatcattttaaaagtaattttcgtaatttaaatggttcctcttgaagctcaaattggcagtggagctaatcctcaactgaaagaattttttaaaaagcaaaaatcattttgagtattatttatggagaaagtctcatttctttgtcacatttgttttccagcttgatgagcaagctgtgcttacataagatggtaacttaatagggaattactatctttccttttttttttttttttttttgaggcgggtctcactttgtcacccaggctagagtgcagtggcatgatctatgctcactgtagccttgaccttctgggttcaagagatcctcctgcctaagcccccaaatagctgggactacagatgcacgctaccacacatatctaatttttgtattttttatagagacagggtttcgccatgttgcacaggttggtctcaaactcctgagctcaagcaatccacctgcctcagcctaccaaagtgctgggtgtgagccaccaccagtcaacaaaatacttttgttttggcgaagtaggatatgacttcaagtcaaatgttgtaaagaatcctcgttaagtcattttgtaatttaatgattattcctattctttataatttcagaattttctaagcaacttagggtaggtaaacttttccttttttgaccttcctctcttaaaaacttagttttccaaataaaatttgataaagattcttcctgggaaaaaaaaatgcagcaaaacggattacctcttttattgaataaaaccattttaggaattagaaaaatcaacatgggtcaaatttgtaaatctgtacaatgggatttatccatggtacattcagagcctaacatatgaggtacagccagatgttaataaaaacttcaatcttttattataaaaaaaaaaaaaaaa

SEQ ID NO: 1412 - protein, 622 aa, Homo sapiens
MEKQYLRNSNLTPQQKIDELHHGFTGLDLEEQWMYPSRSDHSNCHNIQTNDTAKTTFQEYPLIKNCFTPQTGLSDIMKESGVDIYHYGRDRICTKGLEAPLQQKRAEMFLSQFNRYTENVDYCRYPEYVHPNKAKLNKCSNFSVQDSKKLANGTPETPTVEADTYTKLFQVKPANQKKMEETIPDQQNFTFPKTTPHLTEKQFAKEAVFTADFGLTSEYGLKPHTACPANDFANVTEKQQFAKPDPPHSEYFKSVNLLSNSATSSGGINLNRPTWMNVQTKNNTPIPYRNQGNLMKLNSHLSAASKGSNHSSDFPQLSSTNLTPNSNLFQKYCQENPSAFSSFDFSYSGAERIQSVNHIEGLTKPGEENLFKLVTDKKIKQPNGFCDNYSAQKYGIIENVNKHNFQAKPQSGHYDPEEGPKHLDGLSQNTYQDLLESQGHSNSHRTRGGDNSRVNRTQVSCFSNNYMMGDLRHNQCFQQLGSNGFPLRSTHPFGHSVVPLLDSYDLLSYDDLSHLYPYFNMMYGDNSFSGLMPTFGFQRPIKTRSGPASELHIRLEECCEQWRALEKERKKTELALAKNYPGKKVSSTNNTPVPRLTSNPSRVDRLIVDELRELARVSCKNR

SEQ ID NO: 1413 - DNA, 1405 bp, Homo sapiens
ctaaagccgcaggcgccgcggtaccctggctgtggccctcggcgctttcttcctagggtcacaggacccatacgagtgggagctccctgggagcagaactgcgtcttgtatcacctggcgcggtgaacgtgggggttgaaacgctccacgcggaaggtagagggcaggggccaagggggcgatcctggtggctgcgctttttgctatttgctgccgacggcatgcagacgagatgcaaataagcttatgaaactgtccgtcctaccccctcgctccctcctcgccccctacaccgtgttgtgctgcccaccagactcggagaagccgcggctgtccccggaaccctccgagcggcgccctcaggcccccgccaaaaagctccgcaagccgaggaccatctactccagcctgcagctgcagcacctaaaccagcgtttccagcacacgcagtacctggcgctgcccgagagggcccagctggcagcgcagctcggcctcacccagacccaggtaaagatctggtttcagaacaaacgctccaagtataagaagctcctgaagcagaattctggggggcaggaaggggacttccctgggaggaccttctctgtgtctccctgctccccacccctcccctccctctgggatctacccaaggcagggaccctgcccaccagtggctatggcaacagctttggagcctggtatcagcatcactcctcagatgtcctggcttcgcctcagatgatgtgaatctggggaagggcgggtcaggcccacagccttcctgcaaagcccaggacccaggcagtccacctgcaccccttctgggctgggaggaaaccagctccagatgggttttctctggaggacaagcagttagaggagaaaaaggaatggagcagagcctgtacccctaaccctaacagctaaatcaaggacctcagccttatataatcattgtccccaccactaccatggactggacaccttcactccagctggacaaagactctggagagagagccattggctggagttgagactgtccccagaacccttggtcttgccactcccccactccttcttccctctctccctttctcctctccctgctttcttgaaaaggactgaatcgccactacagcctgggtgcaaaatcagcaagaaacattgagtatttttttttctttgtatgcctttggccttgcacaacccatttgtgagcaaaagcagaagtggaccaccatcagctcccacccacccagcgatttttccttggaggtcagcccgttacccccataactgatttacctacttaccatactgggaggtagaagagatgcagagaaatgtggaatttgtggacctatgggtaatttatgctttcctcctaaaaaaaaaa

SEQ ID NO: 1414 - protein, 168 aa, Homo sapiens
MKLSVLPPRSLLAPYTVLCCPPDSEKPRLSPEPSERRPQAPAKKLRKPRTIYSSLQLQHLNQRFQHTQYLALPERAQLAAQLGLTQTQVKIWFQNKRSKYKKLLKQNSGGQEGDFPGRTFSVSPCSPPLPSLWDLPKAGTLPTSGYGNSFGAWYQHHSSDVLASPQMM

SEQ ID NO: 1415 - DNA, 1659 bp, Homo sapiens
ccgcccgggcaggtgggaaccgaacccgatggagaggagggggcccccatggatttagggggggaggggaaagtcatgggggggcacccccccggaacccctttcccaggcgcgcgttctccgctgaaagaggctcagagagacactttctccgggatcttaagtgtgggggctgctggctggggggcccgtccggcccaacgccggaggcttggaaaagagagttggcagcgggagcggactacgtgccgggccatggcccttctgcccgggccctggccacaatgacctctttgccctgccccctccccggccgggacgcctccaaagctgtcttcccagacctcgcccctgtcccgtcggtagcggctgcctacccgcttggcttgtcccctacaaccgcagcctcccccaatttgtcctactccaggccgtatggccacctcctgtcttacccctacaccgagccagcgaaccccggagactcctacctgtcctgccagcaacccgcggcgctctctcagcccctctgcggacctgcagagcaccctcaggaactcgaggcagactcggagaagccgcggctgtccccggaaccctccgagcggcgccctcaggcccccgccaaaaagctccgcaagccgaggaccatctactccagcctgcagctgcagcacctaaaccagcgtttccagcacacgcagtacctggcgctgcccgagagggcccagctggcagcgcagctcggcctcacccagacccaggtaaagatctggtttcagaacaaacgctccaagtataagaagctcctgaagcagaattctggggggcaggaaggggacttccctgggaggaccttctctgtgtctccctgctccccacccctcccctccctctgggatctacccaaggcagggaccctgcccaccagtggctatggcaacagctttggagcctggtatcagcatcactcctcagatgtcctggcttcgcctcagatgatgtgaatctggggaagggcgggtcaggcccacagccttcctgcaaagcccaggacccaggcagtccacctgcaccccttctgggctgggaggaaaccagctccagatgggttttctctggaggacaagcagttagaggagaaaaaggaatggagcagagcctgtacccctaaccctaacagctaaatcaaggacctcagccttatataatcattgtccccaccactaccatggactggacaccttcactccagctggacaaagactctggagagagagccattggctggagttgagactgtccccagaacccttggtcttgccactcccccactccttcttccctctctccctttctcctctccctgctttcttgaaaaggactgaatcgccactacagcctgggtgcaaaatcagcaagaaacattgagtatttttttttctttgtatgcctttggccttgcacaacccatttgtgagcaaaagcagaagtggaccaccatcagctcccacccacccagcgatttttccttggaggtcagcccgttacccccataactgatttacctacttaccatactgggaggtagaagagatgcagagaaatgtggaatttgtggacctatgggtaatttatgctttcctcctaaaaaaaaaa

SEQ ID NO: 1416 - protein, 240 aa, Homo sapiens
MTSLPCPLPGRDASKAVFPDLAPVPSVAAAYPLGLSPTTAASPNLSYSRPYGHLLSYPYTEPANPGDSYLSCQQPAALSQPLCGPAEHPQELEADSEKPRLSPEPSERRPQAPAKKLRKPRTIYSSLQLQHLNQRFQHTQYLALPERAQLAAQLGLTQTQVKIWFQNKRSKYKKLLKQNSGGQEGDFPGRTFSVSPCSPPLPSLWDLPKAGTLPTSGYGNSFGAWYQHHSSDVLASPQMM

SEQ ID NO: 1417 - DNA, 2613 bp, Homo sapiens
agcatttgattgtggcttgggacgcgaggagaggcgcgcagcgaccgcctgacggcaggcaatggtgtaagcgcctctcggcctccccctccccccagacgcggccgggtcctcccttcgccttctggacacacacccctgcctcgtctcttccgcctctctcgcactccggtccgttcctgtcctctgcggaggccagccctggggaggtgcagcgcccgccaggatgagtggctccttcgatcgcaagctcagcagcatcctcaccgacatctccagctcccttagctgccatgcgggctccaaggactcgcctaccctgcccgagtcttctgtcactgacctgggctactacagcgctccccagcacgattactactcgggccagccctatggccagacggtgaacccctacacctaccaccaccaattcaatctcaatgggcttgcaggcacgggcgcttactcgcccaagtcggaatatacctacggagcctcctaccggcaatacggggcgtatcgggagcagccgctgccagcccaggacccagtgtcggtgaaggaggagccggaagcagaggtgcgcatggtgaatgggaagcccaagaaggtccgaaagccgcgtacgatctactccagctaccagctggccgccctgcagcgccgcttccagaaggcccagtacctggcgctgcccgagcgcgccgagctggccgcgcagctgggcctcacgcagacacaggtgaaaatctggttccagaaccgccgttccaagttcaagaaactctacaagaacggggaggtgccgctggagcacagtcccaataacagtgattccatggcctgcaactcaccaccatcacccgccctctgggacacctcttcccactccactccggcccctgcccgcagtcagctgcccccgccgctcccatacagtgcctcccccagctacctggacgaccccaccaactcctggtatcacgcacagaacctgagtggaccccacttacagcagcagccgcctcagccagccaccctgcaccatgcctctcccgggcccccgcccaaccctggggctgtgtactgagcacccatctggcctgcacccttgacaaaggaccccaggaccaggcagaaggcgcctccgtcctagccactcaggaatcatcgaggagcacagggaaaaggaactccctttccccctcccttgccccttcctccagggacccaagcgcttccagatgacatttgcatggaccaaggatgccccctgaacctccctccctctgcctagacactggggtacccctccagatgtggggacattccaccccagtggggacagccattcccctacctgctccaggagcctggattggctttaaatggctcatcatcttccagcttcttaaacttagtgcctgttcccagactggagaccttgggatgggggagagtgtggagggtttgcgggtcctgcctgtgctggggcacctggcaccgtggatcttaaaacttgccaggcctagttcctcctgagcctctggtggtctccccctgctcgagcggcccctcggccaataagacagtggacatcatgacgaggactccgggtggggacctgaactggtcaccgccctgcacttctagccctcatttaagatttgagggtgaaaccaaagaaaaccccctaagtgagggaatcttttaatatttgtggctttagaggaaagaactaaaggagccatctctctcccctctcctccgttccgagaggaggggtgggtctcagacgtttttcctatggacttatttcttccatgtccaggactttgcacaactttggttttaaaagctgttgaaaaataggaaaacaaagggcattgttcacagatagggccaagtctccccttgcaagggtgcctctgttctgtccctgcccccacctcaccttctctactcctccagtaagttggcagttttggtgccaaaccccaaatctccaaagagacataccaggcaagacaaacccccaaacacctcctttccggtggccttggaaacagattgctccgagctggagaatgtcgggtgaggtgtatgggagaggaggggagagttagaacttgtgcctttgggagtaaggggtaactgcctggagggctggtggcactgcccctccctgacccagacatcccaccaaagctaactttcccccacccctgatgcagtaaaacattgaaaaaaaaaaaaaaggagaggtagaagactgtagctatatatataaatatatagtaagttttttttttttaagagcaacagagagaagcagcctcctccctgctgcggtttcctatttatgtggccatgttcctcctggacggatctccctgtgtgtttcaagctgagagatgtgggctccggctggatttgggttttgtgggaggtgcaggggccaagagagacgtggtaggtctccaagagtcccacccgggggggaagaagcaaagccatctcccaccccctcctagccttctcatttctgctttcttactggactcatctttatatataatgttaataaaaaagacgaaaataaaaaaaaaaaaa

SEQ ID NO: 1418 - protein, 287 aa, Homo sapiens
MSGSFDRKLSSILTDISSSLSCHAGSKDSPTLPESSVTDLGYYSAPQHDYYSGQPYGQTVNPYTYHHQFNLNGLAGTGAYSPKSEYTYGASYRQYGAYREQPLPAQDPVSVKEEPEAEVRMVNGKPKKVRKPRTIYSSYQLAALQRRFQKAQYLALPERAELAAQLGLTQTQVKIWFQNRRSKFKKLYKNGEVPLEHSPNNSDSMACNSPPSPALWDTSSHSTPAPARSQLPPPLPYSASPSYLDDPTNSWYHAQNLSGPHLQQQPPQPATLHHASPGPPPNPGAVY

SEQ ID NO: 1419 - DNA, 4637 bp, Homo sapiens
aggtgaacaggtcctcacgcccagctccgccccctcacgcgctctcgccgggaccccgcttccgctggcagccatgggccccggccccagccgcgcgccccgcgccccacgcctgatgctctgtgcgctcgccttgatggtggcggccggcggctgcgtcgtctccgccttcaacctggatacccgattcctggtagtgaaggaggccgggaacccgggcagcctcttcggctactcggtcgccctccatcggcagacagagcggcagcagcgctacctgctcctggctggtgccccccgggagctcgctgtgcccgatggctacaccaaccggactggtgctgtgtacctgtgcccactcactgcccacaaggatgactgtgagcggatgaacatcacagtgaaaaatgaccctggccatcacattattgaggacatgtggcttggagtgactgtggccagccagggccctgcaggcagagttctggtctgtgcccaccgctacacccaggtgctgtggtcagggtcagaagaccagcggcgcatggtgggcaagtgctacgtgcgaggcaatgacctagagctggactccagtgatgactggcagacctaccacaacgagatgtgcaatagcaacacagactacctggagacgggcatgtgccagctgggcaccagcggtggcttcacccagaacactgtgtacttcggcgcccccggtgcctacaactggaaaggaaacagctacatgattcagcgcaaggagtgggacttatctgagtatagttacaaggacccagaggaccaaggaaacctctatattgggtacacgatgcaggtaggcagcttcatcctgcaccccaaaaacatcaccattgtgacaggtgccccacggcaccgacatatgggcgcggtgttcttgctgagccaggaggcaggcggagacctgcggaggaggcaggtgctggagggctcgcaggtgggcgcctattttggcagcgcaattgccctggcagacctgaacaatgatgggtggcaggacctcctggtgggcgccccctactacttcgagaggaaagaggaagtagggggtgccatctatgtcttcatgaaccaggcgggaacctccttccctgctcacccctcactccttcttcatggccccagtggctctgcctttggtttatctgtggccagcattggtgacatcaaccaggatggatttcaggatattgctgtgggagctccgtttgaaggcttgggcaaagtgtacatctatcacagtagctctaaggggctccttagacagccccagcaggtaatccatggagagaagctgggactgcctgggttggccaccttcggctattccctcagtgggcagatggatgtggatgagaacttctacccagaccttctagtgggaagcctgtcagaccacattgtgctgctgcgggcccggccagtcatcaacatcgtccacaagaccttggtgcccaggccagctgtgctggaccctgcactttgcacggccacctcttgtgtgcaagtggagctgtgctttgcttacaaccagagtgccgggaaccccaactacaggcgaaacatcaccctggcctacactctggaggctgacagggaccgccggccgccccggctccgctttgccggcagtgagtccgctgtcttccacggcttcttctccatgcccgagatgcgctgccagaagctggagctgctcctgatggacaacctccgtgacaaactccgccccatcatcatctccatgaactactctttacctttgcggatgcccgatcgcccccggctggggctgcggtccctggacgcctacccgatcctcaaccaggcacaggctctggagaaccacactgaggtccagttccagaaggagtgcgggcctgacaacaagtgtgagagcaacttgcagatgcgggcagccttcgtgtcagagcagcagcagaagctgagcaggctccagtacagcagagacgtccggaaattgctcctgagcatcaacgtgacgaacacccggacctcggagcgctccggggaggacgcccacgaggcgctgctcaccctggtggtgcctcccgccctgctgctgtcctcagtgcgcccccccggggcctgccaagctaatgagaccatcttttgcgagctggggaaccccttcaaacggaaccagaggatggagctgctcatcgcctttgaggtcatcggggtgaccctgcacacaagggaccttcaggtgcagctgcagctctccacgtcgagtcaccaggacaacctgtggcccatgatcctcactctgctggtggactatacactccagacctcgcttagcatggtaaatcaccggctacaaagcttctttggggggacagtgatgggtgagtctggcatgaaaactgtggaggatgtaggaagccccctcaagtatgaattccaggtgggcccaatgggggaggggctggtgggcctggggaccctggtcctaggtctggagtggccctacgaagtcagcaatggcaagtggctgctgtatcccacggagatcaccgtccatggcaatgggtcctggccctgccgaccacctggagaccttatcaaccctctcaacctcactctttctgaccctggggacaggccatcatccccacagcgcaggcgccgacagctggatccagggggaggccagggccccccacctgtcactctggctgctgccaaaaaagccaagtctgagactgtgctgacctgtgccacagggcgtgcccactgtgtgtggctagagtgccccatccctgatgcccccgttgtcaccaacgtgactgtgaaggcacgagtgtggaacagcaccttcatcgaggattacagagactttgaccgagtccgggtaaatggctgggctaccctattcctccgaaccagcatccccaccatcaacatggagaacaagaccacgtggttctctgtggacattgactcggagctggtggaggagctgccggccgaaatcgagctgtggctggtgctggtggccgtgggtgcagggctgctgctgctggggctgatcatcctcctgctgtggaagtgcggcttcttcaagcgagcccgcactcgcgccctgtatgaagctaagaggcagaaggcggagatgaagagccagccgtcagagacagagaggctgaccgacgactactgagggggcagccccccgcccccggcccacctggtgtgacttctttaagcggacccgctattatcagatcatgcccaagtaccacgcagtgcggatccgggaggaggagcgctacccacctccagggagcaccctgcccaccaagaagcactgggtgaccagctggcagactcgggaccaatactactgacgtcctccctgatcccaccccctcctcccccagtgtcccctttcttcctatttatcataagttatgcctctgacagtccacaggggccaccacctttggctggtagcagcaggctcaggcacatacacctcgtcaagagcatgcacatgctgtctggccctggggatcttcccacaggagggccagcgctgtggaccttacaacgccgagtgcactgcattcctgtgccctagatgcacgtggggcccactgctcgtggactgtgctggtgcatcacggatggtgcatgggctcgccgtgtctcagcctctgccagcgccagcgccaaaacaagccaaagagcctcccaccagagccgggaggaaaaggcccctgcaatgtggtgacacctcccctttcacacctggatccatcttgagagccacagtcactggattgactttgctgtcaaaactactgacagggagcagcccccgggccgctggctggtgggcccccaattgacacccatgccagagaggtggggatcctgcctaaggttgtctacgggggcacttggaggacctggcgtgctcagacccaacagcaaaggaactagaaagaaggacccagaaggcttgctttcctgcatctctgtgaagcctctctccttggccacagactgaactcgcagggagtgcagcaggaaggaacaaagacaggcaaacggcaacgtagcctgggctcactgtgctggggcatggcgggatcctccacagagaggaggggaccaattctggacagacagatgttgggaggatacagaggagatgccacttctcactcaccactaccagccagcctccagaaggccccagagagaccctgcaagaccacggagggagccgacacttgaatgtagtaataggcagggggccctgccaccccatccagccagaccccagctgaaccatgcgtcaggggcctagaggtggagttcttagctatccttggctttctgtgccagcctggctctgcccctcccccatgggctgtgtcctaaggcccatttgagaagctgaggctagttccaaaaacctctcctgacccctgcctgttggcagcccactccccagccccagccccttccatggtactgtagcaggggaattccctccccctccttgtgccttctttgtatataggcttctcaccgcgaccaataaacagctcccagtttgt

SEQ ID NO: 1420 - protein, 1051 aa, Homo sapiens
MGPGPSRAPRAPRLMLCALALMVAAGGCVVSAFNLDTRFLVVKEAGNPGSLFGYSVALHRQTERQQRYLLLAGAPRELAVPDGYTNRTGAVYLCPLTAHKDDCERMNITVKNDPGHHIIEDMWLGVTVASQGPAGRVLVCAHRYTQVLWSGSEDQRRMVGKCYVRGNDLELDSSDDWQTYHNEMCNSNTDYLETGMCQLGTSGGFTQNTVYFGAPGAYNWKGNSYMIQRKEWDLSEYSYKDPEDQGNLYIGYTMQVGSFILHPKNITIVTGAPRHRHMGAVFLLSQEAGGDLRRRQVLEGSQVGAYFGSAIALADLNNDGWQDLLVGAPYYFERKEEVGGAIYVFMNQAGTSFPAHPSLLLHGPSGSAFGLSVASIGDINQDGFQDIAVGAPFEGLGKVYIYHSSSKGLLRQPQQVIHGEKLGLPGLATFGYSLSGQMDVDENFYPDLLVGSLSDHIVLLRARPVINIVHKTLVPRPAVLDPALCTATSCVQVELCFAYNQSAGNPNYRRNITLAYTLEADRDRRPPRLRFAGSESAVFHGFFSMPEMRCQKLELLLMDNLRDKLRPIIISMNYSLPLRMPDRPRLGLRSLDAYPILNQAQALENHTEVQFQKECGPDNKCESNLQMRAAFVSEQQQKLSRLQYSRDVRKLLLSINVTNTRTSERSGEDAHEALLTLVVPPALLLSSVRPPGACQANETIFCELGNPFKRNQRMELLIAFEVIGVTLHTRDLQVQLQLSTSSHQDNLWPMILTLLVDYTLQTSLSMVNHRLQSFFGGTVMGESGMKTVEDVGSPLKYEFQVGPMGEGLVGLGTLVLGLEWPYEVSNGKWLLYPTEITVHGNGSWPCRPPGDLINPLNLTLSDPGDRPSSPQRRRRQLDPGGGQGPPPVTLAAAKKAKSETVLTCATGRAHCVWLECPIPDAPVVTNVTVKARVWNSTFIEDYRDFDRVRVNGWATLFLRTSIPTINMENKTTWFSVDIDSELVEELPAEIELWLVLVAVGAGLLLLGLIILLLWKCGFFKRARTRALYEAKRQKAEMKSQPSETERLTDDY

SEQ ID NO: 1421 - DNA, 4495 bp, Homo sapiens
aggtgaacaggtcctcacgcccagctccgccccctcacgcgctctcgccgggaccccgcttccgctggcagccatgggccccggccccagccgcgcgccccgcgccccacgcctgatgctctgtgcgctcgccttgatggtggcggccggcggctgcgtcgtctccgccttcaacctggatacccgattcctggtagtgaaggaggccgggaacccgggcagcctcttcggctactcggtcgccctccatcggcagacagagcggcagcagcgctacctgctcctggctggtgccccccgggagctcgctgtgcccgatggctacaccaaccggactggtgctgtgtacctgtgcccactcactgcccacaaggatgactgtgagcggatgaacatcacagtgaaaaatgaccctggccatcacattattgaggacatgtggcttggagtgactgtggccagccagggccctgcaggcagagttctggtctgtgcccaccgctacacccaggtgctgtggtcagggtcagaagaccagcggcgcatggtgggcaagtgctacgtgcgaggcaatgacctagagctggactccagtgatgactggcagacctaccacaacgagatgtgcaatagcaacacagactacctggagacgggcatgtgccagctgggcaccagcggtggcttcacccagaacactgtgtacttcggcgcccccggtgcctacaactggaaaggaaacagctacatgattcagcgcaaggagtgggacttatctgagtatagttacaaggacccagaggaccaaggaaacctctatattgggtacacgatgcaggtaggcagcttcatcctgcaccccaaaaacatcaccattgtgacaggtgccccacggcaccgacatatgggcgcggtgttcttgctgagccaggaggcaggcggagacctgcggaggaggcaggtgctggagggctcgcaggtgggcgcctattttggcagcgcaattgccctggcagacctgaacaatgatgggtggcaggacctcctggtgggcgccccctactacttcgagaggaaagaggaagtagggggtgccatctatgtcttcatgaaccaggcgggaacctccttccctgctcacccctcactccttcttcatggccccagtggctctgcctttggtttatctgtggccagcattggtgacatcaaccaggatggatttcaggatattgctgtgggagctccgtttgaaggcttgggcaaagtgtacatctatcacagtagctctaaggggctccttagacagccccagcaggtaatccatggagagaagctgggactgcctgggttggccaccttcggctattccctcagtgggcagatggatgtggatgagaacttctacccagaccttctagtgggaagcctgtcagaccacattgtgctgctgcgggcccggccagtcatcaacatcgtccacaagaccttggtgcccaggccagctgtgctggaccctgcactttgcacggccacctcttgtgtgcaagtggagctgtgctttgcttacaaccagagtgccgggaaccccaactacaggcgaaacatcaccctggcctacactctggaggctgacagggaccgccggccgccccggctccgctttgccggcagtgagtccgctgtcttccacggcttcttctccatgcccgagatgcgctgccagaagctggagctgctcctgatggacaacctccgtgacaaactccgccccatcatcatctccatgaactactctttacctttgcggatgcccgatcgcccccggctggggctgcggtccctggacgcctacccgatcctcaaccaggcacaggctctggagaaccacactgaggtccagttccagaaggagtgcgggcctgacaacaagtgtgagagcaacttgcagatgcgggcagccttcgtgtcagagcagcagcagaagctgagcaggctccagtacagcagagacgtccggaaattgctcctgagcatcaacgtgacgaacacccggacctcggagcgctccggggaggacgcccacgaggcgctgctcaccctggtggtgcctcccgccctgctgctgtcctcagtgcgcccccccggggcctgccaagctaatgagaccatcttttgcgagctggggaaccccttcaaacggaaccagaggatggagctgctcatcgcctttgaggtcatcggggtgaccctgcacacaagggaccttcaggtgcagctgcagctctccacgtcgagtcaccaggacaacctgtggcccatgatcctcactctgctggtggactatacactccagacctcgcttagcatggtaaatcaccggctacaaagcttctttggggggacagtgatgggtgagtctggcatgaaaactgtggaggatgtaggaagccccctcaagtatgaattccaggtgggcccaatgggggaggggctggtgggcctggggaccctggtcctaggtctggagtggccctacgaagtcagcaatggcaagtggctgctgtatcccacggagatcaccgtccatggcaatgggtcctggccctgccgaccacctggagaccttatcaaccctctcaacctcactctttctgaccctggggacaggccatcatccccacagcgcaggcgccgacagctggatccagggggaggccagggccccccacctgtcactctggctgctgccaaaaaagccaagtctgagactgtgctgacctgtgccacagggcgtgcccactgtgtgtggctagagtgccccatccctgatgcccccgttgtcaccaacgtgactgtgaaggcacgagtgtggaacagcaccttcatcgaggattacagagactttgaccgagtccgggtaaatggctgggctaccctattcctccgaaccagcatccccaccatcaacatggagaacaagaccacgtggttctctgtggacattgactcggagctggtggaggagctgccggccgaaatcgagctgtggctggtgctggtggccgtgggtgcagggctgctgctgctggggctgatcatcctcctgctgtggaagtgtgacttctttaagcggacccgctattatcagatcatgcccaagtaccacgcagtgcggatccgggaggaggagcgctacccacctccagggagcaccctgcccaccaagaagcactgggtgaccagctggcagactcgggaccaatactactgacgtcctccctgatcccaccccctcctcccccagtgtcccctttcttcctatttatcataagttatgcctctgacagtccacaggggccaccacctttggctggtagcagcaggctcaggcacatacacctcgtcaagagcatgcacatgctgtctggccctggggatcttcccacaggagggccagcgctgtggaccttacaacgccgagtgcactgcattcctgtgccctagatgcacgtggggcccactgctcgtggactgtgctggtgcatcacggatggtgcatgggctcgccgtgtctcagcctctgccagcgccagcgccaaaacaagccaaagagcctcccaccagagccgggaggaaaaggcccctgcaatgtggtgacacctcccctttcacacctggatccatcttgagagccacagtcactggattgactttgctgtcaaaactactgacagggagcagcccccgggccgctggctggtgggcccccaattgacacccatgccagagaggtggggatcctgcctaaggttgtctacgggggcacttggaggacctggcgtgctcagacccaacagcaaaggaactagaaagaaggacccagaaggcttgctttcctgcatctctgtgaagcctctctccttggccacagactgaactcgcagggagtgcagcaggaaggaacaaagacaggcaaacggcaacgtagcctgggctcactgtgctggggcatggcgggatcctccacagagaggaggggaccaattctggacagacagatgttgggaggatacagaggagatgccacttctcactcaccactaccagccagcctccagaaggccccagagagaccctgcaagaccacggagggagccgacacttgaatgtagtaataggcagggggccctgccaccccatccagccagaccccagctgaaccatgcgtcaggggcctagaggtggagttcttagctatccttggctttctgtgccagcctggctctgcccctcccccatgggctgtgtcctaaggcccatttgagaagctgaggctagttccaaaaacctctcctgacccctgcctgttggcagcccactccccagccccagccccttccatggtactgtagcaggggaattccctccccctccttgtgccttctttgtatataggcttctcaccgcgaccaataaacagctcccagtttgt

SEQ ID NO: 1422 - protein, 1066 aa, Homo sapiens
MGPGPSRAPRAPRLMLCALALMVAAGGCVVSAFNLDTRFLVVKEAGNPGSLFGYSVALHRQTERQQRYLLLAGAPRELAVPDGYTNRTGAVYLCPLTAHKDDCERMNITVKNDPGHHIIEDMWLGVTVASQGPAGRVLVCAHRYTQVLWSGSEDQRRMVGKCYVRGNDLELDSSDDWQTYHNEMCNSNTDYLETGMCQLGTSGGFTQNTVYFGAPGAYNWKGNSYMIQRKEWDLSEYSYKDPEDQGNLYIGYTMQVGSFILHPKNITIVTGAPRHRHMGAVFLLSQEAGGDLRRRQVLEGSQVGAYFGSAIALADLNNDGWQDLLVGAPYYFERKEEVGGAIYVFMNQAGTSFPAHPSLLLHGPSGSAFGLSVASIGDINQDGFQDIAVGAPFEGLGKVYIYHSSSKGLLRQPQQVIHGEKLGLPGLATFGYSLSGQMDVDENFYPDLLVGSLSDHIVLLRARPVINIVHKTLVPRPAVLDPALCTATSCVQVELCFAYNQSAGNPNYRRNITLAYTLEADRDRRPPRLRFAGSESAVFHGFFSMPEMRCQKLELLLMDNLRDKLRPIIISMNYSLPLRMPDRPRLGLRSLDAYPILNQAQALENHTEVQFQKECGPDNKCESNLQMRAAFVSEQQQKLSRLQYSRDVRKLLLSINVTNTRTSERSGEDAHEALLTLVVPPALLLSSVRPPGACQANETIFCELGNPFKRNQRMELLIAFEVIGVTLHTRDLQVQLQLSTSSHQDNLWPMILTLLVDYTLQTSLSMVNHRLQSFFGGTVMGESGMKTVEDVGSPLKYEFQVGPMGEGLVGLGTLVLGLEWPYEVSNGKWLLYPTEITVHGNGSWPCRPPGDLINPLNLTLSDPGDRPSSPQRRRRQLDPGGGQGPPPVTLAAAKKAKSETVLTCATGRAHCVWLECPIPDAPVVTNVTVKARVWNSTFIEDYRDFDRVRVNGWATLFLRTSIPTINMENKTTWFSVDIDSELVEELPAEIELWLVLVAVGAGLLLLGLIILLLWKCDFFKRTRYYQIMPKYHAVRIREEERYPPPGSTLPTKKHWVTSWQTRDQYY

SEQ ID NO: 1423 - DNA, 5176 bp, Homo sapiens
ctccggcgcccgctctgcccgccgctgggtccgaccgcgctcgccttccttgcagccgcgcctcggccccatggacgccctgtgcggttccggggagctcggctccaagttctgggactccaacctgtctgtgcacacagaaaacccggacctcactccctgcttccagaactccctgctggcctgggtgccctgcatctacctgtgggtcgccctgccctgctacttgctctacctgcggcaccattgtcgtggctacatcatcctctcccacctgtccaagctcaagatggtcctgggtgtcctgctgtggtgcgtctcctgggcggaccttttttactccttccatggcctggtccatggccgggcccctgcccctgttttctttgtcacccccttggtggtgggggtcaccatgctgctggccaccctgctgatacagtatgagcggctgcagggcgtacagtcttcgggggtcctcattatcttctggttcctgtgtgtggtctgcgccatcgtcccattccgctccaagatccttttagccaaggcagagggtgagatctcagaccccttccgcttcaccaccttctacatccactttgccctggtactctctgccctcatcttggcctgcttcagggagaaacctccatttttctccgcaaagaatgtcgaccctaacccctaccctgagaccagcgctggctttctctcccgcctgtttttctggtggttcacaaagatggccatctatggctaccggcatcccctggaggagaaggacctctggtccctaaaggaagaggacagatcccagatggtggtgcagcagctgctggaggcatggaggaagcaggaaaagcagacggcacgacacaaggcttcagcagcacctgggaaaaatgcctccggcgaggacgaggtgctgctgggtgcccggcccaggccccggaagccctccttcctgaaggccctgctggccaccttcggctccagcttcctcatcagtgcctgcttcaagcttatccaggacctgctctccttcatcaatccacagctgctcagcatcctgatcaggtttatctccaaccccatggccccctcctggtggggcttcctggtggctgggctgatgttcctgtgctccatgatgcagtcgctgatcttacaacactattaccactacatctttgtgactggggtgaagtttcgtactgggatcatgggtgtcatctacaggaaggctctggttatcaccaactcagtcaaacgtgcgtccactgtgggggaaattgtcaacctcatgtcagtggatgcccagcgcttcatggaccttgcccccttcctcaatctgctgtggtcagcacccctgcagatcatcctggcgatctacttcctctggcagaacctaggtccctctgtcctggctggagtcgctttcatggtcttgctgattccactcaacggagctgtggccgtgaagatgcgcgccttccaggtaaagcaaatgaaattgaaggactcgcgcatcaagctgatgagtgagatcctgaacggcatcaaggtgctgaagctgtacgcctgggagcccagcttcctgaagcaggtggagggcatcaggcagggtgagctccagctgctgcgcacggcggcctacctccacaccacaaccaccttcacctggatgtgcagccccttcctggtgaccctgatcaccctctgggtgtacgtgtacgtggacccaaacaatgtgctggacgccgagaaggcctttgtgtctgtgtccttgtttaatatcttaagacttcccctcaacatgctgccccagttaatcagcaacctgactcaggccagtgtgtctctgaaacggatccagcaattcctgagccaagaggaacttgacccccagagtgtggaaagaaagaccatctccccaggctatgccatcaccatacacagtggcaccttcacctgggcccaggacctgccccccactctgcacagcctagacatccaggtcccgaaaggggcactggtggccgtggtggggcctgtgggctgtgggaagtcctccctggtgtctgccctgctgggagagatggagaagctagaaggcaaagtgcacatgaagggctccgtggcctatgtgccccagcaggcatggatccagaactgcactcttcaggaaaacgtgcttttcggcaaagccctgaaccccaagcgctaccagcagactctggaggcctgtgccttgctagctgacctggagatgctgcctggtggggatcagacagagattggagagaagggcattaacctgtctgggggccagcggcagcgggtcagtctggctcgagctgtttacagtgatgccgatattttcttgctggatgacccactgtccgcggtggactctcatgtggccaagcacatctttgaccacgtcatcgggccagaaggcgtgctggcaggcaagacgcgagtgctggtgacgcacggcattagcttcctgccccagacagacttcatcattgtgctagctgatggacaggtgtctgagatgggcccgtacccagccctgctgcagcgcaacggctcctttgccaactttctctgcaactatgcccccgatgaggaccaagggcacctggaggacagctggaccgcgttggaaggtgcagaggataaggaggcactgctgattgaagacacactcagcaaccacacggatctgacagacaatgatccagtcacctatgtggtccagaagcagtttatgagacagctgagtgccctgtcctcagatggggagggacagggtcggcctgtaccccggaggcacctgggtccatcagagaaggtgcaggtgacagaggcgaaggcagatggggcactgacccaggaggagaaagcagccattggcactgtggagctcagtgtgttctgggattatgccaaggccgtggggctctgtaccacgctggccatctgtctcctgtatgtgggtcaaagtgcggctgccattggagccaatgtgtggctcagtgcctggacaaatgatgccatggcagacagtagacagaacaacacttccctgaggctgggcgtctatgctgctttaggaattctgcaagggttcttggtgatgctggcagccatggccatggcagcgggtggcatccaggctgcccgtgtgttgcaccaggcactgctgcacaacaagatacgctcgccacagtccttctttgacaccacaccatcaggccgcatcctgaactgcttctccaaggacatctatgtcgttgatgaggttctggcccctgtcatcctcatgctgctcaattccttcttcaacgccatctccactcttgtggtcatcatggccagcacgccgctcttcactgtggtcatcctgcccctggctgtgctctacaccttagtgcagcgcttctatgcagccacatcacggcaactgaagcggctggaatcagtcagccgctcacctatctactcccacttttcggagacagtgactggtgccagtgtcatccgggcctacaaccgcagccgggattttgagatcatcagtgatactaaggtggatgccaaccagagaagctgctacccctacatcatctccaaccggtggctgagcatcggagtggagttcgtggggaactgcgtggtgctctttgctgcactatttgccgtcatcgggaggagcagcctgaacccggggctggtgggcctttctgtgtcctactccttgcaggtgacatttgctctgaactggatgatacgaatgatgtcagatttggaatctaacatcgtggctgtggagagggtcaaggagtactccaagacagagacagaggcgccctgggtggtggaaggcagccgccctcccgaaggttggcccccacgtggggaggtggagttccggaattattctgtgcgctaccggccgggcctagacctggtgctgagagacctgagtctgcatgtgcacggtggcgagaaggtggggatcgtgggccgcactggggctggcaagtcttccatgaccctttgcctgttccgcatcctggaggcggcaaagggtgaaatccgcattgatggcctcaatgtggcagacatcggcctccatgacctgcgctctcagctgaccatcatcccgcaggaccccatcctgttctcggggaccctgcgcatgaacctggaccccttcggcagctactcagaggaggacatttggtgggctttggagctgtcccacctgcacacgtttgtgagctcccagccggcaggcctggacttccagtgctcagagggcggggagaatctcagcgtgggccagaggcagctcgtgtgcctggcccgagccctgctccgcaagagccgcatcctggttttagacgaggccacagctgccatcgacctggagactgacaacctcatccaggctaccatccgcacccagtttgatacctgcactgtcctgaccatcgcacaccggcttaacactatcatggactacaccagggtcctggtcctggacaaaggagtagtagctgaatttgattctccagccaacctcattgcagctagaggcatcttctacgggatggccagagatgctggacttgcctaaaatatattcctgagatttcctcctggcctttcctggttttcatcaggaaggaaatgacaccaaatatgtccgcagaatggacttgatagcaaacactgggggcaccttaagattttgcacctgtaaagtgccttacagggtaactgtgctgaatgctttagatgaggaaatgatccccaagtggtgaatgacacgcctaaggtcacagctagtttgagccagttagactagtcccccggtctcccgattcccaactgagtgttatttgcacactgcactgttttcaaataacgattttatgaaatgacctctgtcctccctctgatttttcatattttcctaaagtttcgtttctgttttttaataaaaagctttttcctcctggaacagaagacagctgctgggtcaggccacccctaggaactcagtcctgtactctggggtgctgcctgaatccattaaaaatgggagtactgatgaaataaaactacatggtcaacagtaaaaaaaaaaaaaaaaaaa

SEQ ID NO: 1424 - protein, 1527 aa, Homo sapiens
MDALCGSGELGSKFWDSNLSVHTENPDLTPCFQNSLLAWVPCIYLWVALPCYLLYLRHHCRGYIILSHLSKLKMVLGVLLWCVSWADLFYSFHGLVHGRAPAPVFFVTPLVVGVTMLLATLLIQYERLQGVQSSGVLIIFWFLCVVCAIVPFRSKILLAKAEGEISDPFRFTTFYIHFALVLSALILACFREKPPFFSAKNVDPNPYPETSAGFLSRLFFWWFTKMAIYGYRHPLEEKDLWSLKEEDRSQMVVQQLLEAWRKQEKQTARHKASAAPGKNASGEDEVLLGARPRPRKPSFLKALLATFGSSFLISACFKLIQDLLSFINPQLLSILIRFISNPMAPSWWGFLVAGLMFLCSMMQSLILQHYYHYIFVTGVKFRTGIMGVIYRKALVITNSVKRASTVGEIVNLMSVDAQRFMDLAPFLNLLWSAPLQIILAIYFLWQNLGPSVLAGVAFMVLLIPLNGAVAVKMRAFQVKQMKLKDSRIKLMSEILNGIKVLKLYAWEPSFLKQVEGIRQGELQLLRTAAYLHTTTTFTWMCSPFLVTLITLWVYVYVDPNNVLDAEKAFVSVSLFNILRLPLNMLPQLISNLTQASVSLKRIQQFLSQEELDPQSVERKTISPGYAITIHSGTFTWAQDLPPTLHSLDIQVPKGALVAVVGPVGCGKSSLVSALLGEMEKLEGKVHMKGSVAYVPQQAWIQNCTLQENVLFGKALNPKRYQQTLEACALLADLEMLPGGDQTEIGEKGINLSGGQRQRVSLARAVYSDADIFLLDDPLSAVDSHVAKHIFDHVIGPEGVLAGKTRVLVTHGISFLPQTDFIIVLADGQVSEMGPYPALLQRNGSFANFLCNYAPDEDQGHLEDSWTALEGAEDKEALLIEDTLSNHTDLTDNDPVTYVVQKQFMRQLSALSSDGEGQGRPVPRRHLGPSEKVQVTEAKADGALTQEEKAAIGTVELSVFWDYAKAVGLCTTLAICLLYVGQSAAAIGANVWLSAWTNDAMADSRQNNTSLRLGVYAALGILQGFLVMLAAMAMAAGGIQAARVLHQALLHNKIRSPQSFFDTTPSGRILNCFSKDIYVVDEVLAPVILMLLNSFFNAISTLVVIMASTPLFTVVILPLAVLYTLVQRFYAATSRQLKRLESVSRSPIYSHFSETVTGASVIRAYNRSRDFEIISDTKVDANQRSCYPYIISNRWLSIGVEFVGNCVVLFAALFAVIGRSSLNPGLVGLSVSYSLQVTFALNWMIRMMSDLESNIVAVERVKEYSKTETEAPWVVEGSRPPEGWPPRGEVEFRNYSVRYRPGLDLVLRDLSLHVHGGEKVGIVGRTGAGKSSMTLCLFRILEAAKGEIRIDGLNVADIGLHDLRSQLTIIPQDPILFSGTLRMNLDPFGSYSEEDIWWALELSHLHTFVSSQPAGLDFQCSEGGENLSVGQRQLVCLARALLRKSRILVLDEATAAIDLETDNLIQATIRTQFDTCTVLTIAHRLNTIMDYTRVLVLDKGVVAEFDSPANLIAARGIFYGMARDAGLA

SEQ ID NO: 1425 - DNA, 1972 bp, Homo sapiens
ctgtgtgtaggagggatttcggcctgagagcgggccgaggagattggcgacggtgtcgcccgtgttttcgttggcgggtgcctgggctggtgggaacagccgcccgaaggaagcaccatgatttcggccgcgcagttgttggatgagttaatgggccgggaccgaaacctagccccggacgagaagcgcagcaacgtgcggtgggaccacgagagcgtttgtaaatattatctctgtggtttttgtcctgcggaattgttcacaaatacacgttctgatcttggtccgtgtgaaaaaattcatgatgaaaatctacgaaaacagtatgagaagagctctcgtttcatgaaagttggctatgagagagattttttgcgatacttacagagcttacttgcagaagtagaacgtaggatcagacgaggccatgctcgtttggcattatctcaaaaccagcagtcttctggggccgctggcccaacaggcaaaaatgaagaaaaaattcaggttctaacagacaaaattgatgtacttctgcaacagattgaagaattagggtctgaaggaaaagtagaagaagcccaggggatgatgaaattagttgagcaattaaaagaagagagagaactgctaaggtccacaacgtcgacaattgaaagctttgctgcacaagaaaaacaaatggaagtttgtgaagtatgtggagcctttttaatagtaggagatgcccagtcccgggtagatgaccatttgatgggaaaacaacacatgggctatgccaaaattaaagctactgtagaagaattaaaagaaaagttaaggaaaagaaccgaagaacctgatcgtgatgagcgtctaaaaaaggagaagcaagaaagagaagaaagagaaaaagaacgggagagagaaagggaagaaagagaaaggaaaagacgaagggaagaggaagaaagagaaaaagaaagggctcgtgacagagaaagaagaaagagaagtcgttcacgaagtagacactcaagccgaacatcagacagaagatgcagcaggtctcgggaccacaaaaggtcacgaagtagagaaagaaggcggagcagaagtagagatcgacgaagaagcagaagccatgatcgatcagaaagaaaacacagatctcgaagtcgggatcgaagaagatcaaaaagccgggatcgaaagtcatataagcacaggagcaaaagtcgggacagagaacaagatagaaaatccaaggagaaagaaaagaggggatctgatgataaaaaaagtagtgtgaagtccggtagtcgagaaaagcagagtgaagacacaaacactgaatcgaaggaaagtgatactaagaatgaggtcaatgggaccagtgaagacattaaatctgaaggtgacactcagtccaattaaaactgatctgataagacctcagatcagacagaggactactgttcgaagatttttggaagaatactgagaacggcataaagtgaagatcgacatttaaaaaatgaggtgaaagaaagctatagtggcatagaaaaagtataaagctcagttagtttttttattattattattattaaaagttaattcaggactgatgtgacctaccagatttcagaacatgtgttaatagtatatatgccactgaaaacttaggtcctgtatcatacttttttctttaagactttttaagaaatattacttaaacatgtggcttgctcagtgtttaattgcaagttttcaatcttggactttgaaaacaggattaaacgttagtattcgtgtgaatcagactaagtgggatttcatttttacaactctgctctacttagcctttggatttagaagtaaaaataaagtatctctgactttctgttacaaagttgattgtctctgtcattgaaaagttttagtattaatctttttctaataaagttattgactctgaaaaaaaaaaaaa

SEQ ID NO: 1426 - protein, 432 aa, Homo sapiens
MISAAQLLDELMGRDRNLAPDEKRSNVRWDHESVCKYYLCGFCPAELFTNTRSDLGPCEKIHDENLRKQYEKSSRFMKVGYERDFLRYLQSLLAEVERRIRRGHARLALSQNQQSSGAAGPTGKNEEKIQVLTDKIDVLLQQIEELGSEGKVEEAQGMMKLVEQLKEERELLRSTTSTIESFAAQEKQMEVCEVCGAFLIVGDAQSRVDDHLMGKQHMGYAKIKATVEELKEKLRKRTEEPDRDERLKKEKQEREEREKEREREREERERKRRREEEEREKERARDRERRKRSRSRSRHSSRTSDRRCSRSRDHKRSRSRERRRSRSRDRRRSRSHDRSERKHRSRSRDRRRSKSRDRKSYKHRSKSRDREQDRKSKEKEKRGSDDKKSSVKSGSREKQSEDTNTESKESDTKNEVNGTSEDIKSEGDTQSN

SEQ ID NO: 1427 - DNA, 3477 bp, Homo sapiens
ctgtgtgtaggagggatttcggcctgagagcgggccgaggagattggcgacggtgtcgcccgtgttttcgttggcgggtgcctgggctggtgggaacagccgcccgaaggaagcaccatgatttcggccgcgcagttgttggatgagttaatgggccgggaccgaaacctagccccggacgagaagcgcagcaacgtgcggtgggaccacgagagcgtttgtaaatattatctctgtggtttttgtcctgcggaattgttcacaaatacacgttctgatcttggtccgtgtgaaaaaattcatgatgaaaatctacgaaaacagtatgagaagagctctcgtttcatgaaagttggctatgagagagattttttgcgatacttacagagcttacttgcagaagtagaacgtaggatcagacgaggccatgctcgtttggcattatctcaaaaccagcagtcttctggggccgctggcccaacaggcaaaaatgaagaaaaaattcaggttctaacagacaaaattgatgtacttctgcaacagattgaagaattagggtctgaaggaaaagtagaagaagcccaggggatgatgaaattagttgagcaattaaaagaagagagagaactgctaaggtccacaacgtcgacaattgaaagctttgctgcacaagaaaaacaaatggaagtttgtgaagtatgtggagcctttttaatagtaggagatgcccagtcccgggtagatgaccatttgatgggaaaacaacacatgggctatgccaaaattaaagctactgtagaagaattaaaagaaaagttaaggaaaagaaccgaagaacctgatcgtgatgagcgtctaaaaaaggagaagcaagaaagagaagaaagagaaaaagaacgggagagagaaagggaagaaagagaaaggaaaagacgaagggaagaggaagaaagagaaaaagaaagggctcgtgacagagaaagaagaaagagaagtcgttcacgaagtagacactcaagccgaacatcagacagaagatgcagcaggtctcgggaccacaaaaggtcacgaagtagagaaagaaggcggagcagaagtagagatcgacgaagaagcagaagccatgatcgatcagaaagaaaacacagatctcgaagtcgggatcgaagaagatcaaaaagccgggatcgaaagtcatataagcacaggagcaaaagtcgggacagagaacaagatagaaaatccaaggagaaagaaaagaggggatctgatgataaaaaaagtagtgtgaagtccggtagtcgagaaaagcagagtgaagacacaaacactgaatcgaaggaaagtgatactaagaatgaggtcaatgggaccagtgaagacattaaatctgaaggtgacactcagtccaattaaaactgatctgataagacctcagatcagacagaggtaagtgtattgtttctcactttgattagggctttttgttactgtttgacagtgcagcgtaagtatgcacagatgaagatggaactaagccgagtaagaagacatacaaaagcctcttctgaaggaaaagacagtgtagtcctgcaaaacattttgaggtacattgttttgtctcagctattttgtagcagactcgtgcccccattagtgtgcctctttggaaattatcgcccacatttgtaatatagtcgccattgaaaagttaattatcctttttttagggattttgatgtcatttcttttttttttttaataaaaaggttgaactgtttttttttttctttttggtattaagtccatcttgtgttggtacattggcagagacatatgctttaaaaacttaaatatttcggaggcacatgttggactactttgttttaattaaactgctagtatttctttgtcaaggatgtttctagttttttgctttattgccttgcattctaatgcagtttgttctgtaactcgagagccagtagcattggattgatggaagtgtagggtttatgaattattgcagctgactaccatacctcacacagcgttggtgttgtgagcggcccatgaaaagccaaattaaaaatcaaggattcagtcaaactaagcaggtactcatgccaggtactcctttctctacccacatccatgtttgaatgctattgcctgtgatctttacgcttaactgttgtgtatcttttttgttctttacaagaagtgcagaggggttttttgtgtattgcgtgaaaacttataaaacaaatgttaacagaatggaattttttttcaactgtatgtagggctgcagtggtggccagaattagatatctttaaagaattttaaatacaataaacacttcatattattcgccttgttacactcaatgcaattctcaagtctataagaggtatgtgcttaatatttcctactgtgtaggagaatttgcagtcagccataggtatgtaggaatagtcactcactggctgatacatttaaagcagcagtgtgaatagcaaggacagacaccttcaatttgtgaaatcaaagaactgatgcactatatagaacgaatttgggtttttaaagaaatattaaaagttaggtactgtaagtgttcttaaaacctgtaaacttcattctgtgggctagtggtgtgggacaaaatattcctaatgaaaggaagtaccaattagttgatttgttggtggcattccccttttgggaaagcaatgtaaggttatgtctgtgtatgtcattcacacttaggcaagcatacacaggcacatggctttaagaaccacactgatgccttgataattaaaaagaatacaagcattccatgtacacatgttaattagcagttagtgactgggccaacactttctcataaaaattggccttttacatgttgtctaattatcatttttccccaaattttgcgttgtaggactactgttcgaagatttttggaagaatactgagaacggcataaagtgaagatcgacatttaaaaaatgaggtgaaagaaagctatagtggcatagaaaaagtataaagctcagttagtttttttattattattattattaaaagttaattcaggactgatgtgacctaccagatttcagaacatgtgttaatagtatatatgccactgaaaacttaggtcctgtatcatacttttttctttaagactttttaagaaatattacttaaacatgtggcttgctcagtgtttaattgcaagttttcaatcttggactttgaaaacaggattaaacgttagtattcgtgtgaatcagactaagtgggatttcatttttacaactctgctctacttagcctttggatttagaagtaaaaataaagtatctctgactttctgttacaaagttgattgtctctgtcattgaaaagttttagtattaatctttttctaataaagttattgactctgaaaaaaaaaaaaa

SEQ ID NO: 1428 - protein, 432 aa, Homo sapiens; identical to SEQ ID NO: 1426

SEQ ID NO: 1429 - DNA, 2649 bp, Homo sapiens
atctctcggcttccgttgagcaccaagcaagatggcagcttccgagacggttaggctacggcttcaatttgattacccgccgccagctaccccgcactgtacggccttctggcttctggtcgacttgaacagatgccgagtcgtcacagatctcattagtctcatccgccagcgcttcggcttcagttctggggccttcctaggcctctacctggagggggggctcttgccccccgccgagagcgcgcgccttgtgagagacaacgactgcctcagagttaaattagaagagagaggagttgctgagaattctgtagtcatcagtaatggtgacattaatttatctcttagaaaagcaaagaagcgggcatttcagttagaggagggtgaagaaactgaaccagattgcaaatattcaaagaagcattggaagagtcgagagaacaataacaataatgagaaggtcttggatctggaaccaaaagctgtcacagatcagactgtcagcaaaaaaaacaagagaaaaaataaagcaacctgtggcacagtgggtgatgataacgaagaggccaaaagaaaatcaccaaagaaaaaggagaaatgtgaatataaaaaaaaggctaagaatcccaagtctccgaaagtacaggcagtgaaagactgggccaatcagagatgtagttctccaaaaggttctgctagaaacagccttgttaaagccaaaaggaaaggtagtgtaagcgtttgctcaaaagagagtcccagttcctcctcggagtctgaatcttgtgatgaatctatcagtgatggtcccagcaaagtcactttggaggccagaaattcctcagagaaattaccaactgagttatcaaaggaagaaccctctaccaaaaatacaactgcagacaaactggctataaaacttggctttagccttacccccagcaagggcaagacctctggaacaacatcttccagttcagactctagtgcagagtcagacgaccaatgcttgatgtcatcgagcaccccggagtgtgctgcgggtttcttaaagacagtaggcctttttgcaggaagaggtcgtccaggcccagggctgtcatcacagactgcaggtgctgctggatggaggcgttctggctcaaatggtggtggacaggctcctggtgcttctcccagtgtgtctctccctgctagtttaggaagaggatggggtagagaagagaaccttttttcttggaagggagctaagggacggggcatgcgggggagaggtcgaggacgagggcatcctgtttcctgtgttgtaaatagaagcactgacaaccagaggcaacagcaattaaatgacgtggtaaaaaattcatctactattatccagaatccagtagagacacccaagaaggactatagtctgttaccactgttagcagctgcccctcaagttggagaaaagattgcatttaagcttttggagctaacatccagttactctcctgatgtctctgactacaaggaaggaagaatattaagccacaatccagagacccagcaagtagatatagaaattctttcatccttacctgccttgagagaacctgggaaatttgatttagtttatcacaatgaaaatggagccgaggtagtggagtacgctgtgacacaggagagcaagatcactgtattttggaaagagttgattgacccaagactgattattgaatctccaagtaacacatcaagtacagaacctgcctgagtatgacctctccaccttatagtttatgaatgtcttgtttgtgaaagtgactataacccaaacttttttttttttttaaagaggatttggaagttgtatggatttttttgttatcttcactttactgcataggaaacaatctacctcatcatttaaaatgacatgggtgtcggttttgtagatctttggtttttttgtcaggtttaatttcagttaacaaaatgtaaaacatgacattccctgcagatattgttgtataccagtatggtttcttctctttctttaaatgtttttggccatcaagtagcagtcgtcagtaggagtttataataccaagaatgtgctgcgtatcttgtctcaataagttttaagtaacatttaaaaatattaaagcatgttatttgacctaattttttagcatttgagttgttccattaaatggagcatcttgtaaatttcaagtattttatacttgcaattgttaagagttaacaggtagttggatttgtcgcagacaatgagttaaggaatcctttcacgtttttcccaactttaaaattaaggattctcaggtccctgtgtagagcagtgaaaataagatgtgcgtatgtgtgtgtatgcctggagaattggtgtttcacttcagtgagaggattggctgtgagcttcagaccaggaaatgtgtcatcttgccaggcacctggctgagtgtgctggagtgaggatcttgaacagaaacttccttttctgttattattcactacgaagctaaaatggccaaatatataccgtgaaaattggtttcatttaacaaaagatcagatccctccttcagctgtacacatttttaaataaaatcatattgaactaaaaaaaaaaaaaaaaaa

SEQ ID NO: 1430 - protein, 576 aa, Homo sapiens
MAASETVRLRLQFDYPPPATPHCTAFWLLVDLNRCRVVTDLISLIRQRFGFSSGAFLGLYLEGGLLPPAESARLVRDNDCLRVKLEERGVAENSVVISNGDINLSLRKAKKRAFQLEEGEETEPDCKYSKKHWKSRENNNNNEKVLDLEPKAVTDQTVSKKNKRKNKATCGTVGDDNEEAKRKSPKKKEKCEYKKKAKNPKSPKVQAVKDWANQRCSSPKGSARNSLVKAKRKGSVSVCSKESPSSSSESESCDESISDGPSKVTLEARNSSEKLPTELSKEEPSTKNTTADKLAIKLGFSLTPSKGKTSGTTSSSSDSSAESDDQCLMSSSTPECAAGFLKTVGLFAGRGRPGPGLSSQTAGAAGWRRSGSNGGGQAPGASPSVSLPASLGRGWGREENLFSWKGAKGRGMRGRGRGRGHPVSCVVNRSTDNQRQQQLNDVVKNSSTIIQNPVETPKKDYSLLPLLAAAPQVGEKIAFKLLELTSSYSPDVSDYKEGRILSHNPETQQVDIEILSSLPALREPGKFDLVYHNENGAEVVEYAVTQESKITVFWKELIDPRLIIESPSNTSSTEPA

SEQ ID NO: 1431 - DNA, 1952 bp, Homo sapiens
gtgatggggcgccgggtccagcctgttgctgatgctgccgtgcggtacttgtcatggagctggcactgcggcgctctcccgtcccgcggtggttgctgctgctgccgctgctgctgggcctgaacgcaggagctgtcattgactggcccacagaggagggcaaggaagtatgggattatgtgacggtccgcaaggatgcctacatgttctggtggctctattatgccaccaactcctgcaagaacttctcagaactgcccctggtcatgtggcttcagggcggtccaggcggttctagcactggatttggaaactttgaggaaattgggccccttgacagtgatctcaaaccacggaaaaccacctggctccaggctgccagtctcctatttgtggataatcccgtgggcactgggttcagttatgtgaatggtagtggtgcctatgccaaggacctggctatggtggcttcagacatgatggttctcctgaagaccttcttcagttgccacaaagaattccagacagttccattctacattttctcagagtcctatggaggaaaaatggcagctggcattggtctagagctttataaggccattcagcgagggaccatcaagtgcaactttgcgggggttgccttgggtgattcctggatctcccctgttgattcggtgctctcctggggaccttacctgtacagcatgtctcttctcgaagacaaaggtctggcagaggtgtctaaggttgcagagcaagtactgaatgccgtaaataaggggctctacagagaggccacagagctgtgggggaaagcagaaatgatcattgaacagaacacagatggggtgaacttctataacatcttaactaaaagcactcccacgtctacaatggagtcgagtctagaattcacacagagccacctagtttgtctttgtcagcgccacgtgagacacctacaacgagatgccttaagccagctcatgaatggccccatcagaaagaagctcaaaattattcctgaggatcaatcctggggaggccaggctaccaacgtctttgtgaacatggaggaggacttcatgaagccagtcattagcattgtggacgagttgctggaggcagggatcaacgtgacggtgtataatggacagctggatctcatcgtagataccatgggtcaggaggcctgggtgcggaaactgaagtggccagaactgcctaaattcagtcagctgaagtggaaggccctgtacagtgaccctaaatctttggaaacatctgcttttgtcaagtcctacaagaaccttgctttctactggattctgaaagctggtcatatggttccttctgaccaaggggacatggctctgaagatgatgagactggtgactcagcaagaataggatggatggggctggagatgagctggtttggccttggggcacagagctgagctgaggccgctgaagctgtaggaagcgccattcttccctgtatctaactggggctgtgatcaagaaggttctgaccagcttctgcagaggataaaatcattgtctctggaggcaatttggaaattatttctgcttcttaaaaaaacctaagattttttaaaaaattgatttgttttgatcaaaataaaggatgataatagatattattttttcttatgacagaagcaaatgatgtgatttatagaaaaactgggaaatacaggtacccaaagagtaaatcaacatctgtatacccccttcccaggggtaagcactgttaccaatttagcatatgtccttgcagaatttttttttctatatatacatatatattttttaccaaaatgaatcattactctatgttgttttactatttgtttgacatatcagtatatctgaaacaccttttcatgtcaataaatgttcttctctaacatttttaaaaaaaaa

SEQ ID NO: 1432 - protein, 452 aa, Homo sapiens
MELALRRSPVPRWLLLLPLLLGLNAGAVIDWPTEEGKEVWDYVTVRKDAYMFWWLYYATNSCKNFSELPLVMWLQGGPGGSSTGFGNFEEIGPLDSDLKPRKTTWLQAASLLFVDNPVGTGFSYVNGSGAYAKDLAMVASDMMVLLKTFFSCHKEFQTVPFYIFSESYGGKMAAGIGLELYKAIQRGTIKCNFAGVALGDSWISPVDSVLSWGPYLYSMSLLEDKGLAEVSKVAEQVLNAVNKGLYREATELWGKAEMIIEQNTDGVNFYNILTKSTPTSTMESSLEFTQSHLVCLCQRHVRHLQRDALSQLMNGPIRKKLKIIPEDQSWGGQATNVFVNMEEDFMKPVISIVDELLEAGINVTVYNGQLDLIVDTMGQEAWVRKLKWPELPKFSQLKWKALYSDPKSLETSAFVKSYKNLAFYWILKAGHMVPSDQGDMALKMMRLVTQQE

SEQ ID NO: 1433 - DNA, 5585 bp, Homo sapiens
agtcagtcggggagcaagagccccgcgcgcagccggcgcgggctcggtcatcggcgcgccgccgcccggggctgggcttggggctgcctgtggagaggcggcgggcggaacgcgcgcggccacggccacggccaccgccacggccacggccggcagctcgggtcccgggtcccgggcaggggaaggggagaggcggcgagctcagcaaccggaaccgagggaagattttggctccgcgggctcgccctccgctccctctgccagcggcgccagacgccgagtggggccagggacaggggaggaggacccaggaccctgtgcccgcgcccctggagccgctggagttcggacttctgcaactgttggcactttgggggcttggcttagcgctctgctgtttacccgtctctcctcgctgcctcggaaccaaagctcccggccccctccgccctcgcgcgcccacccaccgccgccggggagcggcccggcccgcactcagcaccatgaggggacttgggacttgcctggcgactttggccggacttttgctaactgcggcgggcgagacgttctcaggtggctgcctctttgatgagccgtatagcacatgtggatatagtcaatctgaaggtgatgacttcaattgggagcaagtgaacaccttgactaaaccgacttctgatccatggatgccatcaggttctttcatgctggtgaatgcctctgggagacctgaggggcagagagcccacctgctcttaccccaacttaaagaaaatgacacccactgcatcgattttcactattttgtgtccagcaagagtaattctcctccggggttactcaatgtctacgtgaaggtcaataacgggccactggggaatcctatctggaatatatctggagacccaacacgtacatggaacagggcagaactggccattagtactttctggcctaacttttatcaggtgatttttgaagtgataacttctggacatcaaggctatctcgctatcgatgaggtgaaggtgttaggacatccatgtaccaggactcctcacttcctgcggattcagaatgtggaagttaatgctggccagtttgctaccttccagtgcagtgccatcggcaggaccgtggcaggagacaggctctggttacagggcattgatgtgcgagatgctcctctgaaggaaatcaaggtgaccagctcccgacgcttcattgcttcatttaatgttgtgaataccaccaaacgagatgctggaaagtaccgctgcatgattcgcactgaaggaggtgttggaatatcaaactatgcagagttggtagttaaagaaccacccgttcctattgccccacctcagctcgcctctgtaggagccacctacctgtggatacagctcaacgccaactccatcaatggggatgggcccattgtggcccgagaggtggagtactgcacggccagtgggagctggaatgaccggcagccagtcgattccacgagctataaaattggacaccttgacccagatacagaatatgagattagtgtgctcctgaccaggccaggggagggtggcactggctctcctggtccagctctcaggacaagaacaaagtgtgctgatcccatgcgaggcccaagaaaactagaagtagtggaggtcaaatctcggcaaatcactatccgctgggagccatttggatataatgtaactcgttgccacagttataatctcactgtccactactgttaccaagttggaggacaagaacaagtgcgagaagaagtaagctgggatacagaaaactcacaccctcaacacacgatcactaacctgtcaccatacaccaatgtcagtgtgaaactgatcctcatgaacccagagggccggaaggaaagccaagaactcatagtgcagacagatgaagacctcccaggtgctgttcccactgaatccatacaaggaagtacctttgaagagaagatatttcttcagtggagagaaccaactcaaacatatggtgtaatcactttatatgagatcacctacaaagcagtcagttcctttgacccagaaatagatttatccaatcagagtggaagagtttcaaagctgggaaatgaaacccattttctgttttttggactgtatccggggaccacatactcctttaccatccgagctagcacagctaagggttttgggcctccagcaacaaaccagttcaccaccaaaatatcagcaccctctatgccagcttatgaacttgagacacctttgaatcaaactgacaataccgtgacagtcatgctgaaacctgcccacagcagaggagcacctgtcagtgtctatcaaatagttgttgaggaagaacgtcctcgaagaactaaaaagacgacagaaatcttaaagtgctacccagtgccaattcacttccagaatgcttctctgctgaactcacagtactactttgctgcagaatttcctgcagacagcctccaagctgcgcagccttttacaattggtgataataagacatataatggatactggaacactccccttctcccctataaaagctacagaatttatttccaagctgctagtagagccaatggggaaaccaaaatagactgtgtccaagtggccacaaaaggagctgccactccgaaaccagtcccagaacccgagaaacagacagaccatacagttaaaattgctggagtcatcgcgggcatcttgctgttcgtgattatatttcttggagttgtgttggtaatgaagaaaaggaaactggccaagaagcggaaagagaccatgagcagcacccgacaggagatgactgtgatggtgaactcaatggacaagagctatgctgagcagggcacaaactgcgacgaggctttctcattcatggacacgcacaatctgaatgggagatctgtgtcttcaccatcgtccttcacaatgaaaacaaatacactgagcacatcggtgcctaattcctattacccagatgaaacccacacaatggccagcgataccagcagcctggtgcagtcccatacttacaagaagcgagagccggccgacgtgccctatcagactgggcagctccaccccgccatccgggtggcagacctccttcagcacatcacacagatgaagtgtgcggagggctacggcttcaaggaggaatacgagagcttctttgaagggcagtctgcaccatgggactcggctaagaaagatgagaacagaatgaagaacagatacgggaatatcattgcatacgatcattcccgagtgaggctgcagacaatagaaggagacacaaactcagactatatcaatggcaattatatcgatggttatcatcgacccaatcattacattgctacccaagggccaatgcaggaaaccatctatgacttctggaggatggtgtggcacgaaaacactgcaagtatcatcatggtgaccaatcttgtggaagtgggaagggtcaaatgctgcaaatactggccagatgacacagagatatataaagacattaaagttaccctaatagaaacagaactactggcagaatatgtgataagaacatttgctgttgaaaagagaggtgtgcatgaaatccgagagatcagacagtttcacttcactggctggccggatcatggggtcccctaccatgccaccggcctgctgggattcgtgcggcaagtcaagtccaagagcccgcccagtgcaggcccactggtggtgcactgcagtgctggtgcagggaggactggctgtttcatcgtcattgatatcatgttggacatggccgaaagggaaggggtcgtagacatctacaactgcgtcagggagctgcggtcacggagggtgaacatggtgcaaacagaggagcagtatgtgtttatccacgatgcgatcctggaagcctgtctttgtggggacacctctgtgcctgcttcccaagttaggtctctgtattatgacatgaacaaactggatccacagacaaactcaagccagattaaagaggaattccggacgctaaacatggtgacaccaacgctgcgagtagaggactgcagcatcgcactgttgccccggaaccatgagaaaaaccggtgcatggacatcctgcccccagaccgctgcctgcccttcctcatcaccatcgatggggagagcagcaactacatcaatgctgccctcatggacagctataaacagccttcagcttttatagtcacccagcatcctttgccaaacacagtgaaagacttttggagactggtcctggattatcactgcacatccgtagttatgctaaatgatgtggatcctgcccagttgtgtccacagtactggccagaaaacggagtacacagacacggccccatccaggtggaatttgtctctgctgacctggaagaggacatcatcagcaggatattccgcatttacaatgccgccagaccccaagatggatatcggatggtgcagcaattccagttcctgggctggccgatgtacagggacacaccagtgtctaagcgctccttcttgaagctcattcgccaggtggacaagtggcaagaggagtacaatggcggggaaggccgcacggttgtgcactgcttgaacgggggaggccgcagtgggacgttctgcgccatcagcatcgtatgtgagatgctccggcaccagagaaccgtggatgtctttcacgctgtgaagacactgaggaacaacaagcccaacatggtcgacctcctggatcagtacaagttctgctacgaggtggccctggaatacttgaattctggctgatggtgtaaacagctctgcaaacaatccctttcataccacaaagccaagacgttccatggtatttgtgcaaaagagatgaagacttctcaatatgcttattttgctttgcataattggctctttttaagagcccaagaaagtgtttctaaaattgcttgcactgcccaatcccagtaatgctgctgcctgacagaaacacacacacagccacagttgccaaatcccgtactccttgccaccggcttcctagagcagcgtagacagctggtaaactgaagagcacaactatattcttatgaaggaatttgtacctttggggtattattttgtggcccgtgaccctcgttattgttacagctgagtgtatgtttttgttctgtggagaatgctatctggcattatggtaatatattattttaggtaatatttgtactttaacatgttgcataatatatgcttatgtagctttccaggactaacagataaatgtgtaatgaacaaagatatgttgtatgagtcgtcgtttctgtcagatttgtattgtttccaagggaaaagcttgggggaggactcagttcacaaaatgcaaaactcaacgatcagattcacggacccagagcttttccatgtgtttatattgtaaatatttttgatttcatcaaattatttattcattaaaagaaatttttgtgaagcacaaaaaaaaaaaaaaaaaaaaaaaaa

SEQ ID NO: 1434 - protein, 1452 aa, Homo sapiens
MRGLGTCLATLAGLLLTAAGETFSGGCLFDEPYSTCGYSQSEGDDFNWEQVNTLTKPTSDPWMPSGSFMLVNASGRPEGQRAHLLLPQLKENDTHCIDFHYFVSSKSNSPPGLLNVYVKVNNGPLGNPIWNISGDPTRTWNRAELAISTFWPNFYQVIFEVITSGHQGYLAIDEVKVLGHPCTRTPHFLRIQNVEVNAGQFATFQCSAIGRTVAGDRLWLQGIDVRDAPLKEIKVTSSRRFIASFNVVNTTKRDAGKYRCMIRTEGGVGISNYAELVVKEPPVPIAPPQLASVGATYLWIQLNANSINGDGPIVAREVEYCTASGSWNDRQPVDSTSYKIGHLDPDTEYEISVLLTRPGEGGTGSPGPALRTRTKCADPMRGPRKLEVVEVKSRQITIRWEPFGYNVTRCHSYNLTVHYCYQVGGQEQVREEVSWDTENSHPQHTITNLSPYTNVSVKLILMNPEGRKESQELIVQTDEDLPGAVPTESIQGSTFEEKIFLQWREPTQTYGVITLYEITYKAVSSFDPEIDLSNQSGRVSKLGNETHFLFFGLYPGTTYSFTIRASTAKGFGPPATNQFTTKISAPSMPAYELETPLNQTDNTVTVMLKPAHSRGAPVSVYQIVVEEERPRRTKKTTEILKCYPVPIHFQNASLLNSQYYFAAEFPADSLQAAQPFTIGDNKTYNGYWNTPLLPYKSYRIYFQAASRANGETKIDCVQVATKGAATPKPVPEPEKQTDHTVKIAGVIAGILLFVIIFLGVVLVMKKRKLAKKRKETMSSTRQEMTVMVNSMDKSYAEQGTNCDEAFSFMDTHNLNGRSVSSPSSFTMKTNTLSTSVPNSYYPDETHTMASDTSSLVQSHTYKKREPADVPYQTGQLHPAIRVADLLQHITQMKCAEGYGFKEEYESFFEGQSAPWDSAKKDENRMKNRYGNIIAYDHSRVRLQTIEGDTNSDYINGNYIDGYHRPNHYIATQGPMQETIYDFWRMVWHENTASIIMVTNLVEVGRVKCCKYWPDDTEIYKDIKVTLIETELLAEYVIRTFAVEKRGVHEIREIRQFHFTGWPDHGVPYHATGLLGFVRQVKSKSPPSAGPLVVHCSAGAGRTGCFIVIDIMLDMAEREGVVDIYNCVRELRSRRVNMVQTEEQYVFIHDAILEACLCGDTSVPASQVRSLYYDMNKLDPQTNSSQIKEEFRTLNMVTPTLRVEDCSIALLPRNHEKNRCMDILPPDRCLPFLITIDGESSNYINAALMDSYKQPSAFIVTQHPLPNTVKDFWRLVLDYHCTSVVMLNDVDPAQLCPQYWPENGVHRHGPIQVEFVSADLEEDIISRIFRIYNAARPQDGYRMVQQFQFLGWPMYRDTPVSKRSFLKLIRQVDKWQEEYNGGEGRTVVHCLNGGGRSGTFCAISIVCEMLRHQRTVDVFHAVKTLRNNKPNMVDLLDQYKFCYEVALEYLNSG

SEQ ID NO: 1435 - DNA, 3795 bp, Homo sapiens
atgacccatacggacgctccggacctgctggtgtcgaccgtgtaccaggacatcaaggtggcgaccccgggacccgcgtccaagcgctcgccatgtgagcgatccctggctcggcctgctgagcccgcgcctttcaacaagcgccactgcggcagcttcgacttcctggaggcgctggaccggccaaccatggagaccctgccggagccaccgcccctggagcccgctgtgccgcgcgcccggacccgcgaggccgagccacaccgccgcgcccactccaagagcgcgccccgcgcgcccccgggcctgacgcccgcgcccgccttgctgcaggtgttgcccagccgagggcgggaggcccagcgtgcggcgcgggccgaggcatcgccgcgcccttgccaactagctgcgtcccatcaagttgcagccgcagctgggcggccccggccacatcgcgcccctgtgcgccgccgcgggccgctgcgcacctcccgagccacccgcgggtccctacccctacgtgcgctccttccggacatcaagccagaggacgcagtgctccagcacgcggcgctgtcgcacaccccgacgccaagcgactcataccgtgcggatccccgggcgttctactgcgacgagcccctgcctgggccccgtgactacgctgagcgccgcagtctgcccttcatcaccccgccgggccccaccagttcttctatacagaggagccccaaggcttccggggcagctttgcggccagtcccggtccaaccttcgacgcctactgccccaggccctatccgtcggaggagctcccagggcccagtccaaggtgcacggggggctactacgcaggagaggtgcgcaccttcccaatccaggaaccgtcctcccgctcctactatggggaggctccctgagcctacggcctgccctacgggccccgctatgtccctgaggagccccgggcccactgcaccgcccgccctttttacacggaggacttcggaaaataccgtgagcgtgacgtccttgctcggacgtaggcgcacccgctcagcagcccagcctgggcggactggggcctgcgaccctaccgcaccctgcaagtggtgcagtcctctaaccccgaccggttgctcgcctcctggcatggcggcaccggcaccagtccaccccggctggccaccgacagccgccactactcgtgctcctgggacaacattctggccccgggccgtgccgagaccagtggggccgtgccgagaccagtggggccgtggccgcagctatgagaacctgctggggcgtgaggtgcgggagccgcgaggcgtgtcccccgaaggctggtgcccacctgtcgtcgtgaacctgtccacctcgcccagacgctatgccccactgtccctgtccgagacgtcgctgacggagaagggccgcgcgggtgagggcccgggccgcaactggtacgtgatgcccgagatcaccatcactgacaatgacctgcacgccaccgagcgcgcaccagggcctgggagttgcccgggggctgcacgcggccacttcctcatgcggcccccgacggccccacctctggccgccagcggatcctagagcagctggacgagctcatcacggacctggtcatcgacttgcgaccccccgccggccaggcctcagagccggcagcccactgcctgggcccccaactgcgccaactgctggactcgcggcccgcgggctccggggcccccgcgctggtgccgccacactcgcccccagcctccaccggcatcacccaggagcccgcggccccgggagaggcggctgacatgtccccggaacccagcgccgacgaagacgacctgatgacctgctccagtgcgcgctgctggcacacagagaccatgttcaacgcctgcctctacgtcaagtcctgccacagctgctacacctactactgctcacgcctgtgccgcggcgaggactgggacgtccacaaggcgcgctgcgtgtacggccgcgtgggcagcgtgtgccgccacatgctgcagttttgctgtgacagtggcccggtgcacctcgctttctcgcccatggctcgtgtgggtttcctgtcgcgcaggcgcagcgtgctcttcctgggcttcccaagtccaggctcagctgaaaacttcctgtgctttggcctggaggggctgctgctatccccctcccaactatcgcagtgtgagctggccacacacgcggcgcccctgggcagctacatacgcgagctggcagccgctgggcgcctctacgagccggcagagcttcctgcttagcgtggccgtggccgtgggacccagcaccgcgcccctggggacatccgccctgcccgtgcccacgccacccagcgatgggccaacagtgtgcaagttagccaaggtagcgctggcagccggcagcccctcgtggccgcccctggcgcggagtggcaagcccgacatggagacgctgatcctgacaccactgccggacacccacattttccagtatctttatacagaggtgggctactacagggacatgagctgcctaactgccatcctcctcctgtatctgccagaggaagacaccttctgggcactggatcagctgatggctgaggagaggcactccctgcaggagtcacatttgaatcctactccttacatcaaggttcaggcagctgtccaaacaccttatctcttcatctctggccatttcttcagagtcgactatgagcagaaatcacccagacaccccacagagtctcctgagctcgggggaagaagctgcataaccggcacacttccagaaaggaccgaggaagagagcgtcgcttcagctagggatctgattagtcatgcctgcacagaggcacagagtgaagaagaaacacagcaccaggaccctctttcctatctgtttagagagaagatggtggagaaggtttgggcgggaaagacttggctgcacagcatcgcaggtccaccagagctgcctccctccctgagtcaacgcgtccctgaagatacacagcttatgtcagcagcacagacctgcatcccccatgttcgtgttttagaaattcagaacaaacaatttctgaatgctcctcagaacgccaactcaggcagagaatctcaccgaaatagagaagaagctcatgctcctggaagaaacagcccgaggagagccgctgggccacatctggccactgtccgcagcgctgtcagattgctggggccacatctggccactgtccacagtgctgtcagatccaaggagagccgctgggccacatctggccactgtccacagcgctgtcagatgccgaccaaaccctgctttggtgttgaggtggttcgtctgaagacaggtcccaactgcccctgtgggtccatctccattgagaaagctgccttgtcagccacagacttgccaaccacatggagcacggaaacacctgggcccactctggccgtgtggcttcataatttagaaaatgtaaagaagaagaaaatgatgtcagtgaaagctgaagcagttaaaatgtcagtaagctgggcagattttaatgtggggatggtgggagtccatgtgacctatgtggacaggggacctacccaagagacaagtggcaggtcgagctcaccaccagccacccccagggccaccagcttggctgaagtaacactctcatcatccctgaagctgtggaacacagtaaatccgagaatattcaggggagcagagcagattgaagtttga

SEQ ID NO: 1436 - DNA, 3680 bp, Homo sapiens
cctggcaggcggcggctgcagggcaggtccaggggccacatggctgagggggacgcagggagcgaccagaggcagaatgaggaaattgaagcaatggcagccatttatggcgaggagtggtgtgtcattgatgactgtgccaaaatattttgtattagaattagcgacgatatagatgaccccaaatggacactttgcttgcaggtgatgctgccgaatgaatacccaggtacagctccacctatctaccagttgaatgctccttggcttaaagggcaagaacgtgcggatttatcaaatagccttgaggaaatatatattcagaatatcggtgaaagtattctttacctgtgggtggagaaaataagagatgttcttatacaaaaatctcagatgacagaaccaggcccagatgtaaagaagaaaactgaagaggaagatgttgaatgtgaagatgatctcattttagcatgtcagccggaaagttcggttaaagcattggattttgatatcagtgaaactcggacagaagtagaagtagaagaattacctccgattgatcatggcattcctattacagaccgaagaagtacttttcaggcacacttggctccagtggtttgtcccaaacaggtgaaaatggttctttccaaattgtatgagaataagaaaatagctagtgccacccacaacatctatgcctacagaatatattgtgaggataaacagaccttcttacaggattgtgaggatgatggggaaacagcagctggtgggcgtcttcttcatctcatggagattttgaatgtgaagaatgtcatggtggtagtatcacgctggtatggagggattctgctaggaccagatcgctttaaacatatcaacaactgtgccagaaacatactagtggaaaagaactacacaaattcacctgaggagtcatctaaggctttgggaaagaacaaaaaagtaagaaaagacaagaagaggaatgaacattaatacctgaaactataggaaaggttaatttgcctataattatatatacattccatagtcatcaaggaatatattgtgcagagagagtatccttgactgcttaagtcagccagttcagcatggataccaacattagcttttcttcttggttatatcatctgccaaaaatagagaacttatgatctattcatgtgtgtttcaggcttatttgggagaactaatttgaacttaatcaccacttcatctaattttagcaaggtaacagttgcccagggcagtacctgaattaactgtccatttcagtacatgtcaagtgcctttgttaggtggagaagaaatgtctctagaggaatataaatacctgatttcttgtcatcgagattcttgtactgttaaatgaatattgccttttactgctctttatggcttattggaataggagctcatttaagattgatcttggagagtttcttcttgtgattttagttcataagtatgtcacctttcattttatagtgttcatcattgagtaatggattaagtgaaaatccaggagtatccatctgcagttatgtgctgaggtgataattcatccaacatatttgttagcataaatattatgcttcagtttctgttgcaaattggtgattgtgaaattacagaaagtgattttctagtctgctttttttgtttaattcttgtaatgtaagcaataaatatggagtgtcagtagtctccttccaccccagaaatgtgttggtgtaacattctcgtttcttttaacaacctggaagtacctttcttgtgatcttcactgaggaattagaactatgatagaagttaggctgtggcaaatgggacattcgtagagtgggatagaggtggcagaatgaacctggtgtagggcaggagtatgttgtgtagttacatcaatttgatgcatgctttccatctgcactccagacggctttctcagttccaagattttgcagagagaaggagcaaaccttttcattggaaaaacagaaacaaccctcccccccattttttcccctctattcatcaaacctttatgtatctttcatcttccagttacctctaggcatttagatagtgaaatttacctttgagatataacaataagtgattaactgttcactttcagatgtaatggcaaacaattgttaaaagttattaactgatcacagatttgcctggacttcccttcccagggagggaacagaagttaggaggcaactttgggatggtgctagagcatggaaagcacagagaattggacaaacaggtctttttctcttttctctgatgttttacctttaaaagatccaacatccttaccgttggtatttttagtaaggttatagtaaatagctttacaccaggatggattctgaaatataaattctaaattatatttgttataactatattttatgttgtatgttatcaggagccatcagagaatgacctttttgtgtttggaacacttggttccatgaaaagtatgctttgtgttttaactgttaaaataatttaaaaattaattattttacataattaaagaagttaaaaactattaacattaaataatttcacaatttcaacatgtcaaacctatgaagggagataggaaacaatgagaaacttacttttgctcctttatacagaattattaactatattttactaactaaaaaactctagtattctttacctaaagtcaattggctggtaagagggagagatgcaaaattctccagctctgaacttggagctacttcacactctactcttaatggaaacttgaactaatgatagatagtatttttttcctctatttaaaatttttgtcttgattaggagatttttcagttctccatataataattttctacaatcagatctatgctgtggcatattttgctttatttaaaaatttttttttagagatgagttcttgctctgtcacctaggctggagtgcagtggcatgatcatggctcactgcagccttgaccttccagcctgccaagtagctgggattacagacaggcatgtgctattacacctggctaatttttaaagttttttttgtaaagatagggtctttctatgttgcccaggctcgtcttgagctcctggcctcaatcgatcttcctgccaaggttttggaattacaggtgtgagccaccatgcctggcctgctttgacatattttatagtgtgttaattacaaatagtcttcatatgccagaatataagagcaagtgttatctactttttagatgggaattgcagaagctgcatcaaaagtatgctttgaggtatatatagtgaaacagagcctttctgaagagaattatatcaaactaattacaaccaagaaataatagtatgaagcggatgctgtttggaggacaggaaaatttatcgggaaaattacataatccctctgattccactatccagagatagccattattattaatatttggtatgtacatccttatattattttttttttatgcatgattttgtatatatggttatttttctttccataaaaatggtattaaactgtatatactgttttgtagcctacatatttcatatagaagtatattgttaacattttccatgtcaataaatattctatggctt

SEQ ID NO: 1437 - protein, 320 aa, Homo sapiens
MAEGDAGSDQRQNEEIEAMAAIYGEEWCVIDDCAKIFCIRISDDIDDPKWTLCLQVMLPNEYPGTAPPIYQLNAPWLKGQERADLSNSLEEIYIQNIGESILYLWVEKIRDVLIQKSQMTEPGPDVKKKTEEEDVECEDDLILACQPESSVKALDFDISETRTEVEVEELPPIDHGIPITDRRSTFQAHLAPVVCPKQVKMVLSKLYENKKIASATHNIYAYRIYCEDKQTFLQDCEDDGETAAGGRLLHLMEILNVKNVMVVVSRWYGGILLGPDRFKHINNCARNILVEKNYTNSPEESSKALGKNKKVRKDKKRNEH

SEQ ID NO: 1438 - DNA, 3689 bp, Homo sapiens
ggaagactacacattttaggtatgtgattagaaaacatacttgtcagaattgtctggctggattaatttgctaatttgaccttcttcatcatttgatgtgatgccagatactaatagcacaatcaatttatcactaagcactcgtgttactttagcattttttatgtccttagtagcttttgctataatgctaggaaatgctttggtcattttagcttttgtggtggacaaaaaccttagacatcgaagtagttatttttttcttaacttggccatctctgacttctttgtgggtgtgatctccattcctttgtacatccctcacacgctgttcgaatgggattttggaaaggaaatctgtgtattttggctcactactgactatctgttatgtacagcatctgtatataacattgtcctcatcagctatgatcgatacctgtcagtctcaaatgctgtgtcttatagaactcaacatactggggtcttgaagattgttactctgatggtggccgtttgggtgctggccttcttagtgaatgggccaatgattctagtttcagagtcttggaaggatgaaggtagtgaatgtgaacctggatttttttcggaatggtacatccttgccatcacatcattcttggaattcgtgatcccagtcatcttagtcgcttatttcaacatgaatatttattggagcctgtggaagcgtgatcatctcagtaggtgccaaagccatcctggactgactgctgtctcttccaacatctgtggacactcattcagaggtagactatcttcaaggagatctctttctgcatcgacagaagttcctgcatcctttcattcagagagacagaggagaaagagtagtctcatgttttcctcaagaaccaagatgaatagcaatacaattgcttccaaaatgggttccttctcccaatcagattctgtagctcttcaccaaagggaacatgttgaactgcttagagccaggagattagccaagtcactggccattctcttaggggtttttgctgtttgctgggctccatattctctgttcacaattgtcctttcattttattcctcagcaacaggtcctaaatcagtttggtatagaattgcattttggcttcagtggttcaattcctttgtcaatcctcttttgtatccattgtgtcacaagcgctttcaaaaggctttcttgaaaatattttgtataaaaaagcaacctctaccatcacaacacagtcggtcagtatcttcttaaagacaattttctcacctctgtaaattttagtctcaatctcacctaaatgaatcaggtctgccctttatcttgcccttttcattctaccaacagatctgcactttgaagtcaatggtaaattactccagtgaataatagcagtataatatgacttgataatatttttgtaaacttgtagtcataatagtactatattcttcttagtcctcacctcttccttgtcttttagatcttaatttcatgctgattacaaaaatccagttttgttttctttctatgttccatgcataatacagtcttaagtgaatttctcttttttaattttatcgtaatagaaacttatccagtttgaaaatcattccctaaagcatgcaataggaaaaagaacctcctggctgggactgcccaactctgttctgatcagtgggtgggtgaggtagggtttgagttggcaagagcagggaacgggcatgtgcccaggtgagctcctgtgtgtgtccagattttatattcctaatcccagtaaggaagaaagcgtagtgtgggagaggagagagctgatgactgcagttctcaaaggtcctcagtgaagttattttggaggccctggtggtcacaggatcagaaggcaagggataggcagtggtcaccaatggttgaaagtatggcttgtcccatttcttcctgttctctttttctagcttccacatcagcttccttttttgagaacatatagaagaagaaggctaagagatggtgaagagactgcatgattaaactagatagacctggtatacagtcactgaactagtagatgtcaataattattatttttaaaaatttttatttgttggccgggcatggtggctcacgcctgaaatcccagcactttgggaggccaaggtgggcggatcatgaggtcaggagatcgagaccatcctggccaacatggtgaaaccccatctgtactaaaatacaaacaagtagctggttgtggcgccgcatgcctgtagtcccagctactcgggaggctgaggcaggggaattgcttgaacccgggaggcggagttttgccagcctggcaacagagcaagactctgtctaaaaagaaaaaaaaatttttttgtttgagacagcatcttgctctgtctcccaggctggagcgtagtaatgcaatcatagctcactgcagcctggaactccttggctcaagcaatcctgctgccttggcctcccaagtatgtgggactacaggtactcgccaccacacctggataattaaaaaattatttctgtagagatgaagtctcactgtgttgcccagcctgggtgtcaataattattttttaaaaaaaatttttaaaaaggttttttgagacagattcttgctctgtcacccaggctggagtgcagtagcatgatcagggatcactgcaacctctgcctcctgggttcaagcgattcttgtgcctaagccacctgagcagctgggattgcaggtgcatgccaccatgcctggctaattttggtatttttagtagagatgaggttttgccattttggtcaggctggaattttttttttttttaattttgataagacagggtattgccgtgttggccagactggtctcaaactcctgggctgaaacaatcctcccgccttggcctcccaaagtgctgggattataggcacaagacaccacaataattattgcctgtatgtcaattattattttaaaatattgttgtatttacttaatgtctttaatgcatttgcccaatattttacattgttactgctcagaggtattcctttattatgtggttagcataggttatactttgctgacgattcacattttattagtttggttatgttttgtccttttaaaacattttcttttgagatgggggtcttgctctgttgcccacgcaggagtgcagtggcatgctctcagctcactgcagccctgactgcctaggctccagcaatcttcttacgtcagcctccagagtagctgggaccgcaggcacttgccaccacgccccactaaaaattttttaaattgttgcctttcttgaagtgttctctgcctgtctttgtcacaaaatttcatttttctcatagttaatttcatctctccggtaagattttattggtgtttcttttataactttgcagttcttacaccgtttggtgattttcatgtttcttagaaactttaaacctttaacttcaaacattaaaatacaagtcttttaagtacatgagtgcttagaaatgtacataatgtttatatacacttatgccttacattaaagtccaatatgagaaatacatgtttaacattcaataataattttaaaaatttgagaaataaactctcataaatgcaaaaaaaaaaaaaaaaaaa

SEQ ID NO: 1439 - protein, 390 aa, Homo sapiens
MPDTNSTINLSLSTRVTLAFFMSLVAFAIMLGNALVILAFVVDKNLRHRSSYFFLNLAISDFFVGVISIPLYIPHTLFEWDFGKEICVFWLTTDYLLCTASVYNIVLISYDRYLSVSNAVSYRTQHTGVLKIVTLMVAVWVLAFLVNGPMILVSESWKDEGSECEPGFFSEWYILAITSFLEFVIPVILVAYFNMNIYWSLWKRDHLSRCQSHPGLTAVSSNICGHSFRGRLSSRRSLSASTEVPASFHSERQRRKSSLMFSSRTKMNSNTIASKMGSFSQSDSVALHQREHVELLRARRLAKSLAILLGVFAVCWAPYSLFTIVLSFYSSATGPKSVWYRIAFWLQWFNSFVNPLLYPLCHKRFQKAFLKIFCIKKQPLPSQHSRSVSS

SEQ ID NO: 1440 - DNA, 4869 bp, Homo sapiens
aatgatttcctcagtgattacgtacagagcgagtccctgcgggttaggggccccctctggagccatcctgatggctttgggggccttgcttccattttccattattatgtggactaccggagcgacagcgcagtccaagaccttgcaggatgtctcgccgcaagcaagcgaaaccgagatccctcaaagaccccaactgtaaacttgaagacaagactgaagatggagaggcactagattgtaagaagaggccggaagacggggaggagttggaagacgaagctgtgcacagctgtgacagctgcctccaggtgtttgaatcgctgagcgatatcacagaacacaagattaatcaatgtcaactgacagatggagtggatgttgaagatgatccgacttgctcttggccagcttcctcaccttctagcaaggatcagacttcccctagccatggagaaggttgcgattttggagaggaagaaggtggccctgggcttccatacccgtgtcaattctgtgacaagtcgtttagccgcctcagctacctaaagcaccatgagcagagtcacagtgacaaactgcctttcaaatgcacctactgcagtaggctgttcaaacacaagcgcagccgagatcgccacataaaactccacaccggggacaagaagtaccactgcagtgaatgtgatgctgcgttttccagaagtgatcacttgaagatccacttaaagactcacacgtccaacaagccatataaatgtgccatttgtcgccgtgggtttctgtcctctagttccttacacggacacatgcaggttcatgagaggaacaaggacggctctcagtccggttccaggatggaggactggaagatgaaggacactcagaagtgcagtcagtgtgaggaaggctttgacttcccggaagacctccaaaaacacattgcagagtgccaccccgaatgctccccaaatgaggaccgagcggccctccagtgtgtctactgccacgagctcttcgtagaggagacctccctcatgaaccacatggagcaggtgcatagcggggagaagaagaactcatgcagcatttgttctgagagtttccacacagttgaggaactgtacagccacatggacagtcaccagcaaccggagtcatgcaatcacagcaacagcccttccctggtcacggtgggctatacctccgtgtccagtacgactccagattccaacctctcagtggacagctcaaccatggtggaagctgccccgccaatcccaaagagtcgagggaggaagagggccgctcaacaaacccctgacatgactggtccctcgagtaaacaagcaaaagttacctacagctgtatttactgcaacaaacaattattttcaagtcttgcagttctgcagattcacctgaaaactatgcacttagataagccagaacaggcccatatttgtcagtattgcttggaggtcctgccctcactctataacctaaatgaacatcttaagcaagtgcatgaagctcaggacccaggtctgattgtttctgccatgcctgccattgtctaccagtgtaacttctgttccgaagttgtcaacgacctcaacactcttcaggaacacatccgatgttctcatggatttgcaaaccctgcagctaaagatagtaatgcattcttttgtccccattgctatatggggtttctcactgactcttccctggaagagcatattagacaggttcattgtgacctcagtggctcccgatttgggtctccagtgcttgggactcccaaagaaccagtagtagaagtctattcttgttcctattgtacaaattcgccaatattcaacagcgttcttaaactgaacaagcatatcaaagagaatcataaaaacattcccttggccctgaattatatccacaatgggaagaaatccagggccttaagccccctatctcctgtggccatagagcagacatctcttaagatgatgcaggcagtaggaggtgcacctgcacgccccactggagaatatatctgtaatcaatgtggtgctaagtacacatccctagacagctttcagactcacctaaaaactcatctcgacactgtgcttccaaaattgacctgtcctcagtgcaacaaggaattccccaaccaagaatccttgctgaagcatgttaccattcactttatgatcacttcaacgtattacatctgtgagagttgtgacaagcaattcacatcagtggatgaccttcagaaacacctgctggacatgcacacctttgtcttctttcgctgcaccctctgccaggaagtttttgactcaaaagtctccattcagctccacttggctgtgaagcacagtaacgaaaagaaagtctataggtgcacatcttgcaactgggacttccgcaacgaaactgacttgcagctccatgtgaaacacaaccacctggaaaaccaagggaaagtgcataagtgcattttctgcggtgagtcctttggcaccgaggtggagctgcaatgccacatcaccactcacagtaagaagtacaactgcaagttctgtagcaaagccttccatgcgatcattttgttagaaaaacacttgcgagaaaaacactgtgtattcgaaaccaagacacccaactgtggaacaaatggagcttccgagcaagtgcagaaagaggaagtggagctgcagactttgctgaccaacagccaggagtcccacaacagtcacgatgggagcgaagaagacgttgacacctctgagcctatgtacggctgcgacatttgtggggcagcctacactatggaaactttgctgcagaatcaccagctccgagaccacaacatcagacctggagaaagtgccatcgtgaaaaagaaagctgagctcattaaagggaattacaagtgcaacgtgtgctctcgaaccttcttctccgaaaatggcctccgggaacatatgcagacccacctaggccctgtcaaacactacatgtgccctatttgcggagagcggtttccctcccttttaactcttactgaacacaaagtcacgcatagtaagagtcttgatactggaaactgccggatttgcaagatgcctctccagagtgaagaggagtttttagagcattgccaaatgcaccctgacttgaggaattccctgacaggctttcgctgcgtggtgtgcatgcagacagtgacctccaccttggaactcaaaatccatgggacgttccacatgcaaaagacagggaatgggtctgcagttcagaccacagggcggggccagcacgtccaaaaactgtataagtgcgcatcttgcctcaaagaattccgttccaagcaagatctggtgaaacttgatatcaatggcctgccatatggtctgtgtgccggctgcgtgaatctcagtaagagcgccagcccaggcattaacgtccctcccggcacgaatagaccaggcttgggccagaatgagaatctgagtgccattgaggggaaaggcaaggtggggggactgaagacacgctgctctagctgcaacgttaagtttgagtctgaaagtgaactccagaaccacatccaaaccatccaccgagagctcgtgccagacagcaacagcacacagttgaaaacgccccaagtatcaccaatgcccagaatcagtccctcccagtcggatgagaagaagacctatcaatgcatcaagtgtcagatggttttctacaatgaatgggatattcaggttcatgttgcaaatcacatgattgatgaaggactgaaccatgaatgcaaactctgcagccagacctttgactctcctgccaaactccagtgccacctgatagagcacagcttcgaagggatgggaggcaccttcaagtgtccagtctgctttacagtatttgttcaagcaaacaagttgcagcagcatattttctctgcccatggacaagaagacaagatctatgactgtacacaatgtccacagaagtttttcttccaaacagagctgcagaatcatacaatgacccaacacagcagttagtgcaagtacagtctctcaaggagaattgattttgtggcacaaaaagggaacatgttttactctttgcacgaaactttcattgttaatgtatattattcagaaacattgtattgtaccataaaacttgtattatcaaactgttggatgttcatgtgtttgaacttttgcgcaccggatagaccccttgtatataaagtgttgcacatgtattatgtcgtctgatactaaaatggtcttataaagacaagtggacttgggccctattcaggcaagattaaaaaaaaaaaagactatgaccaaaatggcttaagataaagtatttttaaggaagaaagattaaaaacaactgttatacatgagactatggttggacttccttttctttacacttaagcctagaatttctctttaggtatatcagcgcttaaatccaagactattttttattgctgaagattcttgcaaaccatgaagagatgttctcacagaacagaaccccacagctggataaggcccgtatatatatatttgtaagccttgcaatgtgacaggtagcatcactatatatgcaatagttgttatgtagactgtcaaagaatttttttttccctggatacatttgaagctttgagtgttcaaggttttccttaatgatttcacgcagccaaattcttgaatcagttgaactaacctgtatgttactgttattaatgtttactctgcagtctgaacctggagattactggaattgttttccaagaggaaataaattcagtttaccatt

SEQ ID NO: 1441 - protein, 1311 aa, Homo sapiens
MSRRKQAKPRSLKDPNCKLEDKTEDGEALDCKKRPEDGEELEDEAVHSCDSCLQVFESLSDITEHKINQCQLTDGVDVEDDPTCSWPASSPSSKDQTSPSHGEGCDFGEEEGGPGLPYPCQFCDKSFSRLSYLKHHEQSHSDKLPFKCTYCSRLFKHKRSRDRHIKLHTGDKKYHCSECDAAFSRSDHLKIHLKTHTSNKPYKCAICRRGFLSSSSLHGHMQVHERNKDGSQSGSRMEDWKMKDTQKCSQCEEGFDFPEDLQKHIAECHPECSPNEDRAALQCVYCHELFVEETSLMNHMEQVHSGEKKNSCSICSESFHTVEELYSHMDSHQQPESCNHSNSPSLVTVGYTSVSSTTPDSNLSVDSSTMVEAAPPIPKSRGRKRAAQQTPDMTGPSSKQAKVTYSCIYCNKQLFSSLAVLQIHLKTMHLDKPEQAHICQYCLEVLPSLYNLNEHLKQVHEAQDPGLIVSAMPAIVYQCNFCSEVVNDLNTLQEHIRCSHGFANPAAKDSNAFFCPHCYMGFLTDSSLEEHIRQVHCDLSGSRFGSPVLGTPKEPVVEVYSCSYCTNSPIFNSVLKLNKHIKENHKNIPLALNYIHNGKKSRALSPLSPVAIEQTSLKMMQAVGGAPARPTGEYICNQCGAKYTSLDSFQTHLKTHLDTVLPKLTCPQCNKEFPNQESLLKHVTIHFMITSTYYICESCDKQFTSVDDLQKHLLDMHTFVFFRCTLCQEVFDSKVSIQLHLAVKHSNEKKVYRCTSCNWDFRNETDLQLHVKHNHLENQGKVHKCIFCGESFGTEVELQCHITTHSKKYNCKFCSKAFHAIILLEKHLREKHCVFETKTPNCGTNGASEQVQKEEVELQTLLTNSQESHNSHDGSEEDVDTSEPMYGCDICGAAYTMETLLQNHQLRDHNIRPGESAIVKKKAELIKGNYKCNVCSRTFFSENGLREHMQTHLGPVKHYMCPICGERFPSLLTLTEHKVTHSKSLDTGNCRICKMPLQSEEEFLEHCQMHPDLRNSLTGFRCVVCMQTVTSTLELKIHGTFHMQKTGNGSAVQTTGRGQHVQKLYKCASCLKEFRSKQDLVKLDINGLPYGLCAGCVNLSKSASPGINVPPGTNRPGLGQNENLSAIEGKGKVGGLKTRCSSCNVKFESESELQNHIQTIHRELVPDSNSTQLKTPQVSPMPRISPSQSDEKKTYQCIKCQMVFYNEWDIQVHVANHMIDEGLNHECKLCSQTFDSPAKLQCHLIEHSFEGMGGTFKCPVCFTVFVQANKLQQHIFSAHGQEDKIYDCTQCPQKFFFQTELQNHTMTQHSS

SEQ ID NO: 1442 - DNA, 3055 bp, Homo sapiens
gcgggtggtgccggtggcggcggcgggggagcgcgggacaggaggcttcggggaagatggacccggcgccctcgctgggctgcagcctcaaggatgtgaagtggagctcggtggccgtgccgctcgacctcctggtcagcacttaccggctgccccagatcgcgcgcctggacaacggagagtgcgtagaagggctgcgggaaaatgactatctgctgattcattcctgccgccagtggaccaccatcactgcccacagcttggaggagggtcactatgtcattgggccaaagatagagattccggtacattatgcagggcaattcaagctgctggaacaagaccgagatataaaggagccagtgcaatatttcaacagtgtggaggaggtggctaaggcatttcctgaacgcgtgtacgtcatggaggatatcacattcaacgtgaaggttgcttcaggtgaatgcaatgaagacactgaagtttacaacatcaccctgtgtactggggatgaactcactctaatggggcaggcagaaatcctttatgcaaagacattcaaggaaaagtcacgactcaacacaatcttcaaaaagattgggaagctcaattccatcagcaagctgggaaaaggcaaaatgccgtgcctcatttgtatgaatcaccggaccaacgaaagcattagccttccattccagtgcaagggcagatttagcacccgaagtcccctggaacttcagatgcaagagggcgaacacaccatccgcaacattgtggagaaaaccaggcttcctgtgaatgtgactgtgccaagccctccaccgagaaacccatacgacctccacttcatccgtgaggggcaccgctataagtttgtgaacatccagaccaagacggtggtggtttgctgtgtgctgcggaacaacaagatcctccccatgcactttcctttgcacttgactgtccccaagttcagcctcccagaacacctggtgaagggagagagctggcccgaaaccctggtccatcactggctaggtatctgccaagaacagttcgacatcgatgagtattcacgggctgtccgtgatgtgaaaaccgactggaatgaagaatgcaagagccccaagaagggtcggtgctctggccacaaccacgtgcccaattcgctcagctacgcccgcgatgagctcacccagtccttccaccgactctcggtctgtgtgtatggcaacaatctccatggcaacagtgaggtgaaccttcatggttgcagggacctggggggagattgggctccctttcctcatgacatcctgccctatcaggactctggagatagtgggagcgactaccttttcccagaagctagtgaagaatcagcaggcatcccgggaaagtcagaacttccctacgaagagctgtggctggaggaaggcaagcccagccatcagcctctcactcgctctctgagcgagaagaacagatgtgatcagtttagaggttctgtccgatccaaatgtgcgacttctcctcttcccatccctgggactctgggagcagcagtgaagtcttcagatactgccctacctccacctccagtgcctcccaaatctgaagccgtcagagaagaatgccggctcctgaacgccccacctgttccaccccgaagcgcaaagcctttgtccaccagtccctccatccctcctcgcacagtcaagccagcgcggcaacagactcgctctcccagccccaccttgtcctactattcttcagggctacacaacatcgtcactaaaactgacacaaatccttctgaaagcactcctgtttcctgctatccatgtaaccgagtgaaaactgattctgtggacctgaaatccccgtttggaagtccttctgctgaagctgtgtcctctcggctctcatggcctaaccattattcaggagcatcagaaagccagaccaggagtgacttcctgctggatccaagcaggagttatagttaccctagacaaaagacgccaggcacacccaagagaaactgcccagcaccttttgattttgatggctgtgagctcctggccagccccactagcccagtcactgcagaattcagtagcagcgtctctggttgtcccaagtcagccagctactctctggagagcacagatgtgaaatctcttgcagctggtgtgacaaagcagagtacgtcatgccctgccttaccccccagggctccaaaactagtggaagagaaggtcgcctccgaaacatctcctttgcctctgaaaattgatggtgctgaggaagaccccaagtctgggtcaccagatctctcggaggaccagtattttgttaaaaagggcatgcaggacatcttctctgcctcctaccctttctcatctccgctccatctccagctggcccccagatcctgtggcgacggttccccatggcagccacctgctgacctatcaggactctctatagaggaagtgtccaagtcactacggttcattggtttgtccgaagatgtcatatcattctttgttactgaaaagattgatgggaacctgcttgttcagctaacggaagaaatcctctcagaggatttcaaattgagcaaattgcaggtgaagaagataatgcaattcattaatggctggaggcccaaaatatagccaaataacccccggccagcatggaacaaaactgatcaatgcgtgtgctagaaggggtgggctgggacacaatttcatgtttttgcactaaaaaccttctctgtaaatagggataagagaaactcttactatgcagattacgtttttgaatggtgaacaggctattttgtacatcaataaaaatgctgtacagaacacttggaggtgtgccttgtacgtcactcaacaaacactcagcagctgctaaaagaaaaaaaggcatgtgcagagaaatcattcttacccaagtaggtttatgtgagaaggtatgatatttattacaaaatagccaaagctgaaagacataaaaatctttaaaaaaaaaaaaaaaa

SEQ ID NO: 1443 - protein, 875 aa, Homo sapiens
MDPAPSLGCSLKDVKWSSVAVPLDLLVSTYRLPQIARLDNGECVEGLRENDYLLIHSCRQWTTITAHSLEEGHYVIGPKIEIPVHYAGQFKLLEQDRDIKEPVQYFNSVEEVAKAFPERVYVMEDITFNVKVASGECNEDTEVYNITLCTGDELTLMGQAEILYAKTFKEKSRLNTIFKKIGKLNSISKLGKGKMPCLICMNHRTNESISLPFQCKGRFSTRSPLELQMQEGEHTIRNIVEKTRLPVNVTVPSPPPRNPYDLHFIREGHRYKFVNIQTKTVVVCCVLRNNKILPMHFPLHLTVPKFSLPEHLVKGESWPETLVHHWLGICQEQFDIDEYSRAVRDVKTDWNEECKSPKKGRCSGHNHVPNSLSYARDELTQSFHRLSVCVYGNNLHGNSEVNLHGCRDLGGDWAPFPHDILPYQDSGDSGSDYLFPEASEESAGIPGKSELPYEELWLEEGKPSHQPLTRSLSEKNRCDQFRGSVRSKCATSPLPIPGTLGAAVKSSDTALPPPPVPPKSEAVREECRLLNAPPVPPRSAKPLSTSPSIPPRTVKPARQQTRSPSPTLSYYSSGLHNIVTKTDTNPSESTPVSCYPCNRVKTDSVDLKSPFGSPSAEAVSSRLSWPNHYSGASESQTRSDFLLDPSRSYSYPRQKTPGTPKRNCPAPFDFDGCELLASPTSPVTAEFSSSVSGCPKSASYSLESTDVKSLAAGVTKQSTSCPALPPRAPKLVEEKVASETSPLPLKIDGAEEDPKSGSPDLSEDQYFVKKGMQDIFSASYPFSSPLHLQLAPRSCGDGSPWQPPADLSGLSIEEVSKSLRFIGLSEDVISFFVTEKIDGNLLVQLTEEILSEDFKLSKLQVKKIMQFINGWRPKI

SEQ ID NO: 1444 - DNA, 4942 bp, Homo sapiens
gctgcggctgcggcctcccctgcgcgcagctacccgggcgtcccggcccgcggccccgctaaccccggggcccgcgcccccgcggcagggatgcatcatggccacgctggcttgccgggtgcagttcttggacgacacggaccctttcaacagcaccaacttccccgagcccagccggccgccgctgttcacgttccgcgaggacctcgcgctcggcacccagctggcgggggtccataggctgctgcaggcgccgcacaagctggatgactgtactctgcagctctctcacaatggcgcctacctggatttggaggccaccctggcagagcagcgggatgagttggaaggcttccaggatgacgccgggcggggcaagaagcacagcatcatcctaaggacgcagctgtctgtgagggtccatgcctgcatcgaaaaactatacaactccagcggacgagatttgagaagggccctcttctccctgaagcagatatttcaggatgacaaggatttggtgcatgaatttgtagtggctgaaggtctgacatgtttgatcaaggtgggagctgaggctgatcagaactatcagaactacatcttaagggctttgggccagattatgttgtatgtggatggaatgaatggagtaataaaccgcaatgaaaccattcagtggctgtacactctcattgggtcaaagttccgcctggtggtgaagacagccctgaagctgctgctcgtctttgtagagtactcggagtccaacgcacctctcctaattcaggctgtcactgctgttgacacgaaaagaggggtcaaaccttggtcaaatatcatggaaatcctggaggaaaaagatggagttgatacggagctactggtttatgcaatgactttggtgaacaagacgttatcaggactaccagaccaagacaccttctacgacgtcgtggactgcctggaggagctgggcattgctgctgtgtcccagaggcacttgaacaagaaagggactgacctggacttagtggagcaactcaacatttatgaggtggcgctcaggcacgaggatggcgatgagaccacggagccaccccccagtgggtgccgggaccggaggagggccagcgtgtgttccagtggcggaggcgagcaccggggcctggaccgcagaaggagccgcaggcactcggtgcagagcatcaagagcaccctgtcggcccccaccagtccctgctcccagtcagctcccagcttcaagcccaaccaagtgcgagatctgcgtgaaaaatacagcaattttggcaataactcttatcactcctcaagaccctcatctggatccagtgtgcccaccacccccacatcatccgtctcacccccacaggaggccaggttggaaaggtcatcaccgagtggtcttctcacatcatccttcaggcagcaccaagagtcactggcagcagagagagagaggcggcggcaggagagagaagaaaggttgcagagaatagagcgggaagaaagaaacaaattcagccgagattatttagacaaaagagaggagcaaaggcaagcaagagaagaaagatacaaatacttggaacagttggcagctgaggagcacgagaaggagctgagaagccggagtgtgagccggggcagagccgacctctccttggacctgacctcgccagcagccccagcctgcctggctcctctgagccatagcccctcatcttcagactctcaagaggctctcacggtgtctgcctcctccccaggaacccctcaccatccccaagcaagtgccggggatcctgaacccgaatcagaggcagaaccggaagcagaggcaggggcggggcaggttgctgatgaagctggccaggacatagcctctgcccacgagggtgcagagactgaagtggagcaggcactagagcaagagccggaagaaagagcctccctcagtgaaaaagagaggcagaacgagggggtgaacgagagggacaactgctctgcctccagcgtctcgtcctccagcagcacgttggagagggaggagaaggaggacaagctctccagggacaggacaactggtttgtggcccgcaggtgtccaggatgcaggtgtaaatggacagtgtggcgacatcctcaccaacaaacggttcatgcttgacatgctgtatgcccataacaggaagtctccggatgatgaggagaagggggatggggaggctgggaggacccagcaggaggcagaggcggtagccagccttgctaccaggatatccaccctgcaggccaactctcagacccaggatgagagtgtcaggagggtggatgtcggctgtttggacaatcggggcagtgtgaaagcatttgctgagaaattcaacagtggggacctggggagaggttccatctcccctgatgctgagcccaatgacaaggtcccagaaacagcgccggtgcagccgaagacagagtctgattacatctgggaccagctcatggccaatccaagagagctcagaatccaagacatggatttcactgacctgggggaggaggatgacattgatgtcctagatgtggacctgggtcacagggaggcccctgggccacctcccccacccccacccacctttctgggtttgccgcccccaccccctccgcccctgttggacagcattcctccccctcctgtccctggtaatttattggttcctcctcctccagtgttcaacgctcctcagggcttagggtggtcccaggtacccaggggtcagcccacattcactaagaaaaagaagaccatccgtttgttctggaatgaagttcggccttttgactggccatgtaaaaacaaccgacgctgcagagaattcctgtggtcaaaactggaacccattaaggtggacacttccagactggagcacctgtttgagtctaaatccaaggaactgtctgtctcaaagaaaactgctgcagatggaaaaaggcaagagatcattgttctggattccaagaggagtaacgccatcaatattggtctgacggtgctgccccctccaaggacgattaagatcgccattttgaattttgatgagtatgccttaaacaaagaaggaatcgagaaaattctaacgatgattcccaccgatgaggagaagcagaaaatccaggaagctcagctggccaaccctgaaatccccctgggcagtgcagagcagttcctcctcaccctgtcctccatcagcgagctctctgcacgacttcacctctgggcattcaaaatggattatgaaactacagaaaaggaagtagcagaaccactcctggacctgaaggaaggaatagaccagttggagaacaataaaaccttgggctttatcctgtctactctcttagccattgggaactttctaaatggaactaatgccaaagcgtttgagttaagctacctcgagaaggttccagaagtcaaagacacagtgcacaagcagtcgcttctccaccatgtgtgcaccatggtggtagaaaacttcccagacagctccgatctgtactcggagatcggggccatcaccaggtcagccaaggttgactttgatcaacttcaggataatttatgtcagatggagagaagatgcaaagcttcatgggatcacctcaaggcaattgcaaaacatgaaatgaaaccagttttaaaacaacggatgtcagagttcctgaaagactgtgcagagcgaattataattttaaagattgtccatagaaggataatcaacagattccactcctttttactctttatgggccatccaccttatgcaattcgggaagtgaacataaacaaattctgcaggattattagtgaatttgcactagagtatcgcacaaccagggaaagggttttgcagcagaaacagaaacgggccaaccacagagagagaaataagaccagagggaagatgatcaccgattctggcaagttctccggcagttctccggcgcccccaagccagccgcagggtctgagctatgcggaggacgcggctgagcacgagaacatgaaggctgtgctgaaaacctcgtccccctccgtggaggacgccacccccgcgctgggcgtccgcacacgcagccgagcaagccgaggatccactagttcctggactatgggaactgatgactcgcccaatgtcacagatgatgcagctgatgagatcatggaccgcatcgtcaagtcagccacccaagtgcccagtcagcgagtggtgccgagggagaggaaacgatcccgggccaaccggaaatctttgcgaagaaccctgaagagcggcctgaccccagaagaagccagagccctgggcttggttggcacctcggagttgcagctgtgacactcataggttactcccaggagtgtgctgagcagaaggcaagctcttgctggatgaaacccctccaggtggggttggggagacttgatattcacatccaacagtttgaaaagggagagctcaattcccagcgtcaccccatggcttgtgttgcctgctacgcattgacttggatctccaggagtcccctgcacataccttctccatcgtgtcagctgtgtttctcttgattccgtgacacccggtttattagttcaaaagtgtgacaccttttctgggcaaggaacagcccctttaaggagcaaatcacttctgtcacagttattatggtaatatgaggcaatctgattagcttcacagactgagtctccacaacaccaaaatatccagatgtaaaccccaaacttgtacacaaaagaaagcacagattgtttacctgttgtggattttagatgtaacaaatgtttatacaaatacatacatgtacaccatgtttcaaatactaaataaatagagtttaatgcc

SEQ ID NO: 1445 - protein, 1439 aa, Homo sapiens
MATLACRVQFLDDTDPFNSTNFPEPSRPPLFTFREDLALGTQLAGVHRLLQAPHKLDDCTLQLSHNGAYLDLEATLAEQRDELEGFQDDAGRGKKHSIILRTQLSVRVHACIEKLYNSSGRDLRRALFSLKQIFQDDKDLVHEFVVAEGLTCLIKVGAEADQNYQNYILRALGQIMLYVDGMNGVINRNETIQWLYTLIGSKFRLVVKTALKLLLVFVEYSESNAPLLIQAVTAVDTKRGVKPWSNIMEILEEKDGVDTELLVYAMTLVNKTLSGLPDQDTFYDVVDCLEELGIAAVSQRHLNKKGTDLDLVEQLNIYEVALRHEDGDETTEPPPSGCRDRRRASVCSSGGGEHRGLDRRRSRRHSVQSIKSTLSAPTSPCSQSAPSFKPNQVRDLREKYSNFGNNSYHSSRPSSGSSVPTTPTSSVSPPQEARLERSSPSGLLTSSFRQHQESLAAERERRRQEREERLQRIEREERNKFSRDYLDKREEQRQAREERYKYLEQLAAEEHEKELRSRSVSRGRADLSLDLTSPAAPACLAPLSHSPSSSDSQEALTVSASSPGTPHHPQASAGDPEPESEAEPEAEAGAGQVADEAGQDIASAHEGAETEVEQALEQEPEERASLSEKERQNEGVNERDNCSASSVSSSSSTLEREEKEDKLSRDRTTGLWPAGVQDAGVNGQCGDILTNKRFMLDMLYAHNRKSPDDEEKGDGEAGRTQQEAEAVASLATRISTLQANSQTQDESVRRVDVGCLDNRGSVKAFAEKFNSGDLGRGSISPDAEPNDKVPETAPVQPKTESDYIWDQLMANPRELRIQDMDFTDLGEEDDIDVLDVDLGHREAPGPPPPPPPTFLGLPPPPPPPLLDSIPPPPVPGNLLVPPPPVFNAPQGLGWSQVPRGQPTFTKKKKTIRLFWNEVRPFDWPCKNNRRCREFLWSKLEPIKVDTSRLEHLFESKSKELSVSKKTAADGKRQEIIVLDSKRSNAINIGLTVLPPPRTIKIAILNFDEYALNKEGIEKILTMIPTDEEKQKIQEAQLANPEIPLGSAEQFLLTLSSISELSARLHLWAFKMDYETTEKEVAEPLLDLKEGIDQLENNKTLGFILSTLLAIGNFLNGTNAKAFELSYLEKVPEVKDTVHKQSLLHHVCTMVVENFPDSSDLYSEIGAITRSAKVDFDQLQDNLCQMERRCKASWDHLKAIAKHEMKPVLKQRMSEFLKDCAERIIILKIVHRRIINRFHSFLLFMGHPPYAIREVNINKFCRIISEFALEYRTTRERVLQQKQKRANHRERNKTRGKMITDSGKFSGSSPAPPSQPQGLSYAEDAAEHENMKAVLKTSSPSVEDATPALGVRTRSRASRGSTSSWTMGTDDSPNVTDDAADEIMDRIVKSATQVPSQRVVPRERKRSRANRKSLRRTLKSGLTPEEARALGLVGTSELQL

SEQ ID NO: 1446 - DNA, 2627 bp, Homo sapiens
gtacgccccctccccccgtccctatcggcagaaccggaggccaaccttcgcgatcccttgctgcgggcccggagatcaaacgtggcccgcccccggcagggcacagcgcgctgggcaaccgcgatccggcgccggactggaggggtcgatgcgcggcgcgctggggcgcacaggggacggagcccgggtcttgctccccattggccgccacctcggcgggaggggccgcctccggctcgtggcacctggcgtctcccctccgcggggaaatcggcggctacccggcaccggcgcctggaggtaaaggtacccgggggtggggaaggcccctggccgcggcagagctccctgccaccggccctgtcctgcttgccgccccagcgcctgcgacgcttggatgcccccagctccggccgcgccaaccagaaactttgcccctcgaagtcccccgcctgcctgaccgcaccgtgaggcgccaagtcggccgcgcgccccccggggccccggaaccccgcgagtcattgcctggccgccccgtaccccgcgcccgcggcgcccggtagccaggatgcgctacgcggacccctcggccaaccgggatttgttggggagccgaactttgctcttcatcttcatctgcgcctttgccttggtgaccttgctgcaacagatcctgtatggcaggaactacattaagaggtactttgaattttatgaggggccttttgaatataactccacaagatgcctggagctgaggcacgaaatattggaagtgaaggtgctgtccatggtgaagcagtcagagctgttcgacaggtggaagagcctccagatgtgcaaatgggcgatgaacatctctgaggccaaccagttcaagtctactctgtccaggtgctgcaacgcccctgcctttctcttcaccacccagaagaacactcccctggggacaaagctcaagtatgaggtggacaccagtggcatctaccacatcaaccaggagatcttccgcatgtttcccaaggacatgccctactaccggtcccagtttaagaagtgtgctgtagtgggcaacggaggcatcttgaagaacagccgctgcgggagggagatcaacagcgccgacttcgtcttccggtgcaacctgccccccatctcagagaagtacaccatggatgtgggggtgaagacggatgtggtcactgtgaaccccagcatcatcacagagaggttccacaagctggagaagtggcggcggccgttctatcgcgtgctgcaggtgtacgagaacgcgtcggtgctgctgcctgccttctacaacacgcgcaacaccgacgtgtccatccgcgtcaagtacgtgctggacgacttcgaatcgccgcaagctgtctactacttccatccgcagtacctggtcaacgtgtcgcgctactggctcagcctgggggtgcgcgccaagcgcatcagcaccggcctcattctggtcactgcggcgctggagctctgtgaggaggtgcacctctttggcttctgggccttccccatgaacccctcgggcctctacatcactcaccactactatgacaacgtcaagccgcgtcccggcttccacgccatgccctctgagatcttcaacttcctgcacttgcacagccgaggcatcctccgcgtgcacacgggcacctgcagctgctgctgatggctgccagccaggctgcccggcaagcggcgccccctctcctgctgtccctcctggtggaactgggagccccgaaccgggcagcgtggggtcctggcgttcaggctgtctctccctccattgttcagctctgtacttggatcctggggtagggaggcagggttaggaaccggggcagagtcagctctgtgctgagcctcctggcctggcccccaccggtgcatccgcccagtgcgtccacctgccctggctagcatgctgctgggccacaccccaagatcaggggccctggggacggcaagtgaataaagcacatttccacccaattttgtcatccgagagagagcacaaactgcaggcccttgttgcagctgaaggaagaccctacagagaatggaattgagagtggagacaggacacttcacaggacacttgagcacagtcaagattttattcacacttttggttcctgtgttttatatcgaagacttagctatgaattgctatctaaatctcagagcttagaagccaacccagtgactagaccttccagtgaagaaagtgatctcaagaggtccagggacttaacagccaagccacaccacccgacaggttcttctgtgacaccgagagatctaacccaaggcctgggttatgtcttagtcgagacatcatcatctgagaagcaccacatcctttcagacacatcctcggacacacatgcggtcttggtgcccccaggttcaatcctgcgttagctcttttgatgagaaggaaataaaccaaaccagccacttgcactatggcttccaagccaatgttattgactcaataagtgcttagcaattggcttcctcttttgtcttcctattttcagctccatttaaaccaggagttatttataaagacctcttcctctcatgtaaaa

SEQ ID NO: 1447 - protein, 376 aa, Homo sapiens
MRYADPSANRDLLGSRTLLFIFICAFALVTLLQQILYGRNYIKRYFEFYEGPFEYNSTRCLELRHEILEVKVLSMVKQSELFDRWKSLQMCKWAMNISEANQFKSTLSRCCNAPAFLFTTQKNTPLGTKLKYEVDTSGIYHINQEIFRMFPKDMPYYRSQFKKCAVVGNGGILKNSRCGREINSADFVFRCNLPPISEKYTMDVGVKTDVVTVNPSIITERFHKLEKWRRPFYRVLQVYENASVLLPAFYNTRNTDVSIRVKYVLDDFESPQAVYYFHPQYLVNVSRYWLSLGVRAKRISTGLILVTAALELCEEVHLFGFWAFPMNPSGLYITHHYYDNVKPRPGFHAMPSEIFNFLHLHSRGILRVHTGTCSCC

SEQ ID NO: 1448 - DNA, 2360 bp, Homo sapiens
gacgggcccggctgtagcggcggcggccgcggcgtcttaagcggcgcccagtgcaggatggtgctggaggcggcggcggccgtggtggcggcagcgtcgttggcggcagcgggagtgggtgcggcggcagcggcggcggcgcccgcgggtggtataaaatggcggatttcgaagagttgaggaatatggtttctagttttagggtttctgaactacaagtattactaggctttgctggacggaataaaagtggacgcaagcatgacctcctgatgagggcgctgcatttattgaagagcggctgcagccctgcggttcagattaaaatccgagaattgtatagacgccgatatccacgaactcttgaaggactttctgatttatccacaatcaaatcatcggttttcagtttggatggtggctcatcacctgtagaacctgacttggccgtggctggaatccactcgttgccttccacttcagttacacctcactcaccatcctctcctgttggttctgtgctgcttcaagatactaagcccacatttgagatgcagcagccatctcccccaattcctcctgtccatcctgatgtgcagttaaaaaatctgcccttttatgatgtccttgatgttctcatcaagcccacgagtttagttcaaagcagtattcagcgatttcaagagaagttttttatttttgctttgacacctcaacaagttagagagatatgcatatccagggattttttgccaggtggtaggagagattatacagtccaagttcagttgagactttgcctggcagagacaagttgccctcaagaagataactatccaaatagtctatgtataaaagtaaatgggaagctatttcctttgcctggctatgcaccaccgcctaaaaatgggattgaacagaagcgccctggacgccccttgaatattacatctttagttaggttatcttcagctgtgccaaaccaaatttccatttcttgggcatcagaaattgggaagaattactctatgtctgtatatcttgtacggcagcttacatcagccatgttattacagagattaaaaatgaaaggtattagaaaccctgatcattccagagcactaattaaagaaaaacttactgcagatcctgatagtgaaattgctacaactagccttcgggtatccttgatgtgccctttaggaaaaatgaggctgacaatcccatgccgtgcagtgacttgtacacatctgcagtgttttgatgctgccctctatctacaaatgaatgagaaaaagcccacctggatttgtcctgtgtgtgacaaaaaagctgcctatgaaagtctaatattagatgggctttttatggaaattctcaatgactgttctgatgtagatgagatcaaattccaagaagatggttcttggtgtccaatgagaccgaagaaagaagctatgaaagtatccagccaaccgtgtacaaaaatagaaagttcaagcgtcctcagtaagccttgttcagtgactgtagccagtgaggcaagcaagaagaaagtagatgttattgatcttacaatagaaagctcttctgacgaagaggaagaccctcctgccaaaaggaaatgcatctttatgtcagaaacacaaagcagcccaaccaaaggggttctcatgtatcagccatcttctgtaagggtgcccagtgtgacttcggttgatcctgctgctattccgccttcattaacagactactcagtaccattccaccatacgccaatatcaagcatgtcatcagatttgccaggtttggattttctttcccttattccagttgatccccagtactgtcctcctatgtttttggatagtctcacctcacccttaacagcaagcagtacgtctgtcaccaccaccagctcccatgaaagcagtactcatgttagttcatccagcagcaggagtgagacaggggtcataaccagcagtggaagtaacattcctgacatcatctcattggactaaaggaggactcacttgattctgggaatcattcatcagaactgctttttcttggatctctagtctgtggaaacgttcttttttttttttttttaataatttggtatttattgaaagtcagatggattcttttgctttctgaggggtgaacacagaagactgcaacaagaaccaaatgacatgcaaggatttttcttaattatgctgtactctcagcatcagatacattcaaccataactgtatcttcctgagagatggatttcactttcatacgttaatggatggagtctacaaatcagtgaaaaaagtttttgttaaaataaagagcaataaaatta

SEQ ID NO: 1449 - protein, 621 aa, Homo sapiens
MADFEELRNMVSSFRVSELQVLLGFAGRNKSGRKHDLLMRALHLLKSGCSPAVQIKIRELYRRRYPRTLEGLSDLSTIKSSVFSLDGGSSPVEPDLAVAGIHSLPSTSVTPHSPSSPVGSVLLQDTKPTFEMQQPSPPIPPVHPDVQLKNLPFYDVLDVLIKPTSLVQSSIQRFQEKFFIFALTPQQVREICISRDFLPGGRRDYTVQVQLRLCLAETSCPQEDNYPNSLCIKVNGKLFPLPGYAPPPKNGIEQKRPGRPLNITSLVRLSSAVPNQISISWASEIGKNYSMSVYLVRQLTSAMLLQRLKMKGIRNPDHSRALIKEKLTADPDSEIATTSLRVSLMCPLGKMRLTIPCRAVTCTHLQCFDAALYLQMNEKKPTWICPVCDKKAAYESLILDGLFMEILNDCSDVDEIKFQEDGSWCPMRPKKEAMKVSSQPCTKIESSSVLSKPCSVTVASEASKKKVDVIDLTIESSSDEEEDPPAKRKCIFMSETQSSPTKGVLMYQPSSVRVPSVTSVDPAAIPPSLTDYSVPFHHTPISSMSSDLPGLDFLSLIPVDPQYCPPMFLDSLTSPLTASSTSVTTTSSHESSTHVSSSSSRSETGVITSSGSNIPDIISLD

SEQ ID NO: 1450 - DNA, 1919 bp, Homo sapiens
gacgggcccggctgtagcggcggcggccgcggcgtcttaagcggcgcccagtgcaggatggtgctggaggcggcggcggccgtggtggcggcagcgtcgttggcggcagcgggagtgggtgcggcggcagcggcggcggcgcccgcgggtggtataaaatggcggatttcgaagagttgaggaatatggtttctagttttagggtttctgaactacaagtattactaggctttgctggacggaataaaagtggacgcaagcatgacctcctgatgagggcgctgcatttattgaagagcggctgcagccctgcggttcagattaaaatccgagaattgtatagacgccgatatccacgaactcttgaaggactttctgatttatccacaatcaaatcatcggttttcagtttggatggtggctcatcacctgtagaacctgacttggccgtggctggaatccactcgttgccttccacttcagttacacctcactcaccatcctctcctgttggttctgtgctgcttcaagatactaagcccacatttgagatgcagcagccatctcccccaattcctcctgtccatcctgatgtgcagttaaaaaatctgcccttttatgatgtccttgatgttctcatcaagcccacgagtttagttcaaagcagtattcagcgatttcaagagaagttttttatttttgctttgacacctcaacaagttagagagatatgcatatccagggattttttgccaggtggtaggagagattatacagtccaagttcagttgagactttgcctggcagagacaagttgccctcaagaagataactatccaaatagtctatgtataaaagtaaatgggaagctatttcctttgcctggctatgcaccaccgcctaaaaatgggattgaacagaagcgccctggacgccccttgaatattacatctttagttaggttatcttcagctgtgccaaaccaaatttccatttcttgggcatcagaaattgggaagaattactctatgtctgtatatcttgtacggcagcttacatcagccatgttattacagagattaaaaatgaaaggtattagaaaccctgatcattccagagcactaattaaagaaaaacttactgcagatcctgatagtgaaattgctacaactagccttcgggtatccttgatgtgccctttaggaaaaatgaggctgacaatcccatgccgtgcagtgacttgtacacatctgcagtgttttgatgctgccctctatctacaaatgaatgagaaaaagcccacctggatttgtcctgtgtgtgacaaaaaagctgcctatgaaagtctaatattagatgggctttttatggaaattctcaatgactgttctgatgtagatgagatcaaattccaagaagatggttcttggtgtccaatgagaccgaagaaagaagctatgaaagtatccagccaaccgtgtacaaaaatagaaagttcaagcgtcctcagtaagccttgttcagtgactgtagccagtgaggcaagcaagaagaaagtagatgttattgatcttacaatagaaagctcttctgacgaagaggaagaccctcctgccaaaaggaaatgcatctttatgtcagaaacacaaagcagcccaaccaaaggggttctcatgtatcagccatcttctgtaagggtgcccagtgtgacttcggttgatcctgctgctattccgccttcattaacagactactcagtaccattccaccatacgccaatatcaagcatgtcatcagatttgccaggagaacaaagaagaaatgatattaataatgaactgaagcttggaacatcttctgatactgtgcaacagtgaatacaaaataaaacaaataatttgtaaaaaaaaaaaaaaaaa

SEQ ID NO: 1451 - protein, 572 aa, Homo sapiens
MADFEELRNMVSSFRVSELQVLLGFAGRNKSGRKHDLLMRALHLLKSGCSPAVQIKIRELYRRRYPRTLEGLSDLSTIKSSVFSLDGGSSPVEPDLAVAGIHSLPSTSVTPHSPSSPVGSVLLQDTKPTFEMQQPSPPIPPVHPDVQLKNLPFYDVLDVLIKPTSLVQSSIQRFQEKFFIFALTPQQVREICISRDFLPGGRRDYTVQVQLRLCLAETSCPQEDNYPNSLCIKVNGKLFPLPGYAPPPKNGIEQKRPGRPLNITSLVRLSSAVPNQISISWASEIGKNYSMSVYLVRQLTSAMLLQRLKMKGIRNPDHSRALIKEKLTADPDSEIATTSLRVSLMCPLGKMRLTIPCRAVTCTHLQCFDAALYLQMNEKKPTWICPVCDKKAAYESLILDGLFMEILNDCSDVDEIKFQEDGSWCPMRPKKEAMKVSSQPCTKIESSSVLSKPCSVTVASEASKKKVDVIDLTIESSSDEEEDPPAKRKCIFMSETQSSPTKGVLMYQPSSVRVPSVTSVDPAAIPPSLTDYSVPFHHTPISSMSSDLPGEQRRNDINNELKLGTSSDTVQQ

SEQ ID NO: 1452 - DNA, 16142 bp, Homo sapiens
gcccccgccgcccccgggccctgatggactgaatgaaggctgcctacaccgcctatcgatgcctcaccaaagacctagaaggctgcgccatgaacccggagctgacaatggaaagtctgggcactttgcacgggccggccggcggcggcagtggcgggggcggcggcgggggcggcgggggcggcggcgggggcccgggccatgagcaggagctgctggccagccccagcccccaccacgcgggccgcggcgccgctggctcgctgcggggccctccgccgcctccaaccgcgcaccaggagctgggcacggcggcagcggcggcagcggcggcgtcgcgctcggccatggtcaccagcatggcctcgatcctggacggcggcgactaccggcccgagctctccatcccgctgcaccacgccatgagcatgtcctgcgactcgtctccgcctggcatgggcatgagcaacacctacaccacgctgacaccgctccagccgctgccacccatctccaccgtgtctgacaagttccaccaccctcacccgcaccaccatccgcaccaccaccaccaccaccaccaccagcgcctgtccggcaacgtcagcggcagcttcaccctcatgcgcgacgagcgcgggctcccggccatgaacaacctctacagtccctacaaggagatgcccggcatgagccagagcctgtccccgctggccgccacgccgctgggcaacgggctaggcggcctccacaacgcgcagcagagtctgcccaactacggtccgccgggccacgacaaaatgctcagccccaacttcgacgcgcaccacactgccatgctgacccgcggtgagcaacacctgtcccgcggcctgggcaccccacctgcggccatgatgtcgcacctgaacggcctgcaccacccgggccacactcagtctcacgggccggtgctggcacccagtcgcgagcggccaccctcgtcctcatcgggctcgcaggtggccacgtcgggccagctggaagaaatcaacaccaaagaggtggcccagcgcatcacagcggagctgaagcgctacagtatcccccaggcgatctttgcgcagagggtgctgtgccggtctcaggggactctctccgacctgctccggaatccaaaaccgtggagtaaactcaaatctggcagggagaccttccgcaggatgtggaagtggcttcaggagcccgagttccagcgcatgtccgccttacgcctggcagcgtgcaaacgcaaagagcaagaaccaaacaaagacaggaacaattcccagaagaagtcccgcctggtgttcactgacctccaacgccgaacactcttcgccatcttcaaggagaacaaacgcccgtcaaaggagatgcagatcaccatttcccagcagctgggcctggagctcacaaccgtcagcaacttcttcatgaacgcccggcgccgcagcctggagaagtggcaagacgatctgagcacagggggctcctcgtccacctccagcacgtgtaccaaagcatgatggaaggactctcacttgggcacaagtcacctccaaatgaggacaacagataccaaaagaaaacaaaggaaaaagacaccggattcctagctggggcccttcactggtgatttgaaagcacaattctcttgcaaagaaacttatattctagctgtaatcataggccaggtgttcttcttttgtttttaatggctatggagtccaagtgcaagctgaaaaattaatctcttagaaccagacactgttctctgagcatgctaagcatcccagaaacccaaatggggccttcctggagcgagttaattccagtatggtgtcaaccaagctcgggattgcttaaaatatcatccatcccacttcaggtcctgtcagcttcttgcagtcagagttcctatgagtaacaataggagtttggcctatgtaaggactctgagtttaggcttccaagatacaacaataagagaagaatctagcaacgagaatgacctcatttgctttccacatgcttagcctcattataccatgttatgtccaagttcacagccacaacatcagaatggtaattactgagcacaagttttaaatatggacgttaaaaaaaaaaatccaaggacctgtttttccaacccagacatcttttcattgaatgatttagaaagctttaagttgatccagcttacaattttttttttctttacctcctggaaatctcatatggtcttggatccgtcaaaaaaaccagtcagttcacttgcgctcaaagtatcaagcacaacaaagataaacagaagtgaggaaggttctgggttcactacatctggattttcaagacacctattgtgaagtcattagggaattgatgagaatatggcttcaagcacattttgcagtttgctacaaattctgttgtacataatgcagacgcacactcaggaggccaatttaactgttaacagtgcatggagcgaatgcagcattttaaaagatctaggtttttttaggtcattaatgtgtccttggttgatcagtcatctggtccctcctactgtgtgttatgaccaccacgtaatccattctcgctctttctgatttggggtttttcctcatccatcccattagtagggatgttttctgtgttttctagcaagaaaaaaaaatcaatcaatcaaacctgcatacatgttactcatgactgtcatctagtcctaaatctcttctgttgttgaatcatccttgcaaaacagctgaatacatctggagaaaacacagcacaccaaagaagcagaatactgcaaaccaaagacatttatgacttgtcattttctagcctaaaaatactgtgattacttttagaaatcagaaaacctctgcaactccgaatggcattcagctcttgcatttggcgcatcatcgggctgagcggaccagctacaccaaggacattagccaagccacccagaggggtggctttgccacaccagttgtcaccttcccatagcaagtggaagagcgcccacagaactctgggagattgcaaaggtcacaatgtgcatatttaccagtgaatggccccgggtggggccacgtgggggtgttcaaagcaagccaaacgctgcaatcattctttacagacacttgagactgacttttttatgaattacttagtcgaaaccaaagaaactttttctgcacctacttctgcaacaaacaaaactgtcccattaaaatgaataaataaatccgtaaatcaatggaaatcaccaccaataagaaggaagcacgccagaaaataaacgaaaacaaaaacagggagacacactgtgttcaaacagacctcttgggacattttttggaagcagattttaaagaaagggttgagacaaagatagaaataaggaagagcctcagtggctgctgcttcatttgacaactcacacggtaatcttaaagctgaagattgtctttaatttgtgcctatgcagtttttcaaaagaacacggaacagagcaacagaaacctcaacagctacaataccaaagatgaggatttctcacaccttttgtttcagttcattatctcctcttgcctggctaaaatactaatagcgccattgaactgtataaaggtaatcaattatgtttctctgagcaacaaaaggaaagggccatttatttgattttattgtttcatttcaattttgtcttatggttttttgccccaacatggaatctctcaaaagtttccatggactccaagtttaagatgttgggatattgaacagttctctctgctcagcagagggtagggaataacattatcacttgaatgttctttgcttaacccttagacttggttccttctatgttcagagtctcatcatcaggggaaggaaagggagtgagggtcagggataggggtcttggtgatgcatcctctcccgagccacagaaccaaagagtttatagaggaatttacagcctcgttttcatgtgattgctacatcctaacagggcttcatttgggggtggggggaaacatgtaaaaataattgccagtttctacttttctattagctttttaaaaatcagctgtaaagttgcatttctaaagaaagatatatataatatataaaatacatatatagatcaacttgacattggtgataaccaaaattattgctgtccaaattcatgtcttgttttggtccagtgcttcatttgctaagtattcggttcagaatttttctcatttctcatgccattccagagttaatttgccactgtggatgatttgaagtattcagatctctatggaagtttctgggacaggtttaaagtcaagatcaagcattttagcatttaacctgttgataaatggatccatggtgtacatgagttttatttgtattcggagtcatctctattctatccctcagcctcgattaaggtggtgagtgaagtgcatccaacagactcggcccagaactgggtcctgacagtggggtgctcatcttctgtaactgttgggaaggctcggtggtccattttcaccagttaaagaatatgaggccagcccagaaatctgttctccaggagctgccctgtcccatctgggtgtgccagaccccctcagtgagcaggtccaccaaagggacttctcacaggggaagcccaactcctgttgcaatgggttgatagatttcctcagggtggtaattaccaattcgtattttgacaagcctatgtgcaaccacagctggcactggggtgggcagtggtgttgggtgggatgggggagagtgtctcaatcctgaagagaaaatataaagcaggttttggggagacttctggagtcctgcccctagagagccccattgttgttctttgtgccccctcctcattccccctatgtgggtctccctatgcaggagctgtgagagaatgtgactctccacaatttttataattcatccttcctaggagattgttcattggctcttcccttgtgtccctttgtcccttgctcatactccatgtttcctttgtcaaaggactaagaaaagagcatatttcagcagaggagtgttcccatgtgggttgatttcaacttgggtatttctaaaagagtccttgtgacatgtgtccagtggaaatggttgctcttttccagactggattgaggaatggagcctgtttgatttggttagtgattctttgacatactaatctcagcgtttgggtctccagcatcctctgaagatgtctagactagtagaggctgcctttgtgacctgacattacaacattggtcaaaccagtcctctgataatcagaagaacatgtcataattgtttaaaaaaaaaaaaaaggcaagaatttctctccaaggagctttaataaatgtctcattccagataatgtcataccagagaaaagtgcttgcttttagaaaattatttacatacatatataaatatatatgtgtatctatacagttatgtatcaaaattttaagccctgcagaatttcaatttgttagaaatctaacagaaaaaaatttctatattgaaaggtaatagaatttaacccagtgagtttactcaaggatttttaaatttaagttaataatttcagagaaaataaccatttgggtgtggttatagtttagtatccattacctcaatccaaggaaaattccaggcattcctcaaccatcaggaaaaggtacagtgtgaaggaacagttctcagccaaatttcacattcttgaggcaacagaaatcaaaacactcagagccattgagtggaaaaacaatttactttattcctttacacaaataggcttgcattgtttttgttttaatgtgattttggtactagggatataattatttcattccaggaaataataaaaaaaaacagacagagccaatacatttctttttttaaaggaaacagcaacaacaataaaaactcagcaccaatatttaaaagcttttccaaaatgtaaaagaagtgtttagcttgcaccatgcataaaggtgcaggctagttgaaccaggaagcatggcacttcctctggagaaatccagaaagagttgcttctaagctcccttttccccctgcaggctcttggcaattgtaggctttagcaaatccagaataattttcaattcaagctaaaataaaatcaacatttggaatgtaaatctgatacacacacacttttctaagtcaaacaacatatttcaaaaccaaaaataaataccttttagataatcagttattttctttgtctatactgggcacccacctactagtgccagtaaattcaagttgaacagatttttaaaatcactattatctgggtatgggggaaacttccccacttttgaaaatgttggtagaattataggaatgtctgtttgattatcattaccaaagtgtcatgacagtatgcctttgtagtgaactcggattttcaggagtttgaatagttggatattttaaaatctaagaagaaaaggcctgtttccaatgttgttgaagaataatgaactctattaaaaagtggagaaaaagataatacatgtggtcaaggttgaccacaaggcccaggcacaactaccttggcgataatcttctagattcgtaacaggttagagctgactttttgtttttgttgttgctgatgctgtgtgattcagacttctcagcctaaccaggaagagtaagtggaaatggtagatgaagaaggggtagagctggtgtatctataactttctgatatttgtctgccaaacttgatatattagtaatttttttatctttagctaagatcaagtcacccctgaaacaacaggagattctagttttaaaataaggccacaaaaatccttacggaatgaagaatggcaccccagttggttgtataagtctcataagataatgatgttgattttaaatatggatgtctcaatgcctgttttctatcaatgatttgtttgtttccaaggtcggggagggaaagaggggagggtttatctgttttagaaagtctcagaatacttataaaatacagaagtagttattaaaatatataggacctcacataggtagatacagaacttaccattgaggctgatgggctgttgtgtgaatcacacaggaccttaaatgaggctcattattctcacacaccaaaatgactctgacagcctgaagcagttattgctagagcccaagctttccttggaggttttggagttaggttgattggaagtaaccagctaataccttttctagtggagaaaaagacattgctaccagcttgttcatcccatagaagtcttccactctgctccatttttagcagcaagcatttcatgtagcataaaccttggcagataagtgtgcctaaggtttatacagtctgtccgcttggatgtatacaaatttagatacatattttaacatgtgttctcatagatgactttataacaacacacattacctataggtgtctagactgtgtacatacaagtgtgtacagacaagcttcatacgtatatactgtaatccgttacaacaaataaattttaaatcatcgtttaacatgtatgtggtacttctacagtgtacattgttttcattatttattgtaacattgaaaaccacagtgcagggaaaacaaaagtatcccagcatcttcatcctgtacacttggaattaatttcatttgggcatatccaagataaactcaactttcaagaaatcttgtatattatttaatcatctgtgttaggatgacacctatgattgatgacttcggttgaatagctttattctggatttttcataactaaagctaaatccaaagacctgaaaaaggacaaaaagaaaaaaaaaaaaagaaaaaacaaagaaaaagaagaaaaaataataaagtcaagcgcaaactgatggggagacagtgggctctggtttccaggattgagacaatggtactgcggtcttggggagactgcgttagctagtggggagtggtgatttttttcatgcttgtcacatctaaatggtctttaacatgagaaagttttagaggttataatttcctgctttgtttttatttagactatcaaatgaagttatacatgttgtcagtcaaaaaatgaagacaccctctgccccaccccacagaatgctttttatcttgtctctttgggttatgacccaacaagctaagtaccattaatgtaattaacttatttaaattagttcctagtacataaatgtataggatttgggtaattatttaatcatccttccttagtttgattctactccttgtacttatttatcaaaacctagaccaatggtgcatcagagatgcaaaattctacttggaatactcttgaagtttagtttgctttataaagcagtgaaattctgttacagacagggaagaaatacaggttacaaaaagagaatttgggatattcttccctcttaaattaacttttaaaatagtctaagtaacaatttttaaattatttaacttaagttcgcagccccacctggtaccaggcgaacttcacctcttaattattgtggccctcggagccttcatattgtaacttatttatttaacttattcagcatctgtgaaaggtgcactgtatagtttatatttttaatttaaaacaacagagagcactgcagtttgtttgctgtcagaacaacagagcaaattttgtggacaagcaatgactattcagcctgaacctgtgcattcagaaaacataagctgagaccctgcttcaccagcctggatttcggggcttctatacagaaactggaaaaataaattttaaaaaaatcgtaaacaaaaagagagaaacccttacactagctgcttccaagaatgaactctgtgtgtatgtaaagcaacaaaacaaaaaaggaaaaaaacaaaaagcagaaaaaagaaaaaaaaaatgaaaaactttctatttctagtgagaaccaaagaaggctacctcactgactttttccatttgtaattttaatcgtgttgatgacaccaaagataccaaagatttctttctctgtgcggtctgcattttgcttgtgctcttttataatttgaacgattttctctgacatatggtatgtacagccacagctcagataccccaaagaaataattatctatgcgacggcggctgctaatttggaaagggatattttctgtgtttctcttatatgtttgctgtctgctcgacatgttcaagatgcgagttcagatgctgctgtaattggattccttaaattctgattacaaattgaggaaggaaactggttggaaatggccttcagtcctagccatggcctctatccccgctgggacctgtcacagtaaagactgccaattactgaaccacagaagctctgaccattgagtagttgagctggaagagaccttaggaatcatttagtccaagccccggtggcccagaggaatgaaatagttatccaaatcaaataactcttgagagtgaaagcccacacatgcctcctggttcctgccccagtgctccgcttattgtacagtgctacctctgcatgagagcggtcccacattgacaaataggatggtggcaatcctttagcaatgagcagggactggggtttatctcttaacattttcagctgtaaaattagtcacaagcattttcagtgtcccattagtacatagtcacatatggtcggttgcttcgtgaaggtggcctgtcttgaaatactagggctcatacgggatttttgccctaggaaaaacatgttgatcccaatgatgtgatcacttttgaacctttccattacaaagcattgtatagataactttttaattcagtaggaggagaaagttcattcttggcctgttggctttgattattatgggtactttaaagtcagtatttatcaagaaagggaacttgaccaccattggcacatgtgacatttaagctcttcagccttttcctttttagttgtaggtgtttacatttcatttctaagccaactctgtatttatgagagaagtttaagccttacatcatttgatactaaagggttatttgtggtaaatgaaaaatgaccccaaaattacagaggaatatgccagtttaagaaatggctacttaaagttgcttctctctttccttcttactcatgaaattaattggtcttcttcaagtttctttagattccattaaatgattaaatcactattaagagccattcatcaacgtgatttgtgtgttagccaatgaatctgtctcagcttttgaccaaatgggttttagacaaatgcaaagatctgcctctagtccatatggctctttttgagtgctagtattttgcatttcacataatgtagttattttgagcttttaaagagagcatttagacaaagaagcaaagagaggaagggaccaatcaactcatcagttccatgcatcaacaaagcatagctagtagaggaatataaatgacagattgacaaactgtaggaaacactgttactctctttctgaagttttcaagcaccatcctatgtgaaagttccctcctgtccaaacaagctcaaggcccatcttctccctatacaaggcaaacctgtaaggccttccttccaaagagtacattgctttggttttcttcctaaattcctattggaattagaactctcagaatccctgggagacagagcaaagatgacttaattcattgagcagcagagctccctataagtgaacatcaccttccccatctttcctactgccacacccatacgagagaggatctagaaagagcgatggcagcctgaacacagaaaacatccccacttggcagacctctcctcagcaatccccccagcctcatgcttcacttgcaaagtgtgacataaccacgggacgagtgccttgcttgaaccaaagcaacgatttagccagtctggacctctctgtgctttttttaattcttcctgtgaatacctcagcttcaactgggcctccatacagtcagttggtgggcttattgtactgtggtgctttgcaatgcaaccctgcaaagaacaagatttgtactaataccaaaggttctttctctatgtctcctcctctgcctccctcgttcttcccttttttctagttcttcacggttccaaagctttactatgaacctgggcatgttggcaatgcagaccgcgcaattccttaccgaattttctcagatatacctcatagacaatagtgtttagagtaatgttattatagcgtatgtaataaattattcactgtttcttttggtaactgtgatttaaaaaaagaaaaaagaaaaaaaagctttatacgttttaggttgtgcttttgtaatagatgaaaaaaggtgcgcttaaaaagaaaatgtatgtttttttccccctttggattttatttatgctggattggggaaagttgcagaatgagcccaaagtttacagtttcatattttgctgaagaaacaatctgtgttcatttgctctgttgaaaagaataattattttctacatttgtgccacttggtctgaacaattaattgttccgtgttaacagtgtagtattatgattagcaactgccaatcagtgctataattttatgcatgaggctaaaaatttagcagtgtgatgcattgtggtcttaatagcaacatttttcattttgaactagatcttcccctttggttcaatggactttatttatgcatgggcgcctattgtttgttagcagttgtggaacagttgtgtatacattaaactgtgaaaatgtacacagttcagcctcagacggtggtaatattggttttattgggagatgtgtcacctcgaaaataccctttacatctgttgggatctgaaaatgagtcacattgaattgggttccagctttataatgagaaacgttattcctaatttttgagttagccaatttgcattccacaaattgggatcctcataacccaaatatatcaccgtatgtgagagggatttgaaagcgagtattgaaaaactcacctttgcatatttaatttccaccaaaaggagttattttggctttatgctcatgaacttagacctaactggccatgtatatgtagatgcaaattcatctagctgtggccctctttgatctctgcttgggaatggctatttttgactatgcgtggtttcttctcgtattttgtgatcaggtcagctcccagtagaaactcaaatggcatcaatattactaactcttctctgcccacttctcttttgtccactctcctagacattcccaccaactgttccagtgatttgggcaaaaatacgcagccatttcccaaaacttcacatgtgcagctatcatggctgtccctccctagacttggaggtgactctcacttaatttttacctgcccaacaatgttccatctaccatctaaaaggtaatataagaagaagttttgaaacccactttaggaaaaccatcttctttaaatccttcaattatctgaggcctctatatgtcaaaactatttttcagttgcaggggattgggcaaacttgttctttcttatacttgggttcaaagacccattctccagtttcatatttcccaaaccaaaatgcttgacataaagccaaatcaactgccaagcacactttattttgcataggagtatgcagcctagggaaccttggttgaaaagcagcagtctgctatgcaaaatattggaaatcactgacagtgtagcattcatattatctgtcaatgagggtatattgggaacgtgctctcgtgaataataaaaagcaacatatttttatttggccttataaattaggttgtggtaatgtaaactttgatatatagtctttttatttttctcttattaatctgccaaagatgggaacagatacaagaatttttcaaattggcttttgtaagacaattgatgattgtaatagtgtttaatcttccagaaagctttatatgttgttccacaataaaattgatatttgtttcagcaaagttttcctgacactcacaaacccacaaactgttcctcttaatgcagatattgtagaatctacaaagttcaaatccatttttgatccaaagaaagtagaggagtatttgagacatgagtgtacccagccctttttttaatcacaggcaatgcatgggtctggctggttacactttgccaagaagacttgtcttatgaaacccaaggtatattttgttatgccattttatgtccttttcttttaacattgtggaaagtggtatgttgaatcaagtgtaagctgagttttccagacaactgaagtagctacatcatgaatgttattttgttattaaagggtttttactcagtgctttgtgccaatggatgtccttttccttggagacacataactacaaaattacctcagcttggcctggttttctctcctgccctcttggggaaacatgggcctggcctgggaaaaggcaggtcatgggctggaaggtaggttttggtactaggaagaaatctctgtatctgtcagctttaaagagaactgggccaaaaatctctaacctcactctctctggactccaacacttccctgcaatcctttggtcttgagcatgtgccagcatgaaggcagactccagttcatacatgaaaggcaagaaaaagaaaatagtaaccttgaatcttctgtgggccaccaggcactcacctttccccaccttgcacactatccagtcaaggctattgcagcccatctggtggctttacatgggacattaccaaaggcttcttcctccatcctggggttgcaaaggatccaggtcccctccatccagtggggctcttccacatcagaagtccccctcccaccatcctctgcatcctgtttagctatcccatctataccttttggagatgattatttagaaaacaaagaaaggtatggaatggggtttcctattgtttgctaggttatattttagcaattctcaattctttgatctggaaaaatacaagagggaaaaggagaccccactatctccctgtgctttgctcccatctcagggggcaggggcagtgcacattgcctatgctgttgatctgtcttgggcgacaggctgaatcacagctattgccccagccaaaaacatggcccatcaatgcctactttatctctgcttgaaaatcctattcaaaaagttgtagagtttgaggtttttatccccccatatcctttgctttggtccagtttggcctttagcataagagtcagctttatctctaggaaagttttttcagattatgacaaggaacctgccacctgggaagaaaagagtccgaagactagcaatcggataggtagtcataccattaacagatacttccttgaaggtagaatattatttcctttctttacagttttgtgttacacaagtccaagtggtgccagcaaacttcttaccgtgaaatgttgtaaaacacctggcatactgaaatttctgaaacaaaaacacaagctccacattgataacttgataaataaccactaaagtttagatgcagggactgagatgatacaggcaaaatcttggtgttggtttctcttttaattcgtatcttcgatcacctaacctttctcaatccaagagcagttcagtcttttctccccaagtctaggatgccaaagagcatcataggaaaagataattagggattgaccagcatttcaattagttctcttcttcatctttgcatttctcaaaagtgttctcctggaccagagggaaagagctggtccattttttttcattctttctattcaaatttttccacccagacaatactttattaacacagatactgtagatccttccttggtcagtgaattattacaagaggagctatccttccaccaaagtgagtgaaaacaagttccagtatcttttcttccatccagttttgttctcagaatccaagtcagtcctgggtcttttctcactttagaccctggcctcagatgtgtttattcttgctatttaaaaatacctttaaatttcacatgctggcctgcagaacttgcatcctttgttctatactgttgactgcttgatggtattgaaaggtgactataatgagggaagaaaggaggaggtaaagagagaagaatttgtcccagatctgtttaaagtttcaaaatttaaaaagggacccattaaattatgggaaaatggctatagagtgtgagcctccgttgaccatatgctcaaagaccgtactctgccacctgccttccaggtagctattctagaaactcagtcctttgtggaaacccaactaccttttaaaagtctctttccagattccaaaaggacaagagatcagagagtcacatatacgcctcttgttttattttcttgctttcacgggtattattgccaagaaaatcgtagggaaaaactttaaacttttcttttcagttgatccctttgacatcacctctcatgtttaaaatcaggaaaacacacccctaaaatttgcactctcttccgttttgaaaaagaaaacccacacacaaatgcacactattaccgtctttcaccctgcgctatatttccaaagtgtattataatccagatattgccccatctcaaacatgttaagtcagactgtgctgaaagactttccagggacggtcaacagggtatatgttcagtggctgccctgaaatcctggtggggatgaggatcacgcttcatcatcaaggggatgcccatcccctgataagctcccagtccttttggaagatttctttgaatgttaattgcattttcagttttgctcatttcccaccccaatgttttgtctgcaacatcgcttacactggattctttctatttttattcctatcattaaatggtagtgctgtaaattctgcaattaatgttaaataaactgctttaattcattgaaaaaaaaaaaaaaaaaaaaa

SEQ ID NO: 1453 - protein, 504 aa, Homo sapiens
MKAAYTAYRCLTKDLEGCAMNPELTMESLGTLHGPAGGGSGGGGGGGGGGGGGGPGHEQELLASPSPHHAGRGAAGSLRGPPPPPTAHQELGTAAAAAAAASRSAMVTSMASILDGGDYRPELSIPLHHAMSMSCDSSPPGMGMSNTYTTLTPLQPLPPISTVSDKFHHPHPHHHPHHHHHHHHQRLSGNVSGSFTLMRDERGLPAMNNLYSPYKEMPGMSQSLSPLAATPLGNGLGGLHNAQQSLPNYGPPGHDKMLSPNFDAHHTAMLTRGEQHLSRGLGTPPAAMMSHLNGLHHPGHTQSHGPVLAPSRERPPSSSSGSQVATSGQLEEINTKEVAQRITAELKRYSIPQAIFAQRVLCRSQGTLSDLLRNPKPWSKLKSGRETFRRMWKWLQEPEFQRMSALRLAACKRKEQEPNKDRNNSQKKSRLVFTDLQRRTLFAIFKENKRPSKEMQITISQQLGLELTTVSNFFMNARRRSLEKWQDDLSTGGSSSTSSTCTKA

SEQ ID NO: 1454 - DNA, 2513 bp, Homo sapiens
gggtgtgatgcgagcgtcacggtggggatgctgctggctgcgcggcgctgagggccagcgagagcgagagcccgcccggggcggaggacggactcatccggatctggctgcagcgtgggctcggagctcccccttcctctcggtctccctctcggcccccctttatttccttcttgctttgcgtctttaacacctctcgaccctgtcctccccccgccactggaagtcttcccgtctctaaatggaattagtggagcccggagcctctggtgtaacgcacagacatgatccatgggcgcagcgtgcttcacattgtagcaagtttaatcatcctccatttgtctggggcaaccaagaaaggaacagaaaagcaaaccacctcagaaacacagaagtcagtgcagtgtggaacttggacaaaacatgcagagggaggtatctttacctctcccaactatcccagcaagtatccccctgaccgggaatgcatctacatcatagaagccgctccaagacagtgcattgaactttactttgatgaaaagtactctattgaaccgtcttgggagtgcaaatttgatcatattgaagttcgagatggaccttttggcttttctccaataattggacgtttctgtggacaacaaaatccacctgtcataaaatccagtggaagatttctatggattaaattttttgctgatggagagctggaatctatgggattttcagctcgatacaatttcacacctgatcctgactttaaggaccttggagctttgaaaccattaccagcgtgtgagtttgagatgggcggttccgaaggaattgtggagtctatacaaattatgaaggaaggcaaagctactgctagcgaggctgttgattgcaagtggtacatccgagcacctccacggtccaagatttacttacgattcttggactatgagatgcagaattcaaatgagtgcaagaggaattttgtggctgtgtatgatggaagcagttccgtggaggatttgaaagctaagttctgtagcactgtggctaatgatgtcatgctacgcacgggtcttggggtgatccgcatgtgggcagatgagggcagtcgaaacagccgatttcagatgctcttcacatcctttcaagaacctccttgtgaaggcaacacattcttctgccatagtaacatgtgtattaataatactttggtctgcaatggactccagaactgtgtgtatccttgggatgaaaatcactgtaaagagaagaggaaaaccagcctgctggaccagctgaccaacaccagtgggactgtcattggcgtgacttcctgcatcgtgatcatcctcattatcatctctgtcatcgtacagatcaaacagcctcgtaaaaagtatgtccaaaggaaatcagactttgaccagacagttttccaggaggtatttgaacctcctcattatgagttatgcactctcagagggacaggagctacagctgactttgcagatgtggcagatgactttgaaaattaccataaactgcggaggtcatcttccaaatgcattcatgaccatcactgtggatcacagctgtccagcactaaaggcagccgcagtaacctcagcacaagagatgcttctatcttgacagagatgcccacacagccaggaaaacccctcatcccacccatgaacagaagaaatatccttgtcatgaaacacaactactcgcaagatgctgcagatgcctgtgacatagatgaaatcgaagaggtgccgaccaccagtcacaggctgtccagacacgataaagccgtccagcggttctgcctcattgggtctctaagcaaacatgaatctgaatacaacacaactagggtctagaaagaaaattcaagagaagaactatttatacaaacatggggactgtgaaaagaaaattctatagtgaattgtgaaaagtggacatatttctaaattcattccactgcctttatccaaacttaagaattacagacatttgttattccttcggcaagacatccccgctgcacactgatatgttcatttcgtaatttggttgctggccaccaagtgctccttagtttttaaatacattttgagattaactggaaacttgaagaagaaattagttcccgattaagactatcccaactttatttttattgtcagtttcacttttgtttctatgttgttttatgtctttgttatataattgtacattgtgtgatatgtgaaaaaaaaacacgaatttggatgaaccttgtgttacatgtacattgttttcattatatagacagcttgagaatagtgcgttcctgaatgattttgaacatgctacagtgaaaagtgacagtgtggaccatggaatcaccagctagaggttatggactatacacacctattattatattctgattaaatacaggaaaaagtaacaagtaaaattactagattgcaataaaaaaattcattttttggtctttcctg

SEQ ID NO: 1455 - protein, 533 aa, Homo sapiens
MIHGRSVLHIVASLIILHLSGATKKGTEKQTTSETQKSVQCGTWTKHAEGGIFTSPNYPSKYPPDRECIYIIEAAPRQCIELYFDEKYSIEPSWECKFDHIEVRDGPFGFSPIIGRFCGQQNPPVIKSSGRFLWIKFFADGELESMGFSARYNFTPDPDFKDLGALKPLPACEFEMGGSEGIVESIQIMKEGKATASEAVDCKWYIRAPPRSKIYLRFLDYEMQNSNECKRNFVAVYDGSSSVEDLKAKFCSTVANDVMLRTGLGVIRMWADEGSRNSRFQMLFTSFQEPPCEGNTFFCHSNMCINNTLVCNGLQNCVYPWDENHCKEKRKTSLLDQLTNTSGTVIGVTSCIVIILIIISVIVQIKQPRKKYVQRKSDFDQTVFQEVFEPPHYELCTLRGTGATADFADVADDFENYHKLRRSSSKCIHDHHCGSQLSSTKGSRSNLSTRDASILTEMPTQPGKPLIPPMNRRNILVMKHNYSQDAADACDIDEIEEVPTTSHRLSRHDKAVQRFCLIGSLSKHESEYNTTRV

SEQ ID NO: 1456 - DNA, 1849 bp, Homo sapiens
acagccacactgcagtatgtcaggaacagtcatggagctgttctcattgtttgcctctccttttcctcctttttaccttctggcccctctcttcattcagagatgctggcagagccattccctaaggttgtagcaagtttaatcatcctccatttgtctggggcaaccaagaaaggaacagaaaagcaaaccacctcagaaacacagaagtcagtgcagtgtggaacttggacaaaacatgcagagggaggtatctttacctctcccaactatcccagcaagtatccccctgaccgggaatgcatctacatcatagaagccgctccaagacagtgcattgaactttactttgatgaaaagtactctattgaaccgtcttgggagtgcaaatttgatcatattgaagttcgagatggaccttttggcttttctccaataattggacgtttctgtggacaacaaaatccacctgtcataaaatccagtggaagatttctatggattaaattttttgctgatggagagctggaatctatgggattttcagctcgatacaatttcacacctgaataaaaggcaaactccttagcaggatctacagagtgtttcgtgatctctccttctccatcatctcatctctggatgctgtggtgcccagaacgttgatctaacaccatcttgaagcacacatgctgatctccaggtgcaccacgatttgtgcccttgaaaatgctgtttgctcaatctttctggagaaagtttgccacatattcggacttagtaaattagaactcctaccttgaaacccagatgaaggttcaattttccccaggattcctttcctcaccattctcctatgtgagggacttcttgtattataatcttttaatataatattatattttatgtaatattgtgttaaattatattgttttatgtaatatattattttaaatgttattttatatatgatattaaaagattataattatataatctttttcgataatttattcttgtattacaatctttttattataatagtctccactctccccaaaatattgtgaattcttcagctgaggagttttgctttagtttcttatcgccatggactgggaattaacatgtatttaacacattttgctcaaacaatcaaacagtaaaagctgaagagagcgtattattattcgcccattccgagagaaagttgaagatgactgaagaactaaaaatacataaatgaattaagtaattataaacataaatttcctgtagctccaacatgactttgatctgagtaatagtgttgtgaaatagattactacatgattttcattgcttttatattatatatagtaattaatattcagaatagttgattaactttcttaagtgtcacataatttaaaaatgaaattgctgtttgccccagatatgtttttctgtgttctttttaaatttcagtgaaattttcttatactcccttcattaaatctattatctggtttctaaacctttacctatttaatgtctcttttcctttctttctaaaaagtaactggttaaactacagttttgtcatttatgaaattttttctgttattattgtagggatagtcaatattatcattttaaggatagttaaaacttattttgcaattaatacgtattttacagtacactaatatgcatatatgttgtattttattaaaatattaaaatgttttttaaacaaaaatattgtccgaagctctaaataccagagtattgattttaaagtctgccaagacaataatacaagtaacacaactaagcctttctttaaataataaaacgagtatctaaa

SEQ ID NO: 1457 - protein, 156 aa, Homo sapiens
MLAEPFPKVVASLIILHLSGATKKGTEKQTTSETQKSVQCGTWTKHAEGGIFTSPNYPSKYPPDRECIYIIEAAPRQCIELYFDEKYSIEPSWECKFDHIEVRDGPFGFSPIIGRFCGQQNPPVIKSSGRFLWIKFFADGELESMGFSARYNFTPE

SEQ ID NO: 1458 - DNA, 2328 bp, Homo sapiens
acagccacactgcagtatgtcaggaacagtcatggagctgttctcattgtttgcctctccttttcctcctttttaccttctggcccctctcttcattcagagatgctggcagagccattccctaaggttgtagcaagtttaatcatcctccatttgtctggggcaaccaagaaaggaacagaaaagcaaaccacctcagaaacacagaagtcagtgcagtgtggaacttggacaaaacatgcagagggaggtatctttacctctcccaactatcccagcaagtatccccctgaccgggaatgcatctacatcatagaagccgctccaagacagtgcattgaactttactttgatgaaaagtactctattgaaccgtcttgggagtgcaaatttgatcatattgaagttcgagatggaccttttggcttttctccaataattggacgtttctgtggacaacaaaatccacctgtcataaaatccagtggaagatttctatggattaaattttttgctgatggagagctggaatctatgggattttcagctcgatacaatttcacacctgatcctgactttaaggaccttggagctttgaaaccattaccagcgtgtgagtttgagatgggcggttccgaaggaattgtggagtctatacaaattatgaaggaaggcaaagctactgctagcgaggctgttgattgcaagtggtacatccgagcacctccacggtccaagatttacttacgattcttggactatgagatgcagaattcaaatgagtgcaagaggaattttgtggctgtgtatgatggaagcagttccgtggaggatttgaaagctaagttctgtagcactgtggctaatgatgtcatgctacgcacgggtcttggggtgatccgcatgtgggcagatgagggcagtcgaaacagccgatttcagatgctcttcacatcctttcaagaacctccttgtgaaggcaacacattcttctgccatagtaacatgtgtattaataatactttggtctgcaatggactccagaactgtgtgtatccttgggatgaaaatcactgtaaagagaagaggaaaaccagcctgctggaccagctgaccaacaccagtgggactgtcattggcgtgacttcctgcatcgtgatcatcctcattatcatctctgtcatcgtacagatcaaacagcctcgtaaaaagtatgtccaaaggaaatcagactttgaccagacagttttccaggaggtatttgaacctcctcattatgagttatgcactctcagagggacaggagctacagctgactttgcagatgtggcagatgactttgaaaattaccataaactgcggaggtcatcttccaaatgcattcatgaccatcactgtggatcacagctgtccagcactaaaggcagccgcagtaacctcagcacaagagatgcttctatcttgacagagatgcccacacagccaggaaaacccctcatcccacccatgaacagaagaaatatccttgtcatgaaacacaactactcgcaagatgctgcagatgcctgtgacatagatgaaatcgaagaggtgccgaccaccagtcacaggctgtccagacacgataaagccgtccagcggttctgcctcattgggtctctaagcaaacatgaatctgaatacaacacaactagggtctagaaagaaaattcaagagaagaactatttatacaaacatggggactgtgaaaagaaaattctatagtgaattgtgaaaagtggacatatttctaaattcattccactgcctttatccaaacttaagaattacagacatttgttattccttcggcaagacatccccgctgcacactgatatgttcatttcgtaatttggttgctggccaccaagtgctccttagtttttaaatacattttgagattaactggaaacttgaagaagaaattagttcccgattaagactatcccaactttatttttattgtcagtttcacttttgtttctatgttgttttatgtctttgttatataattgtacattgtgtgatatgtgaaaaaaaaacacgaatttggatgaaccttgtgttacatgtacattgttttcattatatagacagcttgagaatagtgcgttcctgaatgattttgaacatgctacagtgaaaagtgacagtgtggaccatggaatcaccagctagaggttatggactatacacacctattattatattctgattaaatacaggaaaaagtaacaagtaaaattactagattgcaataaaaaaattcattttttggtctttcctg

SEQ ID NO: 1459 - protein, 532 aa, Homo sapiens
MLAEPFPKVVASLIILHLSGATKKGTEKQTTSETQKSVQCGTWTKHAEGGIFTSPNYPSKYPPDRECIYIIEAAPRQCIELYFDEKYSIEPSWECKFDHIEVRDGPFGFSPIIGRFCGQQNPPVIKSSGRFLWIKFFADGELESMGFSARYNFTPDPDFKDLGALKPLPACEFEMGGSEGIVESIQIMKEGKATASEAVDCKWYIRAPPRSKIYLRFLDYEMQNSNECKRNFVAVYDGSSSVEDLKAKFCSTVANDVMLRTGLGVIRMWADEGSRNSRFQMLFTSFQEPPCEGNTFFCHSNMCINNTLVCNGLQNCVYPWDENHCKEKRKTSLLDQLTNTSGTVIGVTSCIVIILIIISVIVQIKQPRKKYVQRKSDFDQTVFQEVFEPPHYELCTLRGTGATADFADVADDFENYHKLRRSSSKCIHDHHCGSQLSSTKGSRSNLSTRDASILTEMPTQPGKPLIPPMNRRNILVMKHNYSQDAADACDIDEIEEVPTTSHRLSRHDKAVQRFCLIGSLSKHESEYNTTRV

SEQ ID NO: 1460 - DNA, 8008 bp, Homo sapiens
acaggttatgagtgccagtgagccgccttagatagaagcatcgtcagcactttattaatgatggatagtgagaataaacccgaaaatgatgaggatgaaaagataaacaaagaagcacaagacttgacaaagctttcatcccataatgaagacggtgggcctgtatctgatgtgatagcaagtttccctgagaattctatgggcaaaagaggtttttcagaatcatcgaactctgatagtgttgttataggagaagacagaaataaacatgcttccaaacgcaggaaattagatgaggcagagccccttaaatctggaaagcaaggtatttgtagattagaaacttctgagagctcagtcacagaagggggtattgcattagatgaaacagggaaggagacctttctgagtgactgcacagttggaggcacatgtctcccaaatgccctctccccttcttgcaattttagcactattgatgttgtttctctgaaaacagacactgaaaaaacatctgctcaggaaatggtttcccttgatctggaaagagaatctcctttccccccgaaagaaattagtgttagttgtaccattgggaatgtagatacagttctcaaatgcagcatctgtgggcatttgttttcttcttgctctgacttggaaaaacatgctgagtctcacatgcagcagcctaaggaacatacctgttgtcactgcagccacaaagcagagagcagctcagcactacatatgcatatcaaacaagcacatgggccacagaaggtcttttcctgtgatctttgtggttttcagtgttcagaagaaaacttgttgaatgcacattatcttggcaaaacacatctccgtcgtcagaatctggctgctcgtggaggatttgtacagatcttaacaaaacaaccttttcctaaaaaatcacgtacaatggcaacaaaaaatgttcactcaaaaccaagaacttctaaatcaatagcaaagaatagtgattcaaaaggattacgaaatgtgggaagcacgtttaaagatttcagaggaagtatttctaaacaaagtggtagtagcagtgagcttcttgttgaaatgatgccttccagaaatactttgtcacaggaagtagagattgttgaagaacatgttacttcccttggtctagctcagaatcctgaaaaccagagtagaaagctagacaccttagtaacctcagagggtctcttagagaaattggaatctacaaaaaatacccttcaggcagcacacggtaacagtgtaacctcgaggccaagacctgagcgaaatattctcgtgttgggtaatagctttcgtcgacgaagcagcactttcaccttgaagggccaggcaaagaaaaggtttaatcttttaggaattaaaagaggtacaagtgaaactcagaggatgtatatgaaacacttgagaacacagatgaaaacacacgatgcagaatcagtgctgaaacacctggaagcgtgcagcagtgtgcagagagtgtgtgtgactacctcagaaacccaggaggcagagcagggccaggggagtgcccgtcctccggactccgggctgcattccctgacagtgaagccagcttctggctctcagacgttgtgtgcttgtacagactgtgggcaagtagctacaaataggacagatttggaaatccatgtgaaaaggtgccatgccagagagatgaaattttactgccgtacttgtgacttctctagtatgtcaagaagggacttagatgaacatttgcacagtaaccagcatcagcaaactgcttctgtcctgagttgtcagtgttgttcatttatatccttggatgaaataaatcttagagaccacatgaaggaaaagcacaatatgcattttctttgcaccccttgtaatctgttctttttgtctgaaaaagatgtggaagaacacaaagccaccgagaagcatattaattcattggttcaaccaaagactttgcaatcatctaacagtgatttggttttacagactttacctttgagtactttagaatcagaaaacgcaaaagagtctatggatgactcaggaaaagcatctcaggaagaacctctgaagtccagggtaagccatggtaatgaagtgaggcattccagtaagcctcagtttcagtgtaagaagtgtttttataaaacaagatcttctactgttctcacgagacatataaagcttcggcatggtcaagactatcattttctttgtaaagcttgtaatctttattcattgagcaaagaaggaatggagaaacacattaaaagaagcaagcatcttgaaaatgctaagaaaaataatattggcttaagctttgaagaatgtattgaaagggtatgtataggtgcaaatgataaaaaagaagagtttgatgtttccggaaatggaaggattgaaggccatataggtgtgcaattacaagagcattcctatcttgagaagggcatgctggcgtctgaggaactgtcacagtctggtggtagcaccaaagatgatgaattagcttcaaccactactccaaagagagggagacctaaaggtaacatctcacggacgtgttcacactgtggccttttggcctctagtattacaaacttgactgttcacattagacgaaaacacagtcaccagtatagttatttatgcaaagtgtgtaagtattacactgtaactaagggagatatggaacgtcattgtgccaccaagaaacataaaggacgggtagaaatagaagcaagtggaaaacacagttcagatatcattgttggccctgaagggggtagccttgaagctggtaaaaagaatgctggctcagcagtgaccatgtcagatgaacatgctaacaaaccagctgagtcacccacctccgttttagagaagccagatcgtggaaactcaattgaagctgaagttgaaaatgtatttcattctctagatggagaagttaacagccatcttcttgataaaaaggagcaaatatcttcagagccagaggacttcgcccagccgggggatgtgtactcccagagagatgttacaggcacaggtgagaataagtgtttgcactgtgagtttagtgctcactcctctgcttctctagagctgcatgtaaaacggaaacatacaaaagagtttgagttttattgcatggcatgcgattactacgcggtgactcgtcgcgagatgaccaggcatgcagcaacagagaagcacaaaatgaaaaggcagtcttatctcaactctgctaatgtagaagctggttctgcagacatgtccaaaaacatcattatgcctgaagaagagcatcaacaaaattctgaggaatttcaaataatttcaggtcaaccatctgatactcttaaatctagaaatgctgcagattgctctattttaaatgagaatactaatttagatatgtctaaagtgctctgcgctgctgactctgtagaagttgagactgaagaagaatctaatttcaatgaagaccattccttttgtgagactttccaacaggctcctgtcaaggataaagttaggaaacctgaggagatgatgtcacttactatgtcctcaaactatggctccccaagcagatttcaaaatgaaaattcaggaagctctgccttaaattgtgagacagcaaagaaaaaccatgagatatcgaatgatgcaggtgagctgcgtgtccattgtgagggtgaaggaggaaacgcaggagacggtggaggtgttgtcccccacagacacctgtgccctgtgacgctcgatggggagcgctcggctgaaagccctgtgctcgttgtgacaagaataaccagagaacagggaaatctggagagcgggggtcagaacagagttgcacgtgggcatggtttggaagacttgaaaggtgtccaagaagatcccgttctggggaataaggaaattctgatgaattcacaacatgaaacagaatttattttggaggaggatggcccagcttctgatagcacagttgaaagtagtgatgtctatgaaactataattagtattgatgataaagggcaggccatgtacagttttggtcgatttgactcctccataataagaataaagaaccctgaagatggtgagttgatagaccagtctgaagagggcttgatagcaacgggagtgagaattagtgagctgcccttgaaagactgtgctcaaggtgtgaaaaagaagaaatctgagggcagttccattggtgagtctacacgaattcgctgtgatgattgtggcttcttagcagatggactgagtggactgaatgttcacatagccatgaagcatcctacaaaagagaagcacttccattgtttactctgtggaaagtcgttctataccgaaagcaaccttcaccagcatctggctagtgccggccacatgagaaatgagcaggccagtgtggaggagcttccggagggaggggccacctttaaatgtgtcaagtgcacagagccctttgattctgaacagaatttatttttacatattaaaggacagcatgaggaattgctgcgggaggtgaataagtatatagtggaagacactgagcaaatcaaccgcgagagggaggaaaaccagggaaacgtctgcaagtattgtgggaagatgtgtcgaagcagcaactcgatggccttcctggcacacattcgcactcacacaggatcaaaaccattcaagtgcaagatatgccattttgcaacagctcagcttggagatgccagaaaccatgtgaaaaggcaccttgggatgagggaatacaagtgtcatgtctgtggggttgcttttgtaatgaagaagcacttaaatactcatctactaggcaagcatggagttggcaccccaaaagaaaggaaatttacatgccacttatgtgatagaagtttcacagagaagtgggccctgaacaaccacatgaaactccacacgggagaaaagccgtttaaatgtacctggcccacgtgccattactcattcctcacagcctccgcaatgaaagaccactacaggacgcacacaggcgagaagtcgtttctgtgtgacctctgcggctttgccggcgggacccgccacgccctcaccaagcatcgcagacagcacacaggagaaaaacctttcaagtgcgatgagtgtaactttgcctccacaactcagtcccatttgactcggcataaacgtgtccacactggagaaaagccctacagatgcccctggtgtgactacaggtcaaactgtgctgaaaatatccgcaaacacattctgcatactggcaaacatgaaggagtcaagatgtacaactgtcccaagtgtgactacgggaccaacgtcccggtggagttccggaaccatttgaaggaacagcatcctgacatcgaaaacccggacctcgcttacctgcatgctggcattgtttccaagtcgtacgagtgccgtctaaagggacaaggagccaccttcgtggagacagacagccccttcaccgcggcggccttggcagaagagcccctcgtcaaggagaagcccctcagaagcagcaggaggccagcgccgccccctgagcaggtgcagcaggtcatcatcttccagggctacgacggggagtttgccctggacccctcggtggaggagacggccgccgccacgctgcagacgctggccatggccggccaggtggcccgggtggtgcatatcacggaggatggccaggtcatcgccacgagtcagagcggggcacatgtaggcagcgtggtgcccggacccatcctccccgagcagctggctgatggagccacccaggtggtcgtcgtggggggctccatggaaggccacggcatggatgagtccctcagtccaggtggcgctgtgatacaacaggtgaccaagcaggagattttaaacctctcggaggctggagtcgctccccccgaggcatcctcagccctggatgcattgctctgtgcggtcactgaattaggggaggtggagggcagggctgggctcgaggagcaaggcaggcccggcgccaaagacgtgctgatccagctgcccgggcaggaggtctcccatgtggctgccgaccccgaggcccccgagatccagatgttcccacaggcccaggagagcccggccgccgtggaggtgctcacccaggtggtccatccctcagcagccatggcctctcaggagcgggcacaggtggccttcaagaagatggtccagggcgtcctccagtttgctgtgtgtgacacggccgcggccggccagttggtcaaggacggtgtcacccaggtggtggtgagcgaagagggtgccgtccacatggtcgccggggagggtgcccagatcatcatgcaggaggcgcagggcgagcacatggatctggtggagtccgacggggagatctcgcagatcatcgtgacggaggagctggtccaggccatggtgcaggagtccagtggcggcttctccgagggcaccacgcactacatcctgacagagctgcccccaggggtgcaggacgagccgggcctgtactcccacaccgtgctggagactgcggactcgcaggaactcctgcaggccggggccacgctaggcacagaggccggggccccaagcagggcagagcagctggccagcgtggtcatctacacccaggagggctcctcggccgcggcggcaattcagagccaaagagaaagcagcgaactccaggaagcatgagacgcgcggcacctttactcagcacagggcaggtgtgggaaggtccagcttcggtgggggaccgtgttccctgagcttcatctgaaaccttcaaaaccatgaggacaaggctcccgtgagctctgagcatgccctcccagcgagagtcacactggccaccagccaggcgcccacagagggtaccgtgggctgggcctcggggagcaggctgccaagtgcaggggagggccgggcgcaggccgcacagggagctccggtccactgggggcccttcgatcagtggcctcccgcttcgtcctggccgctgtgctgaagagaagccaagtgttgttggtgtttttctctcccaagtgttttcccatttcagttatcagaaggtcatggccgtggggaaagtggtgaagatacccctcctggcttggggtgcacctgcttgtgcagtcagcatgtagctgcctttccatttcattctctactgggctaaaaattgcagctacaagtgttaccatcttgaagcagtccacttccattcaattttttttttttaattttagaataacagtgtccccataccaaaggaagcctgctagctcatttcatgtataaatttcccatcttcaaacagtttaggtgtatttgttgctctggtcacattctgcataaaagaaatcctcttaagcctatggttaagaaaagccttgaagtttatattcagttaaaatatatgtcggtggagatagccagtgcttctaattttgacttagtttcatacagtaaagcctaaatgtgaaacgcacacgctggaagatattgttcctatcaatattttgctttttataacaagggtttgttcatattgatgccatttttgcaggatttcttcgtgatttctgtccatatgaaaatgctgacattaaacattaacacatggagaccgtgccctgtggccctgccgtggctgccagcatggtctgtgtttccttgtggattcacctgtggccctgctgtggccaccagcatggtctgtgtcctcgtggattcactgcagctgtcggatgcgagtttctgtcataatcatttgtttcctgatacaattgttcttattcttttccaaaactgtaaaataatctcctccctcaaatgcaaaggttgtttttgttctgtttctgttttctttgaaataaaattataacgttaaaagatc

SEQ ID NO: 1461 - protein, 2248 aa, Homo sapiens
MMDSENKPENDEDEKINKEAQDLTKLSSHNEDGGPVSDVIASFPENSMGKRGFSESSNSDSVVIGEDRNKHASKRRKLDEAEPLKSGKQGICRLETSESSVTEGGIALDETGKETFLSDCTVGGTCLPNALSPSCNFSTIDVVSLKTDTEKTSAQEMVSLDLERESPFPPKEISVSCTIGNVDTVLKCSICGHLFSSCSDLEKHAESHMQQPKEHTCCHCSHKAESSSALHMHIKQAHGPQKVFSCDLCGFQCSEENLLNAHYLGKTHLRRQNLAARGGFVQILTKQPFPKKSRTMATKNVHSKPRTSKSIAKNSDSKGLRNVGSTFKDFRGSISKQSGSSSELLVEMMPSRNTLSQEVEIVEEHVTSLGLAQNPENQSRKLDTLVTSEGLLEKLESTKNTLQAAHGNSVTSRPRPERNILVLGNSFRRRSSTFTLKGQAKKRFNLLGIKRGTSETQRMYMKHLRTQMKTHDAESVLKHLEACSSVQRVCVTTSETQEAEQGQGSARPPDSGLHSLTVKPASGSQTLCACTDCGQVATNRTDLEIHVKRCHAREMKFYCRTCDFSSMSRRDLDEHLHSNQHQQTASVLSCQCCSFISLDEINLRDHMKEKHNMHFLCTPCNLFFLSEKDVEEHKATEKHINSLVQPKTLQSSNSDLVLQTLPLSTLESENAKESMDDSGKASQEEPLKSRVSHGNEVRHSSKPQFQCKKCFYKTRSSTVLTRHIKLRHGQDYHFLCKACNLYSLSKEGMEKHIKRSKHLENAKKNNIGLSFEECIERVCIGANDKKEEFDVSGNGRIEGHIGVQLQEHSYLEKGMLASEELSQSGGSTKDDELASTTTPKRGRPKGNISRTCSHCGLLASSITNLTVHIRRKHSHQYSYLCKVCKYYTVTKGDMERHCATKKHKGRVEIEASGKHSSDIIVGPEGGSLEAGKKNAGSAVTMSDEHANKPAESPTSVLEKPDRGNSIEAEVENVFHSLDGEVNSHLLDKKEQISSEPEDFAQPGDVYSQRDVTGTGENKCLHCEFSAHSSASLELHVKRKHTKEFEFYCMACDYYAVTRREMTRHAATEKHKMKRQSYLNSANVEAGSADMSKNIIMPEEEHQQNSEEFQIISGQPSDTLKSRNAADCSILNENTNLDMSKVLCAADSVEVETEEESNFNEDHSFCETFQQAPVKDKVRKPEEMMSLTMSSNYGSPSRFQNENSGSSALNCETAKKNHEISNDAGELRVHCEGEGGNAGDGGGVVPHRHLCPVTLDGERSAESPVLVVTRITREQGNLESGGQNRVARGHGLEDLKGVQEDPVLGNKEILMNSQHETEFILEEDGPASDSTVESSDVYETIISIDDKGQAMYSFGRFDSSIIRIKNPEDGELIDQSEEGLIATGVRISELPLKDCAQGVKKKKSEGSSIGESTRIRCDDCGFLADGLSGLNVHIAMKHPTKEKHFHCLLCGKSFYTESNLHQHLASAGHMRNEQASVEELPEGGATFKCVKCTEPFDSEQNLFLHIKGQHEELLREVNKYIVEDTEQINREREENQGNVCKYCGKMCRSSNSMAFLAHIRTHTGSKPFKCKICHFATAQLGDARNHVKRHLGMREYKCHVCGVAFVMKKHLNTHLLGKHGVGTPKERKFTCHLCDRSFTEKWALNNHMKLHTGEKPFKCTWPTCHYSFLTASAMKDHYRTHTGEKSFLCDLCGFAGGTRHALTKHRRQHTGEKPFKCDECNFASTTQSHLTRHKRVHTGEKPYRCPWCDYRSNCAENIRKHILHTGKHEGVKMYNCPKCDYGTNVPVEFRNHLKEQHPDIENPDLAYLHAGIVSKSYECRLKGQGATFVETDSPFTAAALAEEPLVKEKPLRSSRRPAPPPEQVQQVIIFQGYDGEFALDPSVEETAAATLQTLAMAGQVARVVHITEDGQVIATSQSGAHVGSVVPGPILPEQLADGATQVVVVGGSMEGHGMDESLSPGGAVIQQVTKQEILNLSEAGVAPPEASSALDALLCAVTELGEVEGRAGLEEQGRPGAKDVLIQLPGQEVSHVAADPEAPEIQMFPQAQESPAAVEVLTQVVHPSAAMASQERAQVAFKKMVQGVLQFAVCDTAAAGQLVKDGVTQVVVSEEGAVHMVAGEGAQIIMQEAQGEHMDLVESDGEISQIIVTEELVQAMVQESSGGFSEGTTHYILTELPPGVQDEPGLYSHTVLETADSQELLQAGATLGTEAGAPSRAEQLASVVIYTQEGSSAAAAIQSQRESSELQEA

SEQ ID NO: 1462 - DNA, 1419 bp, Homo sapiens
acacgccgcctgccaggcgtgagtcttcctcccgctctgcgccgtcgccccgtccacacgccgccaccctcgcgtcagttgtcgctccgcgcctgcgcccgttgtctccctgctcgctccgggtcccggcgccgcgccatgtgggctgcggcgggcgggctgtggcgctcccgcgcgggtctccgggccctgttccgtagccgcgatgctgcgctatttccaggctgcgagcggggacttcactgctctgctgtctcctgcaagaactggctcaagaaatttgcctcgaaaaccaaaaaaaaggtttggtatgaaagtccttccttgggttctcactcgacttacaaaccatccaagttggaattcctcatgaggagcacctcaaagaaaaccaggaaggaagaccatgcgcgcctgagggccctgaacggcctcctctataaggcactgacagacctgctgtgtacccctgaagtgagtcaggagctgtatgaccttaacgtggagctctccaaggtttccctgactccagacttctcagcctgccgagcgtactggaagacaacgctctctgctgagcagaacgcacacatggaggctgtcctgcagagaagtgccgcgcacatgaggcaccttttgatgtcccagcagaccctgaggaatgtgccaccgatagtgtttgttcaagacaagggaaatgcagctctagctgagcttgatcagttactggcagtcgcagactttggaccccgggatgaaagagacaactttgtacaaaatgatttcagggaccctgatgccccacaaccctgcggcaccacagagccgaccacaagctccagtctgtgtgggatcgatcatgaggcgctcaacaagcagattatggagtacaaaaggaggaaagataaagggctcgggggcctggtgtggcaggggcaggtggctgagctgacaacgcagatgcaaaagggaaggaagagggccaagccccgcctggagcaggacagctccctcaagagttacctgtcaggcgaggaggttgaagatgacctggacctggttggtgccccggagtacgaatgctatgccccggacacagaggagttggaggcagagagaggaggtggcagaacagaggatggccacagctgcggagcaagcagggagtagatggagaggctctgcccatcccacatttgcagggaaaagcattggcacgcaacgcagcatgtggcttcattgaggcagttgatggagttaaaccatctgctcttctgctacttcaacattttctagcttttccgtgtatctaaacacaatttgctacacaagtcactgtttttttttccatgcactgtgtgtaatttaaaaattaaatggccatcttatcacagattctcacaaaaaaaaaaaaaaaaa

SEQ ID NO: 1463 - protein, 343 aa, Homo sapiens
MWAAAGGLWRSRAGLRALFRSRDAALFPGCERGLHCSAVSCKNWLKKFASKTKKKVWYESPSLGSHSTYKPSKLEFLMRSTSKKTRKEDHARLRALNGLLYKALTDLLCTPEVSQELYDLNVELSKVSLTPDFSACRAYWKTTLSAEQNAHMEAVLQRSAAHMRHLLMSQQTLRNVPPIVFVQDKGNAALAELDQLLAVADFGPRDERDNFVQNDFRDPDAPQPCGTTEPTTSSSLCGIDHEALNKQIMEYKRRKDKGLGGLVWQGQVAELTTQMQKGRKRAKPRLEQDSSLKSYLSGEEVEDDLDLVGAPEYECYAPDTEELEAERGGGRTEDGHSCGASRE

SEQ ID NO: 1464 - DNA, 5403 bp, Homo sapiens
acgagagtttgcacagatgtggaaaggagctggcagggcagttccctgggacagaagggagtcagggggtccaacaggggccccccactgccaccccagagcctccagtccagctttagccaggggccccggggggcctgtgggaagtgccaggggcccccaagcacactctgctctcattggctggctgcgcctacatgcaaatgagggccaacgtcacttcctgaggccaatcgagcgccattttctctttctggctgcgcgggaggaggggaccagtcgcgctgggggtgggcgcgcgctgaggcgggggtcccgccgcgcggggcggaggcgcgggcgggcgcaggcggccccacgggacgcggctgcgctcggcggaagacgcggcagccctgcgagaggcagcagcggagacgcggtgctcctcgggcgccaagcggaaaatttcaaaaatgtttcaaattcctgtggaaaatcttgacaacatcagaaaggtgcgaaaaaaggtgaaaggtattcttgtggatattgggcttgacagctgcaaggagttactgaaggaccttaaaggctttgatccaggagagaaatactttcataacacatcatggggagatgtttctctctgggaaccttctggaaagaaagtgagatatcgaacaaagccatactgttgtggcctctgtaaatactctacaaaggtgcttacttcattcaagaatcatttacatcgttaccatgaagatgaaattgaccaagagctggtgatcccttgcccaaactgtgtatttgcatctcagcccaaagttgtgggaaggcacttcagaatgttccatgcgcctgtccggaaagtccagaactacacagtgaatattttaggtgaaactaaatcatctaggagcgatgtgataagtttcacatgtctaaaatgtaacttttcaaacactttgtactacagcatgaagaagcatgtgctggtagcccattttcactacttaattaactcctactttggcctaagaactgaggaaatgggtgagcaaccgaaaactaacgatactgtttctatagagaagatcccaccacctgacaaatattactgtaaaaagtgcaacgccaatgccagcagccaggatgcgttaatgtatcacattttgacatcagacatacacagagatttggagaataagcttagatctgtgatttcagaacatattaagaggactggactcttgaagcaaacgcacattgctccaaaaccagcagcacatttggctgcaccagcaaatggcagtgctccaagcgctccagcgcagcctccttgcttccatcttgctttgccacagaacagtccaagcccagccgcaggacagccagtgactgtggcccagggtgcccctggaagcctcactcattccccccctgctgctggccaatcccacatgactctggtctccagccctctgcctgtgggccagaacagcctcaccctgcagcccccagcacctcagcccgtctttctttctcacggggttccacttcatcagtctgtgaatcctcctgtgttgcccttgagtcagccagtcggacctgtcaataagtctgttggaactagtgtcctccccataaatcagactgttcgccctggggttttacccctcacccagcctgtgggacccataaacagacctgttgggcctggtgttcttcctgtgagcccctctgtcacccctggggtcctgcaggctgtctcgccaggggtgctttctgtgagtcgggcggtcccgtctggagtccttcctgcaggccagatgactcctgcaggccagatgactcctgcaggggttatccctgggcaaacagcaacttctggggttcttcctactggccagatggtccagtcaggagttctccctgtgggccagacagctccgtcacgggttcttcccccaggccagacagccccattgagggttatctctgcaggccaggtggtcccgtctgggcttctttctcccaaccagacagtctcctcctcagctgttgtgcctgtaaaccagggtgtgaattctggtgttctgcagcttagtcagcctgttgtgtcgggagttcttcctgtgggccagccagtgaggcctggggtcttgcaactcaaccagactgtgggcaccaacattctgcctgtgaatcagccagtgagacctggtgcttcgcagaacaccaccttcctgacatcaggctctattctcagacagctcatccctacagggaaacaagtgaatgggattccaacctacacgctggcccccgtgtctgtcactctgccggttccccctggaggccttgcaactgtcgctccgccccagatgcccatccagctcctgccgtcaggtgcagctgcaccaatggccggttccatgcccggcatgccctctcctccagtgctggtgaatgctgctcagagcgtgtttgttcaggcctcctcctctgcagcagacacaaaccaggtgctcaaacaggccaagcagtggaagacctgccctgtctgcaacgagctctttccgtccaacgtctaccaggtccacatggaggtagcgcataagcacagcgagtccaagtctggtgagaaacttgagcctgaaaaactggcagcgtgtgcaccatttctaaagtggatgagagagaaaacggtgcgatgtctgtcttgtaagtgcttggtctctgaggaagagcttatacaccacttgctgatgcatggcttggggtgcttgttctgtccatgcaccttccatgatatcaaaggtctttcagagcacagcaggaataggcacctggggaagaagaagttgcctatggattatagcaacagaggttttcaattagatgtcgatgccaatggcaacctgctctttccccaccttgatttcatcaccatattgccaaaggagaagcttggggagcgggaagtctacttggcaatcctggctgggatacactccaagtcactggtgcctgtgtatgtgaaggtgaggcctcaggctgagggcacccccgggagcaccggcaagcgagtgtccacctgccccttttgctttggcccctttgtgacaactgaggcctatgagctgcatttgaaggagaggcaccacatcatgcccacagtccacacggtcctgaagtctcccgccttcaagtgcatccactgctgtggggtctacacgggaaatatgaccctggctgccatcgccgtccatttggtgcgctgcagaagtgctcccaaggacagcagctcagacctgcaggcccagccgggttttattcacaacagtgaactgcttttagtcagtggtgaagtgatgcatgattccagtttttctgttaagagaaagctgcctgacggccacttaggggccgaagaccagcggcatggggaggagcagcctcccatcctaaatgccgatgcagccccgggtccagaaaaggtgacgagtgttgtgccttttaaaagacaaaggaatgaaagcagaacagagggacctattgtcaaggacgaggctcttcagattttagcattagatcctaaaaaatatgaaggccgttcttatgaagaaaagaagcaatttcttaaagattatttccataagaaaccatatcctagtaaaaaggaaatagaactgttgtcctcactcttttgggtgtggaaaattgatgtggcttcattttttggaaaaagaaggtatatttgcatgaaagcaataaaaaatcacaagccttctgtacttttaggctttgatatgtctgaacttaaaaatgtgaaacatagattgaactttgaatatgaaccataaaacttgcaaaaaaaaaaaaaaagtaactctaaagtagtaggtagatttttttcagttgaaatttcacagtgttgtcctcactgtgttggtgaatcaacctcagtggtcactgtgctgctctgcagagttacttcaggtgctggagagacccctgttaccaggaagccagtagttatttcacatctattgtttcctgcagtttgatttgtaacagaacagttgttttcaggtttttttctctgtcatgtaaatgaaatcttttgatatttcatgcacgccttgttttcccactagtgtcagtatcgtatgataagaaactgaaatctataaataatttgctttttcattaaggacatttcagcctttttcagaatacttgatttaactgcgagtggaagcatcgatctccttcagctttccctgtagcagcagatggtacagtgagtgttcagagacgtgggtacaaaccctgtgatgtatgtataaggctccctgaggatgcactgcattaacttacgctgacttctttgtaagatctttgcttatagattataatttagatctgtatttttttaggtttatcctaatagctgttttttttttttaaccataactcatagaaaatcaaatgtttttatttgttaaaagtagactgaatttgacatctggtatgctggtatgtagctcatacatcaagagttattttacaaataaatttattctgtagatgcagaaatatttttcagtgtagattttcccttttgatatgctaagtcatttctccgttcagaggtaaaacaataaatttttagtgcctttagaataaacattgaaagaatacaccccaaaactcttctcctaacttaactactcataaactagtgaaagggaaggtctatgatactcaggaataaaattattgcccctgagtgtgaaaactaacttaaatttcagcatagggtttcaggggacatggcgaagtttacagactgagatctcagtctccatggttggtacagtaagtctttgaccacattttctgaaggtcatgtttagtggagaaacgggcttttctctagctggtttaggctggaagctgtgtccgggtcgatgggatggcatattgttaaagaatctccattgtcgtcactgtcctgtggatgttaaacctcgtttttttccccacacgatattaaaacttaaagcaccagaaccagtcatggagaccagccagtttagatggtaagtcatatttctggtggtacacagcagaggaaccccttcactctatctttaggtagaaatatttggaggatgtgacagcctctgagaaacataatgttactatgtggattttaaaaaatataatacttgcatgtaattgctataatgttcatatttgaggcagttgtgaaaccggtttatgattgttggtgtactctgttgtaaattcaaagagagcttgttgaacattttttttttttacctattgttttcagagtgtctattttgaattaaaatttgttacaccgctgcaaaaaaaaaaaaaaaa

SEQ ID NO: 1465 - protein, 1131 aa, Homo sapiens
MFQIPVENLDNIRKVRKKVKGILVDIGLDSCKELLKDLKGFDPGEKYFHNTSWGDVSLWEPSGKKVRYRTKPYCCGLCKYSTKVLTSFKNHLHRYHEDEIDQELVIPCPNCVFASQPKVVGRHFRMFHAPVRKVQNYTVNILGETKSSRSDVISFTCLKCNFSNTLYYSMKKHVLVAHFHYLINSYFGLRTEEMGEQPKTNDTVSIEKIPPPDKYYCKKCNANASSQDALMYHILTSDIHRDLENKLRSVISEHIKRTGLLKQTHIAPKPAAHLAAPANGSAPSAPAQPPCFHLALPQNSPSPAAGQPVTVAQGAPGSLTHSPPAAGQSHMTLVSSPLPVGQNSLTLQPPAPQPVFLSHGVPLHQSVNPPVLPLSQPVGPVNKSVGTSVLPINQTVRPGVLPLTQPVGPINRPVGPGVLPVSPSVTPGVLQAVSPGVLSVSRAVPSGVLPAGQMTPAGQMTPAGVIPGQTATSGVLPTGQMVQSGVLPVGQTAPSRVLPPGQTAPLRVISAGQVVPSGLLSPNQTVSSSAVVPVNQGVNSGVLQLSQPVVSGVLPVGQPVRPGVLQLNQTVGTNILPVNQPVRPGASQNTTFLTSGSILRQLIPTGKQVNGIPTYTLAPVSVTLPVPPGGLATVAPPQMPIQLLPSGAAAPMAGSMPGMPSPPVLVNAAQSVFVQASSSAADTNQVLKQAKQWKTCPVCNELFPSNVYQVHMEVAHKHSESKSGEKLEPEKLAACAPFLKWMREKTVRCLSCKCLVSEEELIHHLLMHGLGCLFCPCTFHDIKGLSEHSRNRHLGKKKLPMDYSNRGFQLDVDANGNLLFPHLDFITILPKEKLGEREVYLAILAGIHSKSLVPVYVKVRPQAEGTPGSTGKRVSTCPFCFGPFVTTEAYELHLKERHHIMPTVHTVLKSPAFKCIHCCGVYTGNMTLAAIAVHLVRCRSAPKDSSSDLQAQPGFIHNSELLLVSGEVMHDSSFSVKRKLPDGHLGAEDQRHGEEQPPILNADAAPGPEKVTSVVPFKRQRNESRTEGPIVKDEALQILALDPKKYEGRSYEEKKQFLKDYFHKKPYPSKKEIELLSSLFWVWKIDVASFFGKRRYICMKAIKNHKPSVLLGFDMSELKNVKHRLNFEYEP

SEQ ID NO: 1466 - DNA, 3847 bp, Homo sapiens
gaggcgcgcggccagcccagctcgggcccgcagcaccgggagcagcccgccggccaagcgagcgcgggccggggccggggccggggcctgggggcgccgcccccgggagtctttctgcggcccctgaggagcgagggcgacggcgaggctgaccggggccgaaaccatgaaccgaagttttcacaagtctcagaccttgcgattctacgattgcagcgcagtggaagtcaagagcaagtttggggcggaattccgaaggttctctctggaccgtcataagcctgggaagtttgaagatttctacaagctggttgtgcacacccaccatatctccaacagtgatgtaactattggctatgcagatgtgcacggagacctgctgcccatcaacaatgatgacaacttctgcaaggcggtttctagtgcaaatcccctgctcagggtcttcatccagaaacgagaggaggccgagcgtggcagcctcggcgcgggctcgctgtgcaggcggaggcgggcgctgggcgcgctgcgtgatgaaggaccccggcggcgtgcacacctggacatcggcctcccgcgcgacttccgccccgtatcatccatcatcgatgtggacctggtccccgagacgcaccggcgagtgcggctgcaccggcacggctgcgagaagccgctgggcttctacatccgcgatggcgccagcgtgcgcgtgaccccgcacgggctggagaaggtgcccggcatcttcatctcgcgcatggtacccgggggcctggcggagagcaccgggctgctggctgtgaatgacgaggtcctggaggtgaacggcattgaggtggccgggaagacgctggaccaggtcacggacatgatgatcgccaacagccacaacctcatcgtcaccgtcaagcccgccaaccagcgcaacaacgtggtgcgcggcggccgcgcgttgggcagctcgggaccgccctcggacggcaccgcgggcttcgtgggtccccccgccccgcgcgtcctgcagaacttccaccccgacgaggcggagagcgatgaggacaacgacgtcgtcatcgagggcacactggagcctgcacgtcccccccagaccccgggcgcgcccgcaggcagcctctcccgggtcaatggcgcgggcctggcgcagcggctgcagcgggacctggccctggacggcggcctccagcggctgctcagctccctgcgggccgacccccgtcacagcctggcgctgccgccaggcggcgtggaggagcacgggcccgcggtcacgctctagactcccgagaggcccccaaatcctagctccagttccccggtaaggacagggacaggacctgcagactgcatccgctcattttttgttgtttttgtgaccacaaaaacaacgctgctctttgtttcaacttccggatataaaaacacaagtattgcctatttttatagaatttcgccacagaacttaaaatgaacgcctgtagagacactctataccaggcctgagtgcaggtcttggcgcctttgcaaagtgatagaaaagatctgaccaagtgcaaaaaaatgctttttaaaatttttacaaatactttgtttttaaagtgaagctttaaaattacttttttaaaatagtcaaattcatgtttttaagtaagttggcccatgcaacatatctcagcattcttgctgtgctctctgctgacttgcaggcgaggccgactgtgctgatgtacgtgacaagaggctggtttttaataacgaatgcagccaggtgcagtggctcacgtctgtaatcccagcactttgggaggcctacgtgggctgatcacgaggtcaggaggtcgagaccagcatggccaacatggtgaaaccctgtctctactaaaaatataaaaattagccaggtgtggtggcaggcgcctgtaatcccagctaccttgggaggctgaggcaggagaatcgcttgaacccgggaggcagaggttgcagtgagctgagatcgcaccactgcactccagcctgggtgacagagcaagactctgtctcgggaaaaaaaaaaaatacacccaaacctgtccatgtacaaccatggagatgaattccagattttcacactgttcatagtcataattcggttgggacaggagagctcccaccagcacacttatggcacccgcagctgtggaattgttccggggcttttttttgtttgttttgagacatagtgtcttgttctgtcatccaagctggagggatctcagctcactgcaacctccgcctcctgggttcaagcaattctcctgcctcagcctcccaaggagctgggacaggcacatgccaccatacccagctaatttttgtatttttagtagagatgggatttcaccacgttggtcaggctggtcttgaactcctgacctcaggtgatacggtcccccctcagcctccaaaaatgctaggattatagacgtgagccacagcaccagaccaggggctatttttgtgacccacataggtggcccattcagcctcaaggggaaatccagggtaggaagcagcagctctgctggactgggctcagcagtcccatttgggatgtaagcctctattgcctctaagatgacccttttcctgtgggttgactgactctgagggcgatttcggaaatgttttcagcagaaatgaaggataagcatcgcacatgtccagcaatgtctttgagaatgcagtcatttgcacgtgagttctcatctttgttttctgaaacagacgtttcttttagtaagtcacaatacatgctaattttcatttctagaatggtcactggcagttctcacttttaactataagaagtcacgtggaacttagtgatttttaacaaatactaaattcatcctcactttatgttgatcttccagcaacgtttatatatttagtaattttaaaaattcctatttgatacaattaaattttatataatgtgttttgcttgaataaaatgttacatttatactttgagaactctgaccaaatctttcatacagatacaggtaaagaaatatttttctaggttgtcggagctgcgtacctcccgctgcttctccttgtggtccagcaccacctgctggtcagtggcagaactgtcctgacttcgtgaacatggaactgctaagagggaaaactgcatctcagcattttcattttttctgaatattaagtgaaaagcaagttctatttttaagaaatagcttttgctgaggagttgtgaattcctgcacctgtgtttgatgttatttgtatgcaatggattgctggccctttgttcctaagcaagagaagaccaaagatgcttccccatgacctctccggtgaggatccgcaccccccggacttgctctctgatgaagggcatgtcgttcagtgccccagcagtcagaagcagtttttgtggaactaaaactaataatgttaccctcacaaaggaaatgttcttttactaagttattgctgattcttgaatgtctgttatataactgggtcggctatcaagaaggaaggttatatttcttatcacattttaagttgttaagcaaatgtgagtttttttttaagaaatgaggctttcactgagatttgtgtgctattcataattttaggaattactgcttagaacagctgcttgggtgtatttttctacacaggtctgtacttctgccactttctccttttaaaaaaacaaaactatgcatattatgtattaaagttttcttggttttatatatcagagaataaaaacttttttgacttttgagtaaacaaaaaaaaaaaaaaa

SEQ ID NO: 1467 - protein, 376 aa, Homo sapiens
MNRSFHKSQTLRFYDCSAVEVKSKFGAEFRRFSLDRHKPGKFEDFYKLVVHTHHISNSDVTIGYADVHGDLLPINNDDNFCKAVSSANPLLRVFIQKREEAERGSLGAGSLCRRRRALGALRDEGPRRRAHLDIGLPRDFRPVSSIIDVDLVPETHRRVRLHRHGCEKPLGFYIRDGASVRVTPHGLEKVPGIFISRMVPGGLAESTGLLAVNDEVLEVNGIEVAGKTLDQVTDMMIANSHNLIVTVKPANQRNNVVRGGRALGSSGPPSDGTAGFVGPPAPRVLQNFHPDEAESDEDNDVVIEGTLEPARPPQTPGAPAGSLSRVNGAGLAQRLQRDLALDGGLQRLLSSLRADPRHSLALPPGGVEEHGPAVTL

SEQ ID NO: 1468 - DNA, 1546 bp, Homo sapiens
gggactgagcatggatttcggactggccctcctgctggcggggcttctggggctcctcctcggccagtccctccaggtgaagcccctgcaggtggagcccccggagccggtggtggccgtggccttgggcgcctcgcgccagctcacctgccgcctggcctgcgcggaccgcggggcctcggtgcagtggcggggcctggacaccagcctgggcgcggtgcagtcggacacgggccgcagcgtcctcaccgtgcgcaacgcctcgctgtcggcggccgggacccgcgtgtgcgtgggctcctgcgggggccgcaccttccagcacaccgtgcagctccttgtgtacgccttcccggaccagctgaccgtctccccagcagccctggtgcctggtgacccggaggtggcctgtacggcccacaaagtcacgcccgtggaccccaacgcgctctccttctccctgctcgtcgggggccaggaactggagggggcgcaagccctgggcccggaggtgcaggaggaggaggaggagccccagggggacgaggacgtgctgttcagggtgacagagcgctggcggctgccgcccctggggacccctgtcccgcccgccctctactgccaggccacgatgaggctgcctggcttggagctcagccaccgccaggccatccccgtcctgcacagcccgacctccccggagcctcccgacaccacctccccggagtctcccgacaccacctccccggagtctcccgacaccacctcccaggagcctcccgacaccacctccccggagcctcccgacaagacctccccggagcccgccccccagcagggctccacacacacccccaggagcccaggctccaccaggactcgccgccctgagatctcccaggctgggcccacgcagggagaagtgatcccaacaggctcgtccaaacctgcgggtgaccagctgcccgcggctctgtggaccagcagtgcggtgctgggactgctgctcctggccttgcccacctatcacctctggaaacgctgccggcacctggctgaggacgacacccacccaccagcttctctgaggcttctgccccaggtgtcggcctgggctgggttaagggggaccggccaggtcgggatcagcccctcctgagtggccagcctttccccctgtgaaagcaaaatagcttggaccccttcaagttgagaactggtcagggcaaacctgcctcccattctactcaaagtcatccctctgttcacagagatggatgcatgttctgattgcctctttggagaagctcatcagaaactcaaaagaaggccactgtttgtctcacctacccatgacctgaagcccctccctgagtggtccccacctttctggacggaaccacgtactttttacatacattgattcatgtctcacgtctccctaaaaatgcgtaagaccaagctgtgccctgaccaccctgggcccctgtcgtcaggacctcctgaggctttggcaaataaacctcctaaaatgataaaaaaaaaa

SEQ ID NO: 1469 - protein, 382 aa, Homo sapiens
MDFGLALLLAGLLGLLLGQSLQVKPLQVEPPEPVVAVALGASRQLTCRLACADRGASVQWRGLDTSLGAVQSDTGRSVLTVRNASLSAAGTRVCVGSCGGRTFQHTVQLLVYAFPDQLTVSPAALVPGDPEVACTAHKVTPVDPNALSFSLLVGGQELEGAQALGPEVQEEEEEPQGDEDVLFRVTERWRLPPLGTPVPPALYCQATMRLPGLELSHRQAIPVLHSPTSPEPPDTTSPESPDTTSPESPDTTSQEPPDTTSPEPPDKTSPEPAPQQGSTHTPRSPGSTRTRRPEISQAGPTQGEVIPTGSSKPAGDQLPAALWTSSAVLGLLLLALPTYHLWKRCRHLAEDDTHPPASLRLLPQVSAWAGLRGTGQVGISPS

SEQ ID NO: 1470 - DNA, 1285 bp, Homo sapiens
gggactgagcatggatttcggactggccctcctgctggcggggcttctggggctcctcctcggccagtccctccaggtgaagcccctgcaggtggagcccccggagccggtggtggccgtggccttgggcgcctcgcgccagctcacctgccgcctggcctgcgcggaccgcggggcctcggtgcagtggcggggcctggacaccagcctgggcgcggtgcagtcggacacgggccgcagcgtcctcaccgtgcgcaacgcctcgctgtcggcggccgggacccgcgtgtgcgtgggctcctgcgggggccgcaccttccagcacaccgtgcagctccttgtgtacgccttcccggaccagctgaccgtctccccagcagccctggtgcctggtgacccggaggtggcctgtacggcccacaaagtcacgcccgtggaccccaacgcgctctccttctccctgctcgtcgggggccaggaactggagggggcgcaagccctgggcccggaggtgcaggaggaggaggaggagccccagggggacgaggacgtgctgttcagggtgacagagcgctggcggctgccgcccctggggacccctgtcccgcccgccctctactgccaggccacgatgaggctgcctggcttggagctcagccaccgccaggccatccccgcgtccaaacctgcgggtgaccagctgcccgcggctctgtggaccagcagtgcggtgctgggactgctgctcctggccttgcccacctatcacctctggaaacgctgccggcacctggctgaggacgacacccacccaccagcttctctgaggcttctgccccaggtgtcggcctgggctgggttaagggggaccggccaggtcgggatcagcccctcctgagtggccagcctttccccctgtgaaagcaaaatagcttggaccccttcaagttgagaactggtcagggcaaacctgcctcccattctactcaaagtcatccctctgttcacagagatggatgcatgttctgattgcctctttggagaagctcatcagaaactcaaaagaaggccactgtttgtctcacctacccatgacctgaagcccctccctgagtggtccccacctttctggacggaaccacgtactttttacatacattgattcatgtctcacgtctccctaaaaatgcgtaagaccaagctgtgccctgaccaccctgggcccctgtcgtcaggacctcctgaggctttggcaaataaacctcctaaaatgataaaaaaaaaa

SEQ ID NO: 1471 - protein, 295 aa, Homo sapiens
MDFGLALLLAGLLGLLLGQSLQVKPLQVEPPEPVVAVALGASRQLTCRLACADRGASVQWRGLDTSLGAVQSDTGRSVLTVRNASLSAAGTRVCVGSCGGRTFQHTVQLLVYAFPDQLTVSPAALVPGDPEVACTAHKVTPVDPNALSFSLLVGGQELEGAQALGPEVQEEEEEPQGDEDVLFRVTERWRLPPLGTPVPPALYCQATMRLPGLELSHRQAIPASKPAGDQLPAALWTSSAVLGLLLLALPTYHLWKRCRHLAEDDTHPPASLRLLPQVSAWAGLRGTGQVGISPS

SEQ ID NO: 1472 - DNA, 1134 bp, Homo sapiens
ctcagcgaagatggcggcagtggagaagcggcggcaagcggtaccaccgccggccggtttcacggacagcggccgccagtcggtatcccgggcggcgggggcggccgagagcgaggaggacttcctgcggcaggtcggcgtgacggaaatgctacgtgcggccctgctgaaggtgctggaggcgcggcccgaggagccgatcgccttcctggctcactacttcgagaacatgggcctgcgctcgcctgtaaacggcggcgccggggagcccccgggccagctcctgctgcagcagcagcgcctgggccgcgcgctatggcaccttcgcctggcccaccactcccagagggccgccttcaacaacaacgtgagcgtggcctacgagtgcctgagcgccggcgggcgcaggaagaggccggggctggacgggcgcacctacagcgagctgctcaggcgcatctgccgggacggccaagcccccgaggaggtggtggcgccgctgctgcgcaaggtgcagtgccgtgaccacgaggcggtgccgctgagcgtcttccgcgcgggcacactcacctgcttcgtgctgctggagttcgtggcgcgcgccggcgcgctcttccagctgctggaggactcggccgccgccgtggccgaccgccgcgtgggccaggccgtgctggacaccctggagggcgcgctgcaggccagcgacgccgccgcgcccgcgcgcttcctggaggccggctcgcgcttggggcccgacagcctggcgctggcgctggaccgcgccgtcggggggcggcggcccagcgcgcccatgacccgcgaggagtttctggagagggccgccgcgctcttcatcgcgaaggtcaagccggtgggctgaggcccgtgggccgcgcggatccgggatctgcgctggggggtccccgcgtgcggggcgcgcggagccttcccttcgccctggtgaggccctgccataaccaggcgcccagccctgcggaggaggccggggctcccaggaagcggacgcccggtccccacacagcgccgcggccgcccctccacccccgcgggagcccctgccccacgctaataaaatgtgttgcgaggctgaaaaaaaaaaaaaaaaaaaaa

SEQ ID NO: 1473 - protein, 290 aa, Homo sapiens
MAAVEKRRQAVPPPAGFTDSGRQSVSRAAGAAESEEDFLRQVGVTEMLRAALLKVLEARPEEPIAFLAHYFENMGLRSPVNGGAGEPPGQLLLQQQRLGRALWHLRLAHHSQRAAFNNNVSVAYECLSAGGRRKRPGLDGRTYSELLRRICRDGQAPEEVVAPLLRKVQCRDHEAVPLSVFRAGTLTCFVLLEFVARAGALFQLLEDSAAAVADRRVGQAVLDTLEGALQASDAAAPARFLEAGSRLGPDSLALALDRAVGGRRPSAPMTREEFLERAAALFIAKVKPVG

SEQ ID NO: 1474 - DNA, 1462 bp, Homo sapiens
ggcaagcgccggtggggcggcggcgccagagctgctggagcgctcggggtccccgggcggcggcggcggcgcagaggaggaggcaggcggcggccccggtggctcccccccggacggtgcgcggcccggcccgtctcgcgaactcgcggtggtcgcgcggccccgcgctgctccgaccccgggcccctccgccgccgccatggctcggccgctagtgcccagctcgcagaaggcgctgctgctggagctcaaggggctgcaggaagagccggtcgagggattccgcgtgacactggtggacgagggcgatctatacaactgggaggtggccatcttcgggccccccaacacctactacgagggcggctacttcaaggcgcgcctcaagttccccatcgactacccatactctccaccagcctttcggttcctgaccaagatgtggcaccctaacatctacgagacgggggacgtgtgtatctccatcctccacccgccggtggacgacccccagagcggggagctgccctcagagaggtggaaccccacgcagaacgtcaggaccattctcctgagtgtgatctccctcctgaacgagcccaacaccttctcgcccgcaaacgtggacgcctccgtgatgtacaggaagtggaaagagagcaaggggaaggatcgggagtacacagacatcatccggaagcaggtcctggggaccaaggtggacgcggagcgtgacggcgtgaaggtgcccaccacgctggccgagtactgcgtgaagaccaaggcgccggcgcccgacgagggctcagacctcttctacgacgactactacgaggacggcgaggtggaggaggaggccgacagctgcttcggggacgatgaggatgactctggcacggaggagtcctgacaccaccagaataaacttgccgagtttacctcactagggccggacccgtggctccttagacgacagactacctcacggaggttttgtgctggtccccgtctcctctggttgtttcgttttggctttttctccctccccatgtctgttctgggttttcacgtgcttcagagaagaggggctgccccaccgccactcacgtcactcggggctcggtggacgggcccagggtgggagcggccggcccacctgtcccctcgggaggggagctgagcccgacttctaccggggtcccccagcttccggactggccgcaccccggaggagccacgggggcgctgctgggaacgtgggcggggggccgtttcctgacactaccagcctgggaggcccaggtgtagcggtccgaggggcccggtcctgcctgtcagctccaggtcctggagccacgtccagcacagagtggacggattcaccgtggccgactcttttccctgctttggtttgtttgaaatctaaataaaactactttatgagaaaaaaaaaaaaaaaaaa

SEQ ID NO: 1475 - protein, 236 aa, Homo sapiens
MARPLVPSSQKALLLELKGLQEEPVEGFRVTLVDEGDLYNWEVAIFGPPNTYYEGGYFKARLKFPIDYPYSPPAFRFLTKMWHPNIYETGDVCISILHPPVDDPQSGELPSERWNPTQNVRTILLSVISLLNEPNTFSPANVDASVMYRKWKESKGKDREYTDIIRKQVLGTKVDAERDGVKVPTTLAEYCVKTKAPAPDEGSDLFYDDYYEDGEVEEEADSCFGDDEDDSGTEES

SEQ ID NO: 1476 - DNA, 947 bp, Homo sapiens
ggctcggggccggggccagcacccacactgggtctccacagcggcatggaggcctgcgtgtcttcactgctggtgctggccctgggggccctgtcagtaggcagctcctttgggacccagatcatcgggggccgggaggtgatcccccactcgcgcccgtacatggcctcactgcagagaaatggctcccacctgtgcgggggtgtcctggtgcacccaaagtgggtgctgacggctgcccactgcctggcccagcggatggcccagctgaggctggtgctggggctccacaccctggacagccccggtctcaccttccacatcaaggcagccatccagcaccctcgctacaagcccgtccctgccctggagaacgacctcgcgctgcttcagctggacgggaaagtgaagcccagccggaccatccggccgttggccctgcccagtaagcgccaggtggtggcagcagggactcggtgcagcatggccggctgggggctgacccaccagggcgggcgcctgtcccgggtgctgcgggagctggacctccaagtgctggacacccgcatgtgtaacaacagccgcttctggaacggcagcctctcccccagcatggtctgcctggcggccgactccaaggaccaggctccctgcaagggtgactcgggcgggcccctggtgtgtggcaaaggccgggtgttggccggagtcctgtccttcagctccagggtctgcactgacatcttcaagcctcccgtggccaccgctgtggcgccttacgtgtcctggatcaggaaggtcaccggccgatcggcctgatgccctggggtgatggggaccccctcgctgtctccacaggacccttcccctccaggggtgcagtggggtgggtgaggacgggtgggagggacagggagggaccaataaatcataatgaagaaacgctc

SEQ ID NO: 1477 - protein, 257 aa, Homo sapiens
MEACVSSLLVLALGALSVGSSFGTQIIGGREVIPHSRPYMASLQRNGSHLCGGVLVHPKWVLTAAHCLAQRMAQLRLVLGLHTLDSPGLTFHIKAAIQHPRYKPVPALENDLALLQLDGKVKPSRTIRPLALPSKRQVVAAGTRCSMAGWGLTHQGGRLSRVLRELDLQVLDTRMCNNSRFWNGSLSPSMVCLAADSKDQAPCKGDSGGPLVCGKGRVLAGVLSFSSRVCTDIFKPPVATAVAPYVSWIRKVTGRSA

SEQ ID NO: 1478 - DNA, 2024 bp, Homo sapiens
gtgcgcgcgcccggtccgcgcctccgccgctttttatagcggccgcgggcggcggcggcagcggttggaggttgtaggaccggcgaggaataggaatcatggcggctgcgctgttcgtgctgctgggattcgcgctgctgggcacccacggagcctccggggctgccggcttcgtccaggcgccgctgtcccagcagaggtgggtggggggcagtgtggagctgcactgcgaggccgtgggcagcccggtgcccgagatccagtggtggtttgaagggcagggtcccaacgacacctgctcccagctctgggacggcgcccggctggaccgcgtccacatccacgccacctaccaccagcacgcggccagcaccatctccatcgacacgctcgtggaggaggacacgggcacttacgagtgccgggccagcaacgacccggatcgcaaccacctgacccgggcgcccagggtcaagtgggtccgcgcccaggcagtcgtgctagtcctggaacccggcacagtcttcactaccgtagaagaccttggctccaagatactcctcacctgctccttgaatgacagcgccacagaggtcacagggcaccgctggctgaaggggggcgtggtgctgaaggaggacgcgctgcccggccagaaaacggagttcaaggtggactccgacgaccagtggggagagtactcctgcgtcttcctccccgagcccatgggcacggccaacatccagctccacgggcctcccagagtgaaggctgtgaagtcgtcagaacacatcaacgagggggagacggccatgctggtctgcaagtcagagtccgtgccacctgtcactgactgggcctggtacaagatcactgactctgaggacaaggccctcatgaacggctccgagagcaggttcttcgtgagttcctcgcagggccggtcagagctacacattgagaacctgaacatggaggccgaccccggccagtaccggtgcaacggcaccagctccaagggctccgaccaggccatcatcacgctccgcgtgcgcagccacctggccgccctctggcccttcctgggcatcgtggctgaggtgctggtgctggtcaccatcatcttcatctacgagaagcgccggaagcccgaggacgtcctggatgatgacgacgccggctctgcacccctgaagagcagcgggcagcaccagaatgacaaaggcaagaacgtccgccagaggaactcttcctgaggcaggtggcccgaggacgctccctgctccacgtctgcgccgccgccggagtccactcccagtgcttgcaagattccaagttctcacctcttaaagaaaacccaccccgtagattcccatcatacacttccttcttttttaaaaaagttgggttttctccattcaggattctgttccttaggtttttttccttctgaagtgtttcacgagagcccgggagctgctgccctgcggccccgtctgtggctttcagcctctgggtctgagtcatggccgggtgggcggcacagccttctccactggccggagtcagtgccaggtccttgccctttgtggaaagtcacaggtcacacgaggggccccgtgtcctgcctgtctgaagccaatgctgtctggttgcgccatttttgtgcttttatgtttaattttatgagggccacgggtctgtgttcgactcagcctcagggacgactctgacctcttggccacagaggactcacttgcccacaccgagggcgaccccgtcacagcctcaagtcactcccaagccccctccttgtctgtgcatccgggggcagctctggagggggtttgctggggaactggcgccatcgccgggactccagaaccgcagaagcctccccagctcacccctggaggacggccggctctctatagcaccagggctcacgtgggaacccccctcccacccaccgccacaataaagatcgcccccacctccaccctcaaaaaaaaaaaaaaaaaaaa

SEQ ID NO: 1479 - protein, 385 aa, Homo sapiens
MAAALFVLLGFALLGTHGASGAAGFVQAPLSQQRWVGGSVELHCEAVGSPVPEIQWWFEGQGPNDTCSQLWDGARLDRVHIHATYHQHAASTISIDTLVEEDTGTYECRASNDPDRNHLTRAPRVKWVRAQAVVLVLEPGTVFTTVEDLGSKILLTCSLNDSATEVTGHRWLKGGVVLKEDALPGQKTEFKVDSDDQWGEYSCVFLPEPMGTANIQLHGPPRVKAVKSSEHINEGETAMLVCKSESVPPVTDWAWYKITDSEDKALMNGSESRFFVSSSQGRSELHIENLNMEADPGQYRCNGTSSKGSDQAIITLRVRSHLAALWPFLGIVAEVLVLVTIIFIYEKRRKPEDVLDDDDAGSAPLKSSGQHQNDKGKNVRQRNSS

SEQ ID NO: 1480 - DNA, 1676 bp, Homo sapiens
gtgcgcgcgcccggtccgcgcctccgccgctttttatagcggccgcgggcggcggcggcagcggttggaggttgtaggaccggcgaggaataggaatcatggcggctgcgctgttcgtgctgctgggattcgcgctgctgggcacccacggagcctccggggctgccggcacagtcttcactaccgtagaagaccttggctccaagatactcctcacctgctccttgaatgacagcgccacagaggtcacagggcaccgctggctgaaggggggcgtggtgctgaaggaggacgcgctgcccggccagaaaacggagttcaaggtggactccgacgaccagtggggagagtactcctgcgtcttcctccccgagcccatgggcacggccaacatccagctccacgggcctcccagagtgaaggctgtgaagtcgtcagaacacatcaacgagggggagacggccatgctggtctgcaagtcagagtccgtgccacctgtcactgactgggcctggtacaagatcactgactctgaggacaaggccctcatgaacggctccgagagcaggttcttcgtgagttcctcgcagggccggtcagagctacacattgagaacctgaacatggaggccgaccccggccagtaccggtgcaacggcaccagctccaagggctccgaccaggccatcatcacgctccgcgtgcgcagccacctggccgccctctggcccttcctgggcatcgtggctgaggtgctggtgctggtcaccatcatcttcatctacgagaagcgccggaagcccgaggacgtcctggatgatgacgacgccggctctgcacccctgaagagcagcgggcagcaccagaatgacaaaggcaagaacgtccgccagaggaactcttcctgaggcaggtggcccgaggacgctccctgctccacgtctgcgccgccgccggagtccactcccagtgcttgcaagattccaagttctcacctcttaaagaaaacccaccccgtagattcccatcatacacttccttcttttttaaaaaagttgggttttctccattcaggattctgttccttaggtttttttccttctgaagtgtttcacgagagcccgggagctgctgccctgcggccccgtctgtggctttcagcctctgggtctgagtcatggccgggtgggcggcacagccttctccactggccggagtcagtgccaggtccttgccctttgtggaaagtcacaggtcacacgaggggccccgtgtcctgcctgtctgaagccaatgctgtctggttgcgccatttttgtgcttttatgtttaattttatgagggccacgggtctgtgttcgactcagcctcagggacgactctgacctcttggccacagaggactcacttgcccacaccgagggcgaccccgtcacagcctcaagtcactcccaagccccctccttgtctgtgcatccgggggcagctctggagggggtttgctggggaactggcgccatcgccgggactccagaaccgcagaagcctccccagctcacccctggaggacggccggctctctatagcaccagggctcacgtgggaacccccctcccacccaccgccacaataaagatcgcccccacctccaccctcaaaaaaaaaaaaaaaaaaaa

SEQ ID NO: 1481 - protein, 269 aa, Homo sapiens
MAAALFVLLGFALLGTHGASGAAGTVFTTVEDLGSKILLTCSLNDSATEVTGHRWLKGGVVLKEDALPGQKTEFKVDSDDQWGEYSCVFLPEPMGTANIQLHGPPRVKAVKSSEHINEGETAMLVCKSESVPPVTDWAWYKITDSEDKALMNGSESRFFVSSSQGRSELHIENLNMEADPGQYRCNGTSSKGSDQAIITLRVRSHLAALWPFLGIVAEVLVLVTIIFIYEKRRKPEDVLDDDDAGSAPLKSSGQHQNDKGKNVRQRNSS

SEQ ID NO: 1482 - DNA, 1766 bp, Homo sapiens
ttcggcttagtctgcggtcctcttgcattgcgactccgagtttaacttccaacacacactttcaacctccaagagacgcccccacctgtgtcgccccaatagcgacttttctcaccgtggtcgccgcggaacttcaagggtccttcctacccgcgttgctgagagtctgggtttacgcgtcacctcgggcgggacccgatcctccgctcctgaggcccccacaatgaagcagtcggacgcgtctccccaagaaagccggcacagtcttcactaccgtagaagaccttggctccaagatactcctcacctgctccttgaatgacagcgccacagaggtcacagggcaccgctggctgaaggggggcgtggtgctgaaggaggacgcgctgcccggccagaaaacggagttcaaggtggactccgacgaccagtggggagagtactcctgcgtcttcctccccgagcccatgggcacggccaacatccagctccacgggcctcccagagtgaaggctgtgaagtcgtcagaacacatcaacgagggggagacggccatgctggtctgcaagtcagagtccgtgccacctgtcactgactgggcctggtacaagatcactgactctgaggacaaggccctcatgaacggctccgagagcaggttcttcgtgagttcctcgcagggccggtcagagctacacattgagaacctgaacatggaggccgaccccggccagtaccggtgcaacggcaccagctccaagggctccgaccaggccatcatcacgctccgcgtgcgcagccacctggccgccctctggcccttcctgggcatcgtggctgaggtgctggtgctggtcaccatcatcttcatctacgagaagcgccggaagcccgaggacgtcctggatgatgacgacgccggctctgcacccctgaagagcagcgggcagcaccagaatgacaaaggcaagaacgtccgccagaggaactcttcctgaggcaggtggcccgaggacgctccctgctccacgtctgcgccgccgccggagtccactcccagtgcttgcaagattccaagttctcacctcttaaagaaaacccaccccgtagattcccatcatacacttccttcttttttaaaaaagttgggttttctccattcaggattctgttccttaggtttttttccttctgaagtgtttcacgagagcccgggagctgctgccctgcggccccgtctgtggctttcagcctctgggtctgagtcatggccgggtgggcggcacagccttctccactggccggagtcagtgccaggtccttgccctttgtggaaagtcacaggtcacacgaggggccccgtgtcctgcctgtctgaagccaatgctgtctggttgcgccatttttgtgcttttatgtttaattttatgagggccacgggtctgtgttcgactcagcctcagggacgactctgacctcttggccacagaggactcacttgcccacaccgagggcgaccccgtcacagcctcaagtcactcccaagccccctccttgtctgtgcatccgggggcagctctggagggggtttgctggggaactggcgccatcgccgggactccagaaccgcagaagcctccccagctcacccctggaggacggccggctctctatagcaccagggctcacgtgggaacccccctcccacccaccgccacaataaagatcgcccccacctccaccctcaaaaaaaaaaaaaaaaaaaa

SEQ ID NO: 1483 - protein, 176 aa, Homo sapiens
MGTANIQLHGPPRVKAVKSSEHINEGETAMLVCKSESVPPVTDWAWYKITDSEDKALMNGSESRFFVSSSQGRSELHIENLNMEADPGQYRCNGTSSKGSDQAIITLRVRSHLAALWPFLGIVAEVLVLVTIIFIYEKRRKPEDVLDDDDAGSAPLKSSGQHQNDKGKNVRQRNSS

SEQ ID NO: 1484 - DNA, 1609 bp, Homo sapiens
ttcggcttagtctgcggtcctcttgcattgcgactccgagtttaacttccaacacacactttcaacctccaagagacgcccccacctgtgtcgccccaatagcgacttttctcaccgtggtcgccgcggaacttcaagggtccttcctacccgcgttgctgagagtctgggtttacgcgtcacctcgggcgggacccgatcctccgctcctgaggcccccacaatgaagcagtcggacgcgtctccccaagaaagggtggactccgacgaccagtggggagagtactcctgcgtcttcctccccgagcccatgggcacggccaacatccagctccacgggcctcccagagtgaaggctgtgaagtcgtcagaacacatcaacgagggggagacggccatgctggtctgcaagtcagagtccgtgccacctgtcactgactgggcctggtacaagatcactgactctgaggacaaggccctcatgaacggctccgagagcaggttcttcgtgagttcctcgcagggccggtcagagctacacattgagaacctgaacatggaggccgaccccggccagtaccggtgcaacggcaccagctccaagggctccgaccaggccatcatcacgctccgcgtgcgcagccacctggccgccctctggcccttcctgggcatcgtggctgaggtgctggtgctggtcaccatcatcttcatctacgagaagcgccggaagcccgaggacgtcctggatgatgacgacgccggctctgcacccctgaagagcagcgggcagcaccagaatgacaaaggcaagaacgtccgccagaggaactcttcctgaggcaggtggcccgaggacgctccctgctccacgtctgcgccgccgccggagtccactcccagtgcttgcaagattccaagttctcacctcttaaagaaaacccaccccgtagattcccatcatacacttccttcttttttaaaaaagttgggttttctccattcaggattctgttccttaggtttttttccttctgaagtgtttcacgagagcccgggagctgctgccctgcggccccgtctgtggctttcagcctctgggtctgagtcatggccgggtgggcggcacagccttctccactggccggagtcagtgccaggtccttgccctttgtggaaagtcacaggtcacacgaggggccccgtgtcctgcctgtctgaagccaatgctgtctggttgcgccatttttgtgcttttatgtttaattttatgagggccacgggtctgtgttcgactcagcctcagggacgactctgacctcttggccacagaggactcacttgcccacaccgagggcgaccccgtcacagcctcaagtcactcccaagccccctccttgtctgtgcatccgggggcagctctggagggggtttgctggggaactggcgccatcgccgggactccagaaccgcagaagcctccccagctcacccctggaggacggccggctctctatagcaccagggctcacgtgggaacccccctcccacccaccgccacaataaagatcgcccccacctccaccctcaaaaaaaaaaaaaaaaaaaa

SEQ ID NO: 1485 - protein, 205 aa, Homo sapiens
MKQSDASPQERVDSDDQWGEYSCVFLPEPMGTANIQLHGPPRVKAVKSSEHINEGETAMLVCKSESVPPVTDWAWYKITDSEDKALMNGSESRFFVSSSQGRSELHIENLNMEADPGQYRCNGTSSKGSDQAIITLRVRSHLAALWPFLGIVAEVLVLVTIIFIYEKRRKPEDVLDDDDAGSAPLKSSGQHQNDKGKNVRQRNSS

SEQ ID NO: 1486 - DNA, 3459 bp, Homo sapiens
ggccggcggcggcggcggcggctccgctccgcactgcccggcgccgcctcgccatggacgcgcgcgggggcggcgggcggcccggggagagcccgggcgcgacccccgcgccggggccgccgccgccgccgccgcccgcgcccccccaacagcagccgccgccgccgccgccgcccgcgccccccccgggccccgggcccgcgcccccccagcacccgccccgggccgaggcgttgcccccggaggcggcggatgagggcggcccgcggggccggctccgcagccgcgacagctcgtgcggccgccccggcaccccgggcgcggcgagcacggccaagggcagcccgaacggcgagtgcgggcgcggcgagccgcagtgcagccccgcggggcccgagggcccggcgcgggggcccaaggtgtcgttctcgtgccgcggggcggcctcggggcccgcgccggggccggggccggcggaggaggcgggcagcgaggaggcgggcccggcgggggagccgcgcggcagccaggccagcttcatgcagcgccagttcggcgcgctcctgcagccgggcgtcaacaagttctcgctgcggatgttcggcagccagaaggccgtggagcgcgagcaggagcgcgtcaagtcggcgggggcctggatcatccacccgtacagcgacttcaggttctactgggacttcaccatgctgctgttcatggtgggaaacctcatcatcatcccagtgggcatcaccttcttcaaggatgagaccactgccccgtggatcgtgttcaacgtggtctcggacaccttcttcctcatggacctggtgttgaacttccgcaccggcattgtgatcgaggacaacacggagatcatcctggaccccgagaagatcaagaagaagtatctgcgcacgtggttcgtggtggacttcgtgtcctccatccccgtggactacatcttccttatcgtggagaagggcattgactccgaggtctacaagacggcacgcgccctgcgcatcgtgcgcttcaccaagatcctcagcctcctgcggctgctgcgcctctcacgcctgatccgctacatccatcagtgggaggagatcttccacatgacctatgacctggccagcgcggtgatgaggatctgcaatctcatcagcatgatgctgctgctctgccactgggacggctgcctgcagttcctggtgcctatgctgcaggacttcccgcgcaactgctgggtgtccatcaatggcatggtgaaccactcgtggagtgaactgtactccttcgcactcttcaaggccatgagccacatgctgtgcatcgggtacggccggcaggcgcccgagagcatgacggacatctggctgaccatgctcagcatgattgtgggtgccacctgctacgccatgttcatcggccacgccactgccctcatccagtcgctggactcctcgcggcgccagtaccaggagaagtacaagcaggtggagcagtacatgtccttccacaagctgccagctgacttccgccagaagatccacgactactatgagcaccgttaccagggcaagatgtttgacgaggacagcatcctgggcgagctcaacgggcccctgcgggaggagatcgtcaacttcaactgccggaagctggtggcctccatgccgctgttcgccaacgccgaccccaacttcgtcacggccatgctgaccaagctcaagttcgaggtcttccagccgggtgactacatcatccgcgaaggcaccatcgggaagaagatgtacttcatccagcacggcgtggtcagcgtgctcactaagggcaacaaggagatgaagctgtccgatggctcctacttcggggagatctgcctgctcacccggggccgccgcacggcgagcgtgcgggctgacacctactgccgcctctattcgctgagcgtggacaacttcaacgaggtgctggaggagtaccccatgatgcggcgcgccttcgagacggtggccatcgaccgcctggaccgcatcggcaagaagaattccatcctcctgcacaaggtgcagcatgacctcaactcgggcgtattcaacaaccaggagaacgccatcatccaggagatcgtcaagtacgaccgcgagatggtgcagcaggccgagctgggtcagcgcgtgggcctcttcccgccgccgccgccgccgccgcaggtcacctcggccatcgccacgctgcagcaggcggcggccatgagcttctgcccgcaggtggcgcggccgctcgtggggccgctggcgctcggctcgccgcgcctcgtgcgccgcccgcccccggggcccgcacctgccgccgcctcacccgggcccccgccccccgccagccccccgggcgcgcccgccagcccccgggcaccgcggacctcgccctacggcggcctgcccgccgccccccttgctgggcccgccctgcccgcgcgccgcctgagccgcgcgtcgcgcccactgtccgcctcgcagccctcgctgcctcacggcgcccccggccccgcggcctccacacgcccggccagcagctccacaccgcgcttggggcccacgcccgctgcccgggccgccgcgcccagcccggaccgcagggactcggcctcacccggcgccgccggcggcctggacccccaggactccgcgcgctcgcgcctctcgtccaacttgtgaccctcgccgaccgccccgcgggcccaggcgggccgggggcggggccgtcatccagaccaaagccatgccattgcgctgccccggccgccagtccgcccagaagccatagacgagacgtaggtagccgtagttggacggacgggcagggccggcggggcagccccctccgcgcccccggccgtcccccctcatcgccccgcgcccacccccatcgcccctgcccccggcggcggcctcgcgtgcgagggggctcccttcacctcggtgcctcagttcccccagctgtaagacagggacggggcggcccagtggctgagaggagccggctgtggagccccgcccgccccccaccctctaggtggcccccgtccgaggaggatcgttttctaagtgcaatacttggcccgccggcttcccgctgcccccatcgcgctcacgcaataaccggcccggcccccgtccgcgcgcgtcccccggtgacctcggggagcagcaccccgcctccctccagcactggcaccgagaggcaggcctggctgcgcagggcgcgggggggaggctggggtcccgccgccgtgatgaatgtactgacgagccgaggcagcagtgcccccaccgtggccccccacgccccattaacccccacacccccattccgcgcaataaacgacagcattggcgccaaaaaaaaaaaaaaaaaaaaaaaaaaaaaaaaaaaaaaaaaaaaaaaaaaaaa

SEQ ID NO: 1487 - protein, 889 aa, Homo sapiens
MDARGGGGRPGESPGATPAPGPPPPPPPAPPQQQPPPPPPPAPPPGPGPAPPQHPPRAEALPPEAADEGGPRGRLRSRDSSCGRPGTPGAASTAKGSPNGECGRGEPQCSPAGPEGPARGPKVSFSCRGAASGPAPGPGPAEEAGSEEAGPAGEPRGSQASFMQRQFGALLQPGVNKFSLRMFGSQKAVEREQERVKSAGAWIIHPYSDFRFYWDFTMLLFMVGNLIIIPVGITFFKDETTAPWIVFNVVSDTFFLMDLVLNFRTGIVIEDNTEIILDPEKIKKKYLRTWFVVDFVSSIPVDYIFLIVEKGIDSEVYKTARALRIVRFTKILSLLRLLRLSRLIRYIHQWEEIFHMTYDLASAVMRICNLISMMLLLCHWDGCLQFLVPMLQDFPRNCWVSINGMVNHSWSELYSFALFKAMSHMLCIGYGRQAPESMTDIWLTMLSMIVGATCYAMFIGHATALIQSLDSSRRQYQEKYKQVEQYMSFHKLPADFRQKIHDYYEHRYQGKMFDEDSILGELNGPLREEIVNFNCRKLVASMPLFANADPNFVTAMLTKLKFEVFQPGDYIIREGTIGKKMYFIQHGVVSVLTKGNKEMKLSDGSYFGEICLLTRGRRTASVRADTYCRLYSLSVDNFNEVLEEYPMMRRAFETVAIDRLDRIGKKNSILLHKVQHDLNSGVFNNQENAIIQEIVKYDREMVQQAELGQRVGLFPPPPPPPQVTSAIATLQQAAAMSFCPQVARPLVGPLALGSPRLVRRPPPGPAPAAASPGPPPPASPPGAPASPRAPRTSPYGGLPAAPLAGPALPARRLSRASRPLSASQPSLPHGAPGPAASTRPASSSTPRLGPTPAARAAAPSPDRRDSASPGAAGGLDPQDSARSRLSSNL

SEQ ID NO: 1488 - DNA, 2758 bp, Homo sapiens
acaataaacagcagctttgcgcggggcgatgcccgagccggtgccgccgcccccgcgccgcgcagccccggccgccaggccttagcccgccccggcccccgccaggccgcgtccccctcccctcccctcccccgcgcgccacccgcgcccgcccccgcccggcaccgcggacccacccggacctcggcggggagatggaggtcctggcggcagagaccacgtcccagcaggagcggctgcaggccatcgcagagaagcggaagcggcaggcggagatcgagaacaagcgccggcagctggaggacgagcggaggcagctgcagcacctgaagtccaaggcactgcgggagcgctggctgctggaggggacgccgtcctcggcctcagagggggatgaggacctgaggaggcagatgcaggacgacgagcagaagacacggctgctggaggactcggtgtccaggttggagaaggaaattgaggtgctggagcgtggagactccgccccagccactgccaaggagaacgcggcggccccgagcccagtccgggccccagccccgagtccagccaaggaggagcgcaagacagaggtggtgatgaattcacagcagacgccggtgggcacgcccaaagacaagcgagtctccaacacgcccctgaggacggttgacggctcccccatgatgaaggcagtggtccatgctgtggacggcaccgccgagaacgggatccaccccctgagctcctccgaggtggacgaactcatccacaaagcggacgaggtcacgctgagcgaggcagggtccacggccggggcggcagagacccggggggctgtggagggggcagcccggaccacgccctcccggcgggagatcaccggtgtgcaggcacagccaggcgaggccacgtccggcccgccggggatccagcccggccaggagcccccggtcacaatgatcttcatgggttaccagaacgtggaggatgaggccgagaccaagaaggtgctgggccttcaagataccatcacggcggagctggtggtcatcgaagacgcggctgagcccaaggagcctgcaccacccaacggcagtgctgccgagcctcccacggaggccgcctccagggaagagaatcaggcggggcccgaggccaccaccagcgacccccaggacctcgacatgaagaagcaccgttgtaaatgctgctccatcatgtgagccggcccccgagaccccggcccccaccccacaccacagacacccaccagcccggcccctcccggcgcctgcccaccctccacccacagcctcacgggtccaggacttggcgtgttgttacatgttccttccgagttttctttcgctggaaagagggacaggggcccccacccgtcaccacgccccaacactccccccgaaccagagccgtgcacttgtgcctggtaggagagagacaggacagacccgcttttcccgagacaaggaccccccatgtcacggcagcttcacagacgcggctcgcgcccaccggggtcctggcgggtgggacccgcagcctccacgcggcccaggccagcctgccaccctctgggcctcctacctgtgcctttctctgaggggacaccccgccagagagggccccgggagccgggggtgggtactgaggcctgctcaggccctggaagtgaggctctatggggttccctggccaaggcgctggccccccaatctcaggcagttggggtgaggccgtgcctctttgggggctaaaggtcttgggtggaggacaggcccctctgctgtgcccctatgccctgtgtgggcccaaccagtggacaatggagtctgggggagggggaaccccggggacatgcccccacccgggaggggccggtaacccctgggctatcttctagacggggcgaaccaggggtcattgacctgccccctgcacagggcagggaccgagtgagccactccttgtcccgagctcccgcccccactgggccctccttcctcctggtgctaatttggggaccccaggggccgcccccggcctcttctccatcctgcttggaccagggtcctgggtcttcccaaccataccccgagatcaggccccacctgccagctctactgggcttggagcacgtccgggcagtggagggagggacacagcctgggacaggaagcctcttgggttggagcaggagaccctcatttgccacccagaccaatgtgagcctgcccccagccccctctcattggaagtggcaaggggcttccctcctgggggcagctacactcgtccccagaggcacattcgtgcacattctcacagacaccgtctcacacgttggctttggacaaccaggccccaacttggtccctgccctagggacctccagcctggtgcccagtgctcaggccacctcctggtccagtcaccacctgcagcctcggcagggcaggtacaggggccacctcggatgggagcctgggtccctgcctccgctctgcccctgggtggctgggaggagaggccctctcgggggtgacctgggcgtcagccgtggaaccccctcctcctccctggagtctgcctgagtccctcgagccgcgagccttcgctgaagtgcccttgctataaccccctctgcttctggtgtgtgacgaggcccccgatgttcttgattttcccagagaagcaaataaacagcgtgaacagccccagaaaaaaaaaaaaaaaa

SEQ ID NO: 1489 - protein, 343 aa, Homo sapiens
MEVLAAETTSQQERLQAIAEKRKRQAEIENKRRQLEDERRQLQHLKSKALRERWLLEGTPSSASEGDEDLRRQMQDDEQKTRLLEDSVSRLEKEIEVLERGDSAPATAKENAAAPSPVRAPAPSPAKEERKTEVVMNSQQTPVGTPKDKRVSNTPLRTVDGSPMMKAVVHAVDGTAENGIHPLSSSEVDELIHKADEVTLSEAGSTAGAAETRGAVEGAARTTPSRREITGVQAQPGEATSGPPGIQPGQEPPVTMIFMGYQNVEDEAETKKVLGLQDTITAELVVIEDAAEPKEPAPPNGSAAEPPTEAASREENQAGPEATTSDPQDLDMKKHRCKCCSIM

SEQ ID NO: 1490 - DNA, 2890 bp, Homo sapiens
acaataaacagcagctttgcgcggggcgatgcccgagccggtgccgccgcccccgcgccgcgcagccccggccgccaggccttagcccgccccggcccccgccaggccgcgtccccctcccctcccctcccccgcgcgccacccgcgcccgcccccgcccggcaccgcggacccacccggacctcggcggggagatggaggtcctggcggcagagaccacgtcccagcaggagcggctgcaggccatcgcagagaagcggaagcggcaggcggagatcgagaacaagcgccggcagctggaggacgagcggaggcagctgcagcacctgaagtccaaggcactgcgggagcgctggctgctggaggggacgccgtcctcggcctcagagggggatgaggacctgaggaggcagatgcaggacgacgagcagaagacacggctgctggaggactcggtgtccaggttggagaaggaaattgaggtgctggagcgtggagactccgccccagccactgccaaggagaacgcggcggccccgagcccagtccgggccccagccccgagtccagccaaggaggagcgcaagacagaggtggtgatgaattcacagcagacgccggtgggcacgcccaaagacaagcgagtctccaacacgcccctgaggacggttgacggctcccccatgatgaaggcagccatgtactcggttgagatcactgtggagaaggacaaggtgacaggggagaccagggtgctgtccagcaccacgctgctccctcggcagccgctccctctgggcatcaaagtctacgaggacgagaccaaagtggtccatgctgtggacggcaccgccgagaacgggatccaccccctgagctcctccgaggtggacgaactcatccacaaagcggacgaggtcacgctgagcgaggcagggtccacggccggggcggcagagacccggggggctgtggagggggcagcccggaccacgccctcccggcgggagatcaccggtgtgcaggcacagccaggcgaggccacgtccggcccgccggggatccagcccggccaggagcccccggtcacaatgatcttcatgggttaccagaacgtggaggatgaggccgagaccaagaaggtgctgggccttcaagataccatcacggcggagctggtggtcatcgaagacgcggctgagcccaaggagcctgcaccacccaacggcagtgctgccgagcctcccacggaggccgcctccagggaagagaatcaggcggggcccgaggccaccaccagcgacccccaggacctcgacatgaagaagcaccgttgtaaatgctgctccatcatgtgagccggcccccgagaccccggcccccaccccacaccacagacacccaccagcccggcccctcccggcgcctgcccaccctccacccacagcctcacgggtccaggacttggcgtgttgttacatgttccttccgagttttctttcgctggaaagagggacaggggcccccacccgtcaccacgccccaacactccccccgaaccagagccgtgcacttgtgcctggtaggagagagacaggacagacccgcttttcccgagacaaggaccccccatgtcacggcagcttcacagacgcggctcgcgcccaccggggtcctggcgggtgggacccgcagcctccacgcggcccaggccagcctgccaccctctgggcctcctacctgtgcctttctctgaggggacaccccgccagagagggccccgggagccgggggtgggtactgaggcctgctcaggccctggaagtgaggctctatggggttccctggccaaggcgctggccccccaatctcaggcagttggggtgaggccgtgcctctttgggggctaaaggtcttgggtggaggacaggcccctctgctgtgcccctatgccctgtgtgggcccaaccagtggacaatggagtctgggggagggggaaccccggggacatgcccccacccgggaggggccggtaacccctgggctatcttctagacggggcgaaccaggggtcattgacctgccccctgcacagggcagggaccgagtgagccactccttgtcccgagctcccgcccccactgggccctccttcctcctggtgctaatttggggaccccaggggccgcccccggcctcttctccatcctgcttggaccagggtcctgggtcttcccaaccataccccgagatcaggccccacctgccagctctactgggcttggagcacgtccgggcagtggagggagggacacagcctgggacaggaagcctcttgggttggagcaggagaccctcatttgccacccagaccaatgtgagcctgcccccagccccctctcattggaagtggcaaggggcttccctcctgggggcagctacactcgtccccagaggcacattcgtgcacattctcacagacaccgtctcacacgttggctttggacaaccaggccccaacttggtccctgccctagggacctccagcctggtgcccagtgctcaggccacctcctggtccagtcaccacctgcagcctcggcagggcaggtacaggggccacctcggatgggagcctgggtccctgcctccgctctgcccctgggtggctgggaggagaggccctctcgggggtgacctgggcgtcagccgtggaaccccctcctcctccctggagtctgcctgagtccctcgagccgcgagccttcgctgaagtgcccttgctataaccccctctgcttctggtgtgtgacgaggcccccgatgttcttgattttcccagagaagcaaataaacagcgtgaacagccccagaaaaaaaaaaaaaaaa

SEQ ID NO: 1491 - protein, 387 aa, Homo sapiens
MEVLAAETTSQQERLQAIAEKRKRQAEIENKRRQLEDERRQLQHLKSKALRERWLLEGTPSSASEGDEDLRRQMQDDEQKTRLLEDSVSRLEKEIEVLERGDSAPATAKENAAAPSPVRAPAPSPAKEERKTEVVMNSQQTPVGTPKDKRVSNTPLRTVDGSPMMKAAMYSVEITVEKDKVTGETRVLSSTTLLPRQPLPLGIKVYEDETKVVHAVDGTAENGIHPLSSSEVDELIHKADEVTLSEAGSTAGAAETRGAVEGAARTTPSRREITGVQAQPGEATSGPPGIQPGQEPPVTMIFMGYQNVEDEAETKKVLGLQDTITAELVVIEDAAEPKEPAPPNGSAAEPPTEAASREENQAGPEATTSDPQDLDMKKHRCKCCSIM

SEQ ID NO: 1492 - DNA, 2907 bp, Homo sapiens
cagactgtggagccgggagccggcagtaagcccagaggtctccaccccacgggaggaaggctgaggccaagaccccggaagagatggaccgcgtgaccagataccccatcctgggcatccctcaggcacaccgtggcaccggcctggtgctggatggagacaccagctacacataccatctggtgtgcatgggccccgaggccagcggctggggccaggatgagccgcagacatggcccactgaccacagggcccagcagggcgtgcagaggcagggggtgtcctacagcgtgcatgcctacactggccagccgtccccacgggggctccactcggagaacagggaggatgagggttggcaggtttaccgcctgggcgccagggatgcccaccagggacgtccaacatgggcactccgcccagaggacggggaggacaaggagatgaagacctaccgcctggatgctggggacgctgaccccaggaggctgtgtgacctggagcgggagcgctgggccgtcatccagggccaggcagtcaggaagagcagcaccgtggccacgctccagggcactcctgaccacggagaccccaggacccccggcccacctcggtccacgcccctggaggagaacgtggttgacagggagcagattgacttcctggcagcgagacagcagttcctgagtctggagcaggcgaacaagggggcccctcatagctccccggccagggggacccctgcaggcacaaccccaggggccagccaggcccccaaggccttcaacaagccccacctggccaacgggcacgtggttcccatcaagccccaggtgaagggggtggtcagggaagagaacaaggtgcgtgctgtgcccacctgggccagtgtccaagttgtggatgaccctggctccttggcctcagtggagtccccggggacccccaaggagacgcccatcgagcgggagatccgtctggctcaggagcgtgaggcagacctgcgagagcagagggggcttcggcaggcaaccgaccaccaggagctggtggaaatccccaccaggccgctgctgaccaagctgagcctgatcacagccccacggcgggagagagggcgcccgtccctctacgtgcagcgggacatagtacaggagacacagcgtgaggaagaccaccggcgggagggcctgcacgtgggccgggcgtccacacccgactgggtctcggagggtccccagcccggactccggagagccctcagctcagattccatcctcagcccggccccagatgcccgtgcggccgacccagctccagaagtgaggaaggtgaaccgcatcccacctgatgcctaccagccgtacctgagccccgggaccccccagctagaattctcagccttcggagcattcggcaagcccagcagtctctccacagcggaggccaaggctgcgacttcaccaaaggccacgatgtccccgaggcatctctcagaatcctctggaaaacccctgagcacaaagcaagaggcatcgaagccccctcggggatgcccgcaagccaacaggggtgtcgtgcggtgggagtacttccgcctgcgtcctctgcggttcagggccccagacgagccccagcaggcccaagtcccccatgtctggggctgggaggtggctggggcccctgcactgaggctgcagaagtcccagtcatctgatctgctggaaagggagagggagagtgtcctgcgccgggagcaagaggtggcagaggagcggagaaatgctctcttcccagaggtcttctccccaacgccagatgagaactctgaccagaactccaggagctcctcccaggcatccggcatcacgggcagttactcggtgtctgagtctcccttcttcagccccatccacctacactcaaacgtggcgtggacagtggaagatccagtggacagtgctcctcccgggcagagaaagaaggagcaatggtacgctggcatcaacccctcggacggtatcaactcagaggtcctggaagccatacgggtgacccgtcacaagaacgccatggcagagcgctgggaatcccgcatctacgccagtgaggaggatgactgagcctcgggatggggcgcccaccccctgccctgccctgaccctcgtgggaactgccaagaccatcgccaagcccccaccctaggaaatgggtcctaggtccaggatccaagaaccacagctcatctgccaacaatcccaccatgggcacatttgggactgttgggtttttcgtttccgtttctatcttcctttagaaatgtttctgcctttggggtctaaagcttttggggatgaaatgggacccctgctgattctttctgcttctaagactttgccaaatgccctgggtctaagaaagaaagagacccgctcctccactttcaggtgtaatttgcttccgctagtctgagggcagagggaccggtcaaagagggtggcacagatcgcagcaccttgaggggctgcgggtctgagggaggagacactcagctcctccctctgagaagtcccaagctgagaggggagacctgcccctttccaaccctgggaaaccatccagtctgagggaggaggccaaactcccagtgctgggggtccctgtgcagccctcaaacccttcaccttggtgcacccagccacacctggtggacacaaagctctcacatcgataggatcccatgaggatggtccccttcacctgggagaaaagtgacccagtttaggagctggaggggggtctttgtcccccacccccaaactgccctgaaataaacctggagtgagctgccaaaaaaaaaaaaaaaaaaaaaaaaaaaaaaaaaaaaaaaaaaaaaaaaaaaaaaaa

SEQ ID NO: 1493 - protein, 679 aa, Homo sapiens
MDRVTRYPILGIPQAHRGTGLVLDGDTSYTYHLVCMGPEASGWGQDEPQTWPTDHRAQQGVQRQGVSYSVHAYTGQPSPRGLHSENREDEGWQVYRLGARDAHQGRPTWALRPEDGEDKEMKTYRLDAGDADPRRLCDLERERWAVIQGQAVRKSSTVATLQGTPDHGDPRTPGPPRSTPLEENVVDREQIDFLAARQQFLSLEQANKGAPHSSPARGTPAGTTPGASQAPKAFNKPHLANGHVVPIKPQVKGVVREENKVRAVPTWASVQVVDDPGSLASVESPGTPKETPIEREIRLAQEREADLREQRGLRQATDHQELVEIPTRPLLTKLSLITAPRRERGRPSLYVQRDIVQETQREEDHRREGLHVGRASTPDWVSEGPQPGLRRALSSDSILSPAPDARAADPAPEVRKVNRIPPDAYQPYLSPGTPQLEFSAFGAFGKPSSLSTAEAKAATSPKATMSPRHLSESSGKPLSTKQEASKPPRGCPQANRGVVRWEYFRLRPLRFRAPDEPQQAQVPHVWGWEVAGAPALRLQKSQSSDLLERERESVLRREQEVAEERRNALFPEVFSPTPDENSDQNSRSSSQASGITGSYSVSESPFFSPIHLHSNVAWTVEDPVDSAPPGQRKKEQWYAGINPSDGINSEVLEAIRVTRHKNAMAERWESRIYASEEDD

SEQ ID NO: 1494 - DNA, 2579 bp, Homo sapiens
ctctctcctccctctttcttcgggcagcctccccaccaccccacttcagcctcccccactcttgccgcctccatatcatcaagctctggtggcgcctggggggcttttcggatcggcaggatgtacccccagggaaggcacccgaccccgctccagtccggccagcccttcaagttctcgatcttggagatctgcgaccgcatcaaagaagaattccagtttcttcaggctcaataccacagcctcaagctagaatgtgagaagctggccagcgagaagacggaaatgcagcgacattatgtcatgtattatgagatgtcgtacgggctcaacattgaaatgcataagcaggcggagattgtgaagcgtctgagcggtatctgcgctcagattatccccttcctgacccaggagcatcagcagcaggtgctccaggccgtagaacgcgccaagcaggtcaccgtgggggagctgaacagcctcatcgggcagcagctccagccgctgtcccaccacgcaccccctgtgcccctcaccccccgcccagccgggctggtgggcggcagtgctacggggctgcttgctctgtctggagccctggctgcccaggctcagctggcggcggctgtcaaggaggaccgtgcgggcgtggaggccgaggggtccagagtggagagagccccgagcaggagtgcatctccctcgccccctgagagtctcgtggaggaggagcgaccgagtggccctggtggtggcgggaagcagagagcagatgagaaggagccatcaggaccttatgaaagcgacgaagacaagagtgattacaatctggtggtggacgaggaccaaccctcagagccccccagcccggctaccaccccctgcggaaaggtacccatctgcattcctgcccgtcgggacctggtggacagtccagcctccttggcctctagccttggctcaccgctgcctagagccaaggagctcatcctgaatgaccttcccgccagcactcctgcctccaaatcctgtgactcctccccgccccaggacgcttccacccccgggcccagctcggccagtcacctctgccagcttgctgccaagccagcaccttccacggacagcgtcgccctgaggagccccctgactctgtccagtcccttcaccacgtccttcagcctgggctcccacagcactctcaacggagacctctccgtgcccagctcctacgtcagcctccacctgtccccccaggtcagcagctctgtggtgtacggacgctcccccgtgatggcatttgagtctcatccccatctccgagggtcatccgtctcttcctccctacccagcatccctgggggaaagccggcctactccttccacgtgtctgcggacgggcagatgcagccggttcccttcccctcggatgcactggtaggcgcgggcatcccgcggcacgcccggcagctgcacacgctggcccatggcgaggtggtctgcgcggtcaccatcagcggctccacacagcatgtgtacacgggcggcaagggctgtgtgaaggtgtgggacgtgggccagcctggggccaagacgcccgtggcccagctcgactgcctgaaccgagacaactacattcgttcctgcaagttgctgccggatggccggagtctgatcgtgggcggtgaggccagcaccttgtccatttgggacctggcggcgcccaccccccgtatcaaggccgagctgacttcctcagccccagcctgctacgccctggccgtcagccccgacgccaaggtttgcttctcctgctgcagcgatggcaacattgtggtctgggacctgcagaatcagactatggtcaggcagttccagggccacacggacggcgccagctgcattgatatttccgattacggcactcggctctggacagggggcctggacaacacggtgcgctgctgggacctgcgggagggccgccagctgcagcagcatgacttcagctcccagattttctccctgggccactgccctaaccaggactggctggcggtcggaatggagagtagcaacgtggagatcctgcacgtccgcaagccggagaaataccagctgcacctccacgagagctgcgtgctgtccctgaagtttgcctcctgcggacggtggtttgtgagcaccgggaaggacaacctgctcaacgcctggaggacgccgtacggggccagcattttccagtccaaggagtcgtcctcagtcctgagttgtgacatctccagaaataacaaatacatcgtgacaggctcgggggacaagaaggccaccgtgtatgaggtggtctactgagacatgaccccccttcctgtacccgaagtccagactcccaggggaatcagcagccaggacagacatcctagcagccgcctcccagccctgcctaggaaccgtacatcccatctgctctctggccaacggcttcacaccttcccctgctgcatgtgggggccgatgggcaggggacctcggtggaaataaaatgtatctatcacatccgcaaaaaaaaaaaaaaaaaa

SEQ ID NO: 1495 - protein, 743 aa, Homo sapiens
MYPQGRHPTPLQSGQPFKFSILEICDRIKEEFQFLQAQYHSLKLECEKLASEKTEMQRHYVMYYEMSYGLNIEMHKQAEIVKRLSGICAQIIPFLTQEHQQQVLQAVERAKQVTVGELNSLIGQQLQPLSHHAPPVPLTPRPAGLVGGSATGLLALSGALAAQAQLAAAVKEDRAGVEAEGSRVERAPSRSASPSPPESLVEEERPSGPGGGGKQRADEKEPSGPYESDEDKSDYNLVVDEDQPSEPPSPATTPCGKVPICIPARRDLVDSPASLASSLGSPLPRAKELILNDLPASTPASKSCDSSPPQDASTPGPSSASHLCQLAAKPAPSTDSVALRSPLTLSSPFTTSFSLGSHSTLNGDLSVPSSYVSLHLSPQVSSSVVYGRSPVMAFESHPHLRGSSVSSSLPSIPGGKPAYSFHVSADGQMQPVPFPSDALVGAGIPRHARQLHTLAHGEVVCAVTISGSTQHVYTGGKGCVKVWDVGQPGAKTPVAQLDCLNRDNYIRSCKLLPDGRSLIVGGEASTLSIWDLAAPTPRIKAELTSSAPACYALAVSPDAKVCFSCCSDGNIVVWDLQNQTMVRQFQGHTDGASCIDISDYGTRLWTGGLDNTVRCWDLREGRQLQQHDFSSQIFSLGHCPNQDWLAVGMESSNVEILHVRKPEKYQLHLHESCVLSLKFASCGRWFVSTGKDNLLNAWRTPYGASIFQSKESSSVLSCDISRNNKYIVTGSGDKKATVYEVVY

SEQ ID NO: 1496 - DNA, 1687 bp, Homo sapiens
cgggcgcgcggggagggggcgcaggaagcgggcgaggccgggcgcgggaggcggcggcggccccgggagctgccgatcggcgccgggacaaaggcgcggccgcccggcgcccccagcagcccgagccggggcgcacagccggggcgcagcccgcgccccccgccgcgattgacatgatgtttccacaaagcaggcattcgggctcctcgcacctaccccagcaactcaaattcaccacctcggactcctgcgaccgcatcaaagacgaatttcagctactgcaagctcagtaccacagcctcaagctcgaatgtgacaagttggccagtgagaagtcagagatgcagcgtcactatgtgatgtactacgagatgtcctacggcttgaacatcgagatgcacaaacaggctgagatcgtcaaaaggctgaacgggatttgtgcccaggtcctgccctacctctcccaagagcaccagcagcaggtcttgggagccattgagagggccaagcaggtcaccgctcccgagctgaactctatcatccgacagcagctccaagcccaccagctgtcccagctgcaggccctggccctgcccttgaccccactacccgtggggctgcagccgccttcgctgccggcggtcagcgcaggcaccggcctcctctcgctgtccgcgctgggttcccaggcccacctctccaaggaagacaagaacgggcacgatggtgacacccaccaggaggatgatggcgagaagtcggattagcagggggccgggacagggaggttgggaggggggacagaggggagacagaggcacggagagaaaggaatgtttagcacaagacacagcggagctcgggattggctaaactcccatagtatttatggtggccgccggcgggggccccagcccagcttgcaggccacctctagctttcttcctaccccattcccggcttccctcctcctcccctgcagcctggttaggtggatacctgccctgacatgtgaggcaagctaaggcctggagggtcagatgggagaccaggtcccaagggagcaagacctcgcgaagcgcagcagccccggcccttcccccgttttgaacatgtgtaaccgacagtctgcctgggccacagccctctcaccctggtactgcatgcacgcaatgctagctgcccctttcccgtcctgggcaccccgagtctcccccgaccccgggtcccaggtatgctcccacctccacctgccccactcaccacctctgctagttccagacacctccacgcccacctggtcctctcccatcgcccacaaaagggggggcacgagggacgagcttagctgagctgggaggagcagggtgagggtgggcgacccaggattccccctccccttcccaaataaagatgagggtactaaagttgtcttggtttttattttattattatttttttctttttccagtatactagcttgtcttttaagaaaggggatattaaaaaaaaaaaaagacaaaagtgtttttaaaaaaaagcaacacccacacctgtgtctgtatatagtcagcttatctcgtgttcaatcgtctgatctctacagagagaagtggaaaatgctgtatcaagggtgggcttagctgtgcctttccaataaagatgtgagaagcttcaaaaaaaaaaa

SEQ ID NO: 1497 - protein, 197 aa, Homo sapiens
MMFPQSRHSGSSHLPQQLKFTTSDSCDRIKDEFQLLQAQYHSLKLECDKLASEKSEMQRHYVMYYEMSYGLNIEMHKQAEIVKRLNGICAQVLPYLSQEHQQQVLGAIERAKQVTAPELNSIIRQQLQAHQLSQLQALALPLTPLPVGLQPPSLPAVSAGTGLLSLSALGSQAHLSKEDKNGHDGDTHQEDDGEKSD

SEQ ID NO: 1498 - DNA, 1754 bp, Homo sapiens
tggagcagcggggcctggcacacagtaggcgttctataaatgtgtcacaagaatggcttccctcaggaaggcggcattaccgctgcctttctgcagaaaaggaaactaaggctcagcaagaaccaccgcccagccagagccaaggtcacagagcacgtccgtggcacgcgtccaggtcgtgccacagcagggccggcggcttcgacgcgggcagccgggtcccttttctttgacagatggggaaaccgaggcccggccggctgccggggctcctcgcacctaccccagcaactcaaattcaccacctcggactcctgcgaccgcatcaaagacgaatttcagctactgcaagctcagtaccacagcctcaagctcgaatgtgacaagttggccagtgagaagtcagagatgcagcgtcactatgtgatgtactacgagatgtcctacggcttgaacatcgagatgcacaaacaggctgagatcgtcaaaaggctgaacgggatttgtgcccaggtcctgccctacctctcccaagagcaccagcagcaggtcttgggagccattgagagggccaagcaggtcaccgctcccgagctgaactctatcatccgacagcagctccaagcccaccagctgtcccagctgcaggccctggccctgcccttgaccccactacccgtggggctgcagccgccttcgctgccggcggtcagcgcaggcaccggcctcctctcgctgtccgcgctgggttcccaggcccacctctccaaggaagacaagaacgggcacgatggtgacacccaccaggaggatgatggcgagaagtcggattagcagggggccgggacagggaggttgggaggggggacagaggggagacagaggcacggagagaaaggaatgtttagcacaagacacagcggagctcgggattggctaaactcccatagtatttatggtggccgccggcgggggccccagcccagcttgcaggccacctctagctttcttcctaccccattcccggcttccctcctcctcccctgcagcctggttaggtggatacctgccctgacatgtgaggcaagctaaggcctggagggtcagatgggagaccaggtcccaagggagcaagacctcgcgaagcgcagcagccccggcccttcccccgttttgaacatgtgtaaccgacagtctgcctgggccacagccctctcaccctggtactgcatgcacgcaatgctagctgcccctttcccgtcctgggcaccccgagtctcccccgaccccgggtcccaggtatgctcccacctccacctgccccactcaccacctctgctagttccagacacctccacgcccacctggtcctctcccatcgcccacaaaagggggggcacgagggacgagcttagctgagctgggaggagcagggtgagggtgggcgacccaggattccccctccccttcccaaataaagatgagggtactaaagttgtcttggtttttattttattattatttttttctttttccagtatactagcttgtcttttaagaaaggggatattaaaaaaaaaaaaagacaaaagtgtttttaaaaaaaagcaacacccacacctgtgtctgtatatagtcagcttatctcgtgttcaatcgtctgatctctacagagagaagtggaaaatgctgtatcaagggtgggcttagctgtgcctttccaataaagatgtgagaagcttcaaaaaaaaaaa

SEQ ID NO: 1499 - protein, 264 aa, Homo sapiens
MCHKNGFPQEGGITAAFLQKRKLRLSKNHRPARAKVTEHVRGTRPGRATAGPAASTRAAGSLFFDRWGNRGPAGCRGSSHLPQQLKFTTSDSCDRIKDEFQLLQAQYHSLKLECDKLASEKSEMQRHYVMYYEMSYGLNIEMHKQAEIVKRLNGICAQVLPYLSQEHQQQVLGAIERAKQVTAPELNSIIRQQLQAHQLSQLQALALPLTPLPVGLQPPSLPAVSAGTGLLSLSALGSQAHLSKEDKNGHDGDTHQEDDGEKSD

SEQ ID NO: 1500 - DNA, 1684 bp, Homo sapiens
cgggcgcgcggggagggggcgcaggaagcgggcgaggccgggcgcgggaggcggcggcggccccgggagctgccgatcggcgccgggacaaaggcgcggccgcccggcgcccccagcagcccgagccggggcgcacagccggggcgcagcccgcgccccccgccgcgattgacatgatgtttccacaaagcaggcattcgggctcctcgcacctaccccagcaactcaaattcaccacctcggactcctgcgaccgcatcaaagacgaatttcagctactgcaagctcagtaccacagcctcaagctcgaatgtgacaagttggccagtgagaagtcagagatgcagcgtcactatgtgatgtactacgagatgtcctacggcttgaacatcgagatgcacaaacaggctgagatcgtcaaaaggctgaacgggatttgtgcccaggtcctgccctacctctcccaagagcaccagcagcaggtcttgggagccattgagagggccaagcaggtcaccgctcccgagctgaactctatcatccgacagctccaagcccaccagctgtcccagctgcaggccctggccctgcccttgaccccactacccgtggggctgcagccgccttcgctgccggcggtcagcgcaggcaccggcctcctctcgctgtccgcgctgggttcccaggcccacctctccaaggaagacaagaacgggcacgatggtgacacccaccaggaggatgatggcgagaagtcggattagcagggggccgggacagggaggttgggaggggggacagaggggagacagaggcacggagagaaaggaatgtttagcacaagacacagcggagctcgggattggctaaactcccatagtatttatggtggccgccggcgggggccccagcccagcttgcaggccacctctagctttcttcctaccccattcccggcttccctcctcctcccctgcagcctggttaggtggatacctgccctgacatgtgaggcaagctaaggcctggagggtcagatgggagaccaggtcccaagggagcaagacctcgcgaagcgcagcagccccggcccttcccccgttttgaacatgtgtaaccgacagtctgcctgggccacagccctctcaccctggtactgcatgcacgcaatgctagctgcccctttcccgtcctgggcaccccgagtctcccccgaccccgggtcccaggtatgctcccacctccacctgccccactcaccacctctgctagttccagacacctccacgcccacctggtcctctcccatcgcccacaaaagggggggcacgagggacgagcttagctgagctgggaggagcagggtgagggtgggcgacccaggattccccctccccttcccaaataaagatgagggtactaaagttgtcttggtttttattttattattatttttttctttttccagtatactagcttgtcttttaagaaaggggatattaaaaaaaaaaaaagacaaaagtgtttttaaaaaaaagcaacacccacacctgtgtctgtatatagtcagcttatctcgtgttcaatcgtctgatctctacagagagaagtggaaaatgctgtatcaagggtgggcttagctgtgcctttccaataaagatgtgagaagcttcaaaaaaaaaaa

SEQ ID NO: 1501 - protein, 196 aa, Homo sapiens
MMFPQSRHSGSSHLPQQLKFTTSDSCDRIKDEFQLLQAQYHSLKLECDKLASEKSEMQRHYVMYYEMSYGLNIEMHKQAEIVKRLNGICAQVLPYLSQEHQQQVLGAIERAKQVTAPELNSIIRQLQAHQLSQLQALALPLTPLPVGLQPPSLPAVSAGTGLLSLSALGSQAHLSKEDKNGHDGDTHQEDDGEKSD

SEQ ID NO: 1502 - DNA, 2802 bp, Homo sapiens
ggtcgctggcgcctgtttcctcagagccactttttcctttgtgttgtctggtcgttcactactttgagggaaaagaattttgccgttcgcgttcgattgactccgtccccaagatcctgtagccccacggacctggcgactccaccgtgttcgggtctttctaggaacccaatctgccttcatgaagaaaagacagaggcagaaaggaagatggcttactgcctgacaaattgttatcagtactccgtgacctttgaggatacagctgtggacttcacccaggaggagtggattttactggacccagttcagagaaacttatacagagatgtgatgctggagaattatgagaacgtggccaaagtaggatttcagctctttaaacccagtgtcatctcttggttggaagaagaagagttgagaaccttgcagcaaggagttctccaagactgggcaataaaacatcaaaccagtgtttcagcactgcagcaggagttttggaaaatacaaacttctaatgggatacaaatggacctggtaacctttgacagtgtggctgtggagttcacccaggaagagtggactttactggacccagctcagagaaacctgtacagtgatgtgatgctggagaactacaagaacctgtcctcagtaggttaccagctcttcaaacccagtctgatctcttggctggaggaagaggaagagttgagcacactgccaagagttctccaagaatggaaaatgtgcctgaaaaccaaagggccagccctttggcaagataatttttgtttaaaaacattaaatgggatacagttggcaagaaaccaaaatggagaggaactctatgactgtaagcaatgtgaagatgtcttctgtaaacatccatgccttaagaccaacatgagtactcaaaatagaggcaacacgtctgaatgtattcagtatgcaaaagacctcctttctctatacaataaaacctctaccataaggaaagtttctgtgttcagtaagcatggaaaatctttccgcctgattttaaatgttcaggtccagagaaagtgtacacaagataaatcctttgaaggcactgactatgggaaagccttcatttatcagtcataccttgaagcacacaggaaaactcagagtggagaaaaactcaatgaatggaagcaatgtggggaagcatttactcactccacaagccatgctgtaaatgttgaaacacacattattaaaaacccctatgaatgtaaggaatgtggaaaagattttagataccctacccaccttaataatcacatgcaaacccacattgggataaaaccttataaatgtaagcactgtggcaaaaccttcactgtgccgtcaggctttcttgaacatgtacgaactcacactggagagaagccctatgggtgtaaggaatgtggtaaagcctttggtacatctgcaggccttattgaacatataagatgtcacgccagagagaaaacctttaaatgtgaccactgtgggaaagcctttatttcttacccatctctttttggacatttgagagttcataatggagagaagccatatgagcataaggaatatgggaaggcctttggtacatcctcaggtgttattgaagatagaagaagtaacacaggacagaaacgctttgattgtgaccagtgtgggaaagtctttgtttctttctcatctctttttgctcatttgagaactcacactggtgagaagccctttaagtgttacaaatgtgggaaaccatttacctcttctgcctgtcttcgtattcacatgcgaactcacacagaagagagactctatcaatgtaagaaatgtggtaaagctttcactaagtgctcatatcttaccaaacatttacgaacacacgctggagagaaaccctatgaatgtatgaaatgtgggaaagccttcactgagcgctcataccttactaaacatttacgaagacacagtggagagaagccatatgaatgtaagaaatgtggaaaagccttcacagaacgctcagatcttactaaacatttacgaagacacactggagataagccctatgaatataaggactgtgggaaagcctttgttgtctcctccagtctagttgatcatttaagaactcacactggatataaaccctataaatgtaatgcatgtgaaaaagcttacagtaggtcttgtgtactaactcaacacttaaaaactcatgcagcagagaagacctctgaatgtaacgcatgtggaaattcctttcgaaattccatgtgctttcatgatcgcttaaaaactctcaccaaaataaaaccctataaatgtaaggactgtgggaaagccttcacttgtcattcagatcttactaatcatgtgcgaattcacactggagagaagccctataaatgtaaggaatgtgggaaggccttccgtacatcctcaggacgtattcaacatttaagaactcatatgggagagaaaccctttgaatgtgaccagtgtgggaaagcctttgcttctttctcagctcgtattgcacatttgaaaacacactagagagaagccctgtggatgtgaagaatgtggaaaaacctttgctgtttcctcaagcctaactgaacatgtaaaaattcacaggagaaagtaacactatcaatgtaaggaatgtgagaaagcctgaacagttgaatctttctagatatgtacaaactcacactgtagagaaaccctgtaaatgtaagggatgtaggaaaacactagttcttctctctctct

SEQ ID NO: 1503 - protein, 790 aa, Homo sapiens
MAYCLTNCYQYSVTFEDTAVDFTQEEWILLDPVQRNLYRDVMLENYENVAKVGFQLFKPSVISWLEEEELRTLQQGVLQDWAIKHQTSVSALQQEFWKIQTSNGIQMDLVTFDSVAVEFTQEEWTLLDPAQRNLYSDVMLENYKNLSSVGYQLFKPSLISWLEEEEELSTLPRVLQEWKMCLKTKGPALWQDNFCLKTLNGIQLARNQNGEELYDCKQCEDVFCKHPCLKTNMSTQNRGNTSECIQYAKDLLSLYNKTSTIRKVSVFSKHGKSFRLILNVQVQRKCTQDKSFEGTDYGKAFIYQSYLEAHRKTQSGEKLNEWKQCGEAFTHSTSHAVNVETHIIKNPYECKECGKDFRYPTHLNNHMQTHIGIKPYKCKHCGKTFTVPSGFLEHVRTHTGEKPYGCKECGKAFGTSAGLIEHIRCHAREKTFKCDHCGKAFISYPSLFGHLRVHNGEKPYEHKEYGKAFGTSSGVIEDRRSNTGQKRFDCDQCGKVFVSFSSLFAHLRTHTGEKPFKCYKCGKPFTSSACLRIHMRTHTEERLYQCKKCGKAFTKCSYLTKHLRTHAGEKPYECMKCGKAFTERSYLTKHLRRHSGEKPYECKKCGKAFTERSDLTKHLRRHTGDKPYEYKDCGKAFVVSSSLVDHLRTHTGYKPYKCNACEKAYSRSCVLTQHLKTHAAEKTSECNACGNSFRNSMCFHDRLKTLTKIKPYKCKDCGKAFTCHSDLTNHVRIHTGEKPYKCKECGKAFRTSSGRIQHLRTHMGEKPFECDQCGKAFASFSARIAHLKTH

SEQ ID NO: 1504 - DNA, 931 bp, Homo sapiens
atggatgatgatattgaggtgcttgtagttaacaatggctccggcatgtgcaaggtcaacttcgtgggcgacaatgccccccgggccatcttcccctccatcgtggggcatctgaagcaccagggcgttatggtgggcatcggtcagaaggactcctacgtgggtgaagatgcccagagcaagagaggcaacctgaccctgaaataccccatcgagcagagcattgtcaccaactgggatgacattgagaagatctggcaccacaccttctacaatgagctgcatgtttctcccaaggagcacccggtgctgctgaccgaggcccccttgaaccccaaggccagccatgagaagatgacccagatcatgtctgagaccttcaactccccatccatgtatatagccatccaggctctgctgtccctgcacgtggcctccagcttctccctgaagaagagattccagctgcctgacagccaggtcatcaccatcagcaacgagcggtccccgctgtcccatggcacttttccagccttccttcctggacatggaatcctgtggcatccatgaaactaccctcaactccatcatgaaatgtgacattgacatctgcaaagacctggatgccaacccagtgctgtccagtgacaccaccatgtacgctggtattgctgacaggatggaggaggagatcaccaccatggctcccagcatgaagaagatcaacatcattgctcctcctgagcacaaatattctgtatggatcagtggctccatcttggtctcgctgtcccccttccagcagatgtggatcagcaagcaggaatacgaggagtccggcctcagtattgtccaccctaccacaaatacttctaggcggacggtaaaaggcttctctccagttcgacttcttacaccttctagaaggtag

SEQ ID NO: 1505 - DNA, 2320 bp, Homo sapiens
gtgagcgcctgagagtctttttgcctttcagagttaaggcctcactggcctgggaaaataattgctgccttttgcatccgcgttggctccgtccccaggatcttcccggttcagggacctggcgatttctgagtgttccggaatcccaataaccctgtttaaagaggaatggagattgccactgtccatttagattaatgaggtgtcctgaagtgatggtgacatcaatgaaaggagggttctgacacgttctcacctcgcgggatggcagctgctgatttgtcccatggacattatctttctggggacccagtttgccttcatgaagaaaagacaccagcaggaagaatagtggctgactgcctaacagattgttatcaggattcagtgacctttgacgatgtggctgtggacttcacccaggaggagtggactttactggactcaactcagagaagcctctacagtgacgtgatgctggagaactacaagaacctggccacagtaggaggtcagatcatcaaacccagtctaatctcttggttggaacaagaagagtcaaggacagttcagggaggagttctccaaggatgggaaatgcgacttgaaacccagtggtctatacttcagcaggactttttgaggggtcagacatccattgggatacaattggaaggaaaacacaatggaagggaactctgtgactgtgagcaatgtggagaagtcttcagtgaacactcatgccttaagacgcacgtgagaactcaaagtacagggaacactcatgactgtaatcagtatggaaaagatttccttaccctgtgtgagaaaacctctactggtgagaaactttctgagtttaatcagagtgaaaaaatcttcagcctgacaccaaatattgtataccagagaactagcacacaagaaaagtcatttgaatgtagtcactgtggaaaatccttcattaatgagtcataccttcaggcacatatgagaactcacaatggagaaaaactctacgaatggaggaattatgggccaggttttattgactctacaagcctttctgtgcttatagaaaccctcaatgcaaaaaagccctacaaatgtaaggaatgtggaaaaggctatagatacccagcctacctcagtattcacatgcgaacccacactggggagaaaccatatgaatgtaaggaatgtgggaaagccttcaattattccaactcatttcagatacatggaagaactcacactggagagaaaccctatgtatgtaaggaatgtgggaaagccttcactcagtactcgggccttagtatgcatgtacgatctcacagtggagacaagccctatgaatgtaaggaatgtgggaaatccttccttacatcctcacgccttattcaacatataagaactcacactggagagaagccttttgtatgtgttgaatgtgggaaagcctttgcagtttcctcaaatcttagtggacatttgagaactcacactgaagagaaggcctgtgagtgtaagatatgtgggaaagtatttgggtatccctcatgtcttaataatcacatgcgaacgcacagtgcccagaaaccatacacctgtaaggaatgtgggaaggcttttaactattccacccaccttaaaattcacatgcgaatccacactggagaaaaaccctatgagtgtaaacaatgtggaaaggccttcagtcattccagttcatttcaaatacatgaaaggactcacactggagagaaaccctatgaatgcaaggagtgtgggaaagccttcacgtgttccagttcctttagaattcatgaaaaaactcacacagaagagaaaccctataaatgtcagcaatgcgggaaagcttacagtcatccccgttcacttcgaagacatgaacaaattcactagtgagaaactgtccatgtaataaatgtgggaaagctctcatttgttccagttcactttaaagacatgaatgaactcactctggagagaagaagctgcatgaaaattacttaattcctgtaatcccagcattttgagaggctgaggtgggtggatcacttgaggtcaggagtttgagaccaccctggccaacatggtgaaaccttgtctctactgaaaatacaaaaaatttagccaggtgtggtgggcacctgtaatcccagctacttgggaggctgaggcaagtgaatcacttgaacccaggaagcagaggttgcagtgagcagagatcatgccactgcactccagcctgggcgatggagtgagactccatctcaaaaaaaaaaaaaaaaaa

SEQ ID NO: 1506 - protein, 554 aa, Homo sapiens
MAAADLSHGHYLSGDPVCLHEEKTPAGRIVADCLTDCYQDSVTFDDVAVDFTQEEWTLLDSTQRSLYSDVMLENYKNLATVGGQIIKPSLISWLEQEESRTVQGGVLQGWEMRLETQWSILQQDFLRGQTSIGIQLEGKHNGRELCDCEQCGEVFSEHSCLKTHVRTQSTGNTHDCNQYGKDFLTLCEKTSTGEKLSEFNQSEKIFSLTPNIVYQRTSTQEKSFECSHCGKSFINESYLQAHMRTHNGEKLYEWRNYGPGFIDSTSLSVLIETLNAKKPYKCKECGKGYRYPAYLSIHMRTHTGEKPYECKECGKAFNYSNSFQIHGRTHTGEKPYVCKECGKAFTQYSGLSMHVRSHSGDKPYECKECGKSFLTSSRLIQHIRTHTGEKPFVCVECGKAFAVSSNLSGHLRTHTEEKACECKICGKVFGYPSCLNNHMRTHSAQKPYTCKECGKAFNYSTHLKIHMRIHTGEKPYECKQCGKAFSHSSSFQIHERTHTGEKPYECKECGKAFTCSSSFRIHEKTHTEEKPYKCQQCGKAYSHPRSLRRHEQIH

SEQ ID NO: 1507 - DNA, 1735 bp, Homo sapiens
atcttttccggcgctggctccgcatggtcagtgccatttcgcctttatcgtggtggagtccaccctggctgtggacctattcaaactcagtctgtctcttgactggaggaggagaaggaaaagttgagcacattgccaaccggagttccccaagaatggcaagttaaaaccaaagtgtcagcacctcaacaacatttttttttggcttaacaaaacatcaaacggcatacaaatggcagaaatccacaatggaggggaactctgtgactttatggaaaatggagaaatcttcagtgaacactcatgccttaatgcacacatgggaactgaaaatacaggggacacttatgactgtgatgagtatggagaaaactttcccatgttacacaacagtgcccctgctggagagacactttctgtgttgaatcagtgcagaaaagccttcagcctgccaccaaatgttcaccagagaacgtggataggagacaaatcctttgaatacagtgactgtgaggaagcctttgttgatcagtcacatcttcaggcaaataggataactcacaatggagaaacactctatgaacagaagcaatgtgggagagcttttacttactccacaagccatgctgtgtctgttaaaatgcatactgtagaaaaaccctacgaatgtaaggaatgtggaaaattctttagatattcttcatatcttaatagtcacatgcgaacccatactggggagaaaccctatgaatgtaaggaatgtgggaaatgcttcactgtttcttcacacctagttgaacatgtaagaattcatactggagagaaaccttatcaatgtaaggaatgtggaagagccttcgctgggcgctcaggccttactaaacatgtacgaatacacactggagagaagccctatgaatgtaacgaatgtgggaaagcctacaataggttttatctactaactgaacattttaaaactcacacagaggagaagccctttgaatgtaaggtatgtggaaaatccttcagaagctcttcatgccttaagaatcactttagaattcacactggaataaaaccctataaatgtaaggagtgtgggaaagcattcactgtttcctcaagcttacataatcatgtaaaaatccatactggagagaagccctatgaatgtaaggactgtgggaaagcctttgctacatcttcacaactcattgaacatataagaactcacactggagagaaaccgtatatatgtaaggaatgtgggaaaaccttccgtgcttcttcacatctacagaaacatgttagaattcacactggagagaaaccctatatatgtaacgaatgtgggaaagcctacaatagattttatttacttactaaacatttaaaaacacactgaagaaaaactctgaatgtaaggaatgtggaaatcttttaggaatttctcataccataattaccacatttgaattcacactgaagagaaattttattggtacaaagaatgtgaggaggccttcagttatccccattcacttcgaagacatgaaagaactcatactctatgtgtcccctataaattttaggaatgttagggagccaatggaatcttttttttattattttattttattttattttattttattttattttattttattttattttatttgagacagagttttgctgttgtcatcacacaggctggagtgcaatggcatgatcc

SEQ ID NO: 1508 - protein, 390 aa, Homo sapiens
MAEIHNGGELCDFMENGEIFSEHSCLNAHMGTENTGDTYDCDEYGENFPMLHNSAPAGETLSVLNQCRKAFSLPPNVHQRTWIGDKSFEYSDCEEAFVDQSHLQANRITHNGETLYEQKQCGRAFTYSTSHAVSVKMHTVEKPYECKECGKFFRYSSYLNSHMRTHTGEKPYECKECGKCFTVSSHLVEHVRIHTGEKPYQCKECGRAFAGRSGLTKHVRIHTGEKPYECNECGKAYNRFYLLTEHFKTHTEEKPFECKVCGKSFRSSSCLKNHFRIHTGIKPYKCKECGKAFTVSSSLHNHVKIHTGEKPYECKDCGKAFATSSQLIEHIRTHTGEKPYICKECGKTFRASSHLQKHVRIHTGEKPYICNECGKAYNRFYLLTKHLKTH

SEQ ID NO: 1509 - DNA, 3462 bp, Homo sapiens
ccacgcgtccgctggctcctctccgtcagtgcggtttcgcctttatggtggtggagtctgcccaggctgtggaccgcaaataaccctgtacaaagaggaatggagattgcctctatccacctagattcataagctggcctgaggtgatcttggcatcaaggaagggatgcacatcatcacaccatcagcttcagagaatggcagccatttatttgtcccgtgggtttttttccagggaaccaatctgcccttttgaagaaaagacaaaggtagaaaggatggtggaggactacctggcaagtggttatcaggattcagtgacgtttgatgatgtggctgtggacttcaccccagaggagtgggctttactggacacaactgagaaatacctctacagagatgtgatgctggagaactacatgaacctggcctctgtggaatgggaaatacaacctagaaccaaacggtcatcacttcagcagggttttttgaagaatcaaatattcagtgggatacaaatgacaagaggctacagtggatggaaactctgtgactgtaagaattgtggagaggtcttcagggaacagttttgccttaagacacacatgagagttcagaatggagggaatacttctgagggtaattgttatggaaaagacaccctcagtgtgcacaaggaagcctctactggacaggaactttccaaatttaatccatgtggaaaagtctttactctaactccaggtcttgctgtacatcttgaagttctcaatgcaagacaaccctacaaatgtaaggaatgtggaaaaggctttaagtattttgcaagccttgataatcatatgggaatccacactgatgagaaactctgtgaatttcaggaatatgggagagctgtcacagcttcttcacacctaaagcagtgtgtagcagttcatacaggaaagaaatccaaaaagactaagaaatgtgggaaatccttcactaatttttctcaactttatgcacctgtgaaaactcataaaggagagaagtcctttgaatgtaaagaatgtggaagatcctttagaaattcctcatgccttaatgatcacattcaaattcacactggaataaaaccacacaagtgtacttactgtgggaaagccttcactagatcaactcaacttactgaacatgtaagaactcacactggaataaaaccctatgaatgtaaggaatgtggccaagcctttgctcagtactcgggcctttctatacacatacgaagtcacagtggaaagaaaccctatcagtgtaaggaatgtgggaaagccttcactacatccacaagtcttattcagcatacaagaattcacacaggagagaagccttatgaatgtgttgaatgtgggaagaccttcattacttcttcccgtcgtagtaaacatttgaaaactcatagtggagaaaagccctttgtatgcaagatatgtgggaaagcatttctatattcctcacgccttaatgttcacctgcgaactcataccggagagaaacccttcgtatgtaaagaatgtgggaaagcatttgctgtttcctcacgcctaagtagacatgaaagaattcacactggggagaaaccctatgaatgcaaggatatgagtgttaccatttagcccatcggttgccatctttaattattggcaatgacaccaaagattatcagatttgtcctaaatgccttttggaggttgtaatgactcatggattggccttagataccatcctgagggtctgaaattaaacctacaggttctgaatacaacatcatggttgcctgagtctgggcatctgtgaagaagggtcatggatggtgaggtcagtactgcaggctgcctcaccttggtgattagattcctaagatcatagcattaacaagttgtgtatgagataaatcatgcagattgaccccagcccctgttggttagtggctgccagtgtggcacatttatgtcaaaatttaccagaagccaagatgatgtaggaccccaaaggtgggttgttaagagatgctcctccaagggtctcttctgatcccacggatcctgcagagcgtgtcaggaatgaaaccatccataactgccagtgccctttcacagctgattatttctgtgtccccttgtaaaatctaagaagtgtgacagccttgcctgttctgccttgtatgtctattttagatggcacaatgtaagtggcaatgtctcttctagtataatccagtctctcttctcacttctgtcaaggtggctgatatagtccatgaatcccactcatgatctctttatcagatgatcgttcagccacactttgaggattctcttcagtacaagttttctaatttttgcattatggataggctgagaattttccaaatctccaagttctggttcctttttccttaacaattttttctgcaattcaggtctccttttgcatttttgctgagaccagctgggtcatggagaccctgacccagcagctctagaggaattaagacaaagacacagaaatagagtgcagagtgggaatcggggctcacagccttcagagctgagagccttgaacagagtttgacccacatatttattgacagtaagcctgtgataaacattatttctatagattatagattagctaaaagtattccttacaagaaagaaagggacaggctctggcttgttatctgcaacaggaacatgtccttaaggcacaaatcactcatggtattgtttgtggtttaggaatgcctgagcagttttccagttttccaccgtgggtgggccaggtgttccttgccctcattcgggtaaaccagcaacctccagcatgggtgtcatagccatcacgagcatgtcacagtgccgcagagattttgtttatgggcagtttctcatggcctgtttatgtccaaatttggggggcctgttctgagcacattttcctgtaagcactcaggaagaatgaagcttcctgtgtcctttaacactttaagtacagatcttagtgatacataaccagttttatctctctcaagctctaccttccgcaaagtgctagaatacagttctgccaagttcttcactacttcgtatcaagggttgtattttctttatttcccaatagcatgttcctcattccccaatgacacctcaccaggatcacccttaccaaccttacttccagcttgcacatcagaatttttccagcctcatttgtcagtttcaaatctgcttcacatttttagtttttttgtttgtttgtttttaatctgccttaatgagctcaggccactatcacaaaataccacagaccaaatggcttacaaatttgttaattttaaataaatgaggttaaaaacaaaaaaaaaaaaaaaaaaaaaaaaaaaaaaaaaaaaaaaaaaaaaaaaaaaaaaaaaaaaaa

SEQ ID NO: 1510 - protein, 417 aa, Homo sapiens
MLENYMNLASVEWEIQPRTKRSSLQQGFLKNQIFSGIQMTRGYSGWKLCDCKNCGEVFREQFCLKTHMRVQNGGNTSEGNCYGKDTLSVHKEASTGQELSKFNPCGKVFTLTPGLAVHLEVLNARQPYKCKECGKGFKYFASLDNHMGIHTDEKLCEFQEYGRAVTASSHLKQCVAVHTGKKSKKTKKCGKSFTNFSQLYAPVKTHKGEKSFECKECGRSFRNSSCLNDHIQIHTGIKPHKCTYCGKAFTRSTQLTEHVRTHTGIKPYECKECGQAFAQYSGLSIHIRSHSGKKPYQCKECGKAFTTSTSLIQHTRIHTGEKPYECVECGKTFITSSRRSKHLKTHSGEKPFVCKICGKAFLYSSRLNVHLRTHTGEKPFVCKECGKAFAVSSRLSRHERIHTGEKPYECKDMSVTI

SEQ ID NO: 1511 - DNA, 5539 bp, Homo sapiens
cagtgccgtttaacctttattgtggtggagtccaccccgctgtgggcctcagataaccctgtacaaaagggaatggagattgcctgtatccacctagattcataagctgccctgaggcgatcttggcatcaagaaagacagcattgaggcacatctcaccatcagcttcagaggatgtcagcctttgatatgtcccatgatttctttttctgcttaacttcagaatgggaaatacaacctagaaccaaacggtcatcacttcagcagggttttttgaagaatcaaatattcactgggatacaaatgcagacaagaagctacagtggatggaaactctgtgagaattgtggagaggtcttcagtgaacagttttgccttaagacacacatgagagctcagaatggagggaacacttttgagggtaattgttatggaaaagacagcatcagtgtgcacaaggaagcctctattggacaagaactttccaaacttaatccatgtggaaaagtcttcaccttaactccaggccttgctgtgcatcttgaaattctcaatggaagacaaccctacgaatgtaaggaatgtggaaaaggctttaagtattttgcaagccttgataatcacatgggaatccacattggagagaaactctgtgaatttcaggaatgtgagagagccatcacaacttcctcacacttaaagcagtgtgtagcagttcatactggaaagaaatccgaaaagactaagaactgtgggaaatccttcactaatttttctcaactttctgcacatgcaaaaactcataaaggagagaagtcctttgaatgtaaagaatgtggaagatcctttagaaattcctcatcctttaatgttcacattcaaattcacactggaataaaaccacacaaatgtacggaatgtgggaaagccttcactagatcaactcaccttactcaacatgtaagaactcacactggaataaaaccctatgaatgtaaggaatgtggccaagccttcactcagtacacgggccttgctatacacatacgaaatcacactggagagaaaccctatcagtgtaaggaatgtgggagagccttcaatagatcttcaacgcttactcaacatagaagaattcacacaggagagaagccttatgaatgtgttgaatgtgggaagaccttcattacttcttcccatcgtagtaaacatttgaaaactcacagtggagaaaggtaaatgcaagatatgtgggaaagaatttctgtattcctcaccccacctgtgaactcctaccagagagaaaccttttgtatgtaaagaatttgggaaagcatttgctctttcctcatgcctaagtatgcatgaaagaattcacactggggagaaatactatgaatgtaaggatatgagtgttgttaccatttagcccattggttgccatctttaattattggcagtgcaaagatcatcagattagtcctaaatgccttttggaggttgtaatggctcacagattggccttagatgcatcccgagggtctgaaattaaacctacaggttctgaatacaacatcatggttacctgagtctgggcatctgtgaagaagggtcatggatggtgaggtcagtactgcaggctgcctcaccttggtgattagattcctaagatcatagcattaacaagttctgtacgagataaatcatgcagattgatcccagcccctgttggttagtggctgccagtgtggcacattcatgtcaaaatttaccagaagccaagatgatgtaggccccagaggtggattgttaaaaagatgctcctccaaggttctcttctgttcccatggatcctgcagagcatgtcaggagtgaaaccatccataactgccagtgccctttcacagctgattatttctatgtccccttcttgtaaaataagaagtgtgacaaccttgactgttctgttctgtcttctctgtccattttaggtggcacaatgtaagtggcagtgtctcttatagtataatccagtctctcttctcacttctgttaagatggctgatatagtccatgaatcccactcatgatctctttatcaaatgattgttcagccacactttgaggattctcttcagtacaagttttctaatttttgcagtatggataggctgagaattttccaaatctccaagttctggttcctttttccttaacaacttcttctgcaattcaggtctccttttgcatttttgccgagaccagctgggtcgtggagaccctaacccagtggctctagaggaattaagacaaagacacagaaatatagtgcagagtgggaatcggggctcacagccttcagagctgagcttgaacagagtttgtcccacatatttattgacagtaagcctgtgataaacattattcctatagattgtagatcagctataagtattccttatgagaaagaaagggacaggctctggcttgttatctgcaacaggaatatgtccttaaggcacaaatcactcatgctattgtttgtggtttaggaatgccttgagcagttttccagttttctgccctgggtgggccaggtgttgcttgccctcattctggtaaaccagcagcctccagcatgggcgtcatagccatcacgagcatgtcacagtgctgcagagattttgtttatggccagtttctcattgcctgtttatggccagatttggggggcctgttcccagcacattttcctgtaagcactcaggaataatgaagcttcctgtgtcctttaacactttaattacagatcttagtgatacataccattttatctgtctcaagctctaccttccgtaaaatgctagaatacagttctgccaagttcttcaccactttatatcaagggttgtcttttcttcatttcccaatagcatgttcctcattccccaatgacacctcaccagaataacccttaccaaccttatttccagcttgcacatcagaatttttccagcctctactcatttgtcagtttcaaagctgcttcacatttttagtttttttgtttgtttttaattgcagtacctcacttctcagtaccaatatctgccttagtcagctcagacaaccataagagaataccgcagaccaaatggcttagaaattaatttaattttaaatcaatgaggttaaaaacacaggatttttttttttttttttttttttttttgaaatggagttttgctcttgttgcccaggctggagtgcaatggtatgatcttggctcaccgcaacctccacctcctgagttccagtgattctcctgcctcaccctcagtagctgggattattggcatgcaccacaaaccttagctaagtttgtatttttagtagagacagggtttctccatgttggttaggctgatctccatgttggtcagatctgacctttggtgatccacctgccttggcctcccaaagtgctgggattacaggcctgagccaccgtatctggcccaaaacacaaatttatattctcacatatctggaggctggaagtctgagatcagagtgccagcatggtcaacctctagtgagagctctcttcctggcatgtaagtgcccacttcctcatgttttcacacgatggagaccaacaaataggtcggtcggtctcccccctccccgcccccttctcttttcacatacagtcacattgaggtttggaacttcatatgaaatttggggggtcactgtgtgtgtgtgtgtgtgtgtgtgtatgtgtatatatatatacatatatatacacatatgtatgtatacctaactcctaaagtggaacagtaagagtcattatttatagattatctgattctctatgtggaaagagaaaagaatcatattaagtactttggactgaacaatggcccccaaaattcgtatgacgatgaagctctctctaaatattttcttgctttactggactgattttaacccgctgcacaacaccaactaaaagtagtaataccagcatacttgtctttgcagttctggtgagatatgcactctattttgttggtttggctgtaggcttttatttcttttttattttttgaagaggttatgtcctgtcagggaaccagccccgatattcacataggttcttttctattttccctaagtgtcagccaacttgagaaataaagggacagagtacaaaagagagaaattttaaagctgggtgtccggggcagacatcacatgtcggtaggttccgtgatgccccacaagccgcaaaaaccagcaagtttttattagggattttcaaaaggggagggagtgtgcaaataggtgtgggtcacagacatcaagtactttacaaggtaatagaatatcacaaggcaagtggaggcagggcgagatcacaggaccaaggtgaaattaaaattgctaatgaagttttgggcaccattgtcattgataacatcttatcaggagacggttttgagatcaactggtctgactaaaatttattaggtgggaatttcctcttcctaataagcctgggagtgctatgggagactggggtctatttcacccctgcagtctcgaccataagagatggctacacccaggggggccagttcagagacccactcccaggtgtgcattctctttctcaaggatgttccttgctgagaaaaagaattcagtgatatttctcccatttgcttgtgaaagaagagaaatgtggctttgttccacctggctcaccggcggtcagaatttaaggttatctctcttgtttcctaaacattgctgttatcctgttcttttttcaaggtgcccagatttcatattgctcaaacacacatgctgtataatttgtgcagttaatgcaattattacagggtcctgaggtaatatacatcctcctcagctgacaggattgagagattaaagtaaagacaggcataggaaatcacaagggtattgactggggaagtgataagtgtccatgaaatctttacaatttatgtttagagattgcagtaaggacaggcataagaaattataaaagtattaatttggggaactaataaatgtccatgaaacctccacaatccatgtttttctgccatggcttcagccagtccccccgtttggggtccctgacttcctgcaacaatgtcctgcaggaaaagttttttctttatatccagtttttacatgatgaattatttcccaatatttcatagtttatgaggctgaattcctcttgaatttattaaatgcttccttcacatcctctgtgatgatcatgtttatttactgataaaactcaatacctagaactgcacctagctcatgatggtacctaataaatacttcaatgaaatgatgtggtgatgcatgcctatagttttagctacttgggagggtggcctgagcccaggggttctagaccagcttaggcaacatagcaagaccccatctcaaaaaaaaaagcatcagcaaaaacaaaaaaaaaaaaaaa

SEQ ID NO: 1512 - protein, 354 aa, Homo sapiens
MSAFDMSHDFFFCLTSEWEIQPRTKRSSLQQGFLKNQIFTGIQMQTRSYSGWKLCENCGEVFSEQFCLKTHMRAQNGGNTFEGNCYGKDSISVHKEASIGQELSKLNPCGKVFTLTPGLAVHLEILNGRQPYECKECGKGFKYFASLDNHMGIHIGEKLCEFQECERAITTSSHLKQCVAVHTGKKSEKTKNCGKSFTNFSQLSAHAKTHKGEKSFECKECGRSFRNSSSFNVHIQIHTGIKPHKCTECGKAFTRSTHLTQHVRTHTGIKPYECKECGQAFTQYTGLAIHIRNHTGEKPYQCKECGRAFNRSSTLTQHRRIHTGEKPYECVECGKTFITSSHRSKHLKTHSGER

SEQ ID NO: 1513 - DNA, 620 bp, Homo sapiens
atgggccccacccctcgcccacggttccgtccagagtgtgccaccgccatctttaccggctgtggctcagcatggtcagtgccgtttaacctttattgtggtggagtccaccccgctgtggtgagttctacctgcttgggggtccgggacataccagcggggcggcaaaggaaggattgggcgtggtcgcccaggagcctctcagatccgcctagtttcactcgcttttctaggggctgtcagtcctcctggtgcggcctctggccagttccgagaggccgcacagtccgtctggctgcgtcgggaagtgtgtttgttccgcctccgccgggtgttttcttgagtactttcatccgctgtgctcctctcttgaaaagcttggaaagcaacctttgggagtttttttctttccgaaaggaaaaggatttctgcccttctggtgaggttggctctggccccgcattctcccgcgtctggaacctatctcttccggcatgttcctgggcctcagataaccctgtacaaaggggaatggagattgcctgtatccacctagattcataagctgccctgaggcgatcttggcatcaagaaagacagcattgaggcacatctcacca

SEQ ID NO: 1514 - protein, 187 aa, Homo sapiens
MGPTPRPRFRPECATAIFTGCGSAWSVPFNLYCGGVHPAVVSSTCLGVRDIPAGRQRKDWAWSPRSLSDPPSFTRFSRGCQSSWCGLWPVPRGRTVRLAASGSVFVPPPPGVFLSTFIRCAPLLKSLESNLWEFFSFRKEKDFCPSGEVGSGPAFSRVWNLSLPACSWASDNPVQRGMEIACIHLDS

SEQ ID NO: 1515 - DNA, 1480 bp, Homo sapiens
atggcagtcactgatttgtcccatgggttttttcccagggaaccaatctgcccttttgaagaaaagacaaagataggaacgatggtggaggactacctggcaaattcttatcaggattcagtgacgtttgatgatgtggctgtggagttcaccccagaggagtgggctttactggacacaactgagaaatgcctctacagagatgtgatgttggagaactatgtgaacctggcctctgtggatttctttttctgcttaacttcagaatgggaaatacaacctagaaccaaatggtcatcacttcagcttggttttttgaggaatccaatattcaatgggatacaaatgcagacaagaagctacagtggatggaaactctgagaattgtggagaggtcttcagtgaatggttttgccttaaaacacacatgagagctcagaatggagggaacatctttgagggtaattgttatggaaaagacatcctcagtgtgcacaaggaagcctctattggacaggaactttccaaatttaatccatgtggaaaagtcttcaccttaactccagatcttgctgcacatcttggaattctcaatgcaagacaaccatacaaatgtaaggaatgtagaaaaggctttaagtattttgcaagccttgataatcacatgggaatccacattggagagaaattctgtgaatttcaggaatgtaggagagccatcactcattcctcacacctaaagcagtgtgtaacagttcatactggaaagaaatctaaaaagactaagaaacatgggaaatccttcactaatttttctcaactttctgcacatgtgaaaattcataaaggagagaagtcctttgaatgtaaagaatgtggaagatcctttagaaattcctcatcctttaatgttcacattcaaattcacactggaataaaaccacacaaatatacggaatgtgggaaagccttcactaggtcaactcaccttactcaacatgtaagaactcacactggaataaaaccctatgaatgtaaggaatgtggccaagccttcactcagtacacgggccttgctatacacatacgaaatcacactggagagaaacactatcagtgtaaggaatgtgggaaagccttcaatggatcctcaacccttactcaacataaaataattcacacaggagagaagccttatggatgtgttgaatgtgggaagaccttcattacttcttcctatcgtagtaaacatttgaaaactcaccatgaagaaaggccctttgtatgcaagatatgtgggaaagcatttctatattcctcaccccttaatgttcacctgcaaactcataccagagagaaagccctcatatgtaaagaatgtgggaaagcttttgctgtttcctcacacctaagtagacatgaaagaattcacactggggaggaaccctatgaatataagggtatgaatgttaccatttag

SEQ ID NO: 1516 - DNA, 1876 bp, Homo sapiens
aatcacgcctcagccacctcccgcaagcctctcactgcctcagccacgctttccaggctggtttctggtccccatccgcggctggtccggccctgggaccgaatcacttcccagcgagaggaaggtcaaatttctcgaccggctacgggaaggtcgcggccgccgccctgtcagccgcctcggcgcccccaggacccctcgggtctctttaaccggaagcggaagtgcgtgtcggcgggatcatggcgactttggtcgaactgccggactcggtcctgctcgagatcttctcttacctcccggtacgggaccggatccgcatctccagggtctgtcaccgctggaagaggctggtggacgaccggtggctgtggcgacatgtcgacctgacgctctacacgatgcgacctaaagtcatgtggcacctccttcgaaggtacatggcatcccggctccattccctgcggatgggtggctacctgttctctggctcccaggccccccagttgtcccctgctctgttgagagccctgggccagaagtgccccaacctgaagcgcctctgcctgcacgtggccgacctgagcatggtgcccatcaccagcctgcccagcaccttgaggaccctggagctgcacagctgcgagatctccatggcctggctccacaagcagcaggaccccaccgtgctgcccctgcttgaatgcatcgtgctggaccgcgtccccgccttccgtgacgagcacctgcagggcctgacgcgcttccgggccttgcgctcgctggtgctgggtggtacctaccgtgtgaccgagacagggctggatgctggcctgcaggagctcagctatctgcagaggcttgaggtgctgggctgcaccctgtctgccgacagcaccctgctggccatcagccgccacctccgagatgtgcgcaagatccggctgaccgtgaggggcctctctgcccctggcctggctgtgctggagggaatgccggccctggagagtctgtgcctgcagggtcccctcgtcaccccagaaatgccctcccccactgaaatcctctcctcctgcctcactatgcccaagctcagagtccttgagctgcaggggctggggtgggagggtcaggaggcggagaagatcctgtgtaaggggctgccccactgtatggtcatcgtcagggcttgccccaaagagtctatggactggtggatgtaactactccacctgcccttgggacccatcccagttttcatcattgagccccagaccctctgagcagcaccttgaagagggcagataatcagacttgaggaaactgaaagccccaggttgagagaacagaggcctagggacctccagaccattggaatcactgtttgccagctgtgtggccttggtcatatcatcagcctctgggaagcctagttcccacatctggaaataaggatgatcatagctacctcacggttacattgcaaagccttactctaaaagctcccagcctccagaggctctcaatgaagagtcaccttcatggtcgtcttcaggaacaggacggatgaagaaggggtggggttaagactcaggggcacctgagggtctgagcccccttatgagtacccaagaaggactgtctatgcatgcacacccacaagcctatacaccatttatatacctacacgcacgcaagagacgcggagagataggcgatgcagactcgcgattcaatgatcgatatgctcataaaagtgctcaattatattttctgtattttgtatgctgtattttccaagacgtatattattttactattaaagaaaaaaatcatttttttttcccgagaaaaaaaaaaaaaaaaaaaaaaaaaa

SEQ ID NO: 1517 - protein, 326 aa, Homo sapiens
MATLVELPDSVLLEIFSYLPVRDRIRISRVCHRWKRLVDDRWLWRHVDLTLYTMRPKVMWHLLRRYMASRLHSLRMGGYLFSGSQAPQLSPALLRALGQKCPNLKRLCLHVADLSMVPITSLPSTLRTLELHSCEISMAWLHKQQDPTVLPLLECIVLDRVPAFRDEHLQGLTRFRALRSLVLGGTYRVTETGLDAGLQELSYLQRLEVLGCTLSADSTLLAISRHLRDVRKIRLTVRGLSAPGLAVLEGMPALESLCLQGPLVTPEMPSPTEILSSCLTMPKLRVLELQGLGWEGQEAEKILCKGLPHCMVIVRACPKESMDWWM

SEQ ID NO: 1518 - DNA, 537 bp, Homo sapiens
aacttccgcttccggttcctagcgttaactgcgaccggggttcagcgctcgggtgaggagctggtggcgtcggcaggttcgaggcgattcgaggtgagggggtcaagcggagaggctcggagtcggagaaagctgtcgcgacccagccacccagggtctggggtcggtgggagctccagctaggatgatcgaggttgtttgcaacgaccgtctggggaagaaggtccgcgttaaatgcaacacggatgataccatcggggaccttaagaagctgattgcagcccaaactggtacccgttggaacaagattgtcctgaagaagtggtacacgatttttaaggaccacgtgtctctgggggactatgaaatccacgatgggatgaacctggagctttattatcaatagatgagaatcctcatcttcctgccccgctttcctctcccatcctcatcccccacactgggatagatgcttgtttgtaaaaactcaccttaataaagacttagatgttgctttgtaaaaaaaaaaaaaaaaaa

SEQ ID NO: 1519 - protein, 73 aa, Homo sapiens
MIEVVCNDRLGKKVRVKCNTDDTIGDLKKLIAAQTGTRWNKIVLKKWYTIFKDHVSLGDYEIHDGMNLELYYQ

SEQ ID NO: 1520 - DNA, 997 bp, Homo sapiens
aggcgctgcggcaggagggaagatggcggacgaggagaagctgccgcccggctgggagaagcgcatgagccgcagctcaggccgagtgtactacttcaaccacatcactaacgccagccagtgggagcggcccagcggcaacagcagcagtggtggcaaaaacgggcagggggagcctgccagggtccgctgctcgcacctgctggtgaagcacagccagtcacggcggccctcgtcctggcggcaggagaagatcacccggaccaaggaggaggccctggagctgatcaacggctacatccagaagatcaagtcgggagaggaggactttgagtctctggcctcacagttcagcgactgcagctcagccaaggccaggggagacctgggtgccttcagcagaggtcagatgcagaagccatttgaagacgcctcgtttgcgctgcggacgggggagatgagcgggcccgtgttcacggattccggcatccacatcatcctccgcactgagtgagggtggggagcccaggcctggcctcggggcagggcagggcggctaggccggccagctcccccttgcccgccagccagtggccgaaccccccactccctgccaccgtcacacagtatttattgttcccacaatggctgggagggggcccttccagattgggggccctggggtccccactccctgtccatccccagttggggctgcgaccgccagattctcccttaaggaattgacttcagcaggggtgggaggctcccagacccagggcagtgtggtgggaggggtgttccaaagagaaggcctggtcagcagagccgccccgtgtccccccaggtgctggaggcagactcgagggccgaattgtttctagttaggccacgctcctctgttcagtcgcaaaggtgaacactcatgcggcccagccatgggccctctgagcaactgtgcagcaccctttcacccccaattaaacccagaaccact

SEQ ID NO: 1521 - protein, 163 aa, Homo sapiens
MADEEKLPPGWEKRMSRSSGRVYYFNHITNASQWERPSGNSSSGGKNGQGEPARVRCSHLLVKHSQSRRPSSWRQEKITRTKEEALELINGYIQKIKSGEEDFESLASQFSDCSSAKARGDLGAFSRGQMQKPFEDASFALRTGEMSGPVFTDSGIHIILRTE

SEQ ID NO: 1522 - DNA, 1899 bp, Homo sapiens
ggtcgggacgccgggctaggggcgcgtcatgtggccgctcacggtcccgccgccgctgctgctgctgctgtgctcaggcctggccggacagactctcttccagaacccagaagagggctggcagctgtacacctcagcccaggcccctgacgggaaatgcatctgcacggccgtgatcccagcgcagagtacctgctctcgagatggcaggagtcgggagctgcggcaactgatggagaaggtccagaacgtctcccagtccatggaggtccttgagttgcggacgtatcgcgacctccagtatgtacgcggcatggagaccctcatgcggagcctggatgcgcggctccgggcagctgatgggtccctctcggccaagagcttccaggagctgaaggacaggatgacggaactgttgcccctgagctcggtcctggagcagtacaaggcagacacgcggaccattgtacgcttgcgggaggaggtgaggaatctctccggcagtctggcggccattcaggaggagatgggtgcctacgggtatgaggacctgcagcaacgggtgatggccctggaggcccggctccacgcctgcgcccagaagctgggctgtgggaagctgaccggggtcagtaaccccatcaccgttcgggccatggggtcccgcttcggctcctggatgactgacacgatggcccccagtgcggatagccgggtctggtacatggatggctattacaaaggccgccgggtcctggagttccgtaccctgggagacttcatcaaaggccagaactttatccagcacctgctgccccagccgtgggcgggcacgggccacgtggtgtacaacggctccctgttctataacaagtaccagagcaacgtggtggtcaaataccacttccgctcgcgctctgtgctggtgcagaggagcctcccgggcgccggttacaacaacaccttcccctactcctggggcggcttctccgacatggacttcatggtggacgagagcgggctctgggctgtgtacaccaccaaccagaacgcgggcaacatcgtggtcagccggctggacccgcacaccctcgaggtcatgcggtcctgggacaccggctaccccaagcgcagcgctggcgaggccttcatgatctgcggtgtgctctacgtgaccaactcccacctggctggggccaaggtctacttcgcctattttaccaacacgtccagttacgagtacacggacgtgcccttccacaaccagtattcccacatctcgatgctggattacaacccccgggagcgcgccctctatacctggaacaacggccaccaggtgctctacaatgtcaccctgtttcacgtcatcagcacctctggggacccctgagccaatgctgtggctcgggctgctgcctggggggcctccgggggctgggggcccttttcattctgcctgtgtccctcaagggtgatctctctgtctctgtcacgccctttctccccgcctttttgctgggcttttgttctctgcctatgtatttctgtctattttttcaatttcccctcttctcctttattgatctctgcttttaatacaccacttctttctttctgcctttttatggatgtctttttctttttatggctctggttctccagttctttccgtctctgcctctctctgtctctctctctctgtccttccacccctccctccttgcttcccacccattcctcatccctcactcccacccccacccccacccccaggagttgagtgcatggatctgtttctttttttatttacactttttctttccggtttgccggaataaacaggacctttgacatttgaaaaaaaaaaaaaaaaaaaaaaaaaaaaaaaaaaaaaaa

SEQ ID NO: 1523 - protein, 454 aa, Homo sapiens
MWPLTVPPPLLLLLCSGLAGQTLFQNPEEGWQLYTSAQAPDGKCICTAVIPAQSTCSRDGRSRELRQLMEKVQNVSQSMEVLELRTYRDLQYVRGMETLMRSLDARLRAADGSLSAKSFQELKDRMTELLPLSSVLEQYKADTRTIVRLREEVRNLSGSLAAIQEEMGAYGYEDLQQRVMALEARLHACAQKLGCGKLTGVSNPITVRAMGSRFGSWMTDTMAPSADSRVWYMDGYYKGRRVLEFRTLGDFIKGQNFIQHLLPQPWAGTGHVVYNGSLFYNKYQSNVVVKYHFRSRSVLVQRSLPGAGYNNTFPYSWGGFSDMDFMVDESGLWAVYTTNQNAGNIVVSRLDPHTLEVMRSWDTGYPKRSAGEAFMICGVLYVTNSHLAGAKVYFAYFTNTSSYEYTDVPFHNQYSHISMLDYNPRERALYTWNNGHQVLYNVTLFHVISTSGDP

SEQ ID NO: 1524 - DNA, 5434 bp, Homo sapiens
cgtccgcgtggggggggtgtgtgcccgccttgcgcatgcgtgttccctgggcatggccggctccgttccatccttctgcacagggtatcgcctctctccgtttggtacatcccctcctcccccacgcccggactggggtggtagacgcgcctccgctcatcgcccctccccatcggtttccgcgcgaaaagccggggcgcctgcgctgccgccgccgcgtctgctgaagcctccgagatgccggcgcgtaccgccccagcccgggtgcccacactggccgtcccggccatctcgctgcccgacgatgtccgcaggcggctcaaagatttggaaagagacagcttaacagaaaaggaatgtgtgaaggagaaattgaatctcttgcacgaatttctgcaaacagaaataaagaatcagttatgtgacttggaaaccaaattacgtaaagaagaattatccgaggagggctacctggctaaagtcaaatcccttttaaataaagatttgtccttggagaacggtgctcatgcttacaaccgggaagtgaatggacgtctagaaaacgggaaccaagcaagaagtgaagcccgtagagtgggaatggcagatgccaacagcccccccaaacccctttccaaacctcgcacgcccaggaggagcaagtccgatggagaggctaagcctgaaccttcacctagccccaggattacaaggaaaagcaccaggcaaaccaccatcacatctcattttgcaaagggccctgccaaacggaaacctcaggaagagtctgaaagagccaaatcggatgagtccatcaaggaagaagacaaagaccaggatgagaagagacgtagagttacatccagagaacgagttgctagaccgcttcctgcagaagaacctgaaagagcaaaatcaggaacgcgcactgaaaaggaagaagaaagagatgaaaaagaagaaaagagactccgaagtcaaaccaaagaaccaacacccaaacagaaactgaaggaggagccggacagagaagccagggcaggcgtgcaggctgacgaggacgaagatggagacgagaaagatgagaagaagcacagaagtcaacccaaagatctagctgccaaacggaggcccgaagaaaaagaacctgaaaaagtaaatccacagatttctgatgaaaaagacgaggatgaaaaggaggagaagagacgcaaaacgacccccaaagaaccaacggagaaaaaaatggctcgcgccaaaacagtcatgaactccaagacccaccctcccaagtgcattcagtgcgggcagtacctggacgaccctgacctcaaatatgggcagcacccaccagacgcggtggatgagccacagatgctgacaaatgagaagctgtccatctttgatgccaacgagtctggctttgagagttatgaggcgcttccccagcacaaactgacctgcttcagtgtgtactgtaagcacggtcacctgtgtcccatcgacaccggcctcatcgagaagaatatcgaactcttcttttctggttcagcaaaaccaatctatgatgatgacccgtctcttgaaggtggtgttaatggcaaaaatcttggccccataaatgaatggtggatcactggctttgatggaggtgaaaaggccctcatcggcttcagcacctcatttgccgaatacattctgatggatcccagtcccgagtatgcgcccatatttgggctgatgcaggagaagatctacatcagcaagattgtggtggagttcctgcagagcaattccgactcgacctatgaggacctgatcaacaagatcgagaccacggttcctccttctggcctcaacttgaaccgcttcacagaggactccctcctgcgacacgcgcagtttgtggtggagcaggtggagagttatgacgaggccggggacagtgatgagcagcccatcttcctgacgccctgcatgcgggacctgatcaagctggctggggtcacgctgggacagaggcgagcccaggcgaggcggcagaccatcaggcattctaccagggagaaggacaggggacccacgaaagccaccaccaccaagctggtctaccagatcttcgatactttcttcgcagagcaaattgaaaaggatgacagagaagacaaggagaacgcctttaagcgccggcgatgtggcgtctgtgaggtgtgtcagcagcctgagtgtgggaaatgtaaagcctgcaaggacatggttaaatttggtggcagtggacggagcaagcaggcttgccaagagcggaggtgtcccaatatggccatgaaggaggcagatgacgatgaggaagtcgatgataacatcccagagatgccgtcacccaaaaaaatgcaccaggggaagaagaagaaacagaacaagaatcgcatctcttgggtcggagaagccgtcaagactgatgggaagaagagttactataagaaggtgtgcattgatgcggaaaccctggaagtgggggactgtgtctctgttattccagatgattcctcaaaaccgctgtatctagcaagggtcacggcgctgtgggaggacagcagcaacgggcagatgtttcacgcccactggttctgcgctgggacagacacagtcctcggggccacgtcggaccctctggagctgttcttggtggatgaatgtgaggacatgcagctttcatatatccacagcaaagtgaaagtcatctacaaagccccctccgaaaactgggccatggagggaggcatggatcccgagtccctgctggagggggacgacgggaagacctacttctaccagctgtggtatgatcaagactacgcgagattcgagtcccctccaaaaacccagccaacagaggacaacaagttcaaattctgtgtgagctgtgcccgtctggctgagatgaggcaaaaagaaatccccagggtcctggagcagctcgaggacctggatagccgggtcctctactactcagccaccaagaacggcatcctgtaccgagttggtgatggtgtgtacctgccccctgaggccttcacgttcaacatcaagctgtccagtcccgtgaaacgcccacggaaggagcccgtggatgaggacctgtacccagagcactaccggaaatactccgactacatcaaaggcagcaacctggatgcccctgagccctaccgaattggccggatcaaagagatcttctgtcccaagaagagcaacggcaggcccaatgagactgacatcaaaatccgggtcaacaagttctacaggcctgagaacacccacaagtccactccagcgagctaccacgcagacatcaacctgctctactggagcgacgaggaggccgtggtggacttcaaggctgtgcagggccgctgcaccgtggagtatggggaggacctgcccgagtgcgtccaggtgtactccatgggcggccccaaccgcttctacttcctcgaggcctataatgcaaagagcaaaagctttgaagatcctcccaaccatgcccgtagccctggaaacaaagggaagggcaagggaaaagggaagggcaagcccaagtcccaagcctgtgagccgagcgagccagagatagagatcaagctgcccaagctgcggaccctggatgtgttttctggctgcggggggttgtcggagggattccaccaagcaggcatctctgacacgctgtgggccatcgagatgtgggaccctgcggcccaggcgttccggctgaacaaccccggctccacagtgttcacagaggactgcaacatcctgctgaagctggtcatggctggggagaccaccaactcccgcggccagcggctgccccagaagggagacgtggagatgctgtgcggcgggccgccctgccagggcttcagcggcatgaaccgcttcaattcgcgcacctactccaagttcaaaaactctctggtggtttccttcctcagctactgcgactactaccggccccggttcttcctcctggagaatgtcaggaactttgtctccttcaagcgctccatggtcctgaagctcaccctccgctgcctggtccgcatgggctatcagtgcaccttcggcgtgctgcaggccggtcagtacggcgtggcccagactaggaggcgggccatcatcctggccgcggcccctggagagaagctccctctgttcccggagccactgcacgtgtttgctccccgggcctgccagctgagcgtggtggtggatgacaagaagtttgtgagcaacataaccaggttgagctcgggtcctttccggaccatcacggtgcgagacacgatgtccgacctgccggaggtgcggaatggagcctcggcactggagatctcctacaacggggagcctcagtcctggttccagaggcagctccggggcgcacagtaccagcccatcctcagggaccacatctgtaaggacatgagtgcattggtggctgcccgcatgcggcacatccccttggccccagggtcagactggcgcgatctgcccaacatcgaggtgcggctctcagacggcaccatggccaggaagctgcggtatacccaccatgacaggaagaacggccgcagcagctctggggccctccgtggggtctgctcctgcgtggaagccggcaaagcctgcgaccccgcagccaggcagttcaacaccctcatcccctggtgcctgccccacaccgggaaccggcacaaccactgggctggcctctatggaaggctcgagtgggacggcttcttcagcacaaccgtcaccaaccccgagcccatgggcaagcagggccgcgtgctccacccagagcagcaccgtgtggtgagcgtgcgggagtgtgcccgctcccagggcttccctgacacctaccggctcttcggcaacatcctggacaagcaccggcaggtgggcaatgccgtgccaccgcccctggccaaagccattggcttggagatcaagctttgtatgttggccaaagcccgagagagtgcctcagctaaaataaaggaggaggaagctgctaaggactagttctgccctcccgtcacccctgtttctggcaccaggaatccccaacatgcactgatgttgtgtttttaacatgtcaatctgtccgttcacatgtgtggtacatggtgtttgtggccttggctgacatgaagctgttgtgtgaggttcgcttatcaactaatgatttagtgatcaaattgtgcagtactttgtgcattctggattttaaaagttttttattatgcattatatcaaatctaccactgtatgagtggaaattaagactttatgtagtttttatatgttgtaatatttcttcaaataaatctctcctataaaccaaaaaaaaaaaaaaaaaaaaaaaaaa

SEQ ID NO: 1525 - protein, 1616 aa, Homo sapiens
MPARTAPARVPTLAVPAISLPDDVRRRLKDLERDSLTEKECVKEKLNLLHEFLQTEIKNQLCDLETKLRKEELSEEGYLAKVKSLLNKDLSLENGAHAYNREVNGRLENGNQARSEARRVGMADANSPPKPLSKPRTPRRSKSDGEAKPEPSPSPRITRKSTRQTTITSHFAKGPAKRKPQEESERAKSDESIKEEDKDQDEKRRRVTSRERVARPLPAEEPERAKSGTRTEKEEERDEKEEKRLRSQTKEPTPKQKLKEEPDREARAGVQADEDEDGDEKDEKKHRSQPKDLAAKRRPEEKEPEKVNPQISDEKDEDEKEEKRRKTTPKEPTEKKMARAKTVMNSKTHPPKCIQCGQYLDDPDLKYGQHPPDAVDEPQMLTNEKLSIFDANESGFESYEALPQHKLTCFSVYCKHGHLCPIDTGLIEKNIELFFSGSAKPIYDDDPSLEGGVNGKNLGPINEWWITGFDGGEKALIGFSTSFAEYILMDPSPEYAPIFGLMQEKIYISKIVVEFLQSNSDSTYEDLINKIETTVPPSGLNLNRFTEDSLLRHAQFVVEQVESYDEAGDSDEQPIFLTPCMRDLIKLAGVTLGQRRAQARRQTIRHSTREKDRGPTKATTTKLVYQIFDTFFAEQIEKDDREDKENAFKRRRCGVCEVCQQPECGKCKACKDMVKFGGSGRSKQACQERRCPNMAMKEADDDEEVDDNIPEMPSPKKMHQGKKKKQNKNRISWVGEAVKTDGKKSYYKKVCIDAETLEVGDCVSVIPDDSSKPLYLARVTALWEDSSNGQMFHAHWFCAGTDTVLGATSDPLELFLVDECEDMQLSYIHSKVKVIYKAPSENWAMEGGMDPESLLEGDDGKTYFYQLWYDQDYARFESPPKTQPTEDNKFKFCVSCARLAEMRQKEIPRVLEQLEDLDSRVLYYSATKNGILYRVGDGVYLPPEAFTFNIKLSSPVKRPRKEPVDEDLYPEHYRKYSDYIKGSNLDAPEPYRIGRIKEIFCPKKSNGRPNETDIKIRVNKFYRPENTHKSTPASYHADINLLYWSDEEAVVDFKAVQGRCTVEYGEDLPECVQVYSMGGPNRFYFLEAYNAKSKSFEDPPNHARSPGNKGKGKGKGKGKPKSQACEPSEPEIEIKLPKLRTLDVFSGCGGLSEGFHQAGISDTLWAIEMWDPAAQAFRLNNPGSTVFTEDCNILLKLVMAGETTNSRGQRLPQKGDVEMLCGGPPCQGFSGMNRFNSRTYSKFKNSLVVSFLSYCDYYRPRFFLLENVRNFVSFKRSMVLKLTLRCLVRMGYQCTFGVLQAGQYGVAQTRRRAIILAAAPGEKLPLFPEPLHVFAPRACQLSVVVDDKKFVSNITRLSSGPFRTITVRDTMSDLPEVRNGASALEISYNGEPQSWFQRQLRGAQYQPILRDHICKDMSALVAARMRHIPLAPGSDWRDLPNIEVRLSDGTMARKLRYTHHDRKNGRSSSGALRGVCSCVEAGKACDPAARQFNTLIPWCLPHTGNRHNHWAGLYGRLEWDGFFSTTVTNPEPMGKQGRVLHPEQHRVVSVRECARSQGFPDTYRLFGNILDKHRQVGNAVPPPLAKAIGLEIKLCMLAKARESASAKIKEEEAAKD

SEQ ID NO: 1526 - DNA, 135 bp, Homo sapiens
atggggctctgcacctacaagatcaggcagttcctggactgttcgaccactgagaatgacctgtccctgtgtgagggcttcaatgaggccccaaagcagtgcaagtacaaccatggtctgagctccctgccttga

SEQ ID NO: 1527 - protein, 44 aa, Homo sapiens
MGLCTYKIRQFLDCSTTENDLSLCEGFNEAPKQCKYNHGLSSLP

SEQ ID NO: 1528 - DNA, 3589 bp, Homo sapiens
cggccgccctggggacgcagacgccaaggcccctccggccagggccgggagccgggccggcctagccagttctgaaagccccatggccccagcaggcctctgagccccaccatgggcagcttgtactcggagtacctgaaccccaacaaggtccaggaacactataattataccaaggagacgctggaaacgcaggagacgacctcccgccaggtggcctcggccttcatcgtcatcctctgttgcgccattgtggtggaaaaccttctggtgctcattgcggtggcccgaaacagcaagttccactcggcaatgtacctgtttctgggcaacctggccgcctccgatctactggcaggcgtggccttcgtagccaataccttgctctctggctctgtcacgctgaggctgacgcctgtgcagtggtttgcccgggagggctctgccttcatcacgctctcggcctctgtcttcagcctcctggccatcgccattgagcgccacgtggccattgccaaggtcaagctgtatggcagcgacaagagctgccgcatgcttctgctcatcggggcctcgtggctcatctcgctggtcctcggtggcctgcccatccttggctggaactgcctgggccacctcgaggcctgctccactgtcctgcctctctacgccaagcattatgtgctgtgcgtggtgaccatcttctccatcatcctgttggccatcgtggccctgtacgtgcgcatctactgcgtggtccgctcaagccacgctgacatggccgccccgcagacgctagccctgctcaagacggtcaccatcgtgctaggcgtctttatcgtctgctggctgcccgccttcagcatcctccttctggactatgcctgtcccgtccactcctgcccgatcctctacaaagcccactactttttcgccgtctccaccctgaattccctgctcaaccccgtcatctacacgtggcgcagccgggacctgcggcgggaggtgcttcggccgctgcagtgctggaggccgggggtgggggtgcaaggacggaggcggggcgggaccccgggccaccacctcctgccactccgcagctccagctccctggagaggggcatgcacatgcccacgtcacccacgtttctggagggcaacacggtggtctgagggtgggggtggaccaacaaccaggccagggcagaggggttcatggagaggccactgggtgaccccagatagagacttggggctactgagccagatgcccccgccccacagacctgggtgatgttgcaaatatttcacacctggaaaggccagataaggcactgactagtcacatagcagtgttgcagtgcggtcctgagggccagtccagtggctagtgtgacccctttagaactggatcctggggaggccagggcaggggacctgtgaagagccagggtgagggcaggcagcatttaaggggagctcagggcaggagcactttaccacctggtacaaaggatttttttttttttttgagacggaatcttgcactgctgcccaggctggagtgcagtggcgtgatctcggctcaccgcaagctccgcctcctgggttcatgtcgttctcctgcctcagcctcccaagtagctgggactataggcgcctgccaccacacctggctaattttttgtacctttagtagagatggggtttcaccgtgttagccaggatggtcttgatctcctgacctcgtgatccgcccgcctcggcctcccaaagtgctgggattacaggcgtgagccaccgtgcccggctttttttttttttttttttttttttttttttttttttgagatgaagtctcgctctgttgcccaggctggagagtgcagtggtacggtctcagctcactgcaacctccacctcccaggttcaagcgattctccagcctgagcctcctgagtagctgggattacaggtgcctaccaccacgcccaggtaattttttttttttttgtatttttagtagagacggggtttcaccatgttggccaggctggtctcgaactcctgacctcatgatccgcccgtgttggcctcccaaagtgtgggattacaggcgtaagccacctcacctggcggtacaaagaatttctgcattttcttccctggcccctagtcctgcaccgatttctccttttcgaatgtattcctcctgccaccttctctgggcaacttcgtgcgactacagaaccactgtcctgaggagctagaggcctcctctctgaccatccagagcccaaatccacagcttccccaaatttcatcagctgccacttgacgacttctccccgtctctctgaggcccggaaaccacggctggaggtggggaggggatggcggctgaggtccattcctcattctcagacctcattgctcagttgcactatttggggcacagaataatcaccaaaagtgagaaaaacgagtttgggtggctggggaggactttgggactcttgatgcaaggcgcaacttgagaaaattctgggtgtgatatttgcacagacaccctcctttcaaaaacagccaccccccaagctattctcagctccacacctgcagccccagctaaggtaccaggtctcctgagcaaggcagagagaagccttgagccttctctgtgtcttctttcaagaaccccgctgtgtcttctttcaagattttttttttgagacagtttcaagatttttgttttgtttttgagatggagtctcactgtgtcacccaggctgaggtggcagtggttcaatctccgttcactgccacctccacctcccgggttcaagcgattctcctgcttcagcctctcgagtagctgggactacaggcacctgccaccatgtctggctaatttttgtatttttagtagagacagggtttcactacgttggccaggctggtctcaaactcctgacctcaagtgatccgcccgcctcggcctccccaattgctgggattacaggcgtgagccactgtgcccggccttcttctttcaagttatatagaatggagcatgggggtggcagtggctagggacatttcctggggacactctcccctaaccccccagaaggacttcacaaaaacctgtggataatggaagggatgttacggtacaaacgtatatttatgtgtgtgtgtgtgtatgtgtgtgcgcgcgcgcgtgtgcacataggcgtgatgtctgtgaccctcctctcctcgtcacatttcccccagaatgaatgctgtcctgtctgctcatgtttgtgttgaagctgccaaagtcggggagctctggtcctgcccagacccctttggaattgctggcccatcctcccactggagagctggggtgcagctcaccttggggaaggaaacctcatgcctcagagtaatttcttgtgaatgcaaagcctgggggagcgggtctttggggggcaaggagccagtcaggggcttgtttcccctcatagagctccccagacgtgcctccgcaatgcctgaaacccagacctaggctaataaacggttcaatttctgttaaaaa

SEQ ID NO: 1529 - protein, 353 aa, Homo sapiens
MGSLYSEYLNPNKVQEHYNYTKETLETQETTSRQVASAFIVILCCAIVVENLLVLIAVARNSKFHSAMYLFLGNLAASDLLAGVAFVANTLLSGSVTLRLTPVQWFAREGSAFITLSASVFSLLAIAIERHVAIAKVKLYGSDKSCRMLLLIGASWLISLVLGGLPILGWNCLGHLEACSTVLPLYAKHYVLCVVTIFSIILLAIVALYVRIYCVVRSSHADMAAPQTLALLKTVTIVLGVFIVCWLPAFSILLLDYACPVHSCPILYKAHYFFAVSTLNSLLNPVIYTWRSRDLRREVLRPLQCWRPGVGVQGRRRGGTPGHHLLPLRSSSSLERGMHMPTSPTFLEGNTVV

SEQ ID NO: 1530 - DNA, 1511 bp, Homo sapiens
cccaaagtaggctaggcctacggaagctgggtcttcttgctgtgaggtcgcgttccccagtgttacggagggtccttgaggcaggagtgaaaattgggtctgggggttagtcctggggtggaggtctgggcacgccgggtcggaccccctccatcttcggttttgcacaccccgctttccagcgcggagtcgcggcgggtagggcggcgtcgcgtgcgtgacgtcatccagcggcgcctcgcgaggctccagtggccttgacctcccgcggcgtgggaggctgcgcggcgatgctgcagttcgtccgggccggggcgcgggcctggcttcggcctaccggcagccagggcctgagttccctggcggaagaggcagcgcgtgcgaccgagaacccggagcaggtggcgagcgagggtctcccggagcccgtgctgcgcaaagtcgagctcccggtacccactcatcgacgcccagtgcaggcctgggtcgagtccttgcggggcttcgagcaggagcgcgtgggcctggccgacctgcaccccgatgttttcgccaccgcgcccaggctggacatactgcaccaggttgctatgtggcagaagaacttcaagagaattagctatgccaagaccaagacgagagccgaggtgcggggcggtggccggaagccttggccgcagaaaggcactgggcgggcccggcatggcagcatccgctctccgctctggcgaggaggaggtgttgcccatggcccccggggccccacaagttactactacatgctgcccatgaaggtgcgggcgctgggtctcaaagtggcactgaccgtcaagctggcccaggacgacctgcacatcatggactccctagagctgcccaccggagacccacagtacctgacagagctggcgcactaccgccgctggggggactccgtactcctcgtggacttaacacacgaggagatgccacagagcatcgtggaggccacctctaggcttaagaccttcaacttgatcccggctgttggcctaaatgtgcacagcatgctcaagcaccagacgctggtcctgacgctgcccaccgtcgccttcctggaggacaagctgctctggcaggactcacgttacagacccctctaccccttcagcctgccctacagcgacttcccccgacccctaccccacgctacccagggcccagcggccaccccgtaccactgttgatgtgaagcacctcttctgagccaggccgagcccctggccgacttgggagcctcaggcccacgcccacccttcgaggaaggtgtcacctggaccccttcattccacggaggaagctgaggccacagggagcggccatcgccattgggaaggggcgactccacggaaagcccagacgggcttctgcatccattccctctttttgtttttaaaataaattgtatttttgaatcaaaaaaaaaaaaaaaaaaaaaaaaaaaaaaaaaaaaaaaaaaaaaaaaaaaaaaa

SEQ ID NO: 1531 - protein, 311 aa, Homo sapiens [sequence omitted]

SEQ ID NO: 1532 - DNA, 1375 bp, Homo sapiens
cccaaagtaggctaggcctacggaagctgggtcttcttgctgtgagcgcggagtcgcggcgggtagggcggcgtcgcgtgcgtgacgtcatccagcggcgcctcgcgaggctccagtggccttgacctcccgcggcgtgggaggctgcgcggcgatgctgcagttcgtccgggccggggcgcgggcctggcttcggcctaccggcagccagggcctgagttccctggcggaagaggcagcgcgtgcgaccgagaacccggagcaggtggcgagcgagggtctcccggagcccgtgctgcgcaaagtcgagctcccggtacccactcatcgacgcccagtgcaggcctgggtcgagtccttgcggggcttcgagcaggagcgcgtgggcctggccgacctgcaccccgatgttttcgccaccgcgcccaggctggacatactgcaccaggttgctatgtggcagaagaacttcaagagaattagctatgccaagaccaagacgagagccgaggtgcggggcggtggccggaagccttggccgcagaaaggcactgggcgggcccggcatggcagcatccgctctccgctctggcgaggaggaggtgttgcccatggcccccggggccccacaagttactactacatgctgcccatgaaggtgcgggcgctgggtctcaaagtggcactgaccgtcaagctggcccaggacgacctgcacatcatggactccctagagctgcccaccggagacccacagtacctgacagagctggcgcactaccgccgctggggggactccgtactcctcgtggacttaacacacgaggagatgccacagagcatcgtggaggccacctctaggcttaagaccttcaacttgatcccggctgttggcctaaatgtgcacagcatgctcaagcaccagacgctggtcctgacgctgcccaccgtcgccttcctggaggacaagctgctctggcaggactcacgttacagacccctctaccccttcagcctgccctacagcgacttcccccgacccctaccccacgctacccagggcccagcggccaccccgtaccactgttgatgtgaagcacctcttctgagccaggccgagcccctggccgacttgggagcctcaggcccacgcccacccttcgaggaaggtgtcacctggaccccttcattccacggaggaagctgaggccacagggagcggccatcgccattgggaaggggcgactccacggaaagcccagacgggcttctgcatccattccctctttttgtttttaaaataaattgtatttttgaatcaaaaaaaaaaaaaaaaaaaaaaaaaaaaaaaaaaaaaaaaaaaaaaaaaaaaaaa

SEQ ID NO: 1533 - protein, 311 aa, Homo sapiens [sequence omitted]

SEQ ID NO: 1534 - DNA, 2404 bp, Homo sapiens
cccaaagtaggctaggcctacggaagctgggtcttcttgctgtgaggtcgcgttccccagtgttacggagggtccttgaggcaggagtgaaaattgggtctgggggttagtcctggggtggaggtctgggcacgccgggtcggaccccctccatcttcggttttgcacaccccgctttccagcgcggagtcgcggcgggtagggcggcgtcgcgtgcgtgacgtcatccagcggcgcctcgcgaggctccagtggccttgacctcccgcggcgtgggaggctgcgcggcgatgctgcagttcgtccgggccggggcgcgggcctggcttcggcctaccggcagccagggcctgagttccctggcggaagaggcagcgcgtgcgaccgagaacccggagcaggtggcgagcgagggtctcccggagcccgtgctgcgcaaagtcgagctcccggtacccactcatcgacgcccagtgcaggcctgggtcgagtccttgcggggcttcgagcaggagcgcgtgggcctggccgacctgcaccccgatgttttcgccaccgcgcccaggctggacatactgcaccaggttgctatgtggcagaagaacttcaagagaattagctatgccaagaccaagacgagagccgaggtgcggggcggtggccggaagccttggccgcagaaaggcactgggcgggcccggcatggcagcatccgctctccgctctggcgaggaggaggtgttgcccatggcccccggggccccacaagttactactacatgctgcccatgaaggtgcgggcgctgggtctcaaagtggcactgaccgtcaagctggcccaggacgacctgcacatcatggactccctagagctgcccaccggagacccacagtacctgacagagctggcgcactaccgccgctggggggactccgtactcctcgtggacttaacacacgaggagatgccacagagcatcgtggaggccacctctaggcttaagaccttcaacttgatcccggctgttggtgagcaaagagcccaggcccctagagtgcgcatgtgcaggctccgctgttagaatcacagcggttcaaatccggcatctggtcgctgagtggcctcaggcagtgaccacgctcccggacccaaccttcagcttgcccaaagcaataatctttcctaaagaagtgcttggctggggatggtggctcacgcttgtaatcccagtactttgggaggccaaggcagtctgggcaatatagtgaggctcccatctgtactaaaaataaaaaagttaggcgtggcgatgtgcacctgtagtcccagctactcgggggctgagccaggcggatagcttgagctcagggggccaaggctgcagtgagtcatgatcgcaccactgcacccaaacctggggagagagctagactcttgtctcaaaaaaaaaaaaaaaaaaaaaaaaaaagctccaaagtcacctctgtcaaagccacagtctgttccttccacagccacaagatggcgacatgagcctaagtcaagtcctgtccctcaacccacgcccctcgctggcttccccacctctctcaggatgaaagcccaagtcatcagggtggcacgtcaggccctgcacgatgtgccccgtcacctccctgccctcccgtcatttgccctgggtctcccccaccagaatgggagccaggagtcccagccaggcacaggaccgagcctggctctcggtcagcaggtgatgagctgggagcagctccttggccagaggcttacaggcaacaagcggccaggcagggtctggccccgggctgctgggctcacaaagtcacactagaccacagtgacgatctctgtaagcacaaagggactccgatgtgggtggggtgaggagagaggcagccccggcctgaccggccccccgccccgcccccaccccgcccccaggcctaaatgtgcacagcatgctcaagcaccagacgctggtcctgacgctgcccaccgtcgccttcctggaggacaagctgctctggcaggactcacgttacagacccctctaccccttcagcctgccctacagcgacttcccccgacccctaccccacgctacccagggcccagcggccaccccgtaccactgttgatgtgaagcacctcttctgagccaggccgagcccctggccgacttgggagcctcaggcccacgcccacccttcgaggaaggtgtcacctggaccccttcattccacggaggaagctgaggccacagggagcggccatcgccattgggaaggggcgactccacggaaagcccagacgggcttctgcatccattccctctttttgtttttaaaataaattgtatttttgaatcaaggaggataaagataa

SEQ ID NO: 1535 - protein, 263 aa, Homo sapiens
MLQFVRAGARAWLRPTGSQGLSSLAEEAARATENPEQVASEGLPEPVLRKVELPVPTHRRPVQAWVESLRGFEQERVGLADLHPDVFATAPRLDILHQVAMWQKNFKRISYAKTKTRAEVRGGGRKPWPQKGTGRARHGSIRSPLWRGGGVAHGPRGPTSYYYMLPMKVRALGLKVALTVKLAQDDLHIMDSLELPTGDPQYLTELAHYRRWGDSVLLVDLTHEEMPQSIVEATSRLKTFNLIPAVGEQRAQAPRVRMCRLRC

SEQ ID NO: 1536 - DNA, 3249 bp, Homo sapiens
caagcttagcctggccgggaaacgggaggcgtggaggccgggagcagcccccggggtcatcgccctgccaccgccgcccgattgctttagcttggaaattccggagctgaagcggccagcgagggaggatgaccctctcggcccgggcaccctgtcagtccggaaataactgcagcatttgttccggaggggaaggcgcgaggtttccgggaaagcagcaccgccccttggcccccaggtggctagcgctataaaggatcacgcgccccagtcgacgctgagctcctctgctactcagagttgcaacctcagcctcgctatggctcccagcagcccccggcccgcgctgcccgcactcctggtcctgctcggggctctgttcccaggacctggcaatgcccagacatctgtgtccccctcaaaagtcatcctgccccggggaggctccgtgctggtgacatgcagcacctcctgtgaccagcccaagttgttgggcatagagaccccgttgcctaaaaaggagttgctcctgcctgggaacaaccggaaggtgtatgaactgagcaatgtgcaagaagatagccaaccaatgtgctattcaaactgccctgatgggcagtcaacagctaaaaccttcctcaccgtgtactggactccagaacgggtggaactggcacccctcccctcttggcagccagtgggcaagaaccttaccctacgctgccaggtggagggtggggcaccccgggccaacctcaccgtggtgctgctccgtggggagaaggagctgaaacgggagccagctgtgggggagcccgctgaggtcacgaccacggtgctggtgaggagagatcaccatggagccaatttctcgtgccgcactgaactggacctgcggccccaagggctggagctgtttgagaacacctcggccccctaccagctccagacctttgtcctgccagcgactcccccacaacttgtcagcccccgggtcctagaggtggacacgcaggggaccgtggtctgttccctggacgggctgttcccagtctcggaggcccaggtccacctggcactgggggaccagaggttgaaccccacagtcacctatggcaacgactccttctcggccaaggcctcagtcagtgtgaccgcagaggacgagggcacccagcggctgacgtgtgcagtaatactggggaaccagagccaggagacactgcagacagtgaccatctacagctttccggcgcccaacgtgattctgacgaagccagaggtctcagaagggaccgaggtgacagtgaagtgtgaggcccaccctagagccaaggtgacgctgaatggggttccagcccagccactgggcccgagggcccagctcctgctgaaggccaccccagaggacaacgggcgcagcttctcctgctctgcaaccctggaggtggccggccagcttatacacaagaaccagacccgggagcttcgtgtcctgtatggcccccgactggacgagagggattgtccgggaaactggacgtggccagaaaattcccagcagactccaatgtgccaggcttgggggaacccattgcccgagctcaagtgtctaaaggatggcactttcccactgcccatcggggaatcagtgactgtcactcgagatcttgagggcacctacctctgtcgggccaggagcactcaaggggaggtcacccgcaaggtgaccgtgaatgtgctctccccccggtatgagattgtcatcatcactgtggtagcagccgcagtcataatgggcactgcaggcctcagcacgtacctctataaccgccagcggaagatcaagaaatacagactacaacaggcccaaaaagggacccccatgaaaccgaacacacaagccacgcctccctgaacctatcccgggacagggcctcttcctcggccttcccatattggtggcagtggtgccacactgaacagagtggaagacatatgccatgcagctacacctaccggccctgggacgccggaggacagggcattgtcctcagtcagatacaacagcatttggggccatggtacctgcacacctaaaacactaggccacgcatctgatctgtagtcacatgactaagccaagaggaaggagcaagactcaagacatgattgatggatgttaaagtctagcctgatgagaggggaagtggtgggggagacatagccccaccatgaggacatacaactgggaaatactgaaacttgctgcctattgggtatgctgaggccccacagacttacagaagaagtggccctccatagacatgtgtagcatcaaaacacaaaggcccacacttcctgacggatgccagcttgggcactgctgtctactgaccccaacccttgatgatatgtatttattcatttgttattttaccagctatttattgagtgtcttttatgtaggctaaatgaacataggtctctggcctcacggagctcccagtcctaatcacattcaaggtcaccaggtacagttgtacaggttgtacactgcaggagagtgcctggcaaaaagatcaaatggggctgggacttctcattggccaacctgcctttccccagaaggagtgatttttctatcggcacaaaagcactatatggactggtaatggttacaggttcagagattacccagtgaggccttattcctcccttccccccaaaactgacacctttgttagccacctccccacccacatacatttctgccagtgttcacaatgacactcagcggtcatgtctggacatgagtgcccagggaatatgcccaagctatgccttgtcctcttgtcctgtttgcatttcactgggagcttgcactatgcagctccagtttcctgcagtgatcagggtcctgcaagcagtggggaagggggccaaggtattggaggactccctcccagctttggaagcctcatccgcgtgtgtgtgtgtgtgtatgtgtagacaagctctcgctctgtcacccaggctggagtgcagtggtgcaatcatggttcactgcagtcttgaccttttgggctcaagtgatcctcccacctcagcctcctgagtagctgggaccataggctcacaacaccacacctggcaaatttgattttttttttttttccagagacggggtctcgcaacattgcccagacttcctttgtgttagttaataaagctttctcaactgccaaa

SEQ ID NO: 1537 - protein, 532 aa, Homo sapiens
MAPSSPRPALPALLVLLGALFPGPGNAQTSVSPSKVILPRGGSVLVTCSTSCDQPKLLGIETPLPKKELLLPGNNRKVYELSNVQEDSQPMCYSNCPDGQSTAKTFLTVYWTPERVELAPLPSWQPVGKNLTLRCQVEGGAPRANLTVVLLRGEKELKREPAVGEPAEVTTTVLVRRDHHGANFSCRTELDLRPQGLELFENTSAPYQLQTFVLPATPPQLVSPRVLEVDTQGTVVCSLDGLFPVSEAQVHLALGDQRLNPTVTYGNDSFSAKASVSVTAEDEGTQRLTCAVILGNQSQETLQTVTIYSFPAPNVILTKPEVSEGTEVTVKCEAHPRAKVTLNGVPAQPLGPRAQLLLKATPEDNGRSFSCSATLEVAGQLIHKNQTRELRVLYGPRLDERDCPGNWTWPENSQQTPMCQAWGNPLPELKCLKDGTFPLPIGESVTVTRDLEGTYLCRARSTQGEVTRKVTVNVLSPRYEIVIITVVAAAVIMGTAGLSTYLYNRQRKIKKYRLQQAQKGTPMKPNTQATPP

SEQ ID NO: 1538 - DNA, 1196 bp, Homo sapiens
gctctctggcgcggggccccttagtccgggctttttgccatggggtctctgttccctctgtcgctgctgttttttttggcggccgcctacccgggagttgggagcgcgctgggacgccggactaagcgggcgcaaagccccaagggtagccctctcgcgccctccgggacctcagtgcccttctgggtgcgcatgagcccggagttcgtggctgtgcagccggggaagtcagtgcagctcaattgcagcaacagctgtccccagccgcagaattccagcctccgcaccccgctgcggcaaggcaagacgctcagagggccgggttgggtgtcttaccagctgctcgacgtgagggcctggagctccctcgcgcactgcctcgtgacctgcgcaggaaaaacacgctgggccacctccaggatcaccgcctacagtgttcccggtgggctacttggtggtgaccctgaggcatggaagccgggtcatctattccgaaagcctggagcgcttcaccggcctggatctggccaacgtgaccttgacctacgagtttgctgctggaccccgcgacttctggcagcccgtgatctgccacgcgcgcctcaatctcgacggcctggtggtccgcaacagctcggcacccattacactgatgctcgcttggagccccgcgcccacagctttggcctccggttccatcgctgcccttgtagggatcctcctcactgtgggcgctgcgtacctatgcaagtgcctagctatgaagtcccaggcgtaaagggggatgttctatgccggctgagcgagaaaaagaggaatatgaaacaatctggggaaatggccatacatggtggctgacgcctgtaatcccagcactttgggaggccgaggcaggagaatcgcttgagcccaggagttcgagaccagcctggacaacatagtgagaccccgtctatgcaaaaaatacacaaattagcctggtgtggtggcccgcacctgtggtcccagctacccgggaggctgagttgggaggatcctttgagccctgaaagtcgaggttgcagtgagccttgatcgtgccactgcactccagcctgggggacagagcacgaccctgtctccaaaaataaaataaaaataaaaataaatattggcgggggaaccctctggaatcaataaaggcttccttaaccagc

SEQ ID NO: 1539 - protein, 272 aa, Homo sapiens
MGSLFPLSLLFFLAAAYPGVGSALGRRTKRAQSPKGSPLAPSGTSVPFWVRMSPEFVAVQPGKSVQLNCSNSCPQPQNSSLRTPLRQGKTLRGPGWVSYQLLDVRAWSSLAHCLVTCAGKTRWATSRITAYSVPGGLLGGDPEAWKPGHLFRKPGALHRPGSGQRDLDLRVCCWTPRLLAARDLPRAPQSRRPGGPQQLGTHYTDARLEPRAHSFGLRFHRCPCRDPPHCGRCVPMQVPSYEVPGVKGDVLCRLSEKKRNMKQSGEMAIHGG

SEQ ID NO: 1540 - DNA, 1273 bp, Homo sapiens
gctctctggcgcggggccccttagtccgggctttttgccatggggtctctgttccctctgtcgctgctgttttttttggcggccgcctacccgggagttgggagcgcgctgggacgccggactaagcgggcgcaaagccccaagggtagccctctcgcgccctccgggacctcagtgcccttctgggtgcgcatgagcccggagttcgtggctgtgcagccggggaagtcagtgcagctcaattgcagcaacagctgtccccagccgcagaattccagcctccgcaccccgctgcggcaaggcaagacgctcagagggccgggttgggtgtcttaccagctgctcgacgtgagggcctggagctccctcgcgcactgcctcgtgacctgcgcaggaaaaacacgctgggccacctccaggatcaccgcctacaaaccgccccacagcgtgattttggagcctccggtcttaaagggcaggaaatacactttgcgctgccacgtgacgcaggtgttcccggtgggctacttggtggtgaccctgaggcatggaagccgggtcatctattccgaaagcctggagcgcttcaccggcctggatctggccaacgtgaccttgacctacgagtttgctgctggaccccgcgacttctggcagcccgtgatctgccacgcgcgcctcaatctcgacggcctggtggtccgcaacagctcggcacccattacactgatgctcgcttggagccccgcgcccacagctttggcctccggttccatcgctgcccttgtagggatcctcctcactgtgggcgctgcgtacctatgcaagtgcctagctatgaagtcccaggcgtaaagggggatgttctatgccggctgagcgagaaaaagaggaatatgaaacaatctggggaaatggccatacatggtggctgacgcctgtaatcccagcactttgggaggccgaggcaggagaatcgcttgagcccaggagttcgagaccagcctggacaacatagtgagaccccgtctatgcaaaaaatacacaaattagcctggtgtggtggcccgcacctgtggtcccagctacccgggaggctgagttgggaggatcctttgagccctgaaagtcgaggttgcagtgagccttgatcgtgccactgcactccagcctgggggacagagcacgaccctgtctccaaaaataaaataaaaataaaaataaatattggcgggggaaccctctggaatcaataaaggcttccttaaccagc

SEQ ID NO: 1541 - protein, 271 aa, Homo sapiens
MGSLFPLSLLFFLAAAYPGVGSALGRRTKRAQSPKGSPLAPSGTSVPFWVRMSPEFVAVQPGKSVQLNCSNSCPQPQNSSLRTPLRQGKTLRGPGWVSYQLLDVRAWSSLAHCLVTCAGKTRWATSRITAYKPPHSVILEPPVLKGRKYTLRCHVTQVFPVGYLVVTLRHGSRVIYSESLERFTGLDLANVTLTYEFAAGPRDFWQPVICHARLNLDGLVVRNSSAPITLMLAWSPAPTALASGSIAALVGILLTVGAAYLCKCLAMKSQA

SEQ ID NO: 1542 - DNA, 1420 bp, Homo sapiens
gctctctggcgcggggccccttagtccgggctttttgccatggggtctctgttccctctgtcgctgctgttttttttggcggccgcctacccgggagttgggagcgcgctgggacgccggactaagcgggcgcaaagccccaagggtagccctctcgcgccctccgggacctcagtgcccttctgggtgcgcatgagcccggagttcgtggctgtgcagccggggaagtcagtgcagctcaattgcagcaacagctgtccccagccgcagaattccagcctccgcaccccgctgcggcaaggcaagacgctcagagggccgggttgggtgtcttaccagctgctcgacgtgagggcctggagctccctcgcgcactgcctcgtgacctgcgcaggaaaaacacgctgggccacctccaggatcaccgcctacaaaccgccccacagcgtgattttggagcctccggtcttaaagggcaggaaatacactttgcgctgccacgtgacgcaggtgttcccggtgggctacttggtggtgaccctgaggcatggaagccgggtcatctattccgaaagcctggagcgcttcaccggcctggatctggccaacgtgaccttgacctacgagtttgctgctggaccccgcgacttctggcagcccgtgatctgccacgcgcgcctcaatctcgacggcctggtggtccgcaacagctcggcacccattacactgatgctcggtgaggcacccctgtaaccctggggactaggaggaagggggcagagagagttatgaccccgagagggcgcacagaccaagcgtgagctccacgcgggtcgacagacctccctgtgttccgttcctaattctcgccttctgctcccagcttggagccccgcgcccacagctttggcctccggttccatcgctgcccttgtagggatcctcctcactgtgggcgctgcgtacctatgcaagtgcctagctatgaagtcccaggcgtaaagggggatgttctatgccggctgagcgagaaaaagaggaatatgaaacaatctggggaaatggccatacatggtggctgacgcctgtaatcccagcactttgggaggccgaggcaggagaatcgcttgagcccaggagttcgagaccagcctggacaacatagtgagaccccgtctatgcaaaaaatacacaaattagcctggtgtggtggcccgcacctgtggtcccagctacccgggaggctgagttgggaggatcctttgagccctgaaagtcgaggttgcagtgagccttgatcgtgccactgcactccagcctgggggacagagcacgaccctgtctccaaaaataaaataaaaataaaaataaatattggcgggggaaccctctggaatcaataaaggcttccttaaccagc

SEQ ID NO: 1543 - protein, 237 aa, Homo sapiens
MGSLFPLSLLFFLAAAYPGVGSALGRRTKRAQSPKGSPLAPSGTSVPFWVRMSPEFVAVQPGKSVQLNCSNSCPQPQNSSLRTPLRQGKTLRGPGWVSYQLLDVRAWSSLAHCLVTCAGKTRWATSRITAYKPPHSVILEPPVLKGRKYTLRCHVTQVFPVGYLVVTLRHGSRVIYSESLERFTGLDLANVTLTYEFAAGPRDFWQPVICHARLNLDGLVVRNSSAPITLMLGEAPL

SEQ ID NO: 1544 - DNA, 3000 bp, Homo sapiens
ccgtcctctagcccagctcctcggctcgcgctctcctcgcctcctgtgctttccccgccgcggcgatgccagggccttcgccagggctgcgccgggcgctactcggcctctgggctgctctgggcctggggctcttcggcctctcagcggtctcgcaggagcccttctgggcggacctgcagcctcgcgtggcgttcgtggagcgcgggggctcgctgtggctgaattgcagcaccaactgccctcggccggagcgcggtggcctggagacctcgctgcgccgaaacgggacccagaggggtttgcgttggttggcgcggcagctggtggacattcgcgagccggagactcagcccgtctgcttcttccgctgcgcgcggcgcacactacaggcgcgtgggctcattcgcactttccagcgaccagatcgcgtagagctgatgccgctgcctccctggcagccggtgggcgagaacttcaccctgagctgtagggtccccggcgccgggccccgtgcgagcctcacgctgaccctgctgcggggcgcccaggagctgatccgccgcagcttcgccggtgaaccaccccgagcgcggggcgcggtgctcacagccacggtactggctcggagggaggaccatggagccaatttctcgtgtcgcgccgagctggacctgcggccgcacggactgggactgtttgaaaacagctcggcccccagagagctccgaaccttctccctgtctccggatgccccgcgcctcgctgctccccggctcttggaagttggctcggaaaggcccgtgagctgcactctggacggactgtttccagcctcagaggccagggtctacctcgcactgggggaccagaatctgagtcctgatgtcaccctcgaaggggacgcattcgtggccactgccacagccacagctagcgcagagcaggagggtgccaggcagctgatctgcaacgtcaccctggggggcgaaaaccgggagacccgggagaacgtgaccatctacagcttcccggcaccactcctgaccctgagcgaacccagcgtctccgaggggcagatggtgacagtaacctgcgcagctgggacccaagctctggtcacactggagggagttccagccgcggtcccggggcagcccgcccagcttcagctaaatgccaccgagaacgacgacagacgcagcttcttctgcgacgccaccctcgatgtggacggggagaccctgatcaagaacaggagcgcagagcttcgtgtcctatacgctccccggctagacgattcggactgccccaggagttggacgtggcccgagggcccagagcagacgctgcgctgcgaggcccgcgggaacccagaaccctcagtgcactgtgcgcgctccgacggcggggccgtgctggctctgggcctgctgggtccagtcactcgggcgctctcaggcacttaccgctgcaaggcggccaatgatcaaggcgaggcggtcaaggacgtaacgctaacggtggagtacgcaccagcgctggacagcgtgggctgcccagaacgcattacttggctggagggaacagaagcctcgctgagctgtgtggcgcacggggtaccgccgcctgatgtgatctgcgtgcgctctggagaactcggggccgtcatcgaggggctgttgcgtgtggcccgggagcatgcgggcacttaccgctgcgaagccaccaaccctcggggctctgcggccaaaaatgtggccgtcacggtggaatatggccccaggtttgaggagccgagctgccccagcaattggacatgggtggaaggatctgggcgcctgttttcctgtgaggtcgatgggaagccacagccaagcgtgaagtgcgtgggctccgggggcgccactgagggggtgctgctgccgctggcacccccagaccctagtcccagagctcccagaatccctagagtcctggcacccggtatctacgtctgcaacgccaccaaccgccacggctccgtggccaaaacagtcgtcgtgagcgcggagtcgccaccggagatggatgaatctacctgcccaagtcaccagacgtggctggaaggggctgaggcttccgcgctggcctgcgccgcccggggtcgcccttccccaggagtgcgctgctctcgggaaggcatcccatggcctgagcagcagcgcgtgtcccgagaggacgcgggcacttaccactgtgtggccaccaatgcgcatggcacggactcccggaccgtcactgtgggcgtggaataccggccagtggtggccgaacttgctgcctcgccccctggaggcgtgcgcccaggaggaaacttcacgttgacctgccgcgcggaggcctggcctccagcccagatcagctggcgcgcgcccccgggggccctcaacatcggcctgtcgagcaacaacagcacactgagcgtggcaggcgccatgggaagccacggcggcgagtacgagtgcgcacgcaccaacgcgcacgggcgccacgcgcggcgcatcacggtgcgcgtggccggtccgtggctatgggtcgccgtgggcggcgcggcggggggcgcggcgctgctggccgcgggggccggcctggccttctacgtgcagtccaccgcctgcaagaagggcgagtacaacgtgcaggaggccgagagctcaggcgaggccgtgtgtctcaacggagcgggcggcggcgctggcggggcggcaggcgcggagggcggacccgaggcggcggggggcgcggccgagtcgccggcggagggcgaggtcttcgccatacagctgacatcggcgtgagccgctcccctctccccgcgggccgggggacgccccccagactcacacgggggcttatttattgctttatttatttacttattcatttatttatgtattcaactccaagggcgtcacccccattttctacccatcccctcaataaagtttttataaagga

SEQ ID NO: 1545 - protein, 924 aa, Homo sapiens
MPGPSPGLRRALLGLWAALGLGLFGLSAVSQEPFWADLQPRVAFVERGGSLWLNCSTNCPRPERGGLETSLRRNGTQRGLRWLARQLVDIREPETQPVCFFRCARRTLQARGLIRTFQRPDRVELMPLPPWQPVGENFTLSCRVPGAGPRASLTLTLLRGAQELIRRSFAGEPPRARGAVLTATVLARREDHGANFSCRAELDLRPHGLGLFENSSAPRELRTFSLSPDAPRLAAPRLLEVGSERPVSCTLDGLFPASEARVYLALGDQNLSPDVTLEGDAFVATATATASAEQEGARQLICNVTLGGENRETRENVTIYSFPAPLLTLSEPSVSEGQMVTVTCAAGTQALVTLEGVPAAVPGQPAQLQLNATENDDRRSFFCDATLDVDGETLIKNRSAELRVLYAPRLDDSDCPRSWTWPEGPEQTLRCEARGNPEPSVHCARSDGGAVLALGLLGPVTRALSGTYRCKAANDQGEAVKDVTLTVEYAPALDSVGCPERITWLEGTEASLSCVAHGVPPPDVICVRSGELGAVIEGLLRVAREHAGTYRCEATNPRGSAAKNVAVTVEYGPRFEEPSCPSNWTWVEGSGRLFSCEVDGKPQPSVKCVGSGGATEGVLLPLAPPDPSPRAPRIPRVLAPGIYVCNATNRHGSVAKTVVVSAESPPEMDESTCPSHQTWLEGAEASALACAARGRPSPGVRCSREGIPWPEQQRVSREDAGTYHCVATNAHGTDSRTVTVGVEYRPVVAELAASPPGGVRPGGNFTLTCRAEAWPPAQISWRAPPGALNIGLSSNNSTLSVAGAMGSHGGEYECARTNAHGRHARRITVRVAGPWLWVAVGGAAGGAALLAAGAGLAFYVQSTACKKGEYNVQEAESSGEAVCLNGAGGGAGGAAGAEGGPEAAGGAAESPAEGEVFAIQLTSA

SEQ ID NO: 1546 - DNA, 852 bp, Homo sapiens
gagtcacgtgatgcatgtcatggccgcctccatggcccggggaggcgtgagtgccagggttctactgcaggctgccaggggcacctggtggaacagacctgggggcacttccgggtcgggggagggggtggcgctggggacaaccagaaagtttcaagcgacaggctcgcgcccggctggagaggaggacgcgggcggcccggagcggcccggggacgtggtgaacgtggtgttcgtagaccgctcaggccagcggatcccagtgagtggcagagtcggggacaatgttcttcacctggcccagcgccacggggtggacctggaaggggcctgtgaagcctccctggcctgctccacctgccatgtgtatgtgagtgaagaccacctggatctcctgcctcctcccgaggagagggaagacgacatgctagacatggcccccctcctccaggagaactcgcggctgggctgccagattgtgctgacaccggagctggaaggagcggaattcaccctgcccaagatcaccaggaacttctacgtggatggccatgtccccaagccccactgacatgaacacctggaccattccacattgccatggccccagggcccagattgagggaatagccaggtgccagccctgcccagagtgcggacaggcccgggagagacgtggaagcccctgtgaaggacaacacccctgcttgggagagagtcccatgtccaggctctggtggggacagggcccctagtggggtggccttccccaggcccctgagaatcagggtttgagtaggagtggactcatattggagctgcaataaatcgataacacaggcaaaaaaaaaa

SEQ ID NO: 1547 - protein, 183 aa, Homo sapiens
MAASMARGGVSARVLLQAARGTWWNRPGGTSGSGEGVALGTTRKFQATGSRPAGEEDAGGPERPGDVVNVVFVDRSGQRIPVSGRVGDNVLHLAQRHGVDLEGACEASLACSTCHVYVSEDHLDLLPPPEEREDDMLDMAPLLQENSRLGCQIVLTPELEGAEFTLPKITRNFYVDGHVPKPH

SEQ ID NO: 1548 - DNA, 5576 bp, Homo sapiens
gcggccgccgcctgccgggcctcccctcgccgcggccggccgccgcgctcccgcccgggcgcccagctatgtactccccgtactgcctcacccaggatgagttccacccgttcatcgaggcactgctgcctcacgtccgcgctttctcctacacctggttcaacctgcaggcgcggaagcgcaagtacttcaagaagcatgaaaagcggatgtcgaaggacgaggagcgggcggtgaaggacgagctgctgggcgagaagcccgagatcaagcagaagtgggcatcccggctgctggccaagctgcgcaaggacatccggcccgagttccgcgaggacttcgtgctgaccatcacgggcaagaagcccccctgctgcgtgctctccaaccccgaccagaagggcaagatccggcggattgactgcctgcgccaggctgacaaggtgtggcggctggacctggtcatggtgattttgtttaaggggatccccctggaaagtactgatggggagcggctctacaagtcgcctcagtgctcgaaccccggcctgtgcgtccagccacatcacattggagtcacaatcaaagaactggatctttatctggcttactttgtccacactccggaatccggacaatcagatagttcaaaccagcaaggagatgcggacatcaaaccactgcccaacgggcacttaagtttccaggactgttttgtgacttccggggtctggaatgtgacggagctggtgagagtatcacagactcctgttgcaacagcatcagggcccaacttctccctggcggacctggagagtcccagctactacaacatcaaccaggtgaccctggggcggcggtccatcacctcccctccttccaccagcaccaccaagcgccccaagtccatcgatgacagtgagatggagagccctgttgatgacgtgttctatcccgggacaggccgttccccagcagctggcagcagccagtccagcgggtggcccaacgatgtggatgcaggcccggcttctctaaagaagtcaggaaagctggacttctgcagtgccctctcctctcagggcagctccccgcgcatggctttcacccaccacccgctgcctgtgcttgctggagtcagaccagggagcccccgggccacagcatcagccctgcacttcccctccacgtccatcatccagcagtcgagcccgtatttcacgcacccgaccatccgctaccaccaccaccacgggcaggactcactgaaggagtttgtgcagtttgtgtgctcggatggctcgggccaggccaccggacagcattcgcaacgacaggcgcctcctctgccaaccggtttgtcagcatcggaccccgggacggcaactttctgaacatcccacagcagtctcagtcctggttcctctgataagatcgacaaaagaaacaacaaaatgagaagaagaggttcctcgaaaggggggagaagaaattttgagaatggaaaaatcccccagcccagcccagccccaccgaaaagcaaaaattacacgtcgtcagccactcagcccttctctcctccagcccggggacccccgcgggccccagaagcagcccagttctcagagagcccttggaaggggtctcggtggagctgtgcaccagcagccaagcagaaagaaacacgcgacatggactctgtcaagtagaggacagaaagcaagaaaggatgcagaactgccttcctccccctgaccccgccccggccttctggggaaggaacaaagtccccaaacaaagcaaccagcacaattctgaaggggcctggcctccaccctcaccccttcctaggggaaccccaccctccacacagccggagctgccctagggagcctggagggccagcttgtaaagatgatggggtttagatccctcaggctctcccctccagactccgcccttccctccctccctccctccctccctctctgccaaggctccagcttcttcccccagctgctcccgaccaggagggggagagcagcctccacttaccccaccccacccttgggctaaaagcccccaggcgggcagggggtgacccctggagctagttgcgtgtcccagaatggagggtgttctgacaccccaccctgagccgcaagagcagtcctggggccctggacccctctgtacagtccgtaggaaaaagtcggaatgctctcgacggcctcgtcccagcctgggacaggccccctttcccctctctctgcaggccaggagggcctccttcctgccacgagggaggggagtcgggccccaggtcgcccccgcccccagccctgcatgcaggtgccctcgctccgccccatcagttcctgcccctgcccctcatgcagactgccctgctggggccgggccggagggtggagcagaaaggggaccccggagccgagcgaggaggaccaggcagccgccgctgccgcgctaagccaccacctgcgcttaggtaggcgtcctgctcgccgactttcagttccttgggagggtgttgggtgtcgtccttttcaaaagtgttttggagctttctgtgccccccgactttcccccgcctccccgccccccacgtggccacttttctctggattttagctgtaatgtctttactctttatttaggggtggggcattcattgtttgggtcttttgctgttggaatgggaactcctcctccatttgagcaacttgggaacaatttggtaacacaccacaggaagtagctctcccccccagccccctcctccctcaagggagggttggggggcctgtccagagggtcttcagaagcccccctgggagggaggggaggatgagcacgcccagctcccctccagggtgtgacttggcccctctggcttgtctttctgtgccttactcctcctcctgcgtctcccgttcctggccccttcttgagtccttgtgcctctctctttctctctctttcttaattgtatgaaaacacaaagcacaggtcaggatcctctgagagaaaatcaacattgcaccacgtaggggtgggctatgggctgtatttattgtgaatctagtttgtgaggctgtggccccgagctggcggagggagggaagaggagggagtgacgggaggggaggaggtcagcgacctggggccgtagcggcaggcgaacggtgcctgctacccagctggaagccacaaggtggctggctccaggggcggcttttgttggaagttgagtgaagccctccccctgtcctcagcgtgcagccctagaggaccccagggctgaggggcagtggatcctgcgggagtctcccggggcgtggggagtaaggccccgggggtggggggccgggtgggccgggcgtgacgcgcggtcaaagtgcaatgatttttcagttcggttggctaaacagggtcagagctgagagcgaagcagaaggggctccctgtccggcccacgtgccctttccctcgacgacagtcgagggctcgggctctgtgggactgtgggagctagggtctgcggggcgcctgcccgggcgaggtcggaagctgcaggccagctgggcccgggccggagcgtgcccggcggggctgcccgggcgggcagggggtgggggctgctcctttcccaagtggtgttgtgaggggcaatgagggcaacaggagatgtggggacgtgttaggagagaaaaaaaaaaaaacaaaaatatatatgggggaaattaacttttttttttcattgaaccaagtgcaatgcatcagagagttttcctatctttgtatgttaagagattaagaaaaaaaaattctatttttgttgtaatgtcctcgcggctctggggacgctaaaagaaccgggcctgccccgccctgcgcggggataacgaaagctgagtgtttttcccttttttttgttcgtttttagtttttttttttttaagtcgttttcctgcgttgacgaggatgatctggggtttttatttgtttcgtcgttcgttctgtttcggtgggagggctgaaggaaacgttcacattttagagtttaaaaaaaacacctcgacatttaaaaaatcaaccaacacaagatcaaaaaggaaaaggacgagagaaaaattatttttaagataattaaacataaaaccctggtgcttcttacattataaagtacgttttaaagaacccacaaactattatacataagtttatgaatcaattaaatatcctgcacttgttaggaatacgcatatcccttctttgttgagtttaacggaacgggacagcggcgtgcccccggcggctggactgctccggccgcgggtctccccgggcgcccctccctggggcccagcacccctcctcgccccatccccgtccgggtacgggggcgcggcaggggtccccggcccctcccccgcagaggtcaatgccaacgaacaaacgtcccctccctccctccctctccgccccgagcgcccttctttgagccagacgccaacttgaccctcaccagcattatcaggagcgcgctcagcaagttggtagtttcctcccccctttcccggcgcccctcccgcccccattcaacatctctcatcctatccccgaccccctccggggaacaccgggaaggctcgacgctccaggacaggaccagccacgcagacaggtcgatttgcccaggcccgcgcccgcacgcacgcacgcacacggccccgcacacagccccgccccaccccgcaaccagccctgtcgactgccttatacacccgcccccgcgctggccggccgacctagtgccttgttctcacccccgtgctggcggagcggacgccgcgctctgggtcccagaggggccgggtggctcagacgacccaccactcccccaccctgaccgtgctgaacagacccccccacacgagagaaaataaaggagcaataaagtcacgagaactttcgtcccccaatcgagagcccgaggggcaccccagccccgcctctgctcccccccaccccacccaccctcggggcgcccccctccccccgcaagccagcctgggccagccccgcttcggcccctcccgggagatccgtgcgcccgaccagcaccagcatcgcggaccgcaaaggccgcccgtcccgtcaaacaagtttcttcttaggctaagaaacgcagtatatacgagtatctctatatatagtactaatggatttggtgtgcttcccccttagcgtccccctccctctgctcctcctccttcagcctggtctccccctcttctctgccctccacccccgtctctgcactgagatacataagaaacaagggtagtttactgtctgttttgttttctgggttttcagtgtcctagcggaatgcaagtaggcagccagcccgtctgttccctctccgccccgccccgccccgcccccgtcactgcgcttctgttataccatctttgcctgactctctccggcttctccattgaatggctaatgtgtatgtgaaataaagaaataaagaaaaacaaacgcga

SEQ ID NO: 1549 - protein, 441 aa, Homo sapiens
MYSPYCLTQDEFHPFIEALLPHVRAFSYTWFNLQARKRKYFKKHEKRMSKDEERAVKDELLGEKPEIKQKWASRLLAKLRKDIRPEFREDFVLTITGKKPPCCVLSNPDQKGKIRRIDCLRQADKVWRLDLVMVILFKGIPLESTDGERLYKSPQCSNPGLCVQPHHIGVTIKELDLYLAYFVHTPESGQSDSSNQQGDADIKPLPNGHLSFQDCFVTSGVWNVTELVRVSQTPVATASGPNFSLADLESPSYYNINQVTLGRRSITSPPSTSTTKRPKSIDDSEMESPVDDVFYPGTGRSPAAGSSQSSGWPNDVDAGPASLKKSGKLDFCSALSSQGSSPRMAFTHHPLPVLAGVRPGSPRATASALHFPSTSIIQQSSPYFTHPTIRYHHHHGQDSLKEFVQFVCSDGSGQATGQHSQRQAPPLPTGLSASDPGTATF

SEQ ID NO: 1550 - DNA, 1510 bp, Homo sapiens
cagcctggcccttatctgcactgggccagcatcctccggccgctgcgccgccaggggtgagagggaggaaaccgggccgccgggggcggggagaaggcgggccggcccgggagccgctcactttccctgggggggacctacgcggagacctcggctatcctggccttccgaggcccacgaggaggcgcggcccaacgccggggcctggagcattgaggccggaccctcgcgagacagcagagcctggcctgacgctggaaaccacaccctggcccagactgccagccctgacgggacagagccagggcactcaccaggctgcaagaacagtgctggggtgagtacccccacgtcggggtccatgtgcccgcctcaggcacaggcagaggtgggccccaccatgactgagaaggcagagatggtgtgtgcccccagcccagcgcctgccccaccccctaagcctgcctcgcctgggcccccgcaggtggaggaggtgggccaccgaggaggctcctcgccccccaggctgccacctggtgtaccagtgatcagcctgggccacagcaggcccccaggggtagccatgcccaccacagagctgggcactctgcggcccccgctgctgcaactctccaccctgggaactgccccgcccactttggccctgcactaccaccctcaccccttcctcaacagtgtctacattgggccagcaggaccttttagcatcttccctagcagccggttgaagcggagaccaagccactgtgagctggacctggctgaggggcaccagccccagaaggtggcccggcgcgtgttcaccaacagccgggagcgctggcggcagcagaacgttaacggcgccttcgccgagctgaggaagctgctgccgacgcacccgcccgaccggaagctgagcaagaacgaggtgctccgcctagccatgaagtacatcggcttcctggtgcggctgctgcgcgaccaagccgcagctctggccgcaggccccacccctcccgggcctcgcaaacggccggtgcaccgggtcccagacgacggcgcccgccggggatccggacgcagggccgaggcggcagcgcgctcgcagcccgcgcccccggccgaccccgacggcagccccggtggagcggcccggcccatcaagatggagcaaaccgctttgagcccagaggtgcggtgaccgcacgcggcagcacctctgagccggagggcaccagggactcggcccagggccgtcaaggaaagggcagtggacgtgctgcgcatgttcgggagcgaactcccccgaagaaggaccagtgaagacgtcaggggcaaggtctcgggggtccggaagggtgatcatcgacccccaagggacccgcagacccttaaaaaaatcacccacaaccctctggaagtggccttgcccggtccccttcccaggggcgaggtcggcaaagcaacatggcagagcagtcataggaaaaaaaaaaaaaaaaaaaaa

SEQ ID NO: 1551 - protein, 280 aa, Homo sapiens
MCPPQAQAEVGPTMTEKAEMVCAPSPAPAPPPKPASPGPPQVEEVGHRGGSSPPRLPPGVPVISLGHSRPPGVAMPTTELGTLRPPLLQLSTLGTAPPTLALHYHPHPFLNSVYIGPAGPFSIFPSSRLKRRPSHCELDLAEGHQPQKVARRVFTNSRERWRQQNVNGAFAELRKLLPTHPPDRKLSKNEVLRLAMKYIGFLVRLLRDQAAALAAGPTPPGPRKRPVHRVPDDGARRGSGRRAEAAARSQPAPPADPDGSPGGAARPIKMEQTALSPEVR

SEQ ID NO: 1552 - DNA, 2217 bp, Homo sapiens
ccctacctcatagatatgtaggacatccccgggcccggaatgcggctctctgaccctctctgtgccctcccccgccccccgaaccaggcttggcgggcggaggcgccagcggatgtctcatgcaaggatcgtctctgtggctaagcctcactttccgctccgcccgggtgctctctagagcccggtttttcgagtggcagtctccagggctgccgaatacagcagcgatggagaacggcaccgggccctacggagaagaacgtccacgtgaagtccaggagacgacagtcaccgagggggctgccaaaatcgcctttcccagtgccaacgaggtcttttataacccggtgcaggaattcaatcgggacctgacatgtgctgtgatcaccgagtttgctcgcattcagcttggggccaaaggaatccagatcaaggttccaggagagaaggacacgcaaaaagtggtcgtggacttgtcagagcaagaggaggaaaaggttgaactgaaagagagtgaaaacctggcctcaggagaccaacctcgcacagcggccgtgggggagatctgtgaggaaggcctgcatgtgctggaaggcctggcagcttcaggcctacgttccattcgatttgccctagaggtgcctgggctcagatctgtggttgcaaacgatgcctccacccgggctgtggatctcatacgccggaatgtccagctcaatgacgtggcccacctggtacagccgagccaagcagatgcccggatgctgatgtaccagcaccagagggtgtcggagaggtttgacgtcatcgatctggacccctatggcagcccagccaccttcctggatgcagctgtgcaggctgtgagtgaaggagggttgctgtgtgtgacctgcacagacatggcggtgttggcggggaacagcggggagacgtgctacagcaagtacggggccatggccctcaagagccgggcctgccacgagatggccctgagaatcgtcctgcacagcctggacctccgcgccaactgctaccagcgcttcgtggtgccgctgctcagcatcagcgctgacttctacgtgcgtgtttttgtccgtgtcttcaccggccaggccaaggtcaaggcctcagccagcaagcaggcgctggtgttccagtgtgtgggctgcggggccttccaccttcagcgtctcggcaaagcgtcaggagtccccagcggccgggccaagttctctgcagcctgtggtccccctgtgacccccgagtgtgaacactgtgggcaacgacaccagcttggtggccccatgtgggcagagcccatccatgacctggattttgtgggccgtgtcctggaggctgtgagcgctaaccccggccgcttccacacctcggagcggatccgaggggtcctgagcgtcatcactgaggagctcccggacgtgcctctgtactacaccctggaccagctgagcagcaccatccactgcaacacaccaagcctcctgcagttgcggtcggccctcctccacgctgacttccgggtctcactctcccacgcctgtaagaacgctgtgaagacggatgcccctgcctctgccctctgggacatcatgcgttgctgggagaaggaatgtccggtgaaacgggagcgactatcagagactagcccagcgttccgcattctcagtgtggagcccaggctgcaggccaacttcaccatccgggaagatgccaaccccagctcccgacagcgaggactcaagcgcttccaggctaacccggaggccaactggggtccccggcctcgtgcccggccagggggcaaggcggccgacgaagctatggaggagagacgcaggctgcttcagaacaagcggaaggagccgccggaagatgtggcccagcgggctgcccggctcaagacatttccttgcaagaggtttaaggagggcacctgtcaacgcggggaccagtgctgctactcccacagccccccgacacccagggtttctgctgatgctgcccctgactgtccagagacctccaaccagaccccccctggacctggggctgccgctgggccaggcatagactgaaccaataaagagatgtcacgtcaccttctcccgaaaaaaaaaaaaaaaaaaaaaaaaaaaaaaaaaaaaaaaaaaaaaaaaaaaaaaaaaaaaaaaaaaaaaaaaaaaaaaaaaaaaa

SEQ ID NO: 1553 - protein, 659 aa, Homo sapiens
MQGSSLWLSLTFRSARVLSRARFFEWQSPGLPNTAAMENGTGPYGEERPREVQETTVTEGAAKIAFPSANEVFYNPVQEFNRDLTCAVITEFARIQLGAKGIQIKVPGEKDTQKVVVDLSEQEEEKVELKESENLASGDQPRTAAVGEICEEGLHVLEGLAASGLRSIRFALEVPGLRSVVANDASTRAVDLIRRNVQLNDVAHLVQPSQADARMLMYQHQRVSERFDVIDLDPYGSPATFLDAAVQAVSEGGLLCVTCTDMAVLAGNSGETCYSKYGAMALKSRACHEMALRIVLHSLDLRANCYQRFVVPLLSISADFYVRVFVRVFTGQAKVKASASKQALVFQCVGCGAFHLQRLGKASGVPSGRAKFSAACGPPVTPECEHCGQRHQLGGPMWAEPIHDLDFVGRVLEAVSANPGRFHTSERIRGVLSVITEELPDVPLYYTLDQLSSTIHCNTPSLLQLRSALLHADFRVSLSHACKNAVKTDAPASALWDIMRCWEKECPVKRERLSETSPAFRILSVEPRLQANFTIREDANPSSRQRGLKRFQANPEANWGPRPRARPGGKAADEAMEERRRLLQNKRKEPPEDVAQRAARLKTFPCKRFKEGTCQRGDQCCYSHSPPTPRVSADAAPDCPETSNQTPPGPGAAAGPGID

SEQ ID NO: 1554 - DNA, 4556 bp, Homo sapiens
tggccgccgcggctgccgctgctgctgaggcggaggccgcggaggccgcggaggcggaggccgaggccccggcgcagcggggcgcgccccgggcccaggcccggccccagccgccgctgcggagcccgccgggaccccccggagcgcggccacggcgcagccgctgccatggcccagacactgcagatggagatcccgaacttcggcaacagcatcctggagtgcctcaatgaacagcggctgcagggcctgtactgtgacgtgtcagtggtggtcaagggccatgccttcaaggcccaccgggccgtgcttgctgccagcagctcctacttccgggacctgttcaacaacagccgcagcgccgtggtggagctgccggcggctgtgcagccccagtctttccagcagatcctcagcttctgctacacgggccggctgagcatgaacgtgggcgaccagttcctgctcatgtacacggctggcttcctgcagatccaggagatcatggagaagggcaccgagttcttcctcaaggtgagctccccgagctgcgactcccagggcctgcatgcggaggaggccccatcgtcggagccccagagccccgtggcgcagacatcgggctggccagcctgtagcaccccgctgcccctcgtgtcgcgggtgaagacggagcagcaggagtcggactccgtgcagtgcatgcccgtggccaagcggctgtgggacagtggccagaaggaggctgggggcggcggcaatggcagccgcaagatggccaagttctccacgccggacctggctgccaaccggcctcaccagcccccgccaccccaacaggctccggtggtggcagcagcccagcccgccgtggctgcgggagcagggcagccagccggtggggtggcagcagcagggggtgtggtgagtgggcccagcacgtcggagcggaccagcccaggcacctcaagcgcctacaccagcgacagccctggctcctaccacaatgaggaggacgaggaggaggatggtggcgaggagggcatggatgagcagtaccggcagatctgcaacatgtacaccatgtacagcatgatgaacgtcggccagacagccgagaaggtggaggccctcccggagcaggtagcccccgagtcccgaaatcgcatccgggttcggcaagacctggcgtctctcccggctgaacttatcaaccagattgggaaccgctgccaccccaagctctacgacgagggcgacccctctgagaagctggagctggtgacaggcaccaacgtgtacatcacaagggcgcagctgatgaactgccacgtcagcgcaggcacgcggcacaaggtcctactgcggcggctcctggcctccttctttgaccggaacacgctggccaacagctgcggcaccggcatccgctcttctaccaacgatccccgtcggaagcccctggacagccgcgtgctccacgctgtcaagtactactgccagaacttcgcccccaacttcaaggagagcgagatgaatgccatcgcggccgacatgtgcaccaacgcccgccgcgtcgtgcgcaagagctggatgcccaaggtcaaggtgctcaaggctgaggatgacgcctacaccaccttcatcagtgaaacgggcaagatcgagccggacatgatgggtgtggagcatggcttcgagaccgccagccacgagggcgaggcgggtccctcggctgaagccctgcagtaacccgcccagcctcccgcggggccacacacttcccctcccaacacacacacacacctgccatcttggtcatgagctactgtctgtccctccccaggacccgcggtgggtgctgcatgttcccggccctctgcccctcctgtcctaccccctttccccaccgagagctgggccgggagaggaccgcagggcaggtggcgtgaggtccgtgttgccttctttaacacacactcgtgcagtgggggagttctggctccccaacctaacccctagccgtcatctccacactcaccaggcccaccaggggagggggctggcctgggggtcttgggaaggcccctccccaggccctaggccacctcgcggaagccttcagcctccgcccctcactgcagccccttgggacttgaggggggccccaggggttctcaggacccctcccaccacctcccagtgcttccacgtctccaaaagcgccttcctgtcaccctcgtctatccctgcgcctgggggctggggtaggcgaggccgtggggactacccattttatagctggggaaacaggctccgagaaattgcacaaccgacctcaggtggccggcagtggcgtgcctggtgccctttctcctcttccgcctctgttgctccctttggtcctctggggcctcagagaggcaggtcctaaaggagggggggtctcctgggggcagaccgagggtctcggaggatagaatgagaggtttccagggctggcagagtgtgtgcgtgtgtgtgtgcagaagttttgctttcaaacaaatgaagatacaagaggcagtaggacctgggttggaacccaggggagcagactggggggctgttgcccctccctccatctccccacacccaccccaccccacagcagggctcctggcccccacccccctgtacataatttttaaaacctttttttagcgaatgaaatattgaagtataagattccttttatttttcaaaccaatggggctgtgtctattgtccccctcggtccccaggggtggggggccttggaaggcagggcggtgttggggggctggggggcaggctgaatgtgtgtgtgtgggtgtgtatgtgtggagtgtgtgtgtgtgtttccatggtaggactccagtcccagctgctgcctaggctcctgtgggtcctgtgggtccccctcccctgttcaccttccccaacagggctatagtttaagggtgtcccaggccttggctggttggctgggcccagctcctgggggctgggcagggcagggcagggccgggtccacttccattgttagcagttgtttgcagaattttctcttttaccattcctctctttttgttctcgcccagagtgggtggttttttgttgttgttttagattttcatgtgaaggcagttttttttcttttttaactccccatccccctatgcagggtgtcatttcaccatccacatccacatccttgtttgtgtttctggccctcgtcctccctgcctctcatctgcctccccaacccccacctacccactgctcccaggggtctctccaggggcagggggattttaggagatggggtgggggccagcccctactggacccttgtaatctgatttggagaccatccccccgatgggaccagcagccccgccggcccactgggggtccctcttaacatctgcttgttgcgggggtcagtcatgagtgccagggtctggctggggtcttggcactgtcttcctggccggggcctgaaaccttagcccccagccggcctgagtgggggatattgacacccccagctaaagcacaagcaccttagtcacccctcctctccccccgcctcctggcctgccaccccaccccagcgtttaccccaaagcacaatgccctggtcacttggcaagcggctgggcctgacggaggccgaggggcagaccggggctccagccagacccctgaaaggaaggtgctcccccacttccaggccttagttggggtgggggggccagctcctgggcctggggtcttctcacccccacccccttgtcctgggtaggcccctgcctgcccctctctgccttttcctcgggtgtccctcctcgagcccctgtggcattggcttgggtggcagagcccacttgtttcagggaccccaggaggtgccccctggctcccaggactgtgtgtgggtccggggggtgggggggtggggagaagggtcgggcagggggtgcaggggaggaaactcctcaccaggagagccaaagacagggttgtgccttaccccaggagccacccctgtaccccccttgccctgccattcaccctccacccctacccctgggcggcctgctgctttttccttctcttcctcccctgccctgagctgcatggttcccccaccctgggcagccaggaaggaatctgaatggagaatcaccaaccaccagagaaaaaagactgtggggccctcccctgccaactccccttccctggccgcccactcaacccacacctctttcacgcaggacaggctgcccaccctgtccacgtgaagtgccaacgccctccccaccctgggccgagcccccacccctccctgggcccccaagtgagattgcacatttaactactgtaaggagaggagcggcgttggcaaatgtgaaccatgagaatatcagtgatactgatgagaataaactaaacgcctttgtaacaaaaaaaaaaaaaaaaaaaaaaaaaaaaaaaaaaaaaaaaaaaaaaaaaaaaaaaaaaaaaaaaaa

SEQ ID NO: 1555 - protein, 527 aa, Homo sapiens
MAQTLQMEIPNFGNSILECLNEQRLQGLYCDVSVVVKGHAFKAHRAVLAASSSYFRDLFNNSRSAVVELPAAVQPQSFQQILSFCYTGRLSMNVGDQFLLMYTAGFLQIQEIMEKGTEFFLKVSSPSCDSQGLHAEEAPSSEPQSPVAQTSGWPACSTPLPLVSRVKTEQQESDSVQCMPVAKRLWDSGQKEAGGGGNGSRKMAKFSTPDLAANRPHQPPPPQQAPVVAAAQPAVAAGAGQPAGGVAAAGGVVSGPSTSERTSPGTSSAYTSDSPGSYHNEEDEEEDGGEEGMDEQYRQICNMYTMYSMMNVGQTAEKVEALPEQVAPESRNRIRVRQDLASLPAELINQIGNRCHPKLYDEGDPSEKLELVTGTNVYITRAQLMNCHVSAGTRHKVLLRRLLASFFDRNTLANSCGTGIRSSTNDPRRKPLDSRVLHAVKYYCQNFAPNFKESEMNAIAADMCTNARRVVRKSWMPKVKVLKAEDDAYTTFISETGKIEPDMMGVEHGFETASHEGEAGPSAEALQ

SEQ ID NO: 1556 - DNA, 522 bp, Homo sapiens
atgagcagtctccgcgtgctgcctctccctcctcccactcgctcctcctcgcagccctcggcaatctggcctccctttgcaggcagcagctccagctccttggagagcctggcagaagctctgcctccgtcctcatggagctcgcagcctgcccgctccctccccaccaactccaaccataagcccacccttcggagttacatcccactccctgcgtcgcccaggcggtacctgcaggcccggcccctccccgcccccctccggccgcgccgctctcctctcctcccccactcggcctggccggagcccgactcctcctccccctccccctccccctccggcatccacgagaacctcctcacttttccgcctcggaccctccaacttccccggatccccggtacctgccccggcccgacctggccccctccctcgctgggagacgggggagcggtccaggtacgatcctgccgcccccaagccctgaagctcgggctggacgctcaaggccgcccgcggtag

SEQ ID NO: 1557 - protein, 173 aa, Homo sapiens [sequence omitted]

SEQ ID NO: 1558 - DNA, 750 bp, Homo sapiens
atgtctctcgaagaccccttttttgtagtccgaggcgaggtgcagaaggcggtgaacacggcccgcgggctgtaccagcgctggtgcgagctcctgcaggaaagcgcggcggtcggacgcgaggagctggactggacgaccaatgagctgcggaatggcctgcgcagcatcgagtgggacctcgaggacctggaagagaccatcggtatagtggaagccaacccaggcaagttcaagctcccagccggggacctgcaggagagaaaggtgttcgtggagcggatgcgagaggcagtccaggaaatgaaggaccatatggtcagcccaacagccgtagcatttttggagaggaataacagagagatactcgcaggcaagccagctgcccagaagtcacccagcgacctgctggatgccagcgcagtctcggccacatctcgctacatcgaggagcagcaggccacacagcagctgatcatggatgaacaggatcaacagctggagatggtgtctgggagcatccaggttctgaagcacatgtccggccgcgttggagaagagctggacgagcagggcatcatgctggatgccttcgcccaagagatggaccacacccagtcccgcatggacggggtcctcaggaagttggccaaagtatcccacatgacgagtgaccgccgacagtggtgtgccatcgccgtgctagtgggggtgcttctcctcgttctcatcttactattctctctctga

SEQ ID NO: 1559 - protein, 249 aa, Homo sapiens
MSLEDPFFVVRGEVQKAVNTARGLYQRWCELLQESAAVGREELDWTTNELRNGLRSIEWDLEDLEETIGIVEANPGKFKLPAGDLQERKVFVERMREAVQEMKDHMVSPTAVAFLERNNREILAGKPAAQKSPSDLLDASAVSATSRYIEEQQATQQLIMDEQDQQLEMVSGSIQVLKHMSGRVGEELDEQGIMLDAFAQEMDHTQSRMDGVLRKLAKVSHMTSDRRQWCAIAVLVGVLLLVLILLFSL

SEQ ID NO: 1560 - DNA, 2088 bp, Homo sapiens
ggtccgagttcggaatttcggttcaaggcccagttcctcggattgttcctgcgcaacttcagtttcccttccaggcacgggcaatgagtgtttggccgcgacgagttggaaagcccggatgcgtccttcggttgggcggggtgtctcagtgacgtcactgggggtataaaagggcctgggtggcgggcgcctgggcagagcgtcctagcagtgtcactgcgtgggttggtttgtgtagagaggcgtgagcgagcccgttgtccggagtgcacctgctgcctgttctgtccctcccgggagcccccgccgctgtcgccgtcgagtcgccatggaagtgcagaaagaggcacagcgcatcatgaccctgtcggtgtggaagatgtatcactcccgcatgcagcgcggtggcctgcggctgcaccggagtctgcagctgtcgctggtcatgcgcagcgcccgggagctctacctctcggccaaggtggaggccctcgagcccgaggtgtcgttgccggccgccctcccctctgaccctcgcctgcacccgccccgagaagccgagtccacggccgagacagcgacccccgacggtgagcacccgtttccggagccaatggacacgcaggaggcgccgacagccgaggagacctccgcctgctgtgccccgcgccccgccaaagtcagccgcaaacgacgcagcagcagcctgagcgacggcggggacgctggactggtcccgagcaagaaagcccgtctggaagaaaaggaagaagaggagggagcgtcatccgaagtcgccgatcgcctgcagccccctccggcgcaagcggagggcgcctttcccaacctggcccgcgtcctgcagaggcgcttctccggcctcctgaactgcagccccgcggcccctccgacggcgccgcccgcgtgcgaggcaaagcccgcttgccgcccggcggacagcatgctcaacgtgctcgtgcgggccgtggtggccttctgaggaccccgagcggcgctgccggagcccagagcgcgcgtcgaaccgtcggcccgagggcgcagacctgaggcgaggccacccccctccatcctgggggaagcgcccgcgaaaaccgtggagagaagccgccgcccgggctgctgagaggcccggagagggactctgtccccggggagccatcgccttcagtgtgcagggacggcaccgaggagtctgagccgggggcgcgggcgccttccgcagagacctgcgcccacaggtgctgtcttagtggactgggacgtgaacctttcgctctccttctggactgggagaagggaggcttgggtgttgtgttttttgttttgtttgtttgtttgtttttaaagatctcctcagggtcggacttcattttgtactgtgggctgtgctggccctttcaaggtttttcaagagttggttttgcgtttccaacctcggagaattccaggcactccccttccccctccgctgacatacttgtataagcggtcatcgttgcgtcatggggcaggcgtggggagcttcctgtcgccttgcgtgggtgtggggcctgggaggaggtcctggggcgtgcacccgccctgggcagtggggaggagagtggcctgagttacttcacccccgcgtgctgctggttaatgtcccgcgtctctgcaccttcgggtgggagcggggactgatctactttcacattctcaagtttttctcatctgcattagaggtgcccagtaggttcccaggttccagcgtgcccctccctcagacacacggacacaatcagccgagaagttcctggtctgaatcacgagaatgtggaggggtggggggtgtcagtggaaaggcataaggctgagctgagaccagttgctggtgaaactgggccaatctggggaggggaacatccttgccagggagtttctgagggtctgctttgtttacctttcgtgcggtggattctttttaactccgtctacctggcgttttgttagaaatgtcagataggaaaataaaaaccatttgagtaaaaaaaaaaaaaaaaaaaaaaaaaaaaaaaaaaaaaaaaaaaa

SEQ ID NO: 1561 - protein, 223 aa, Homo sapiens
MEVQKEAQRIMTLSVWKMYHSRMQRGGLRLHRSLQLSLVMRSARELYLSAKVEALEPEVSLPAALPSDPRLHPPREAESTAETATPDGEHPFPEPMDTQEAPTAEETSACCAPRPAKVSRKRRSSSLSDGGDAGLVPSKKARLEEKEEEEGASSEVADRLQPPPAQAEGAFPNLARVLQRRFSGLLNCSPAAPPTAPPACEAKPACRPADSMLNVLVRAVVAF

SEQ ID NO: 1562 - DNA, 3293 bp, Homo sapiens
cttttgctctcagatgctgccagggtccctgaagagggaagacacgcggaaacaggcttgcacccagacacgacaccatgcatctcctcggcccctggctcctgctcctggttctagaatacttggctttctctgactcaagtaaatgggtttttgagcaccctgaaaccctctacgcctgggagggggcctgcgtctggatcccctgcacctacagagccctagatggtgacctggaaagcttcatcctgttccacaatcctgagtataacaagaacacctcgaagtttgatgggacaagactctatgaaagcacaaaggatgggaaggttccttctgagcagaaaagggtgcaattcctgggagacaagaataagaactgcacactgagtatccacccggtgcacctcaatgacagtggtcagctggggctgaggatggagtccaagactgagaaatggatggaacgaatacacctcaatgtctctgaaaggccttttccacctcatatccagctccctccagaaattcaagagtcccaggaagtcactctgacctgcttgctgaatttctcctgctatgggtatccgatccaattgcagtggctcctagagggggttccaatgaggcaggctgctgtcacctcgacctccttgaccatcaagtctgtcttcacccggagcgagctcaagttctccccacagtggagtcaccatgggaagattgtgacctgccagcttcaggatgcagatgggaagttcctctccaatgacacggtgcagctgaacgtgaagcacaccccgaagttggagatcaaggtcactcccagtgatgccatagtgagggagggggactctgtgaccatgacctgcgaggtcagcagcagcaacccggagtacacgacggtatcctggctcaaggatgggacctcgctgaagaagcagaatacattcacgctaaacctgcgcgaagtgaccaaggaccagagtgggaagtactgctgtcaggtctccaatgacgtgggcccgggaaggtcggaagaagtgttcctgcaagtgcagtatgccccggaaccttccacggttcagatcctccactcaccggctgtggagggaagtcaagtcgagtttctttgcatgtcactggccaatcctcttccaacaaattacacgtggtaccacaatgggaaagaaatgcagggaaggacagaggagaaagtccacatcccaaagatcctcccctggcacgctgggacttattcctgtgtggcagaaaacattcttggtactggacagaggggcccgggagctgagctggatgtccagtatcctcccaagaaggtgaccacagtgattcaaaaccccatgccgattcgagaaggagacacagtgaccctttcctgtaactacaattccagtaaccccagtgttacccggtatgaatggaaaccccatggcgcctgggaggagccatcgcttggggtgctgaagatccaaaacgttggctgggacaacacaaccatcgcctgcgcagcttgtaatagttggtgctcgtgggcctcccctgtcgccctgaatgtccagtatgccccccgagacgtgagggtccggaaaatcaagcccctttccgagattcactctggaaactcggtcagcctccaatgtgacttctcaagcagccaccccaaagaagtccagttcttctgggagaaaaatggcaggcttctggggaaagaaagccagctgaattttgactccatctccccagaagatgctgggagttacagctgctgggtgaacaactccataggacagacagcgtccaaggcctggacacttgaagtgctgtatgcacccaggaggctgcgtgtgtccatgagcccgggggaccaagtgatggaggggaagagtgcaaccctgacctgtgagagcgacgccaaccctcccgtctcccactacacctggtttgactggaataaccaaagcctcccctaccacagccagaagctgagattggagccggtgaaggtccagcactcgggtgcctactggtgccaggggaccaacagtgtgggcaagggccgttcgcctctcagcaccctcaccgtctactatagcccggagaccatcggcaggcgagtggctgtgggactcgggtcctgcctcgccatcctcatcctggcaatctgtgggctcaagctccagcgacgttggaagaggacacagagccagcaggggcttcaggagaattccagcggccagagcttctttgtgaggaataaaaaggttagaagggcccccctctctgaaggcccccactccctgggatgctacaatccaatgatggaagatggcattagctacaccaccctgcgctttcccgagatgaacataccacgaactggagatgcagagtcctcagagatgcagagacctcccccggactgcgatgacacggtcacttattcagcattgcacaagcgccaagtgggcgactatgagaacgtcattccagattttccagaagatgaggggattcattactcagagctgatccagtttggggtcggggagcggcctcaggcacaagaaaatgtggactatgtgatcctcaaacattgacactggatgggctgcagcagaggcactgggggcagcgggggccagggaagtccccgagtttccccagacaccgccacatggcttcctcctgcgcgcatgtgcgcacacacacacacacacgcacacacacacacacacactcactgcggagaaccttgtgcctggctcagagccagtctttttggtgagggtaaccccaaacctccaaaactcctgcccctgttctcttccactctccttgctacccagaaatccatctaaatacctgccctgacatgcacacctccccctgcccccaccacggccactggccatctccacccccagctgcttgtgtccctcctgggatctgctcgtcatcatttttccttcccttctccatctctctggccctctacccctgatctgacatccccactcacgaatattatgcccagtttctgcctctgagggaaagcccagaaaaggacagaaacgaagtagaaaggggcccagtcctggcctggcttctcctttggaagtgaggcattgcacggggagacgtacgtatcagcggccccttgactctggggactccgggtttgagatggacacactggtgtggattaacctgccagggagacagagctcacaataaaaatggctcagatgccacttcaaagaaaaaaaaaa

SEQ ID NO: 1563 - protein, 847 aa, Homo sapiens
MHLLGPWLLLLVLEYLAFSDSSKWVFEHPETLYAWEGACVWIPCTYRALDGDLESFILFHNPEYNKNTSKFDGTRLYESTKDGKVPSEQKRVQFLGDKNKNCTLSIHPVHLNDSGQLGLRMESKTEKWMERIHLNVSERPFPPHIQLPPEIQESQEVTLTCLLNFSCYGYPIQLQWLLEGVPMRQAAVTSTSLTIKSVFTRSELKFSPQWSHHGKIVTCQLQDADGKFLSNDTVQLNVKHTPKLEIKVTPSDAIVREGDSVTMTCEVSSSNPEYTTVSWLKDGTSLKKQNTFTLNLREVTKDQSGKYCCQVSNDVGPGRSEEVFLQVQYAPEPSTVQILHSPAVEGSQVEFLCMSLANPLPTNYTWYHNGKEMQGRTEEKVHIPKILPWHAGTYSCVAENILGTGQRGPGAELDVQYPPKKVTTVIQNPMPIREGDTVTLSCNYNSSNPSVTRYEWKPHGAWEEPSLGVLKIQNVGWDNTTIACAACNSWCSWASPVALNVQYAPRDVRVRKIKPLSEIHSGNSVSLQCDFSSSHPKEVQFFWEKNGRLLGKESQLNFDSISPEDAGSYSCWVNNSIGQTASKAWTLEVLYAPRRLRVSMSPGDQVMEGKSATLTCESDANPPVSHYTWFDWNNQSLPYHSQKLRLEPVKVQHSGAYWCQGTNSVGKGRSPLSTLTVYYSPETIGRRVAVGLGSCLAILILAICGLKLQRRWKRTQSQQGLQENSSGQSFFVRNKKVRRAPLSEGPHSLGCYNPMMEDGISYTTLRFPEMNIPRTGDAESSEMQRPPPDCDDTVTYSALHKRQVGDYENVIPDFPEDEGIHYSELIQFGVGERPQAQENVDYVILKH

SEQ ID NO: 1564 - DNA, 903 bp, Homo sapiens
atggacctgcccccgcagctctccttcggcctctatgtggccgcctttgcgctgggcttcccgctcaacgtcctggccatccgaggcgcgacggcccacgcccggctccgtctcacccctagcctggtctacgccctgaacctgggctgctccgacctgctgctgacagtctctctgcccctgaaggcggtggaggcgctagcctccggggcctggcctctgccggcctcgctgtgccccgtcttcgcggtggcccacttcttcccactctatgccggcgggggcttcctggccgccctgagtgcaggccgctacctgggagcagccttccccttgggctaccaagccttccggaggccgtgctattcctggggggtgtgcgcggccatctgggccctcgtcctgtgtcacctgggtctggtctttgggttggaggctccaggaggctggctggaccacagcaacacctccctgggcatcaacacaccggtcaacggctctccggtctgcctggaggcctgggacccggcctctgccggcccggcccgcttcagcctctctctcctgctcttttttctgcccttggccatcacagccttctgctacgtgggctgcctccgggcactggcccgctccggcctgacgcacaggcggaagctgcgggccgcctgggtggccggcggggccctcctcacgctgctgctctgcgtaggaccctacaacgcctccaacgtggccagcttcctgtaccccaatctaggaggctcctggcggaagctggggctcatcacgggtgcctggagtgtggtgcttaatccgctggtgaccggttacttgggaaggggtcctggcctgaagacagtgtgtgcggcaagaacgcaagggggcaagtcccagaagtaa

SEQ ID NO: 1565 - protein, 300 aa, Homo sapiens
MDLPPQLSFGLYVAAFALGFPLNVLAIRGATAHARLRLTPSLVYALNLGCSDLLLTVSLPLKAVEALASGAWPLPASLCPVFAVAHFFPLYAGGGFLAALSAGRYLGAAFPLGYQAFRRPCYSWGVCAAIWALVLCHLGLVFGLEAPGGWLDHSNTSLGINTPVNGSPVCLEAWDPASAGPARFSLSLLLFFLPLAITAFCYVGCLRALARSGLTHRRKLRAAWVAGGALLTLLLCVGPYNASNVASFLYPNLGGSWRKLGLITGAWSVVLNPLVTGYLGRGPGLKTVCAARTQGGKSQK

SEQ ID NO: 1566 - DNA, 7642 bp, Homo sapiens
gaattaggggaactcagaaatccatcccccaccccacggccctacctagaagacttaggaatgtgggtccccagcgccgccatctgagactccagagtcgaggctcctagcatcccctacgtagaacactgagaaattccgactgcgggaccccagtctccgagagaccccagattctattcctggagcctgagagcccgaagttcacgcccctgagtctgggctccgcacctccctggggaccgcgtcggggtcgcgcaggagccgggctgcctcgagccggggctggaggctccccgggaggactctgctgggccgctcagccatgcctgagggagcccaaggactgagcctctccaaacctagcccaagcctcgggtgtggccgaagaggtgaagtgtgtgactgtggcaccgtgtgtgagactcggacagctcctgcagcccccaccatggcctccccccgaggttctgggagctccacatccctgagcacagtgggctctgagggggatccagcccctgggcccactccagcctgctcagcctccaggccagagccccttccagggcctcccatccgcctacatctctctccggtggggatcccaggttcagccagaccctcaaggctggagcgtgtggcccgggagatcgtggagacagaacgggcctatgtcagggacctccgcagcatcgtggaggactacctgggccctctgctggacggcggggtcctggggctgagcgtggagcaggtgggcacgctgtttgccaacattgaggacatctacgagttcagcagcgagctcctggaggacttggagaacagcagcagcgccgggggtattgccgagtgcttcgtgcagaggagcgaggattttgacatctacacattgtactgcatgaactacccgagctccctggccctgctccgggagctgtcgttgtctccgccagcagccctgtggctgcaggagcgccaggcccagcttcgccactcgctgcccctgcagagcttcctgctgaaacctgtccagcgcattctcaagtaccatctgctgctgcaggaactagggaagcactgggcggagggcccaggcactgggggtcgcgagatggtggaggaagctattgtgtccatgacagcggttgcctggtacatcaacgacatgaagcgcaagcaggagcatgcagcgcgcctccaggaagtgcagcggcggctgggtggctggaccggaccagagctcagtgcttttggggaactggtgttggagggcgcgttccgaggaggcggagggggtggcccccggctacgagggggtgagcggctgctcttcctgttctctcggatgctgctggtggccaagcgcagggggctggagtacacctacaaaggccacatcttctgctgcaacctgagcgtgagcgagagtccccgagaccctctagggttcaaggtgtctgatctgaccattcccaagcacagacacctgctccaggccaagaaccaagaagagaagaggctgtggattcactgtctccagcgcctcttctttgagaaccaccctgcctccatccctgccaaggcaaagcaagttctccttgaaaacagcctgcattgtgcccccaaaagtaagcctgtcctagagcccctgacacccccacttgggtctcctcgacctcgagatgctagaagttttacccctgggcgaaggaacacagctccatctcctgggccctctgtgattcgccgaggccgcaggcagtctgagccggtgaaggacccttatgtcatgttcccacagaacgctaagcctggattcaagcacgctggcagcgaaggggaactctaccctccagaatctcagccaccagtttcaggctctgcaccccctgaggacctggaggatgctggacccccaacactggacccctctgggacctcaatcactgaagaaatcctggaactgctgaatcagcgaggccttcgagatccagggccgtccacccatgacattcccaagttccccggagactcccaggtgcctggcgacagcgaaaccctcacattccaagccctgcccagccgggactcttcagaagaggaggaggaggaagaggaagggctggagatggatgaacgggggccttccccactccacgtcctggaagggctcgaaagttccattgcagctgaaatgcccagcattccctgccttaccaaaattcctgacgtgcccaaccttcctgaaattcccagccgctgtgaaattcccgaaggttctcgccttcctagtctctctgacatttccgatgtttttgagatgccctgccttccagccatacctagtgtccccaacacccccagtctgtctagcactcccaccctctcctgtgactcctggctccaagggcctctgcaggaaccagctgaggctccagccaccaggagagaactgttttctgggagcaatcctgggaaactgggagagccgccttcaggaggcaaggcagggccagaggaggatgaagaaggggtatcattcacagacttccagccccaggatgtcacccaacatcagggattcccagatgagctggcattccgctcttgctcagaaatccggagcgcctggcaggcattggaacagggacagctggcccggccaggcttcccagagccactgctgatcctggaggattcggatctgggtggagacagcgggagcgggaaggcaggagccccgagttcagaaaggacggcgtcccgagtgcgagagctggcccggctttacagcgagcggatccagcagatgcagcgggcggagactcgggcatcagccaatgccccgcgccgccggcctcgggttctggcccaaccccagccatccccctgtctgccccaggagcaggcagagccagggctcctgcctgcctttggacacgtgctggtatgtgagctggccttcccactgacatgtgcccaggagtctgtccccctgggtcctgctgtctgggttcaagctgccatacctttgtcaaagcagggaggcagcccggatggccagggtctacatgtttccaatttgcctaagcaagaccttccgggcatccacgtttcagctgctacccttttgcctgagcaaggaggttcccggcatgtccaggctccagccgccacacctttgcccaagcaagaaggccccctgcacctccaggtgccggctcttacaactttctctgatcaaggccacccagaaatccaagttccagccaccactcctttgcctgagcatagaagtcacatggttataccagctccatccaccgccttttgtcctgagcagggacactgtgcggacatccacgttcccaccactccagctttgcccaaggagatttgttctgatttcacagtttcagtcaccacccctgtgcccaagcaagaaggtcacctagacagcgagagcccaaccaatatcccactgacaaagcaaggaggttccagggatgttcagggcccagaccctgtctgcagtcaacccatccagcctttgtcttggcatggaagcagcctggatccccagggcccaggcgacaccctaccacccttgccatgtcacctcccagaccttcagattccaggtacctcacctttgcctgcacatggaagccacctggaccatcggatcccagccaacgccccactgtctttgtcccaggagctcccagacactcaggttccagctaccacacctttgcccctgccacaagtcctcacagacatctgggtccaagccctcccaacttcacccaagcagggaagcctcccagacatccagggtccagcggctgcacctccacttccggagccaagccttacagatacacaggtccaaaaactcacaccttcgttggagcagaagagcctcatagatgcccatgttccagctgccacacctttacctgagagaggaggctctctagacattcagggcctctcacccaccccagttcagaccaccatggttttgtccaaaccaggaggctccttagcctctcacgttgccaggttggagtcttcagacttgacgccacctcatagtcccccaccttccagccgtcagctcctgggccccaatgcagctgccctctccagatacctggcagcctcatatatcagccagagcctggctcggcggcaggggcctgggggaggggcccccgcagcctcccggggctcctggtcctctgctcccacgtcacgggcatcttcgccgcccccccagccccagccaccacctcccccagccaggcggctcagctatgccacgacggttaacatccacgtgggcgggggtgggcggctgcggccagccaaggcccaggtccggttgaaccaccctgctctcttggcctccacacaggaatctatgggccttcacagggcccagggggctcctgatgcccccttccacatgtgagccaggacatgaggcttccctgaagcaaggatttcagccagatgccatagaccctcagaacttgacctggaagtccagacactgaacgcaggcctcaaaactgctgcggccttccaactcctggtatctgcatcggcgaatggcccttcttgccttgatccacagggatggggaagggaggaatgtcattaatgttttgttaatactgattctttcatgcaatgatgtgtattttcccattctggaggctgtgggagatgacaagacaatgaatgggaaggtctgacacagaacaaatcagcggttctgaaagcttggggaatctcagactcctttgagaattattggaaaatggacccactataacttggcgtgtgtgtgaactgcttgatgcccatccaggaaagccaagttaagaagctttgcttcaagtagacactagaaatccattcccttggcaatttatacagttcacgtctcccaccatccgttcatctcacccaccctgccatctctccacctatccatctggctattgctccatctagctttcccgctccatctacccatcttccaatccatcatctcacgtatctgccttgcttatccaactgtctgccttattcacccacccatccctttatcattctaaccccatctggcattccatccctccatttatccatcttcccacttacccatcttctccatccagcactccgttcatcagtccgtctctccctccatatttccatctgtccattcatccactcattttgccatccatacatattcacccagccatctcccaatccatcgacataccccatccctccctcactggactctccggggtcttagtactatgatacttcagagacaattccatgctgatacgggggagatcaattttggggctctgggataagtctgtcccacatctgtctgatttcccttggcatccttcccgtcagttcctcttgaatatcccagttcttgtacccactcacatacctcagatcccttcactcctccccgcagtttgcagcctctacaattcatccacatgctccctcccccagcaaaataattcaggtcgtggagacaaaaggcttttatgttaggttctgtctgcccccttgttccagcagtggtatgcccagtgagaggcacaatttaaacggtttctttggtgatgatattagctactttcatcaaatacttagcctcttgtgctttagcacattatttatgtaagctcccctaggattctctgaagcaccctggtgtcctggctgtgaattcaagtcccatctttacttatttggtgtgggtcctccctctgagccggttttctcatctacaaaatgaagacaacagtacttccctcctgggatcattgaaagatttagggagcatatccttccacttcccaaacatatttgaacctctgacttgcttaggagcatcattcaaatcacagatcccccagtatctagtcccaacctattgaatcaggatccccagggaaggaggagcttgggaatctgatttttttttttttttttagataaagtctcactctgtcacccaggcttgagtgcagtggcaaaatcttggctcattgcaacctccacctcctgggttcaagcaattctcatgcctcagcttcccgacatagctgggattataggcgtgcaccaccatgcccagctaatttttcgttgttgttgttgttgttttgtttttgagacagagtctcgctctgttgcccaggctggagtacagtggcacgatcttggctcactgcaagctccgcttcccgggttcacgccattctcctgcctcagcctcccgagtagctgggaccacaggtgcccgccaccacgcccggctaatttttttggtatttttagtagagacggggttttaccatgttagccaggatggtctcgatctcctgacctcgtgatcctcccgcctcggcctcccaaagtgctggcattacaggcgtgagccatcattcctggctgggaatccgaatttttttttttttttagacggagtttcgctcttgttgcccaggctggagttcaatagcatgatctcggctcactgcaacctctgcctcccaggttcaagtgattctcctgcctctagctgggattgcaggcgcccacgaccacgcccagctaatttttgtattttgtagtagagacgggatttcgccatattggccaggccatagtggtcttggactcctgacctcaggtgatccgcccacctcggcctcccaaagtgttgggtttacaggcgtgagctaccataccctgcccaggaatctgaatttttagcaatcagttagcagcaaataagctgagatttcctgggtactaagcacatactatgagcattacagccgctttatataagctcgttcactgtcctcattacattcctaatatgcaagtgagcatgttttttaatcctcagtctagaggtgaggaaactgaggcaggcacagagaggctaagggatttgcctagtcgcacagctaggaaggtgcagcactgagactcgaatccacacagcttggcttaagtctaccattaaatttgcctgtcctggccaggtgcggtggctcacgcctgtaatcccaacacttcgtgaggccaaggcaggtggatcacttgaagtgaggagttcgagaccacaccagcctggccaacatggtgaaatcccgtctttactaaaaatacaaaaaattagctgggcgtggtggtgggtgccggtaatcctagctactcaggaggctgaggcaggagaatcacttgaacctgggaggtggaggttgcagtgaaccgagattgcgccactagactccagcctgggagacgagcaaaactgtctcaaaaaaataaaatgaaatacataaataaatgtgcctatcctgtgccgggtgctgttcttgccagtggggatacatgagagaacactgccttgcccgcatgaggcttgtggcctggtactgtgcacacctcaggggattctgataattagctgagcacagttgccagcacagggcctggctcaataaatattagctgctggcttctgctcaaaaaaaaaaaaaaaaaaaaaaaaaaaaaaaaaaaa

SEQ ID NO: 1567 - protein, 1386 aa, Homo sapiens
MPEGAQGLSLSKPSPSLGCGRRGEVCDCGTVCETRTAPAAPTMASPRGSGSSTSLSTVGSEGDPAPGPTPACSASRPEPLPGPPIRLHLSPVGIPGSARPSRLERVAREIVETERAYVRDLRSIVEDYLGPLLDGGVLGLSVEQVGTLFANIEDIYEFSSELLEDLENSSSAGGIAECFVQRSEDFDIYTLYCMNYPSSLALLRELSLSPPAALWLQERQAQLRHSLPLQSFLLKPVQRILKYHLLLQELGKHWAEGPGTGGREMVEEAIVSMTAVAWYINDMKRKQEHAARLQEVQRRLGGWTGPELSAFGELVLEGAFRGGGGGGPRLRGGERLLFLFSRMLLVAKRRGLEYTYKGHIFCCNLSVSESPRDPLGFKVSDLTIPKHRHLLQAKNQEEKRLWIHCLQRLFFENHPASIPAKAKQVLLENSLHCAPKSKPVLEPLTPPLGSPRPRDARSFTPGRRNTAPSPGPSVIRRGRRQSEPVKDPYVMFPQNAKPGFKHAGSEGELYPPESQPPVSGSAPPEDLEDAGPPTLDPSGTSITEEILELLNQRGLRDPGPSTHDIPKFPGDSQVPGDSETLTFQALPSRDSSEEEEEEEEGLEMDERGPSPLHVLEGLESSIAAEMPSIPCLTKIPDVPNLPEIPSRCEIPEGSRLPSLSDISDVFEMPCLPAIPSVPNTPSLSSTPTLSCDSWLQGPLQEPAEAPATRRELFSGSNPGKLGEPPSGGKAGPEEDEEGVSFTDFQPQDVTQHQGFPDELAFRSCSEIRSAWQALEQGQLARPGFPEPLLILEDSDLGGDSGSGKAGAPSSERTASRVRELARLYSERIQQMQRAETRASANAPRRRPRVLAQPQPSPCLPQEQAEPGLLPAFGHVLVCELAFPLTCAQESVPLGPAVWVQAAIPLSKQGGSPDGQGLHVSNLPKQDLPGIHVSAATLLPEQGGSRHVQAPAATPLPKQEGPLHLQVPALTTFSDQGHPEIQVPATTPLPEHRSHMVIPAPSTAFCPEQGHCADIHVPTTPALPKEICSDFTVSVTTPVPKQEGHLDSESPTNIPLTKQGGSRDVQGPDPVCSQPIQPLSWHGSSLDPQGPGDTLPPLPCHLPDLQIPGTSPLPAHGSHLDHRIPANAPLSLSQELPDTQVPATTPLPLPQVLTDIWVQALPTSPKQGSLPDIQGPAAAPPLPEPSLTDTQVQKLTPSLEQKSLIDAHVPAATPLPERGGSLDIQGLSPTPVQTTMVLSKPGGSLASHVARLESSDLTPPHSPPPSSRQLLGPNAAALSRYLAASYISQSLARRQGPGGGAPAASRGSWSSAPTSRASSPPPQPQPPPPPARRLSYATTVNIHVGGGGRLRPAKAQVRLNHPALLASTQESMGLHRAQGAPDAPFHM

SEQ ID NO: 1568 - DNA, 603 bp, Homo sapiens
gaaaagcggccagggtggcccctagctttccttttccggttgcggcgccgcgcggtgaggttgtctagtccacgctcggagccatgccgtccaagggcccgctgcagtctgtgcaggtcttcggacgcaagaagacagcgacagctgtggcgcactgcaaacgcggcaatggtctcatcaaggtgaacgggcggcccctggagatgattgagccgcgcacgctacagtacaagctgctggagccagttctgcttctcggcaaggagcgatttgctggtgtagacatccgtgtccgtgtaaagggtggtggtcacgtggcccagatttatgctatccgtcagtccatctccaaagccctggtggcctattaccagaaatatgtggatgaggcttccaagaaggagatcaaagacatcctcatccagtatgaccggaccctgctggtagctgaccctcgtcgctgcgagtccaaaaagtttggaggccctggtgcccgcgctcgctaccagaaatcctaccgataagcccatcgtgactcaaaactcacttgtataataaacagtttttgagggattttaaagtttcaagaaaaaaaaaaaaaaa

SEQ ID NO: 1569 - protein, 146 aa, Homo sapiens [sequence omitted]

SEQ ID NO: 1570 - DNA, 3798 bp, Homo sapiens
gtgcagaggtggcagttccgggcgccggggaggtgtagagaacagattcggaaactggggaggtctagcatgtggcgtaggagggggtcctcactccgcttcgcgattgccaaaacgagcctgccggaagcgccctaaggggttttcttctcccagggaaccagcggggaaactgaggctcggggtggagcgcaggattgtgggacgcgccaaggctgctgtctttcccagcagcagcggaagatgtcggacagcgaggacagcaacttttccgaggaggaggacagcgagcgcagcagtgacggcgaggaggccgaggtagacgaagagcggcggagtgcagcgggcagtgagaaagaagaagagcctgaggacgaagaggaggaggaagaggaggaggaatacgatgaggaagaggaggaagaagatgatgaccgaccccccaagaaaccccgccatggaggcttcattctggacgaggctgatgttgacgatgagtatgaggacgaggaccagtgggaggatggagcagaggacattctagagaaagaagagattgaagcctccaatatcgataatgttgtcctggatgaagatcgttctggggctcgccgcctgcaaaacctctggagggaccagcgagaagaagaactgggcgagtattacatgaagaaatacgccaagtcatctgtgggagagacggtgtatggaggatctgatgagctctcagacgacatcacccagcagcagctgctcccaggagtcaaggatcccaatctgtggactgtcaaatgtaagattggggaggaacgggccacggccatttccttgatgcgcaagttcattgcctaccagttcacagacacgcccctgcagatcaagtcagtagtggcaccagagcatgtgaagggctacatctacgtggaggcctacaagcagacccacgtgaagcaggccattgagggggtgggcaacctgcggcttggctactggaaccagcagatggtgcccatcaaggagatgacagacgtgctcaaagtggtgaaggaggtggccaacctgaaaccaaagtcctgggtccgcctcaagcggggcatctacaaggatgacattgctcaggtggactacgtggagcccagccagaacaccatctccctgaagatgatcccacgcatcgactacgatcgcatcaaggcccgcatgagcttgaaagactggtttgccaaaaggaagaagtttaagcggcctccacagaggctgtttgatgctgagaagatcaggtccctggggggtgatgttgcctctgatggtgacttcctcatctttgaggggaaccgttacagccggaagggctttctgttcaagagcttcgccatgtctgctgtgatcacggagggtgtgaagccaacactctctgagctggaaaagtttgaggaccagccagagggcattgacctggaggtggtgactgagagcacagggaaggagcgggagcacaacttccaacctggggacaacgtggaggtctgtgagggtgagctcatcaacctgcagggcaagatcctcagcgtggatggcaacaagatcaccatcatgcccaagcatgaggacctcaaggacatgttggagttcccagcccaggaacttagaaaatacttcaagatgggggaccacgtgaaggtgattgctggccgattcgagggcgacacaggcctcattgtgcgggtggaggagaatttcgttatcctgttctctgacctcaccatgcatgagctgaaggtgctcccccgggacctgcagctctgctcagagacagcatcaggtgtggatgttgggggccagcatgaatggggcgagctggtgcagctggatccccagactgtgggtgtcatcgtgcgactagaacgggagaccttccaggtgctgaacatgtacgggaaggtggtgactgtcagacatcaggctgtgacccggaagaaggacaaccgctttgctgtggccttggactcagagcagaacaacatccatgtgaaagacatcgttaaggtcattgatggcccccactcaggccgagaaggggagattcgccatctcttccgaagcttcgccttcctacattgcaagaaactggtggagaacgggggcatgtttgtctgcaagacccgccacctggtgctggctgggggctcaaagccccgtgatgtgaccaacttcaccgtgggtggctttgcgcctatgagtccccggatcagcagccccatgcaccccagtgctggaggtcagcgtggcggctttggtagcccaggtggcggcagtggtggcatgagcaggggccggggccggagggacaacgaactcatcggccagaccgtgcgcatctcccaggggccctacaaaggctacatcggtgtggtgaaagatgccacagagtccacggcccgtgtggagctgcactccacctgccagaccatctctgtggaccgtcagcggctcaccacggtgggctcacggcgcccgggcggcatgacctcgacctatgggaggacgcccatgtatggctcccagacgcccatgtatggctctggctcccgaacacccatgtacggctcacagacacccctccaggatggtagccgcaccccacactacggctcacagacgcccctgcatgatggcagccgcactcctgcccagagtggggcctgggaccccaacaaccccaacacgccgtcacgggctgaggaagaatatgagtatgctttcgatgatgagcccaccccgtccccgcaggcctatgggggaacccccaatccccaaacacctggctacccagacccctcgtccccacaggtcaacccacaatacaacccgcagacgccagggacgccggccatgtacaacacagaccagttctctccctatgctgccccctccccacaaggttcctaccagcccagccccagcccccagagctaccaccaggtggcgccaagcccagcaggctaccagaatacccactccccagccagctaccaccctacaccgtcgcccatggcctatcaggctagccccagcccgagccccgttggctacagtcctatgacacctggagctccctcccctggtggctacaacccacacacgccaggctcaggcatcgagcagaactccagcgactgggtaaccactgacattcaggtgaaggtgcgggacacctacctggatacacaggtggtgggacagacaggtgtcatccgcagtgtcacggggggcatgtgctctgtgtacctgaaggacagtgagaaggttgtcagcatttccagtgagcacctggagcctatcacccccaccaagaacaacaaggtgaaagtgatcctgggcgaggatcgggaagccacgggcgtcctactgagcattgatggtgaggatggcattgtccgtatggaccttgatgagcagctcaagatcctcaacctccgcttcctggggaagctcctggaagcctgaagcaggcagggccggtggacttcgtcggatgaagagtgatcctccttccttccctggcccttggctgtgacacaagatcctcctgcagggctaggcggattgttctggatttccttttgtttttccttttagttttccatcttttccctccctggtgctcattggaatctgagtagagtctgggggagggtccccaccttcctgtacctcctccccacagcttgcttttgttgtaccgtctttcaataaaaagaagctgtttggtctaaaaaaaaaaaaaaaaaaaaaaaa

SEQ ID NO: 1571 - protein, 1087 aa, Homo sapiens
MSDSEDSNFSEEEDSERSSDGEEAEVDEERRSAAGSEKEEEPEDEEEEEEEEEYDEEEEEEDDDRPPKKPRHGGFILDEADVDDEYEDEDQWEDGAEDILEKEEIEASNIDNVVLDEDRSGARRLQNLWRDQREEELGEYYMKKYAKSSVGETVYGGSDELSDDITQQQLLPGVKDPNLWTVKCKIGEERATAISLMRKFIAYQFTDTPLQIKSVVAPEHVKGYIYVEAYKQTHVKQAIEGVGNLRLGYWNQQMVPIKEMTDVLKVVKEVANLKPKSWVRLKRGIYKDDIAQVDYVEPSQNTISLKMIPRIDYDRIKARMSLKDWFAKRKKFKRPPQRLFDAEKIRSLGGDVASDGDFLIFEGNRYSRKGFLFKSFAMSAVITEGVKPTLSELEKFEDQPEGIDLEVVTESTGKEREHNFQPGDNVEVCEGELINLQGKILSVDGNKITIMPKHEDLKDMLEFPAQELRKYFKMGDHVKVIAGRFEGDTGLIVRVEENFVILFSDLTMHELKVLPRDLQLCSETASGVDVGGQHEWGELVQLDPQTVGVIVRLERETFQVLNMYGKVVTVRHQAVTRKKDNRFAVALDSEQNNIHVKDIVKVIDGPHSGREGEIRHLFRSFAFLHCKKLVENGGMFVCKTRHLVLAGGSKPRDVTNFTVGGFAPMSPRISSPMHPSAGGQRGGFGSPGGGSGGMSRGRGRRDNELIGQTVRISQGPYKGYIGVVKDATESTARVELHSTCQTISVDRQRLTTVGSRRPGGMTSTYGRTPMYGSQTPMYGSGSRTPMYGSQTPLQDGSRTPHYGSQTPLHDGSRTPAQSGAWDPNNPNTPSRAEEEYEYAFDDEPTPSPQAYGGTPNPQTPGYPDPSSPQVNPQYNPQTPGTPAMYNTDQFSPYAAPSPQGSYQPSPSPQSYHQVAPSPAGYQNTHSPASYHPTPSPMAYQASPSPSPVGYSPMTPGAPSPGGYNPHTPGSGIEQNSSDWVTTDIQVKVRDTYLDTQVVGQTGVIRSVTGGMCSVYLKDSEKVVSISSEHLEPITPTKNNKVKVILGEDREATGVLLSIDGEDGIVRMDLDEQLKILNLRFLGKLLEA

SEQ ID NO: 1572 - DNA, 2572 bp, Homo sapiens
acaggtgtggaggggcaacccatcccttcagacaattgggaggtgagggccgattgccttacacggtgagacaagcggcctgactcgtgactatttttttggacaaatcaggcagccactgactcccttcattatggcctcagctttatctctgggcaataagtgtgatcccttccttcgctgcgtcctttgcaggggcggtggcgctctgcaaggcccaagggggcgtggtccagatgactttgaatcccagttgtcgcccccagggtcagccaggagactagtcagaagcaaacgcgcctgcggcaatccgcccgatgcctttggtctctctcgggcttccgtccacccgcccctcccccgcgtttccattggctgtagctccggcccggggcgggcgaagagggagcgagtgggcggggccgcgtggcgtcagcgcaagatggcggcctcggcagcggtgttctcgcgcttgcgaagcgggctccggctcggctcgcggggactgtgcacgaggttggcgacgccgccccgccgggccccagatcaggccgcagagatcgggagccgcgggagcactaaggcgcaagggccacagcagcagccgggctcagagggtcccagctatgccaaaaaagttgcgctctggcttgctgggctgcttggagctggtgggactgtgagcgtcgtctatatctttggaaacaacccggtggacgaaaatggtgccaagattcctgatgagttcgacaatgatccaattctggtacagcagttgcgccggacatacaaatatttcaaagattatagacagatgatcatcgagcccaccagcccttgccttctcccagaccctctgcaggaaccgtactaccagccaccctacacgctcgttttggagctcaccggcgtcctcttgcatcctgagtggtcgctggccactggctggaggtttaagaagcgcccaggcatcgagaccttgttccagcagcttgcccctttatatgaaattgtcatctttacgtcagagactggcatgactgcgtttccactcattgatagtgtggacccccatggcttcatctcctaccgcctattccgggacgccacaagatacatggatggacaccatgtaaaggatatttcatgtctgaatcgggacccagctcgagtagtagttgtggactgcaagaaggaagccttccgcctgcagccctataacggcgttgccctgcggccctgggacggcaactctgatgaccgggtcttgttggatctgtctgccttcctcaagaccattgcactgaatggtgtggaggacgtgcgaaccgtgctggagcactatgccctggaggatgacccgctggcggctttcaaacagcggcaaagccggctagagcaggaggagcagcagcgcctggccgagctctccaagtccaacaagcagaacctcttccttggctccctcaccagccgcttgtggcctcgctccaaacagccctgaactctgggcctcctcaaactcagtgcctgggtccagggccccagtgcttccagaccaagacttgggccaccacttgtccaataaagtacatcccagacgccacacctgctgtgtcccgagagtctccagatgggggcatcagggtgaggtccgggactcttgggtcatcgtcccacagtggctgatcggctgccaagcacagtgggggtgctttgttggatcagagcagatttttcaccctggtctcggaatctaaaaaccctcgctgtgtcttcctgtgtgttgcgtgatctgtgaaaaatacatctccctctgaccacagactcctcatctgtggagaagggaagagaggatggcacttggctttaaagacaggtagctgccaggctactgtggagagaatgtgttatgggcctagtgggcctctggtggaccagagattacccctctcaacaggccagctgctggttggctccagccagtgtggccctggggtaaagggggcctggagttgcttgacacgccagttgttcaaaagaagcaagaacttgggaatattttttttttttttttgagacagggtctcactgttgcccaggctggagtgcattgatgtgatcttagcttacaacagccttgacctcccggctcaagtgatctccaagtgaccctcctgcctcagcctcctgagtaccctcctggggactacaggtgcgtgctaccatacccagctaatttaaacaaattttttttttgtagagatggggtcttggtgcccaagctggtctcaaactcctagtcttaagcaatcttcctgctttggcctcccaaggcgctgggattccaggtgtgagctactgtgcccagctaaaatagggatttttatattaaatctccctattttaaaatgttggctcctagcggggcgcagtggctcacgcctgtaatcccagcactttgggaggctgaggtgggtggatcgcctgaggtcaggagttcaagaccagcctcaacatggagaaaccccatctctgctaaaaatacaaaattagctgggcgtggtggagc

SEQ ID NO: 1573 - protein, 456 aa, Homo sapiens
MASALSLGNKCDPFLRCVLCRGGGALQGPRGRGPDDFESQLSPPGSARRLVRSKRACGNPPDAFGLSRASVHPPLPRVSIGCSSGPGRAKRERVGGAAWRQRKMAASAAVFSRLRSGLRLGSRGLCTRLATPPRRAPDQAAEIGSRGSTKAQGPQQQPGSEGPSYAKKVALWLAGLLGAGGTVSVVYIFGNNPVDENGAKIPDEFDNDPILVQQLRRTYKYFKDYRQMIIEPTSPCLLPDPLQEPYYQPPYTLVLELTGVLLHPEWSLATGWRFKKRPGIETLFQQLAPLYEIVIFTSETGMTAFPLIDSVDPHGFISYRLFRDATRYMDGHHVKDISCLNRDPARVVVVDCKKEAFRLQPYNGVALRPWDGNSDDRVLLDLSAFLKTIALNGVEDVRTVLEHYALEDDPLAAFKQRQSRLEQEEQQRLAELSKSNKQNLFLGSLTSRLWPRSKQP

SEQ ID NO: 1574 - DNA, 2359 bp, Homo sapiens
actcccgagacccccccaccagaaggccatggtctccccacggatgtccgggctcctctcccagactgtgatcctagcgctcattttcctcccccagacacggcccgctggcgtcttcgagctgcagatccactctttcgggccgggtccaggccctggggccccgcggtccccctgcagcgcccggctcccctgccgcctcttcttcagagtctgcctgaagcctgggctctcagaggaggccgccgagtccccgtgcgccctgggcgcggcgctgagtgcgcgcggaccggtctacaccgagcagcccggagcgcccgcgcctgatctcccactgcccgacggcctcttgcaggtgcccttccgggacgcctggcctggcaccttctctttcatcatcgaaacctggagagaggagttaggagaccagattggagggcccgcctggagcctgctggcgcgcgtggctggcaggcggcgcttggcagccggaggcccgtgggcccgggacattcagcgcgcaggcgcctgggagctgcgcttctcgtaccgcgcgcgctgcgagccgcctgccgtcgggaccgcgtgcacgcgcctctgccgtccgcgcagcgccccctcgcggtgcggtccgggactgcgcccctgcgcaccgctcgaggacgaatgtgaggcgccgctggtgtgccgagcaggctgcagccctgagcatggcttctgtgaacagcccggtgaatgccgatgcctagagggctggactggacccctctgcacggtccctgtctccaccagcagctgcctcagccccaggggcccgtcctctgctaccaccggatgccttgtccctgggcctgggccctgtgacgggaacccgtgtgccaatggaggcagctgtagtgagacacccaggtcctttgaatgcacctgcccgcgtgggttctacgggctgcggtgtgaggtgagcggggtgacatgtgcagatggaccctgcttcaacggcggcttgtgtgtcgggggtgcagaccctgactctgcctacatctgccactgcccacccggtttccaaggctccaactgtgagaagagggtggaccggtgcagcctgcagccatgccgcaatggcggactctgcctggacctgggccacgccctgcgctgccgctgccgcgccggcttcgcgggtcctcgctgcgagcacgacctggacgactgcgcgggccgcgcctgcgctaacggcggcacgtgtgtggagggcggcggcgcgcaccgctgctcctgcgcgctgggcttcggcggccgcgactgccgcgagcgcgcggacccgtgcgccgcgcgcccctgtgctcacggcggccgctgctacgcccacttctccggcctcgtctgcgcttgcgctcccggctacatgggagcgcggtgtgagttcccagtgcaccccgacggcgcaagcgccttgcccgcggccccgccgggcctcaggcccggggaccctcagcgctaccttttgcctccggctctgggactgctcgtggccgcgggcgtggccggcgctgcgctcttgctggtccacgtgcgccgccgtggccactcccaggatgctgggtctcgcttgctggctgggaccccggagccgtcagtccacgcactcccggatgcactcaacaacctaaggacgcaggagggttccggggatggtccgagctcgtccgtagattggaatcgccctgaagatgtagaccctcaagggatttatgtcatatctgctccttccatctacgctcgggaggtagcgacgccccttttccccccgctacacactgggcgcgctgggcagaggcagcacctgctttttccctacccttcctcgattctgtccgtgaaatgaattgggtagagtctctggaaggttttaagcccattttcagttctaacttactttcatcctattttgcatccctcttatcgttttgagctacctgccatcttctctttgaaaaacctatgggcttgaggaggtcacgatgccgactccgccagagcttttccactgattgtactcagcggggaggcaggggaggcagaggggcagcctctctaatgcttcctactcattttgtttctaggcctgacgcgtctcctccatccgcacctggagtcagagcgtggatttttgtatttgctcggtggtgcccagtctctgccccagaggctttggagttcaatcttgaaggggtgtctgggggaactttactgttgcaagttgtaaataatggttatttatatcctattttttctcaccccatctctctagaaacacctataaaggctattattgtgatcaaaaaaaaaaaaaaaaaaa

SEQ ID NO: 1575 - protein, 618 aa, Homo sapiens
MVSPRMSGLLSQTVILALIFLPQTRPAGVFELQIHSFGPGPGPGAPRSPCSARLPCRLFFRVCLKPGLSEEAAESPCALGAALSARGPVYTEQPGAPAPDLPLPDGLLQVPFRDAWPGTFSFIIETWREELGDQIGGPAWSLLARVAGRRRLAAGGPWARDIQRAGAWELRFSYRARCEPPAVGTACTRLCRPRSAPSRCGPGLRPCAPLEDECEAPLVCRAGCSPEHGFCEQPGECRCLEGWTGPLCTVPVSTSSCLSPRGPSSATTGCLVPGPGPCDGNPCANGGSCSETPRSFECTCPRGFYGLRCEVSGVTCADGPCFNGGLCVGGADPDSAYICHCPPGFQGSNCEKRVDRCSLQPCRNGGLCLDLGHALRCRCRAGFAGPRCEHDLDDCAGRACANGGTCVEGGGAHRCSCALGFGGRDCRERADPCAARPCAHGGRCYAHFSGLVCACAPGYMGARCEFPVHPDGASALPAAPPGLRPGDPQRYLLPPALGLLVAAGVAGAALLLVHVRRRGHSQDAGSRLLAGTPEPSVHALPDALNNLRTQEGSGDGPSSSVDWNRPEDVDPQGIYVISAPSIYAREVATPLFPPLHTGRAGQRQHLLFPYPSSILSVK

SEQ ID NO: 1576 - DNA, 2022 bp, Homo sapiens
actcccgagacccccccaccagaaggccatggtctccccacggatgtccgggctcctctcccagactgtgatcctagcgctcattttcctcccccagacacggcccgctggcgtcttcgagctgcagatccactctttcgggccgggtccaggccctggggccccgcggtccccctgcagcgcccggctcccctgccgcctcttcttcagagtctgcctgaagcctgggctctcagaggaggccgccgagtccccgtgcgccctgggcgcggcgctgagtgcgcgcggaccggtctacaccgagcagcccggagcgcccgcgcctgatctcccactgcccgacggcctcttgcaggtgcccttccgggacgcctggcctggcaccttctctttcatcatcgaaacctggagagaggagttaggagaccagattggagggcccgcctggagcctgctggcgcgcgtggctggcaggcggcgcttggcagccggaggcccgtgggcccgggacattcagcgcgcaggcgcctgggagctgcgcttctcgtaccgcgcgcgctgcgagccgcctgccgtcgggaccgcgtgcacgcgcctctgccgtccgcgcagcgccccctcgcggtgcggtccgggactgcgcccctgcgcaccgctcgaggacgaatgtgaggcgccgctggtgtgccgagcaggctgcagccctgagcatggcttctgtgaacagcccggtgaatgccgatgcctagagggctggactggacccctctgcacggtccctgtctccaccagcagctgcctcagccccaggggcccgtcctctgctaccaccggatgccttgtccctgggcctgggccctgtgacgggaacccgtgtgccaatggaggcagctgtagtgagacacccaggtcctttgaatgcacctgcccgcgtgggttctacgggctgcggtgtgaggtgagcggggtgacatgtgcagatggaccctgcttcaacggcggcttgtgtgtcgggggtgcagaccctgactctgcctacatctgccactgcccacccggtttccaaggctccaactgtgagaagagggtggaccggtgcagcctgcagccatgccgcaatggcggactctgcctggacctgggccacgccctgcgctgccgctgccgcgccggcttcgcgggtcctcgctgcgagcacgacctggacgactgcgcgggccgcgcctgcgctaacggcggcacgtgtgtggagggcggcggcgcgcaccgctgctcctgcgcgctgggcttcggcggccgcgactgccgcgagcgcgcggacccgtgcgccgcgcgcccctgtgctcacggcggccgctgctacgcccacttctccggcctcgtctgcgcttgcgctcccggctacatgggagcgcggtgtgagttcccagtgcaccccgacggcgcaagcgccttgcccgcggccccgccgggcctcaggcccggggaccctcagcgctaccttttgcctccggctctgggactgctcgtggccgcgggcgtggccggcgctgcgctcttgctggtccacgtgcgccgccgtggccactcccaggatgctgggtctcgcttgctggctgggaccccggagccgtcagtccacgcactcccggatgcactcaacaacctaaggacgcaggagggttccggggatggtccgagctcgtccgtagattggaatcgccctgaagatgtagaccctcaagggatttatgtcatatctgctccttccatctacgctcgggaggcctgacgcgtctcctccatccgcacctggagtcagagcgtggatttttgtatttgctcggtggtgcccagtctctgccccagaggctttggagttcaatcttgaaggggtgtctgggggaactttactgttgcaagttgtaaataatggttatttatatcctattttttctcaccccatctctctagaaacacctataaaggctattattgtgatcaaaaaaaaaaaaaaaaaaa

SEQ ID NO: 1577 - protein, 587 aa, Homo sapiens
MVSPRMSGLLSQTVILALIFLPQTRPAGVFELQIHSFGPGPGPGAPRSPCSARLPCRLFFRVCLKPGLSEEAAESPCALGAALSARGPVYTEQPGAPAPDLPLPDGLLQVPFRDAWPGTFSFIIETWREELGDQIGGPAWSLLARVAGRRRLAAGGPWARDIQRAGAWELRFSYRARCEPPAVGTACTRLCRPRSAPSRCGPGLRPCAPLEDECEAPLVCRAGCSPEHGFCEQPGECRCLEGWTGPLCTVPVSTSSCLSPRGPSSATTGCLVPGPGPCDGNPCANGGSCSETPRSFECTCPRGFYGLRCEVSGVTCADGPCFNGGLCVGGADPDSAYICHCPPGFQGSNCEKRVDRCSLQPCRNGGLCLDLGHALRCRCRAGFAGPRCEHDLDDCAGRACANGGTCVEGGGAHRCSCALGFGGRDCRERADPCAARPCAHGGRCYAHFSGLVCACAPGYMGARCEFPVHPDGASALPAAPPGLRPGDPQRYLLPPALGLLVAAGVAGAALLLVHVRRRGHSQDAGSRLLAGTPEPSVHALPDALNNLRTQEGSGDGPSSSVDWNRPEDVDPQGIYVISAPSIYAREA

SEQ ID NO: 1578 - DNA, 2371 bp, Homo sapiens
atccacgcacgctcagcccggcgagcgcattcagttctcgagctccagccctcagcgcatgcgcaggacgagtcgcctgagggaactgatctcagctcgggcccgcgttacatcctcctcctcttcttccttcggcccagctttccttaggggctgcaacccggacgccgaggccggtttcggagtggggagtgcccattttctctccttcccacgttcctggcccccagacgccatttgcaggcgggtggcttgggtcagcctccccgcccccacccgactcccgtcacgggagagcgcacaccgcgccccgagaaccaatcagcagccgcgttaggtaaccatgtctgagtctggacacagtcagcctggactctatgggatagagcggcggcgacggtggaaggagcctggctctggtggcccccagaatctctctgggcctggtggtcgggagagggactacattgcaccatgggaaagagagagaagggatgccagcgaagagacaagcacttccgtcatgcagaaaacccccatcatcctctcaaaacctccagcagagcggtcaaaacagccaccacctccaacagcccctgctgccccgcctgctccagcccctctggagaagcccatcgttctcatgaagccacgggaggaggggaaggggcctgtggccgtgacaggtgcctctacccctgagggcaccgccccaccaccccctgcagcccctgcgccacccaagggggagaaggaggggcagagacccacacagcctgtgtaccagatccagaaccggggcatgggcactgccgcaccagcagccatggaccctgtcgtgggtcaggccaaactactgcccccagagcgcatgaagcacagcatcaagttggtggatgaccagatgaattggtgtgacagtgccatcgagtacctgttggatcagactgatgtgttggtggttggtgtcctgggcctccaggggacaggcaagtccatggtcatgtcattgttgtcagccaacactccagaggaggaccagaggacttatgttttccgggcccagagcgctgaaatgaaggaacgagggggcaaccagaccagtggcatcgacttctttattacccaagaacggattgttttcctggacacacagcccatcctgagcccttctatcctagaccatctcatcaataatgaccgcaaactgcctccagagtacaaccttccccacacttacgttgaaatgcagtcactccagattgctgccttccttttcacggtctgccatgtggtgattgttgtccaggactggttcacagacctcagtctctacaggttcctgcagacagcagagatggtgaagccctccaccccatcccccagccacgagtccagcagctcatcgggctccgatgaaggcaccgagtactacccccacctagtcttcttgcagaacaaagctcgccgagaggacttctgtcctcggaagctgcggcagatgcacctgatgattgaccagctcatggcccactcccacctgcgttacaagggaactctgtccatgttacaatgcaatgtcttcccggggcttccacctgacttcctggactctgaggtcaacttattcctggtacccttcatggacagtgaagcagagagtgaaaacccaccaagagcaggacctggttccagcccactcttctccctgctgcctgggtatcgtggccaccccagtttccagtccttggtgagcaagctccggagccaagtgatgtccatggcccggccacagctgtcacacacgatcctcaccgagaagaactggttccactacgctgcccggatctgggatggggtgagaaagtcctctgctctggcagagtacagccgcctgctggcctgaggccaaggagaggaatgtcatgcaggggacctcctgggtccgcagtgtactgcgagggagcacagatgtccatcccccgctggggtggagagcggcagcaggcctgatggatgagggatcgtggcttcccggcccagagacatgaggtgtccagggccaggccccccaccctcagttggggctgttccgggggtgactgtgagcgatcccaccccaaacctgagatggggtagcccgtcctgtgtcctccacagggacaagcagtgggaggagtctgaatggtcaccaggaagcccgggctccatcttgacctcctttttcagggacaggagcaacaggcccctcttccctgactctaagcccttccctgtaaggtgaggcagggtctggagagctctttattggaacagatctggtggttcaaataaacacagtcatgcaagcctgaaaaaaaaaaaaaaaaaa

SEQ ID NO: 1579 - protein, 520 aa, Homo sapiens
MSESGHSQPGLYGIERRRRWKEPGSGGPQNLSGPGGRERDYIAPWERERRDASEETSTSVMQKTPIILSKPPAERSKQPPPPTAPAAPPAPAPLEKPIVLMKPREEGKGPVAVTGASTPEGTAPPPPAAPAPPKGEKEGQRPTQPVYQIQNRGMGTAAPAAMDPVVGQAKLLPPERMKHSIKLVDDQMNWCDSAIEYLLDQTDVLVVGVLGLQGTGKSMVMSLLSANTPEEDQRTYVFRAQSAEMKERGGNQTSGIDFFITQERIVFLDTQPILSPSILDHLINNDRKLPPEYNLPHTYVEMQSLQIAAFLFTVCHVVIVVQDWFTDLSLYRFLQTAEMVKPSTPSPSHESSSSSGSDEGTEYYPHLVFLQNKARREDFCPRKLRQMHLMIDQLMAHSHLRYKGTLSMLQCNVFPGLPPDFLDSEVNLFLVPFMDSEAESENPPRAGPGSSPLFSLLPGYRGHPSFQSLVSKLRSQVMSMARPQLSHTILTEKNWFHYAARIWDGVRKSSALAEYSRLLA

SEQ ID NO: 1580 - DNA, 2240 bp, Homo sapiens
gtccttcggtgtctgggtgtggtgagtagaggtgtgtgtcacaaagtacagaccattgtgtgtgacaaagcccatcgtgtgtctgtgtgtgtctttatccacgtggatggacgtctctttcttgctctgccccaagacacaccctagcccctccttattctcaaaagggggagctggggagcctccccctaccctggggcctcccctgcccctccccgccctgcctggccgtcaccactccccagagggcacagggctctgctgtgcctcagagcaaaagtcccagagccagcagagcaggctgacgacctgcaagccacagtggctgccctgtgcgtgctgcgaggtgggggaccctgggcaggaagctggctgagccccaagaccccgggggccatgggcggggatctggtgcttggcctgggggccttgagacgccgaaagcgcttgctggagcaggagaagtctctggccggctgggcactggtgctggcaggaactggcattggactcatggtgctgcatgcagagatgctgtggttcggggggtgctcgtgggcgctctacctgttcctggttaaatgcacgatcagcatttccaccttcttactcctctgcctcatcgtggcctttcatgccaaagaggtccagctgttcatgaccgacaacgggctgcgggactggcgcgtggcgctgaccgggcggcaggcggcgcagatcgtgctggagctggtggtgtgtgggctgcacccggcgcccgtgcggggcccgccgtgcgtgcaggatttaggggcgccgctgacctccccgcagccctggccgggattcctgggccaaggggaagcgctgctgtccctggccatgctgctgcgtctctacctggtgccccgcgccgtgctcctgcgcagcggcgtcctgctcaacgcttcctaccgcagcatcggcgctctcaatcaagtccgcttccgccactggttcgtggccaagctttacatgaacacgcaccctggccgcctgctgctcggcctcacgcttggcctctggctgaccaccgcctgggtgctgtccgtggccgagaggcaggctgttaatgccactgggcacctttcagacacactttggctgatccccatcacattcctgaccatcggctatggtgacgtggtgccgggcaccatgtggggcaagatcgtctgcctgtgcactggagtcatgggtgtctgctgcacagccctgctggtggccgtggtggcccggaagctggagtttaacaaggcagagaagcacgtgcacaacttcatgatggatatccagtataccaaagagatgaaggagtccgctgcccgagtgctacaagaagcctggatgttctacaaacatactcgcaggaaggagtctcatgctgcccgcaggcatcagcgcaagctgctggccgccatcaacgcgttccgccaggtgcggctgaaacaccggaagctccgggaacaagtgaactccatggtggacatctccaagatgcacatgatcctgtatgacctgcagcagaatctgagcagctcacaccgggccctggagaaacagattgacacgctggcggggaagctggatgccctgactgagctgcttagcactgccctggggccgaggcagcttccagaacccagccagcagtccaagtagctggacccacgaggaggaaccaggctactttccccagtactgaggtggtggacatcgtctctgccactcctgacccagccctgaacaaagcacctcaagtgcaaggaccaaagggggccctggcttggagtgggttggcttgctgatggctgctggaggggacgctggctaaagtgggtaggccttggcccacctgaggccccaggtgggaacatggtcacccccactctgcataccctcatcaaaaacactctcactatgctgctatggacgacctccagctctcagttacaagtgcaggcgactggaggcaggactcctgggtccctgggaaagagggtactaggggcccggatccaggattctgggaggcttcagttaccgctggccgagctgaagaactgggtatgaggctggggcggggctggaggtggcgccccctggtgggacaacaaagaggacaccatttttccagagctgcagagagcacctggtggggaggaagaagtgtaactcaccagcctctgctcttatctttgtaataaatgttaaagccagaa

SEQ ID NO: 1581 - protein, 427 aa, Homo sapiens
MGGDLVLGLGALRRRKRLLEQEKSLAGWALVLAGTGIGLMVLHAEMLWFGGCSWALYLFLVKCTISISTFLLLCLIVAFHAKEVQLFMTDNGLRDWRVALTGRQAAQIVLELVVCGLHPAPVRGPPCVQDLGAPLTSPQPWPGFLGQGEALLSLAMLLRLYLVPRAVLLRSGVLLNASYRSIGALNQVRFRHWFVAKLYMNTHPGRLLLGLTLGLWLTTAWVLSVAERQAVNATGHLSDTLWLIPITFLTIGYGDVVPGTMWGKIVCLCTGVMGVCCTALLVAVVARKLEFNKAEKHVHNFMMDIQYTKEMKESAARVLQEAWMFYKHTRRKESHAARRHQRKLLAAINAFRQVRLKHRKLREQVNSMVDISKMHMILYDLQQNLSSSHRALEKQIDTLAGKLDALTELLSTALGPRQLPEPSQQSK

SEQ ID NO: 1582 - DNA, 1071 bp, Homo sapiens
atgaatggggtctcggaggggaccagaggctgcagtgacaggcaacctggggtcctgacacgtgatcgctcttgttccaggaagatgaactcttccggatgcctgtctgaggaggtggggtccctccgcccactgactgtggttatcctgtctgcgtccattgtcgtcggagtgctgggcaatgggctggtgctgtggatgactgtcttccgtatggcacgcacggtctccaccgtctgcttcttccacctggcccttgccgatttcatgctctcactgtctctgcccattgccatgtactatattgtctccaggcagtggctcctcggagagtgggcctgcaaactctacatcacctttgtgttcctcagctactttgccagtaactgcctccttgtcttcatctctgtggaccgttgcatctctgtcctctaccccgtctgggccctgaaccaccgcactgtgcagcgggcgagctggctggcctttggggtgtggctcctggccgccgccttgtgctctgcgcacctgaaattccggacaaccagaaaatggaatggctgtacgcactgctacttggcgttcaactctgacaatgagactgcccagatttggattgaaggggtcgtggagggacacattatagggaccattggccacttcctgctgggcttcctggggcccttagcaatcataggcacctgcgcccacctcatccgggccaagctcttgcgggagggctgggtccatgccaaccggcccaagaggctgctgctggtgctggtgagcgctttctttatcttctggtccccgtttaacgtggtgctgttggtccatctgtggcgacgggtgatgctcaaggaaatctaccacccccggatgctgctcatcctccaggctagctttgccttgggctgtgtcaacagcagcctcaaccccttcctctacgtcttcgttggcagagatttccaagaaaagtttttccagtctttgacttctgccctggcgagggcgtttggagaggaggagtttctgtcatcctgtccccgtggcaacgccccccgggaatga

SEQ ID NO: 1583 - protein, 356 aa, Homo sapiens
MNGVSEGTRGCSDRQPGVLTRDRSCSRKMNSSGCLSEEVGSLRPLTVVILSASIVVGVLGNGLVLWMTVFRMARTVSTVCFFHLALADFMLSLSLPIAMYYIVSRQWLLGEWACKLYITFVFLSYFASNCLLVFISVDRCISVLYPVWALNHRTVQRASWLAFGVWLLAAALCSAHLKFRTTRKWNGCTHCYLAFNSDNETAQIWIEGVVEGHIIGTIGHFLLGFLGPLAIIGTCAHLIRAKLLREGWVHANRPKRLLLVLVSAFFIFWSPFNVVLLVHLWRRVMLKEIYHPRMLLILQASFALGCVNSSLNPFLYVFVGRDFQEKFFQSLTSALARAFGEEEFLSSCPRGNAPRE

SEQ ID NO: 1584 - DNA, 2517 bp, Homo sapiens
aaaacactcattttgttttatagcatgacaggctgtctgattccatctttataaccaaagccaattaagatcttaaaaccaaacatataacttcatctttttacaagtacttagagcctgagttgctccacaggaatccaggaactgggcacaggaaaaggatctaagctggtggtgtgggaagatggaaaccaacttctccattcctctgaatgaaactgaggaggtgctccctgagcctgctggccacaccgttctgtggatcttctcattgctagtccacggagtcacctttgtcttcggggtcctgggcaatgggcttgtgatctgggtggctggattccggatgacacgcacagtcaacaccatctgttacctgaacctggccctagctgacttctctttcagtgccatcctaccattccgaatggtctcagtcgccatgagagaaaaatggccttttggctcattcctatgtaagttagttcatgttatgatagacatcaacctgtttgtcagtgtctacctgatcaccatcattgctctggaccgctgtatttgtgtcctgcatccagcctgggcccagaaccatcgcaccatgagtctggccaagagggtgatgacgggactctggattttcaccatagtccttaccttaccaaatttcatcttctggactacaataagtactacgaatggggacacatactgtattttcaactttgcattctggggtgacactgctgtagagaggttgaacgtgttcattaccatggccaaggtctttctgatcctccacttcattattggcttcagcgtgcctatgtccatcatcacagtctgctatgggatcatcgctgccaaaattcacagaaaccacatgattaaatccagccgtcccttacgtgtcttcgctgctgtggtggcttctttcttcatctgttggttcccttatgaactaattggcattctaatggcagtctggctcaaagagatgttgttaaatggcaaatacaaaatcattcttgtcctgattaacccaacaagctccttggccttttttaacagctgcctcaacccaattctctacgtctttatgggtcgtaacttccaagaaagactgattcgctctttgcccactagtttggagagggccctgactgaggtccctgactcagcccagaccagcaacacagacaccacttctgcttcacctcctgaggagacggagttacaagcaatgtgaggtcggggatatttttgggctctgtctctttctaccctgcgttaagcggaaaaaaaaaattctgacagtgtttttcttcctctttcataccaccaccaccacaatcatcaacataaaggaagtctgtaccaaatctgtagggggtttttcccacaaccaagcaatagacaccagctgggtgtcctacaattaaattccaacactatctacctggagctactgtcagatcccacaggtttaagggctcattccccaagtctgctcctccagttgagacacaagtcacaaatccaggcttctgagacttcggaccaaccagcttcaatcagggttcccactaccccctctttgggggtagagtggctcatggaactcagagaaacatttatttcggcttgctggtttattataaaagcaaggtttattataaaagatactacaaaggatacagatgaagaggcacatagggcaaggtacggggttccacgccctccctgagtgcatcaccctctgggaacctccgtgtgttcacgtctcatgaagctctccaaatccagtcctcttgggtttttatggaagcttcatgatgtcagcattctttcctccagtgtataggatgggatcctctctggggagggtcttaagacccacaattagaaaggcaagggaagattagagtcctgctttggggtagatgaaaggaaaggagagagattctgtttcctgaggcttaatacacccaacattataacaaaggactgtagcaagggctatgggagttctgaagcagaaaccatgggctaaaaccaacatacatcttaataccagataccctaatcccagtcctaacttcatttaaccttggtcacattgagtcattccaggatgagtggctcaagtatttcctcagggaaaatacttctgtgccccctgatttgagggtaagaagtagataatgaggccactgtgggtgttattttttcatgtctggacctcagcctatatcctgagactaagtggaagtgggaaaagagtacaagagaagagacaaagtggggatatttgtaaggcttagatgagatagtgtttttttagaaaaaaactttatcttaccattaagtaaaatgtttgccataggctttctggggctttctctttttaaagtcagactgttgaaggtttcttctattcttatttgttaagagttttcttttattgtttaaatcatgaatgaatgttgaattttattaaatgcagtttctgtaaatatt

SEQ ID NO: 1585 - protein, 353 aa, Homo sapiens
METNFSIPLNETEEVLPEPAGHTVLWIFSLLVHGVTFVFGVLGNGLVIWVAGFRMTRTVNTICYLNLALADFSFSAILPFRMVSVAMREKWPFGSFLCKLVHVMIDINLFVSVYLITIIALDRCICVLHPAWAQNHRTMSLAKRVMTGLWIFTIVLTLPNFIFWTTISTTNGDTYCIFNFAFWGDTAVERLNVFITMAKVFLILHFIIGFSVPMSIITVCYGIIAAKIHRNHMIKSSRPLRVFAAVVASFFICWFPYELIGILMAVWLKEMLLNGKYKIILVLINPTSSLAFFNSCLNPILYVFMGRNFQERLIRSLPTSLERALTEVPDSAQTSNTDTTSASPPEETELQAM

SEQ ID NO: 1586 - DNA, 3067 bp, Homo sapiens
gcgagtgtcgcgtctgcagtgtgtggggttcgcggggcggcgggtagagttgagcatttttgtcatctgcaaataattttagccaggtggcaagtgtatggactgtggagtaagaagtacctgcctctgcctctgacttgggttctggcctataggaacaagacattttcagtaatggaagaaggagcttccaggctggggaagatcatcatttccagtggtagcttgacctgagatgatacctgaccaccacttctgggaaggcccagaatagacagaagagagagaacatactagagttgctagcccctaagagttgaacgaaatgggcaaggcccagctgaaataacaggaaacacatgaaaaatgccacgattgtaatgtctgtgaggagagagcaaggcagttcttcaggggaggggtcattgtcattcgaagatgtggctgtgggcttcaccagggaggagtggcagtttttggaccagtctcagaaggtcttgtacaaggaagtaatgttggagaactacatcaacctagtatcaatagggtatcgaggcaccaagccagattcgctcttcaagttggagcaaggagaacccccagggatagtagaaggagcagcccacagtcaaatctgtccaggttttgttatccagagtagaagatatgcaggaaaagattctgatgcatttggtggatatgggagatcatgcctccatatcaagtgtgacaaaactcttactggagttaaataccatagatgtgttaaacccagcagccctaaatcacagctcaatgacctacaaaaaatttgtgcaggagggaaaccacatgaatgcagtgtgtgcgggagagccttctccaggaaagcacagcttattcaacatcagagaactgaaagaggagagaaaccccatggatgtggtgaatgtgggaaaacattcatgaggaagattcagctcactgagcatcagagaactcacacaggagagaagccccatgaatgtagtgaatgtggaaaagccttctccagaaagtcacagctcatggtccatcagagaacccatacaggagagaaaccctacagatgcagcgaatgcggaaaagccttcagccggaagtgccggctcaatagacatcagcgatcacatactggagagaaactctatgggtgcagtgtgtgtgggaaagccttttctcagaaggcatacctcactgcacaccagagacttcacacaggagataagccttataaatgcagtgattgtggaagaaccttctattttaagtcagacctgaccagacatcagaggattcatacgggagagaaaccttatgaatgtagtgagtgtgaaaaagcctttagaagcaagtcgaagctcattcagcatcagcgtactcacactggagagagaccatattcatgcagagaatgtggcaaagcctttgcccacatgtcagtcctcattaaacatgagaaaactcacataagagagacagccataaattcactgacggtggagaaaccttcctcaaggagtcatacctccttatacatgagcgaactcatacaagagcaaaagactgtgaacacagtacctatagaaatgccttcctcaggaaccccgccattgttaaacaagagtgagcgcctagtgggcagaaatgtagtgattgtggaacaaccttttccaagaaatcaagcctttgtagttaatcaggaatttgaacagagaataagcctcacaaatgaagtgaatgtggccccatcagtaataaattatatcttgtatcttacagatattgtatcagaataaatcttctgataccagaaaggtgggaaaatctttagtaggaatcctccagccattatatcccagagagctcatttagggctgaaacactgtggaggcagtggttgtggaggacatttctgtgagaagtcaaacctgttaaacaccattgaaatcatgttgggtagaaatgcagctgttatgaggaagtctttacctggagatgatatctcaattggtatcaaaagaattcttacaggaatatttatgaaagattgtgatggtgcttttagcgctaaattgtgcctcgtgtgccaaagaaacatagacaactgtagaggcaatggatatggaaaacatttttcgtaaaatatgggagaatttatagaaaagaaaaactcttgaaagtaagaaatgatggcaactcaccaaattaactcatgtatcatacttttatgtcttgagagtcttggagggacgtgtttaatgaaatcttgaaccccaggaatagtattatgtaatgaaaacctatgaatataacaaatatggaagtaaaattgtgttagtttcttatgagtgttgcaccaaactaacacaaatttaatggcttaaaacaacacaaaatcattatcttacagttctggaggactgaagtccaaatgcatctcacggggctacatcaagctgttgacagggctgcttttctttttggaggctctaggggagcgtctttctttgcccttccagcttctagaagctgcccaaattctgtggtttggggcctcctttcaaaaccagcaatggccaatcagtcttacatcactcaaacacttgagtgttctgtctccctcttccatgtttgaggacccttgtgattacactgtgaaaacccagataagccaggataatctccctatcttattatgaggcaagtatgttaagattttattctataatcagagaatcttatgctatgattgttatatgtgagcattatagatgctcttgaaatgttaaaatcacatcagcactggaaaataactcctaaatgtccaaaaagaacatgagatttatggtgcttgaaatgttgctaaacgtaaatttgtatctattctgaaattatataaattaacctacctggccaggcacagtggctcacacctgtaatctcagcactttgggaggccaaggcaggaagatcacttgagcccgcaagtttgagaccaccctgggcaacatagcgagactacctctacaaaaaaaaaaaaaaaaaa

SEQ ID NO: 1587 - protein, 478 aa, Homo sapiens
MSVRREQGSSSGEGSLSFEDVAVGFTREEWQFLDQSQKVLYKEVMLENYINLVSIGYRGTKPDSLFKLEQGEPPGIVEGAAHSQICPGFVIQSRRYAGKDSDAFGGYGRSCLHIKCDKTLTGVKYHRCVKPSSPKSQLNDLQKICAGGKPHECSVCGRAFSRKAQLIQHQRTERGEKPHGCGECGKTFMRKIQLTEHQRTHTGEKPHECSECGKAFSRKSQLMVHQRTHTGEKPYRCSECGKAFSRKCRLNRHQRSHTGEKLYGCSVCGKAFSQKAYLTAHQRLHTGDKPYKCSDCGRTFYFKSDLTRHQRIHTGEKPYECSECEKAFRSKSKLIQHQRTHTGERPYSCRECGKAFAHMSVLIKHEKTHIRETAINSLTVEKPSSRSHTSLYMSELIQEQKTVNTVPIEMPSSGTPPLLNKSERLVGRNVVIVEQPFPRNQAFVVNQEFEQRISLTNEVNVAPSVINYILYLTDIVSE

SEQ ID NO: 1588 - DNA, 3176 bp, Homo sapiens
gccgccataggccagtgccggggtttaagggccaggaaaggaagcattcagggaatttaggtgtagccagaagaaaatcaggtcctggctccccagaagcaagagagttcaagtgaaggaaggaggaggttcctggatgtggatgtcatcatttctgggaacactcttaaatggagactcagatttcttagccaaaatttagggaggatccagaagaaaccaaagacgaagcatcccagttcttgggtatttcctgaaacagaagaaaatgacaaaggcccaggaatcactgaccctggaggatgtggctgtggacttcacctgggaggagtggcagttcctgagccctgctcagaaggacctgtaccgggatgtgatgttggagaactacagcaaccttgtgtcagtggggtatcaagccggcaaacctgatgccctcaccaagttggaacaaggagaaccactatggacactagaagatgaaatccacagtccagcccacccagaaattgagaaagctgatgatcatctgcagcagcccttgcaaaaccaaaaaatactgaagaggacgggacaacgctatgaacacggaagaactttgaaatcatatttaggtttaaccaaccagagcagaagatacaacagaaaggagcctgctgagtttaatggagatggagcttttctccatgataatcatgaacaaatgcctacggaaattgaattccctgaaagtagaaaacccatcagcaccaagtcacaattccttaaacatcagcaaacacacaacatagagaaagcccatgaatgcactgactgtgggaaagctttcctcaagaagtctcagctcactgagcataagagaattcatacaggaaagaaaccccacgtgtgtagcttgtgtgggaaagccttctacaagaagtacaggctcactgaacacgagagagctcacagaggagagaaaccccacgggtgtagcttgtgtgggaaagccttctacaagaggtacaggctcactgaacacgagagagctcacaaaggagagaaaccatacgggtgcagtgaatgtgggaaagccttccccaggaaatctgagcttactgaacatcaaaggattcacacgggaattaagccccatcaatgcagcgaatgtgggagagctttctccagaaaatcactactcgttgtacatcagcgaactcatacaggagagaagcctcatacatgcagtgaatgtggaaaaggcttcattcagaagggcaatctcaacatacatcaacgaactcacactggagagaaaccttatggatgcattgactgtggcaaggccttcagccagaagtcttgccttgtagcacatcagagatatcatacaggaaagactccctttgtatgtcctgaatgtgggcaaccctgttcacagaagtcaggactcattagacatcagaaaattcactcaggagagaaaccctataaatgcagtgactgtgggaaagccttccttacaaagacaatgctcattgtacatcacagaactcacacgggagagagaccctatggctgtgatgagtgtgagaaagcttacttctatatgtcttgccttgttaaacataagagaatacactcaagggagaaacggggggattcagtgaaggtggaaaatccttccacagcaagtcacagcttaagtcctagtgaacatgtgcaggggaaaagccctgttaatatggtaactgtggcaatggtggcagggcagtgtgagtttgcccacatcctgcattcatgataaacagtttgctgtttgatcatatagcctccagcggaatgctgagtttgtcatgtcccatgggcctttggctccctgcactaatatgtatagtagggtttacaagatatgaaatatattttacttttttatatcttataaacctcactacccctcccacaatattgtttttcatttactatcttgatcatagagtttggctggggaggggggcagttttagaggcttccacttggtgttcctcagaatgatatctcttactccgggggccaaggtaggggttagcttttgttctctttgtagtttagattgtatctcttgccttgttcaagttcacaaatctttttgtgtatacacatatgtacatgaaaatgatgttcatgctttttattattttacccttcattatttcattttttatagttctcatagctatgtctttcagttcactaatcttttttccacagtgtttaatctgtcattaatcccatccaaagtatgttttctctcagaaattgtaatttttaacctctaataatttgacatgggtttttccctgttatatctttcatatctttatttatcatggttttacttttaacctatttatgctttcatatttaaagtgggtgtttagtgggcaacatacagttgggccttccttttttatccagttaacaatctctgtctttttactggggtatttagatcatttacgtttaatgtattgatgtttttaggtttaaattactaacttactatttgttgtttattctatgtcttctttgttctccttttcttctttttctgctttcccttagagtagctgagtgtgtttatattacatattgtctcctttgttggcttattaactgtaaatccttgtcatttgattccttgagattttatagcatacatcattgtgagggattgcatatttatgtcctctccaaatttacatgttgaagtcctaatccctaagggatggcattaggaagtgtgacctttggaaggtaattacatcttgaaagtggaaccctcatgatgagattatgtgtcttatgagacaacacagaagagagtttgttttctctttctctgctctttgccatgtgaagacagaatgagatgaccatgcataaaccaggaaatggactctcactggacactagacctgccaacaccttgattgtgttttagagtccagttctagagactcctcagcctctggaacgtgagaaatgaatgtttgttaaggcagtcagtcagtctatggtgtattttttctagtagcctgaactgactgaaagaaaatcatgaacttatcattctaacttcaaggacattatatcacttactgtataataaaataatcttacagtaaaaaaaa

SEQ ID NO: 1589 - protein, 505 aa, Homo sapiens
MTKAQESLTLEDVAVDFTWEEWQFLSPAQKDLYRDVMLENYSNLVSVGYQAGKPDALTKLEQGEPLWTLEDEIHSPAHPEIEKADDHLQQPLQNQKILKRTGQRYEHGRTLKSYLGLTNQSRRYNRKEPAEFNGDGAFLHDNHEQMPTEIEFPESRKPISTKSQFLKHQQTHNIEKAHECTDCGKAFLKKSQLTEHKRIHTGKKPHVCSLCGKAFYKKYRLTEHERAHRGEKPHGCSLCGKAFYKRYRLTEHERAHKGEKPYGCSECGKAFPRKSELTEHQRIHTGIKPHQCSECGRAFSRKSLLVVHQRTHTGEKPHTCSECGKGFIQKGNLNIHQRTHTGEKPYGCIDCGKAFSQKSCLVAHQRYHTGKTPFVCPECGQPCSQKSGLIRHQKIHSGEKPYKCSDCGKAFLTKTMLIVHHRTHTGERPYGCDECEKAYFYMSCLVKHKRIHSREKRGDSVKVENPSTASHSLSPSEHVQGKSPVNMVTVAMVAGQCEFAHILHS

SEQ ID NO: 1590 - DNA, 2307 bp, Homo sapiens
agaagtggaataattcaggaaagtgcaggttctgggaagtctcggtgggttccccgcaaaatcagagatggcatctcactatgttgcccaggctgatcttgaactcctgacctcaagtgatcctctctccttggcctcctaaagtgctgggattccaggtgtgagccacttcacccagccacatttatccatcttgtaaaatattgctttgttttttggtgcatttcaaacccacaggtcctgacttcaggagcaagacacttcaagtgaggtgaggaggaggttccaggacctggataccatcctttgcagggatgtaattcaccagagaccaagatttctagccagaaattgagggcagctcaaggagagactacagacacagcatcctacttactggctatttcccagtaacaaaagaaaatgatcaagtcccaggaatcactgaccctggaggatgtggctgtggagttcacttgggaggagtggcagctcctcggccctgctcagaaggacctgtaccgagacgtgatgttggagaactatagcaacctcgtgtcagtggggtatcaagccagcaaaccagatgcactcttcaagttggaacaaggagagccatggacagtagaaaatgaaatccacagccaaatctgtccagaaatcaagaaagttaacaatcatctacagatgcactcacaaaagcaaagatgtctgaagagagtggaacaatgccataaacataatgcatttggaaacatcattcatcagaggaaaagtgattttcctttaaggcaaaatcatgatacatttgacttacatgggaaaatactgaaatcaaatttaagtttagtcaaccagaacaaaaggtatgaaatcaagaattctgtgggggttaatggagatgggaaatccttccttcatgccaagcatgaacaatttcataatgaaatgaacttccccgaaggtggaaattctgtgaatacaaattcacaattcattaagcatcagcgaactcaaaacatagataaaccccatgtatgcactgagtgtgggaaggctttcctcaagaagtctcgcctcatctatcatcagagagttcacactggggagaaacctcatggatgcagtatatgtgggaaagccttctccagaaagtccgggctcactgaacaccagagaaaccacacaggagagaaaccctatgaatgcactgaatgtgacaaagcattccgctggaaatcacagctcaatgcacaccagaaaattcatacaggagagaagtcatatatatgcagtgattgtggaaaaggcttcatcaagaagtctcggctcattaatcatcagagagttcatacaggagagaaaccacatggatgcagcctgtgtgggaaggccttctccaaaaggtccaggctcactgaacaccagagaactcatacaggagagaaaccctatgaatgcactgaatgtgacaaagcattccgctggaaatcacagctcaatgcacatcagaaagctcacacaggagagaagtcatatatatgccgtgattgtggaaaaggcttcattcagaagggaaatctcattgtacatcagcgaattcatactggagaaaaaccctatatatgcaatgaatgtggaaaaggcttcatccaaaagggcaacctccttattcatcgacgtactcacactggagagaaaccctatgtatgcaatgaatgtgggaaaggcttcagccagaagacatgtttaatatcccatcagagatttcacacaggaaagacaccctttgtatgtactgagtgtggaaaatcctgctcacacaagtcaggtctcattaaccaccagagaattcacacaggagagaaaccctatacatgcagtgactgtgggaaagctttcagagataaatcatgtctcaacagacatcggagaactcatacaggggagagaccgtatggatgctctgattgtgggaaagctttctcccacttgtcatgccttgtttatcataagggaatgctgcatgcaagagagaaatgtgtaggttcagtcaaattggaaaatccttgctcagagagtcatagcttatcacatacacgtgatctcatacaggataaagactctgttaacatggtgactctgcagatgccttctgtggcagctcagacctcattaactaacagtgcgttccaagcagagagcaaagtagccattgtgagccagcctgttgccagaagttcagtctcagcagatagtagaatttgcacagaataaaaaccatatgaatgcgaaaaaaaaaaaaaa

SEQ ID NO: 1591 - protein, 617 aa, Homo sapiens
MIKSQESLTLEDVAVEFTWEEWQLLGPAQKDLYRDVMLENYSNLVSVGYQASKPDALFKLEQGEPWTVENEIHSQICPEIKKVNNHLQMHSQKQRCLKRVEQCHKHNAFGNIIHQRKSDFPLRQNHDTFDLHGKILKSNLSLVNQNKRYEIKNSVGVNGDGKSFLHAKHEQFHNEMNFPEGGNSVNTNSQFIKHQRTQNIDKPHVCTECGKAFLKKSRLIYHQRVHTGEKPHGCSICGKAFSRKSGLTEHQRNHTGEKPYECTECDKAFRWKSQLNAHQKIHTGEKSYICSDCGKGFIKKSRLINHQRVHTGEKPHGCSLCGKAFSKRSRLTEHQRTHTGEKPYECTECDKAFRWKSQLNAHQKAHTGEKSYICRDCGKGFIQKGNLIVHQRIHTGEKPYICNECGKGFIQKGNLLIHRRTHTGEKPYVCNECGKGFSQKTCLISHQRFHTGKTPFVCTECGKSCSHKSGLINHQRIHTGEKPYTCSDCGKAFRDKSCLNRHRRTHTGERPYGCSDCGKAFSHLSCLVYHKGMLHAREKCVGSVKLENPCSESHSLSHTRDLIQDKDSVNMVTLQMPSVAAQTSLTNSAFQAESKVAIVSQPVARSSVSADSRICTE

SEQ ID NO: 1592 - DNA, 2225 bp, Homo sapiens
ctcggccgccgtaggccggcttggaggctgggggagggcccagaagtggaataattcaggaaagtgcaggttctgggaagtctcggtgggttccccgcaaaatcaggcttgagtgcagtggcgcaatcgtggctcactgcagcctccatctcccggggctcaggtgattttcccacctcagctttcccgagtagctgggactacagagatggcatctcactatgttgcccaggctgatcttgaactcctgacctcaagtgatcctctctccttggcctcctaaagtgctgggattccaggtgtgagccacttcacccagccacatttatccatcttgtaaaatattgctttgttttttggtgcatttcaaagaatcactgaccctggaggatgtggctgtggagttcacttgggaggagtggcagctcctcggccctgctcagaaggacctgtaccgagacgtgatgttggagaactatagcaacctcgtgtcagtggggtatcaagccagcaaaccagatgcactcttcaagttggaacaaggagagccatggacagtagaaaatgaaatccacagccaaatctgtccagaaatcaagaaagttgacaatcatctacagatgcactcacaaaagcaaagatgtctgaagagagtggaacaatgccataaacataatgcatttggaaacatcattcatcagaggaaaagtgattttcctttaaggcaaaatcatgatacatttgacttacatgggaaaatactgaaatcaaatttaagtttagtcaaccagaacaaaaggtatgaaatcaagaattctgtgggggttaatggagatgggaaatccttccttcatgccaagcatgaacaatttcataatgaaatgaacttccccgaaggtggaaattctgtgaatacaaattcacaattcattaagcatcagcgaactcaaaacatagataaaccccatgtatgcactgagtgtgggaaggctttcctcaagaagtctcgcctcatctatcatcagagagttcacactggggagaaacctcatggatgcagtatatgtgggaaagccttctccagaaagtccgggctcactgaacaccagagaaaccacacaggagagaaaccctatgaatgcactgaatgtgacaaagcattccgctggaaatcacagctcaatgcacaccagaaaattcatacaggagagaagtcatatatatgcagtgattgtggaaaaggcttcatcaagaagtctcggctcattaatcatcagagagttcatacaggagagaaaccacatggatgcagcctgtgtgggaaggccttctccaaaaggtccaggctcactgaacaccagagaactcatacaggagagaaaccctatgaatgcactgaatgtgacaaagcattccgctggaaatcacagctcaatgcacatcagaaagctcacacaggagagaagtcatatatatgccgtgattgtggaaaaggcttcattcagaagggaaatctcattgtacatcagcgaattcatactggagaaaaaccctatatatgcaatgaatgtggaaaaggcttcatccaaaagggcaacctccttattcatcgacgtactcacactggagagaaaccctatgtatgcaatgaatgtgggaaaggcttcagccagaagacatgtttaatatcccatcagagatttcacacaggaaagacaccctttgtatgtactgagtgtggaaaatcctgctcacacaagtcaggtctcattaaccaccagagaattcacacaggagagaaaccctatacatgcagtgactgtgggaaagctttcagagataaatcatgtctcaacagacatcggagaactcatacaggggagagaccgtatggatgctctgattgtgggaaagctttctcccacttgtcatgccttgtttatcataagggaatgctgcatgcaagagagaaatgtgtaggttcagtcaaattggaaaatccttgctcagagagtcatagcttatcacatacacgtgatctcatacaggataaagactctgttaacatggtgactctgcagatgccttctgtggcagctcagacctcattaactaacagtgcgttccaagcagagagcaaagtagccattgtgagccagcctgttgccagaagttcagtctcagcagatagtagaatttgcacagaataaaaaccatatgaatgc

SEQ ID NO: 1593 - protein, 581 aa, Homo sapiens
MLENYSNLVSVGYQASKPDALFKLEQGEPWTVENEIHSQICPEIKKVDNHLQMHSQKQRCLKRVEQCHKHNAFGNIIHQRKSDFPLRQNHDTFDLHGKILKSNLSLVNQNKRYEIKNSVGVNGDGKSFLHAKHEQFHNEMNFPEGGNSVNTNSQFIKHQRTQNIDKPHVCTECGKAFLKKSRLIYHQRVHTGEKPHGCSICGKAFSRKSGLTEHQRNHTGEKPYECTECDKAFRWKSQLNAHQKIHTGEKSYICSDCGKGFIKKSRLINHQRVHTGEKPHGCSLCGKAFSKRSRLTEHQRTHTGEKPYECTECDKAFRWKSQLNAHQKAHTGEKSYICRDCGKGFIQKGNLIVHQRIHTGEKPYICNECGKGFIQKGNLLIHRRTHTGEKPYVCNECGKGFSQKTCLISHQRFHTGKTPFVCTECGKSCSHKSGLINHQRIHTGEKPYTCSDCGKAFRDKSCLNRHRRTHTGERPYGCSDCGKAFSHLSCLVYHKGMLHAREKCVGSVKLENPCSESHSLSHTRDLIQDKDSVNMVTLQMPSVAAQTSLTNSAFQAESKVAIVSQPVARSSVSADSRICTE

SEQ ID NO: 1594 - DNA, 2358 bp, Homo sapiens
agcagtttacggaagtgtaacgttgaggcccttcttgtgtatctggagaaaatagaggttctgactcctcaggagcaaaaaacataacctgaagagggaggaagtggatttggggttcaccatttcttggggcacacttgattgaaaactgagacttctgaagagaaggccagaagatacaaagacagaccatcccagttgaatgctgtcttccaagaacagaagaaaatgatccaggcccaggaatccataacactggaggatgtggctgtggacttcacttgggaggagtggcaactcctgggcgctgctcagaaggacctgtaccgggatgtgatgttggagaactacagcaacctggtggcagtggggtatcaagccagcaaaccggatgcactcttcaagttggaacaaggagaacaactgtggacaattgaagatggaatccacagtggagcctgttcagacatatggaaagttgatcatgtgctggagcgcttgcagagtgaaagcctggtgaacagaaggaaaccatgtcatgaacatgatgcatttgaaaatattgttcattgcagcaaaagtcagtttctgttagggcaaaatcatgatatatttgacttacgtggaaaaagtttgaaatccaatttaactttagttaaccagagcaaaggctatgaaataaagaactctgttgagtttactggaaatggggactcctttcttcatgctaaccatgaacgacttcatactgcaattaaattccctgcaagtcaaaaactcatcagcactaagtcccaattcatcagtcccaagcatcagaaaacacgaaaattagagaagcatcatgtgtgcagtgaatgtgggaaagccttcatcaagaagtcttggctaactgatcaccaggtaatgcatacaggagagaaaccccacagatgtagtctatgtgagaaagccttctccagaaagttcatgcttactgaacatcagcgaactcatacaggagaaaaaccttatgaatgccctgaatgtggcaaagcctttctcaagaaatcacggctcaacatacatcagaaaacacataccggagagaaaccctatatatgcagtgaatgtggaaaaggcttcatccagaaaggaaatctcattgtacaccagcgaattcatacaggtgagaaaccttatatatgcaatgaatgtggaaaaggcttcattcagaagacgtgtctcatagcacatcagagatttcacacaggaaagacgccctttgtgtgcagtgaatgtggaaaatcctgttctcagaaatcaggtctcattaaacatcaaagaattcacacaggagagaaaccctttgaatgtagtgaatgtgggaaagcctttagcacaaagcaaaagctcattgtccatcaaaggactcatacaggagagagaccctatggctgtaacgagtgtgggaaagcgtttgcgtatatgtcgtgtctggttaagcataagagaatacacacaagggagaaacaagaggcagccaaggtggaaaatcctcctgcagagaggcacagctcattacacaccagtgatgtcatgcaggagaaaaactctgctaacggggcgactacacaagtgccttctgtggcccctcagacatcattaaacatcagcggcctcctcgcaaacaggaacgtagtccttgtgggacagccagtggtcagatgtgcagcctcaggagataacagaggatttgcacaggacagaaaccttgtgaatgcagtgaatgtggttgtgccttccgtgatcaattatgtcttattttatgttacagaaaacccataggaagaaaactcagatctatgtggaaaagggttgagcaaaaatttgtagttcattatgtggccgaaaagcatacactgagagaacatgtataaggctgagatagcctgataaactcatcctattaaaatgtatgctgtgatacacaggcaaatttgatgttaacctaagcacatacacagcaattgctcgactgtgtcaattaaatgagtaaaggaagcccaagtacttttaagtggaggaaatgaagtactgtgaatttttaaaacagatgagataattggtgtcgggagtgttgcagtgactgaaaagcttcataaggggcagttggtgggaaagggctaatactgtaatggtggaatgtgggacacatatgtgtcaattcagtttccttagaccagtgccagtgtggaggattaattgaaaaccaggaccataaactttcagaactttgtattatgcagagggatctgtgaaactagtcaatttgtttcattaaacaaatattttaaaattaaaaaaaaaaaaaaaaaa

SEQ ID NO: 1595 - protein, 532 aa, Homo sapiens
MIQAQESITLEDVAVDFTWEEWQLLGAAQKDLYRDVMLENYSNLVAVGYQASKPDALFKLEQGEQLWTIEDGIHSGACSDIWKVDHVLERLQSESLVNRRKPCHEHDAFENIVHCSKSQFLLGQNHDIFDLRGKSLKSNLTLVNQSKGYEIKNSVEFTGNGDSFLHANHERLHTAIKFPASQKLISTKSQFISPKHQKTRKLEKHHVCSECGKAFIKKSWLTDHQVMHTGEKPHRCSLCEKAFSRKFMLTEHQRTHTGEKPYECPECGKAFLKKSRLNIHQKTHTGEKPYICSECGKGFIQKGNLIVHQRIHTGEKPYICNECGKGFIQKTCLIAHQRFHTGKTPFVCSECGKSCSQKSGLIKHQRIHTGEKPFECSECGKAFSTKQKLIVHQRTHTGERPYGCNECGKAFAYMSCLVKHKRIHTREKQEAAKVENPPAERHSSLHTSDVMQEKNSANGATTQVPSVAPQTSLNISGLLANRNVVLVGQPVVRCAASGDNRGFAQDRNLVNAVNVVVPSVINYVLFYVTENP

SEQ ID NO: 1596 - DNA, 4033 bp, Homo sapiens
ggatagtcgccgtcaggcactgaggaggccgagagatgaggccggagcccaccaagttctgggaagttctttctgacacaagtaagataacatctctgccatgcccacaggtgctgagaacaagagaaatcaagtgaaggaaggaggcggagtttccaagacttgggtgtcatcatttctggggacatccttgattggagattgaagtttttgaaccgaaatttagagctgattcagaagagacaaatacagaacgtccaagttagcagtcgtttcccaaatttaggagacaatgatgcaggcccaggaatccctaacactggaggatgtggctgtggacttcacctgggaggagtggcagttcctgagccctgctcagaaggacctgtaccgggacgtgatgttggagaactacagcaacctggtggcagtggggtatcaagccagcaaaccagatgcactctccaaattggaacgaggagaagaaacttgcacaacagaagatgaaatctactctcgaatctgttctgaaatcaggaaaattgatgatcctctgcagcatcacttgcaaaatcaaagtattcagaagagtgtgaaacagtgccatgaacagaatatgtttggaaatattgttaatcagaacaaaggtcatttcctgctgaagcaagattgtgatacgtttgacttacatgaaaaacctttaaaatcaaatttaagttttgaaaaccagaaaaggagctctggcctaaagaactctgctgagtttaatagagatgggaaatccctttttcatgctaaccataaacaattttatactgaaatgaagtttcctgcaattgcaaaacctattaataagtcccagttcattaagcaacagagaactcacaacatagagaatgcccatgtatgcagtgaatgtgggaaagccttcctcaagttgtctcagtttattgatcatcagagagttcacactggagaaaaacctcatgtatgcagtatgtgtgggaaagctttctccagaaaatccagactaatggaccatcagagaactcatacagaactgaaacattatgaatgcactgaatgtgacaaaaccttcctcaagaaatcacagctcaatatacatcagaaaactcatatgggagggaaaccttacacatgtagccaatgtgggaaagccttcatcaagaagtgtcggctcatttatcatcaacgaactcatacaggagagaaaccccatggatgcagtgtatgtgggaaggccttctctacaaagttcagtctcactacacatcagaaaactcatacaggagaaaaaccttatatatgtagtgaatgtggaaaaggcttcattgagaagaggcgtcttactgcacatcatcgaactcatactggtgagaaaccctttatatgcaataaatgtgggaaaggcttcaccttgaagaacagtcttatcacacatcagcaaactcatacaggagagaaattatatacatgtagtgaatgtggaaaaggcttttcaatgaagcactgtctcatggtacatcaacgaactcatactggagagaaaccttataaatgcaatgagtgtggaaagggcttcgctttgaagagcccactcatcagacatcagcgaacacatactggagagaaaccctatgtatgcaccgaatgtcgaaaaggtttcaccatgaagagtgacctcattgtacatcagcgaactcatactgcagagaagccatatatatgcaatgattgtggaaaaggcttcactgtgaagagccgccttattgtgcatcagcgaactcatactggagaaaaaccctatgtatgtggtgagtgtggaaaaggctttccagcaaagatccggctaatgggacatcaacgaactcatacaggagagaaaccttatatttgcaatgagtgtggaaaaggcttcactgagaagagtcatctcaatgtacatcggcgcactcatacaggagagaaaccctatgtatgcagtgaatgtggcaaagacttaactgggaaaagcatgctcattgcacatcagcgaactcatactggggagaaaccttatatatgcaatgaatgtggaaagggcttcaccatgaagagtactctcagtatacatcagcaaactcatactggagagaagccatacaaatgcaatgaatgtgataaaaccttcaggaagaagacatgcctcatacaacatcagcgatttcacacaggaaagacttcctttgcatgtactgaatgtggaaaattctctttgcgcaaaaatgatcttattacacatcagagaattcacacaggagagaaaccgtacaaatgcagtgactgcgggaaagccttcactacaaaatcagggctcaatgttcatcaaagaaaacatacaggagagaggccctatggatgtagtgattgtgggaaagcttttgcgcacttgtctatccttgttaaacacaggagaattcacaggtagtcattttgggaaagcctcttgccagatgtaggcccttaagatatctgcaaagaagagtaatttcatgaatgcagactacatggttgtttatttagtgatcagttacttcatgttttgtgtcagagaaaacatgtacaaaacatttgagaaaatattttaggacattatgtctaaaaattgtatactgagaaaaatcctatgaatgtggcagactataaaagcctttggtgggaagataaaccccctcagaagtgatcatagatcatgaataaactactaattcgtggaaatgtaataattataggaacgtctttgcccaaaaataaaacttcaacagattgagagagttcacactggagaaatactttcctctggcaaacccctgtggcagggttttcagtaaaatgttttgcctcatcgtgtgctaggaaataatgcagaaaaaacttatgaaaacattcaatgtagaagacttttaggaaaatatcagagaatttaatgaaggaaagaagccttggcaaaatgatggatgagagctttctgtcacaattctaaccttaacagataatatgcctcatgtgcatttgggaacaggatagcttgagccatattcctagttgccttgtcactgattttatacattttaaattgtgacttcctctaatcacgaactaaaatttaatattgtatataataccggagtattttatgcctgcctcattttattatatgattagctcctgcatttctttggttctaagtttgtgttatttcagaataactaaagtacttcagaatgaaactggatacagtatattcagttcataagtgtaattgaccatacttgaatatgtttaagtttataagtaacatcaggtgttatgaaattaatataaataagatgtttttgtaagtttttattttgaaataagtttagattcacaaaatcttaccaaaatattccagagttcttgcccttaacccagcttcttccaaagataacaacttacataagcatagttcattaccaaatacaggaaagtgaaattgttacaatactgttaactacagaatttatttggaaatcaccagttttaacatgcatgcatttttgtttgttttttatatgtagctttaagaaatcttaacacatatattgattcatgtcaccaccaccgtaatcgagattcagaatgttgcatcaatgcaaactccctcatgctccttgtttatagtcacaacctctcctcagccctaacccttggcaatcagaaatcttttcatctttagttttgtcattagtagcatgttataaaaatggaatcatacagcatgtacccttttggtattggctatttcaactaaagcagattaacctgaaatccatccaagttgttctgcatatcattgttctgtttttattggccactaataatctatgatacgaatataccactatttgtttattcacccactgaaggacattagttttgttcccggtttttcttactgttacaaataaaaatcctatgaacatttgtacac

SEQ ID NO: 1597 - protein, 731 aa, Homo sapiens
MMQAQESLTLEDVAVDFTWEEWQFLSPAQKDLYRDVMLENYSNLVAVGYQASKPDALSKLERGEETCTTEDEIYSRICSEIRKIDDPLQHHLQNQSIQKSVKQCHEQNMFGNIVNQNKGHFLLKQDCDTFDLHEKPLKSNLSFENQKRSSGLKNSAEFNRDGKSLFHANHKQFYTEMKFPAIAKPINKSQFIKQQRTHNIENAHVCSECGKAFLKLSQFIDHQRVHTGEKPHVCSMCGKAFSRKSRLMDHQRTHTELKHYECTECDKTFLKKSQLNIHQKTHMGGKPYTCSQCGKAFIKKCRLIYHQRTHTGEKPHGCSVCGKAFSTKFSLTTHQKTHTGEKPYICSECGKGFIEKRRLTAHHRTHTGEKPFICNKCGKGFTLKNSLITHQQTHTGEKLYTCSECGKGFSMKHCLMVHQRTHTGEKPYKCNECGKGFALKSPLIRHQRTHTGEKPYVCTECRKGFTMKSDLIVHQRTHTAEKPYICNDCGKGFTVKSRLIVHQRTHTGEKPYVCGECGKGFPAKIRLMGHQRTHTGEKPYICNECGKGFTEKSHLNVHRRTHTGEKPYVCSECGKDLTGKSMLIAHQRTHTGEKPYICNECGKGFTMKSTLSIHQQTHTGEKPYKCNECDKTFRKKTCLIQHQRFHTGKTSFACTECGKFSLRKNDLITHQRIHTGEKPYKCSDCGKAFTTKSGLNVHQRKHTGERPYGCSDCGKAFAHLSILVKHRRIHR

SEQ ID NO: 1598 - DNA, 4627 bp, Homo sapiens
tcacggtctttaccgctcagcttcccggagtccgcgcaggagcgcgtctgaataggaagcgttttcggacgtggatgcggcgttttgtcgctgccagtggtgtctggagaggttcgggctcggtcctcaggtcctggctcccagaagcaaaataactcaagtgaagcaatgaaggaagaagaaggaggttgctggccttggatatcataatttctggggacaactttaagtggacactaatatttctgactaggaaaacttcaaaaacttcatggcaaatgcagaagagacaaagacgtatagtccatgttatccactattttctgagcacagaagaaaatgatcaagacccaggaatcactgaccctggaggatgtggctgtggaattcagctgggaggagtggcagctcctggacactgctcagaagaacctgtaccgggatgtgatggtggagaactataaccacctagtatcactggggtatcaaactagcaaaccagatgtactctccaagttggcacatggacaagaaccatggacaacagatgctaaaattcagaataaaaattgtccaggaatcgggaaagttgacagtcatctgcaagagcactctccaaaccaaagacttctgaagagcgtgcagcaatgcaatggacagaatacacttagaaatattgtacatctcagcaagacacattttcctatagtgcaaaatcatgatacatttgacttgtacagaaaaaatttgaaatcaagtttaagtttaatcaaccagaagagaagacatggaataaataaccctgttgagtttattggaggtgagaaaacacttctacatggtaagcatgaacgtacgcatactaaaactagattttctgaaaatgcaaaatgtatccatactaaattccaagtcttcaagcatcagaggactcagaaaattgagaaaccccatgcatgcattgaatgtgagcaaaccttccttaggaagtctcagctcatttaccatgagaacatttgtatacaagagaatcctggaagtggtcaatgtgagaaattatccagaagtgtcctgttcactaagcatctgaaaactaatacaacagacaaaatctgtatacccaatgaatatagaaaaggctctactgtgaagagtagtctcattacacatcaacaaacccatacagaagagaaatcctatatgtgcagtgagtgtggaaagggctttacaatgaagcgctatctaattgctcatcagcgaactcatagtggagagaaaccttatgtgtgcaaagaatgtggaaaaggtttcactgtgaagagcaatctcattgtacatcagcgaactcatacaggggagaaaccctatatatgcagtgaatgtggaaaaggcttcaccatgaagcgctatcttgttgtacatcagcgaactcatactggagagaaaccctatatgtgcagtgaatgtggaaaaggctttaccgtgaagagcaatctcattgtacatcagcgctcccacacaggagaaaaatcttacatatgcagcgaatgtggaaaaggcttcactgtcaaacgcactctcgttatacatcagcgaactcatacaggagagaaatcttacatatgcaatgaatgtggtaaaggcttcaccacaaagcgcactcttattatacatcagcgaactcatacaggagaaaaaccctatgaatgcaatgaatgtggtaaagccttcagccagaaaatatgcctcatacaacatgagagatgtcatacaggaaagactccctttgtatgtaccgagtgcggaaaatcctattcacacaaatatggcctcattacccatcagagaattcacacaggagagaaaccttatgagtgcaatgaatgtggaaaagccttcaccacaaagtcagtactcaatgtacatcaaagaacgcatacaggagagaggccgtatggatgcagtgattgtgagaaagccttctcccacttatcaaaccttgtcaaacataagaaaatgcacacaagagaaatgggtagaatcagtcaagttgaaaactcctgtaatggagagtcacagctccttccttataagtgaactcatgcagaagaaaaccctactagtgccgtgactatggaaatgccttttgtggcaactcagacttcattaaacatcagtgtgtttctagccaattggaacataaacatggtgctgcctgttgacagatgtgtgtctgtcctcaggaggtgaaataatttgccctagagatcaatttgatgaatacagtaaataaggtagtgcctttagtggtcttttacctcatattttctgtcaatgaaaatacgttgaataaactatattaatgtggagatgttttgagcaataatttctgctcatatgtctgaaaagtatacagagataaattctgtgaatacaaagactaagaaaagtcttctgtggaaagatagactttattatcaggtttcatcatagatttcaacgtaagtgagcttattgttgatagaaacatgatgaccatgacaaagtctttactcagaaatatgacctcagtgagtgtcaaagtttacactggaaaataactttaaggtgacagtattgatggcaggatttcagcgacgcactctgcttcatcatttgtcaggagatcacatagaaagtaaaattgttccgaacatgctatcaaataaatgtggaacacctttagcaaactatcaacagctcatgaaggcatgaaatgtgaaaatgatgaatatttgagtgctttttcttaataagtataaccttaaacatcagctaatacacctggtgtgcattttcagtcaggataccttaatcctcatttctagttgccttgccaatgattccataatatactgtctcattactgtttatttttactgttgtgtaaaattgtggtataatgagaaatacatttggtctttgttcctggttcctggcatagagctcctaaaacgcttagaatttcatgagtgataagagttttttggttttgttttgtttttgctgttgttgttattcatagcactgcccttttaattacacctgattatactactgaagtgacttatggttgctcccctagacagcctcagaatggggctgttctctaggaagatcaagtaactagaggatggagactttgtgccccatttctcccacctcctggaaggggaggggtgctggagattagattagacaatgagattaagagaactccaaatagcccaagagggtggtgcacccccaacttcataggggtagaggctcctgagattaggagaaccctttttaggctttactctatgtacctcttcatttgagtgttcatttgcgtcctttataaccagtaaaacaaagtacgctgttttcttgagttttgtgagccctgtagcaaattatcaaacctgagtagggcagtgggaactcggaatttatcaccattcagaactgcaggttgtccttgtgagtggcatctgatgtgggggaagtcttggactgagccccttaacttgtggagtctgcactaatttagactgcactaactaacttgcactgcactaacttggactgcactaacttgtggagtctgcactaacttggagaagttagtgtcagaattgaattatagaacacccagttgttcagaattgaattgtagaacacccaattggtgtgggagaattagagaatttatttgtgtcagaaaatactccagaacaaccaccccatattatgattagctcttttcctttctttggctctgagcttaattgtacattaagcaaacttaagtagaaaagaaactgaatatgttaaatatattaacaacatatttggacttgcttaactaagattatagagatgatcagtttataaaaccaccttcaacttaaataaatttgaactcgaaattgcaaaagcagtctagaggctttgctagtatccttcaaccaatttctagtaaaaatatcctatataaccataattatcaaaaccagaaaaacaacattggtaggatactataaagtactaatcttattttggatttgacgaatttttacatgtttttttcttttttagtttgtactctaagaagttgtattacatgtacagattcgtgtaaccactgcaaccacataaaactaatgaacacaaagtccctcatgctacctttttatgcttacactccatccaaacctaactctgccaaccacttttctcctatcagtataatttcatcatttcatgaatatgataaaaataaaattgtttttgtaaatggtttttataaattttatataaataagttatatgaatttttattgatagagagtatgtaagcttttggcatttttgtcactcagcaaattactcctaaggtttatatgagttgatgaatagttgttttattatttttttttaccaccatgtatctaaccagatgaaagttgtttatatttgagagtagtatacatatttgatgtagtagtttatccattcacctatgagatatatttgcactgttttcctggttttaagtgctataaataaagatgctgtgaaatctaaaaaaaaaaaaaaaaaa

SEQ ID NO: 1599 - protein, 585 aa, Homo sapiens
MIKTQESLTLEDVAVEFSWEEWQLLDTAQKNLYRDVMVENYNHLVSLGYQTSKPDVLSKLAHGQEPWTTDAKIQNKNCPGIGKVDSHLQEHSPNQRLLKSVQQCNGQNTLRNIVHLSKTHFPIVQNHDTFDLYRKNLKSSLSLINQKRRHGINNPVEFIGGEKTLLHGKHERTHTKTRFSENAKCIHTKFQVFKHQRTQKIEKPHACIECEQTFLRKSQLIYHENICIQENPGSGQCEKLSRSVLFTKHLKTNTTDKICIPNEYRKGSTVKSSLITHQQTHTEEKSYMCSECGKGFTMKRYLIAHQRTHSGEKPYVCKECGKGFTVKSNLIVHQRTHTGEKPYICSECGKGFTMKRYLVVHQRTHTGEKPYMCSECGKGFTVKSNLIVHQRSHTGEKSYICSECGKGFTVKRTLVIHQRTHTGEKSYICNECGKGFTTKRTLIIHQRTHTGEKPYECNECGKAFSQKICLIQHERCHTGKTPFVCTECGKSYSHKYGLITHQRIHTGEKPYECNECGKAFTTKSVLNVHQRTHTGERPYGCSDCEKAFSHLSNLVKHKKMHTREMGRISQVENSCNGESQLLPYK

SEQ ID NO: 1600 - DNA, 3346 bp, Homo sapiens
cttgtctcccagacagtggctcagccttcaggactctcttccagcatggccgaagacacctattcacacaagatggtaaaaacaaatcataggcgctgtcgcacaaaattcacagaagaacagttgaaaatcctcatcaataccttcaatcaaaagccttacccaggttatgctaccaaacaaaaacttgctttagaaatcaatacagaagagtccagaatccagatttggtttcagaatcgaagagctaggcacggattccagaaaagaccagaagctgagactttagaatcaagccagagccaggggcaagatcaacctggtgtggagtttcaaagtagagaagccagacggtgtcgtaccacctacagcgcctctcagttacacactctcatcaaggcatttatgaaaaacccatatcctgggattgattccagagaagaacttgctaaagaaatcggtgttccagagtcaagagtccaaatttggttccaaaatcgaagatctagattacttctccagagaaaaagggaacctgtggcgtccttagaacaagaagagcagggcaagattcctgagggactgcaaggtgcagaagatacacaaaatggcaccaacttcactagtgactctcatttctctggagccagaacgtggtgaacacagtcaaattcagtgtacttgataatatcaactggaccccaaatctgtctcacggtcttcctgggagtctatccttctgctgaaactgcaagctaagccttctgaagatggtaaaggacttggccagatgtggtgggtcacacttgtaatcccactactttgggaggccaaggcaggaagattgcttgagctcaggagtttgaaaccagcctggacaacatatagcaagactctgcctctattataaaaaaacaaaataaatgaaaaggactgtaggaggcagagacgggtacagggggtaccacactaccctgttgacacagcctagatccagagttcagaagaccttgagacaatgaaaataaacttggtaataatcttttttcaatcatcacagtaattattgatttgtacaaaaatcacttgacgtcataaccttaaagtgacactgctctgcctatggagtagccgttcttttattcctttactttcttaacaaatttgctttcacttaaaaaaaaacctttaagttcaaggaagaacaagatatatacttcatctcaaaagaatctactcacacacacttattaattacaaaaggaaaatcagtaattttgcagcagagaaatatggccaactccaccttaaccaagtggctgaaagtcactgcaccagtaatggcacaaaccaatgtgagatgcttcctgatatgatacagtaagaaggccacagtctcttctgcgtgttagtgacaaaaagtgggtaagctgaaactaataattaggcaatgtcaagtgaacacaaattcaggatgacagactgcaaagtaacatccatgtattcttcaacaatggattgatcagggctactcagaaggctgaggcggaaggattgcttgaggccaggagttccagatcaacctgggcaacatgatgagaccccatctctacaaacaattttttaaaaatgagccaggtgtggtagtgtgcatctgtagtctcagcaacttaggagcctgaggcaggagaatggtttgaacacagggatggtgaggctgcagtgagctatgatcgtgctactgcactccagcctgggcgacacagcaagttcttgtttccaaacaacaacaaaacaaaacaaaaaaaaaaccggatagaataatgaccaaaaaatggagaaaaagtaggctgactcaggaaacacttagaaagtacagccatacctcaaagatattgtggattgggttgcagcccaccacaataaagcaaatattgctataaagtgagtcacaaaaatggttttgtttccttgtgaatataaagttacattggctgggtgtggtggctcatgcctataatcccagtactttaggacatggaagggggaggatcacttgagaccaggagttgtgaggtcaacctgggcaatatagggagatcctgtctctatttaaaaaaagaagttatggccgggcgcggtggctcatgcctgtaataccagcactttgggaggcggaggcgggcagatcgcgaggtcaggagatcgagaccatcctggctaacgtggagaaaccccgtctctactaaaaaaaaaaattacaaaaaattagccgggcatggtagcaggtgcctgtagtcccagctactcgggaggctgaggcaggagaatggcgtgaacctgggaggcggagcttgcagtgagccaagatcgcgccactgcactccagcctgggtggccgagcgagactccctctcaaaaaaaaaagttacatttacactacactacactgtagtctaataaagtgtaaaatggtgttatgtctaggaaacaaggcacatactttaattttaaaacacttgatgctggctgggtggggtgactcacgcctgtaatcccagcactttgggaggccgaggcaggtggattgcttgagctcagcctggacaacatggcaaaaccccatctattaaaagaaaaaatacctgatgcccttatttgaagctccattattttttaaaaagaaattatataaaaatactttattgctaaaaatactaataatgatcttagccttcagggagtcgtaatcttttttgctggtgaggagtcttgcctcaatgtcattggctgctggctgataagggtggtggttgctaaatattgaagtggttgtaacaatttgttaaaacaacaatgaaatttaccacattaactgacgcttccttccacgaaagatttctctggaacatgagatgttgtttgatagcattttacccataatagaacttctttcaaaattggagccaatcctctcaaaccctgccactgctttcttaactacgtgcgtcaatattgtaaatcctctgttgtagtttaaacagcgttcacagcatcttcaccaggagtaaattccacctcatgaaaccactttcgaggctccttctggactgtggcgttctttccaggctaccttgtggcaatttgagagtctggcatcgttttccgccaggacccaaagatccaggaggcacttgtgactagcctgccaatggacccatgacaaaagtttaacctaaccttcatccgagtcttcgcaaatgctcactgaagaaaattcctaagacaattcaggggcctctcataccctctactgtgagatgttactaaagaaccttagtaactt

SEQ ID NO: 1601 - protein, 204 aa, Homo sapiens
MAEDTYSHKMVKTNHRRCRTKFTEEQLKILINTFNQKPYPGYATKQKLALEINTEESRIQIWFQNRRARHGFQKRPEAETLESSQSQGQDQPGVEFQSREARRCRTTYSASQLHTLIKAFMKNPYPGIDSREELAKEIGVPESRVQIWFQNRRSRLLLQRKREPVASLEQEEQGKIPEGLQGAEDTQNGTNFTSDSHFSGARTW

SEQ ID NO: 1602 - DNA, 12171 bp, Homo sapiens
ttttcttctgcacttctgtctggagaggtctgtagccactgagggccccggtcggggccgctttgcaggtccctagtcaggaccgagcaggggagtaggataggaatccccgccgcacctttgtacgagcctgaccccttccgtgggtttgttcctgggtcgccgtcaagctgcggtctctcctcccccgcccttcagccccgcggtctccaggggcggcgccctgggtctggaacgcggttgccaccgaggaggcggcggccctgcgtctggaacgccgttgccaccgaggaggcggcggccccgagcgcgcctggaagccccgggcaaccggccagggtcgggcacaggtggggtccgtcaggccgcccggggctcctctgtcccagctctgcggcccagggggtgacgtgatggcggcagcggtgctgacggaccgggcccaggtgtctgtgacctttgatgatgtggctgtgactttcaccaaggaggagtgggggcagctggacctagctcagcggaccctgtaccaggaggtgatgctggaaaactgtgggctcctggtgtctctggggtgtcctgttcccaaagctgagctgatctgccacctagagcatgggcaggagccatggaccaggaaggaagacctctcccaagacacctgtccaggcgacaaaggaaaacctaagaccacagaacctaccacttgtgagccagccttgtcagagggaatctcacttcagggacaagtgacacaaggaaactcagtggactcacagttggggcaagccgaggatcaggatgggctatcagaaatgcaggaaggacacttcagaccaggaatagatccccaggagaagtctcctgggaagatgagccctgaatgtgatggtttagggacagctgatggtgtgtgttcaaggattggacaggagcaagtctctccaggagatagagtccgtagccataactcatgtgagtcaggtaaagatcccatgattcaggaagaggaaaataactttaaatgcagtgaatgtggaaaagtatttaacaagaaacacctccttgctggacatgagaaaattcactctggagttaagccctatgaatgcacagaatgtgggaaaacctttattaagagcacacatctcctgcaacatcacatgatccacactggggagaggccctatgagtgcatggagtgtggaaaggccttcaaccgcaagtcataccttacccagcaccagcggattcacagtggagagaagccttacaagtgcaatgaatgcggaaaggccttcacccaccgctccaattttgtcttgcataacaggagacacactggagaaaaatcctttgtgtgcacagaatgtggccaagtctttcgacataggccaggctttctccggcactatgttgtccacagtggtgagaatccctatgagtgcttggagtgtggcaaggtcttcaaacacaggtcatatctcatgtggcaccagcagactcataccggggagaagccctatgagtgcagtgaatgtgggaaggtcttcttggagagtgcagccctgattcaccactatgtcatccacactggagagaagccctttgagtgcctcgagtgtgggaaggctttcaaccaccgatcctacctcaagaggcaccagcggattcacactggggagaagcccttcgtgtgcagtgaatgtggaaaggccttcacccactgctctacttttatcttgcataaaagggcccacactggagaaaagcctttcgagtgcaaagagtgtgggaaagcctttagcaatcggaaggacctcattcgccacttcagcatccacactggagagaagccctatgagtgcgtggagtgtggaaaggccttcacccgcatgtcgggcctcacgaggcacaagcggattcatagtggagagaagccctatgaatgtgttgagtgtgggaaatcgttttgctggagcacaaacctcattcgacatgccattatccacactggagagaagccctataaatgtagtgaatgtggaaaggccttcagtcgcagctcgtccctcactcagcatcaaaggatgcatactgggaaaaatcccatcagtgtaacagatgtgggaagaccttttacaagtggacaaacctcagttacccttcgagaacttcttttagggaaggactttttgaatgtaaccactgaggcaaatattttgccagaggaaacatcttcctctgcatctgatcaaccataccaaagagaaaccccacaagtgtcttcactgtgagaaaaccttctgttgctgaatattacttgtcatctgaagagtcatattagaaattcgttcagtctagagccttattctccatctgataatttatcctggagagagacccagtggttattgtgcacataggagaaccttcagctgcatctttctccttagtttacagtgcaattttatctcaggaattatttttaaaaggaggaggggacatagaaaaaatgaaatgcaagcacacatcttttcaggcttctctgccaagcctatggcgctttgtcatggatttcttagtgtatttgggggaagggaaatgtttcaaggtaaagaaccttgaccctttatgtgcttgtatgtacatttattgctatccagtgtcagaacagttagtttaggaaaagtatgcaaactttaatcgcacatcttctgtattccacaatagtacttactcttgagaagcataactttatgacaacttagggggcttgagccatgaaatactcacgtttaagtcagtaaggatacacatgttaacattcaggcttttgtcttgatgcccgtcttttggtttacgtcatcattgtagccatatggtaaatttttatttgttaaatttttaaaaattacttagctcaaaatgtcagtggtaaatttttaaattgagtaaagtgattcttctttgctcttatttaaaatcgacagcatttctagttcctttgacattccatataatttttaggattagtttgtacttatttacaaaacagtcttgttcagatttttacagaaattgagttaagtctgtggattaatctgttaagaattggtatctttactatgttgggtcttgtagttcatgagtgcaggagtaggcctcttaatttataatagttaagcattccttaaagtatttcattaatgttaaaaattttcagcgtatagatccctatgcatttttgttagaatttgcatcctagggtgcttttttgtttgtgtgtgtgtgtaatttgagtgattgtaaatggcattgatgtttgaactttgaattgcacacaatttttggtagtatacagaaatataatatttttggacattgttttgctaccctgcaaccttattgagttcacttattatttttagctatttctttcgacagaatccttggaattttctatatagaaatgtcatctgcaaatacagaccattttttatctttcatcttacctgtaatataccttttatttcctttttgtttgtcttattgcattgcacaagctgggacttccattatagcgttgaataggaatagtgagaaaggccatccttacctggttcctgatagtaggggggacaatgttcagttttttgtttttttgttttttgtttgagacagggtctcgctctgtcacccaggctggagtgcagtggcacgatcttgtctcaccatagccttaagttcctgggctcaagtgatccccccacctcagccctcaccaccccccagtagctggtactacaagcatgcaccaccagtcccagctaatttttgtattttttggtagagacagggtttcaccatggtgcccaggctggtcttgaactcctgggctcaagcaacctgcttgcctgggtctcccaaagtgctgggattacaggcgtgagccacagtgcacagcatgttcagtttttcatcatgaagtataatgtaagttttataaaacatatgtcctctataagggtaaaaaatttcctctgttcccagttttctgagactctgtgttgctatgaataagtgtggaattttgttcagtactttttctccaccagttgatgtcattatgctattttccttctacatcctattgatggaatgtattgctttgatcaagttttgaatattgagccagccttgcatccttagaataaaccatacttgtttgtagagtataattgtttttatatatcatttgacatcattccctttgtttgtattttgttgaggaaatattcctctaatttattggctaataatgtgtagttcttttttcttttgtttcttatgttctaaatgtcttatgtgtggttttgatgtctaggtgatcttgacctttcaacatgaattggaaggagttctcttctaatttttggaagactgtgtagaattggtgttatttgttcttgtcatgtttgatgacctctagtcaaccattgggccagagatttttcttctggaggcttttaaattacatatttattttattggataggtagaactattcgaagtatctatttcttgtgtaataaattttgatagtctgtcctgttgaaggaatatttcatctgtatttgtagcactcccttattcttttgatagcaggatctgcacttctttttatttttaatatttaaaatgtgcatactcattttatgattgagtcttcttagacatttatcagttttattgcgcatcatgctgaaagatgtaatttttgcttcatctctcacttcagagaactagcactttatattaatgatttgtctctattcttgatttctttgatttctgctctgatcggtattatattccacttgctttggttgtatttggctctttctaacttttcaaggtggggttttagattattgatttgagatttttttgcttttttaatgtaagcattacattgtataaatttacctcatatcactattggtttgatcccacaagttttaatgttttcattacattttaattctaatagtttttattttttgagacattctctcttagccatgaattatttaatagtatgcttaattttctggtgtttggcatatttgttactgatttctaatttgttccatgtttgatctgactgtttaaatgtgttaacatttttttatgacccaggatagggtctatcttgtttcgtatagctgcttgaaaagaatgggtgttctgctgttactgggtggagtttctataaatgtctctatgatcctgctcattgttattcaagtcagctatgtccttgctgattttctgtccagcatttctgtcagttgctgagaggggtgttgaagtcctgaacataggccgggtgcagtggctcacgcctgtaatcctagcactttgagaccactaaggcaggtggatcacctgaggccaggagttcgagaccagcctggccaacatggcaaaaccctgtctactaaaaatacaaaaattagccaggcatggtggcgtgtgcctgtaatcccagctgctggggggctgaggcaggaggatcagttgaacgtgggaggcagaggttgcagtgagctgagatctcaccactgcactccagcctgggcaacagagcgagactctgtctcaacaacaacaacaaaaagtcctgaacatgattgtggaagtgtgttgctctttcaagttctatcactttttgtttgcaaagttcaaagctgtattgtttggtacatatacatgtaggtttgccaagtctttgtggtgaattgactcttctgtcattatgtgatgtcatttttttgccttttaatagtcttgtcaatactttacctgatgttctcatagtgactcctgcatattttgattaatgtttgcatggttaatatttcttcattttattttaaagcttacctgtatcattacttatgaagtcagtttctttgaacagcatatactcaggccatgctttttttattcattctgcatatgtctctcttaattggtatgttgaaatgatttacattaaaataattattgatattttagggcttaagtgtgcccttaaatgatttttgtgttcttttttattgttcctctgttatttggggttgtttactagtcttcctataggttacttcaccttttttttttttaataatttgatttgatacatatgtagtgttttttagtatagatcctccttgacttatgatggggttatgtcacaataaacccattgcaagttgaaaatactatgtcaaatatgcatttaatacacctaccctgctgaacatcatagccgatcttgccttcagaatgctcagaaaatttacattagcctgcagttgggcaaaatcatctaacacaaggcctactttataataaagttactgcaaagaattttaaataaaaattcaagtgtggtttctactgaatgcatgtcgcattcgcaccattgtaaagtcaagtagtaagtcgaaccatcctaagtcagggactgtctgtatatatctgcattttttagtgattgttctactattacagtgtaaatatataacttatgacagtttaataagttatcagcaatttagcactttacttccattaggttcctttagcttacctactaatgtaactatcttaagtaatagtaattcctcttcaaaaattgagcgctatgttgcaagatgtaatttttcttttccttttttttgagaccaagtctcactctgtcacccacgctggagtgctgtgatgcgatctcggctctctgcaacctctgcctcccgggttcaagcaattaactgcctcagcttccctagtaatggattacaggcgcccgccaccacgcctggctaatttttgtatttttagtagagacggggtttcaccatcttggccaggttggtcttgaactcttgacctcatgatccacccgcctcggccccccaaagtgctggggttacaggtgtgagccactgcacccggccacaagatgtaatttttactttatctctcacacgtattttacaaaacgtcatgagaaacattgtctcttgaccttttttttttttttttttttttaaagagacagagtctcactctgtcacccaggctggagtgcagtggcacgatcttggctcactgcaacctccgcctcctgggttcaagcgattctcctgcctcagcctcctgagtagctgggattacaggtgtgcgccgccacacccagctaattttgtatttttagtagagacggggtttcaccatgttgctcaggctggtctcaaactcctgaccttgtgatccgccaaccttggcctgtcgacctctttacccattccattgttcattcttctttcttgaaatcccaaaccttctattaacatttcttttcagttatacactgaactttactgtagcctttcttctagagtaacaaatgttctttgttttccttcctctaaagatgtctttatgtttccttcattcccaaagaatatttttgtggaatataagattcagagttggcagttgttttcttttagacttcagagatgtatctctctgttctgtacattattgtttaatataagaaacctactagcattcaaataatcattccctattttacaatgcatcagttctgtcaagcttcattcaaagtgtttttcattgtctctagtgttcagaagtttggctgtgatgtgcgtggcatggaagtttttgggtgtattctatttggcgctccctggtgcttgcccagctttttgatctgtaggattatgccttttgcaaaatttggggaactttcaactattatttcttcaaatattttttcaccccccagtcttgtcttttttagggacttcaataacatgagtggcagatcttgttttacactcccatgggtccttcaggctctcatcttttttctttttccagtctattttctgtcttgttaatattgattaatttttattgaccttccatggtcctcactgattgttttctttgtcatacctaatctgttgagtttgtgcagtgagttttcattttggttttgtattttccagttgtttaatttccattgggtgggttcttttgtacaccttctgtttctttgcttattttttaacgccaaagaaagactctcagagaatagacaactatattccaaagtcatggttctctggtggtttgtcttgacatttgaatagaaatgttaaactatctgggggaatagaaagcccacagtcttctgagttgtgctacaccaatatttctatgaacagatcttacaactgagagtgatctgcagatttttcagagtcatgttctccatggaatgtttgtaaaattccctagctctctgcactgagctgagatcgtgccactgcactccagcctgggcaacagagcgagactccatctcaaaaaaaaaaaaaattctctagctctctatgccttgttgtatcctcaggaaggagtcacctctcttccaggatcactcttgccttttgttattggacacattttcctacctcctgcccagtcttttttaggctctctgtcatacttcctcgcctagtctttaacttgtctctgataaccagatttttcccccataatctgtatctgtattcaagtctctatcctcatccccaaatggatttcaccccgcttgtccatcagtctctgcccatttcttctgtctcccacagacatggtctgtgtagttgttctgcacactacccgtcctcgccccttctcatttccctcactccacggacagctacaggagggcttccatcatttgtcctcttacttccttgttagaactttgtgctgctgaccaccactctgaaccaaaacttctttcttggttcttgaaagttgctgtctttctcctccagagggtctgtgtcttccttccaactcttaaacatttttgtttcccagaatccatcattggccattgctttttcacttgccatgagctctgtgaatgagatggttcctgctgaagacatttactttcaatgatctacagaatttcccaaatctatgtctccagactggatgtttctcacgtctgtggcccactgggcatcttctgcactttctctgcatttgtaaacactgagcctgtatgcgtgtctatgtggccatggccctggccgtggggatgcacccataattataatgagagcaggtgaatgtcatgtggctatgtatgagacattgttgtgaatgttttacatgcatcagctctttcaacatttacagcatctgtgtgtggtaggtaatgttgtttccttcattttgcagagcagaatatagataggctcaggttaagaatttgcccaaggttacacagttatgaagtttggatttaggaatgggaggccacgtagactggcttcagaattcatgtctttaaccactttattgcttctcatgttggggggtttgttttctggtcactatttttactaaagttgattcaacaatgctataatctgttactctcattcgacaatacatcttgactgtttcttcaacttgaggaaggtaaaccaaagccactctttaatgggtgcaaatatctgttgtaactatgtagaagatacagtgtctgggtttgaggacaggggagtgggaaaactgagtagggaagcggtaagacatgcatctggctttaggagtgtttgaagtgcctaaagatcagggtgaatttcccaaatttgaatcttgttgcccaagccacattgcaaccacctctttttctcttacctcgtccccacatccaggcactgccccattctgttcattccacctttttttttagtagaccctccatatatgtgtgtgttttggtgaatggccacacacagcaaagttatttttattgcaattttgttgttgttgtttgagacacagagtctcatactctgccacccagactgaagtgcagtggtgcgatctcagttcactgcaacctccatccccccatgttcaagcaattctcctgcctcagcctcccaagtagctgggattacaggcatgggccaccatgcccggctaatttttgtattttttgtagacacggggtttcaccatgttggccaggctggtctcacactcctgacctcaggtgatccacccgcctcggcctcccgaagtgctggcattacaggcatgagccaccacacccagcctttattgcaatttttggttccctcacagaatgtttaccatgaagctgtgcgtataggtggtaccatgtatgacataccttgacctcaaagataatctacctgggctttttttgtttgtttgttttgagatggagtctcactctgtcacccatgctggtgtgcagtggcgtgatcttggctcacagcagcctctgcctcccgggttcaagcgattctcctgcctcagcctcctgagtagctgggactacaggtgcctgcgaccacacccagctaatttttgtatttttagtagtagtgggatttcaccatgttggccaggatggcctccacctcctgacttcatgatccacccgcctcggcctcccaaagtgctgggattacaggcgtgagccaccgcacctggcctacctgggcttttttggacagatgtacatgattttagaaattgttatgaatgactgtcttgggatcctcaagaacacccccaggtttgacgatttgctgagaagactcaggtctcagcattctgtcatactcaacagctatgatttactgcagcaaaaaaatacaaagcaaatagtaaagggaaaaagccaaaattcagagaaaaccaggcacaatcttctgagtcttgtttcagtgaagtcacaggatgtgccttatttaagttccatctggtacttatgacaacacatgctatatgtccactgggaagcttattagagactcagtgccagggtttttattgggcatgttttctagcacatcccacaattctggacttccagaaggttagcaggggttcagcttttcagctgaaaacgttatccccctttcagctggggggaaaaaaaggcaccgaaaaacagggcagtgagctactcctgttttgggtgggtggagcagtagtaagcctcccaaaatctaaggtcccacactccagcaagggtgaaccttgcaaactcaaaaggatagcagtctccaacctgctgttttatacagtgacttaagtggtactaaaatgctatataagtcaaatttacgtaacattaagcaaataattttttttcagcaaaaaaataatggtcatgactttgtggtgaaggcttatgtaatgattgtaataaattcaggtggctcacgcctgtgataccagcacttttgggaggctgaggcgggtggatcacttgaggtcaggagtttgagaccagcctagccaacatggtgaaatcccatctctacaaaaatgaaaaattagccgggcgtagtggtacatgcatttagtcctagctacttgggaggctgaggcaggaaaatcgcttgaacctgggaggcagaggttgcagtgagccgagatcatgccactgcactccagcctgggtgacagagtgagactgtgtctcaaaaaaaaaaaaaaaaaaaaaatgcctcagttttgttaagaggaaaaagcaaatcctaagttacagtggaacttatgaacaccctagcctagagatttaatttagtgatgaaaaggtacagagagagtctttcaagaaaggacctagtctgctcgcgttctctctctctctctctctatatatatatatgtatatgtgtgtgtacatatggaccacttcaagctacacacacacacacacatatacacgtgtatgaatatatatatatggctataagtggtgcgacttgcaggtactccctttgttcacctttgtaaagatgttattgccagttcagtgtgtatttctatagtatatatgtaaacaatttgtcatccttttgttgctgcttttgaaactagttcatggcttcagtgggggagagatttaaataatatgggtttataatttctgcattattaaatgcagataacttgtgattaaagagtatgttattggaaaaaaaaaaa

SEQ ID NO: 1603 - protein, 627 aa, Homo sapiens
MAAAVLTDRAQVSVTFDDVAVTFTKEEWGQLDLAQRTLYQEVMLENCGLLVSLGCPVPKAELICHLEHGQEPWTRKEDLSQDTCPGDKGKPKTTEPTTCEPALSEGISLQGQVTQGNSVDSQLGQAEDQDGLSEMQEGHFRPGIDPQEKSPGKMSPECDGLGTADGVCSRIGQEQVSPGDRVRSHNSCESGKDPMIQEEENNFKCSECGKVFNKKHLLAGHEKIHSGVKPYECTECGKTFIKSTHLLQHHMIHTGERPYECMECGKAFNRKSYLTQHQRIHSGEKPYKCNECGKAFTHRSNFVLHNRRHTGEKSFVCTECGQVFRHRPGFLRHYVVHSGENPYECLECGKVFKHRSYLMWHQQTHTGEKPYECSECGKVFLESAALIHHYVIHTGEKPFECLECGKAFNHRSYLKRHQRIHTGEKPFVCSECGKAFTHCSTFILHKRAHTGEKPFECKECGKAFSNRKDLIRHFSIHTGEKPYECVECGKAFTRMSGLTRHKRIHSGEKPYECVECGKSFCWSTNLIRHAIIHTGEKPYKCSECGKAFSRSSSLTQHQRMHTGKNPISVTDVGRPFTSGQTSVTLRELLLGKDFLNVTTEANILPEETSSSASDQPYQRETPQVSSL

SEQ ID NO: 1604 - DNA, 1261 bp, Homo sapiens
ccacggctgctcacgacgccgcggatcccgaagcctgtgtagcagtgagacatcagtgaggctgcaggacgagcaggattggaagcgccccggccagaaagtgaccccccacccctttcaggaccctgtgaacgggaacagccatccagagggttcaggaaggcgtccgcgccctcacctcttctccccatgagctcccccagagctgtggtgcagctgggcaaagctcaacctgcaggcgaagagttggctacagcaaaccaaacagcccagcagcccagcagcccagccatgcggcgcctcacagtcgatgactttgaaatcgggcgtcccctgggcaaggggaaatttgggaatgtgtacctggctcggctcaaggaaagccatttcattgtggccctgaaggttctcttcaagtcgcagatagagaaggaaggactggagcaccagctgcgccgggaaattgagatccaggctcatctacaacaccccaatatcctgcgcctgtataactatttccatgatgcacgccgggtgtacctgattctggaatatgctccaaggggtgagctctacaaggagctgcagaaaagcgagaaattagatgaacagcgcacagccacgataatagaggagttggcagatgccctgacctactgccatgacaagaaagtgattcacagagatattaagccagagaacctgctgctggggttcaggggtgaggtgaagattgcagattttggctggtctgtgcacaccccctccctgaggaggaagacaatgtgtgggacactggactacttgccgccagaaatgattgaggggagaacatatgatgaaaaggtggatttgtggtgcattggagtgctctgctatgagctgctggtgggatatccaccctttgagagcgcctcccacagtgagacttacagacgcatcctcaaggtagatgtgaggtttccactatcaatgcctctgggggcccgggacttgatttccaggcttctcagataccagcccttggagagactgcccctggcccagatcctgaagcacccctgggttcaggcccactcccgaagggtgctgcctccctgtgctcagatggcttcctgagccctgtctgcctctgttccctttgtgtgtgttcagggagctctcctggctctgccacctcatttgtctttatttttttctcttttaagatgtaagatgctaattaataaaagctgaatcatttcataccaaaaaaaaaaaa

SEQ ID NO: 1605 - protein, 309 aa, Homo sapiens
MSSPRAVVQLGKAQPAGEELATANQTAQQPSSPAMRRLTVDDFEIGRPLGKGKFGNVYLARLKESHFIVALKVLFKSQIEKEGLEHQLRREIEIQAHLQHPNILRLYNYFHDARRVYLILEYAPRGELYKELQKSEKLDEQRTATIIEELADALTYCHDKKVIHRDIKPENLLLGFRGEVKIADFGWSVHTPSLRRKTMCGTLDYLPPEMIEGRTYDEKVDLWCIGVLCYELLVGYPPFESASHSETYRRILKVDVRFPLSMPLGARDLISRLLRYQPLERLPLAQILKHPWVQAHSRRVLPPCAQMAS

SEQ ID NO: 1606 - DNA, 1120 bp, Homo sapiens
ggaagtacctctctgagcggttggtgccgggtataaaagaaggccgcgcagccacggctgctcacgacgccgcggatcccgaagcctgtgtagcagtgagacatcatggctacagcaaaccaaacagcccagcagcccagcagcccagccatgcggcgcctcacagtcgatgactttgaaatcgggcgtcccctgggcaaggggaaatttgggaatgtgtacctggctcggctcaaggaaagccatttcattgtggccctgaaggttctcttcaagtcgcagatagagaaggaaggactggagcaccagctgcgccgggaaattgagatccaggctcatctacaacaccccaatatcctgcgcctgtataactatttccatgatgcacgccgggtgtacctgattctggaatatgctccaaggggtgagctctacaaggagctgcagaaaagcgagaaattagatgaacagcgcacagccacgataatagaggagttggcagatgccctgacctactgccatgacaagaaagtgattcacagagatattaagccagagaacctgctgctggggttcaggggtgaggtgaagattgcagattttggctggtctgtgcacaccccctccctgaggaggaagacaatgtgtgggacactggactacttgccgccagaaatgattgaggggagaacatatgatgaaaaggtggatttgtggtgcattggagtgctctgctatgagctgctggtgggatatccaccctttgagagcgcctcccacagtgagacttacagacgcatcctcaaggtagatgtgaggtttccactatcaatgcctctgggggcccgggacttgatttccaggcttctcagataccagcccttggagagactgcccctggcccagatcctgaagcacccctgggttcaggcccactcccgaagggtgctgcctccctgtgctcagatggcttcctgagccctgtctgcctctgttccctttgtgtgtgttcagggagctctcctggctctgccacctcatttgtctttatttttttctcttttaagatgtaagatgctaattaataaaagctgaatcatttcataccaaaaaaaaaaaa

SEQ ID NO: 1607 - protein, 290 aa, Homo sapiens
MATANQTAQQPSSPAMRRLTVDDFEIGRPLGKGKFGNVYLARLKESHFIVALKVLFKSQIEKEGLEHQLRREIEIQAHLQHPNILRLYNYFHDARRVYLILEYAPRGELYKELQKSEKLDEQRTATIIEELADALTYCHDKKVIHRDIKPENLLLGFRGEVKIADFGWSVHTPSLRRKTMCGTLDYLPPEMIEGRTYDEKVDLWCIGVLCYELLVGYPPFESASHSETYRRILKVDVRFPLSMPLGARDLISRLLRYQPLERLPLAQILKHPWVQAHSRRVLPPCAQMAS

SEQ ID NO: 1608 - DNA, 1125 bp, Homo sapiens
ggaagtacctctctgagcggttggtgccgggtataaaagaaggccgcgcagccacggctgctcacgacgccgcggatcccgaagcctgtgtagcagtgagacatcagtgagtggctacagcaaaccaaacagcccagcagcccagcagcccagccatgcggcgcctcacagtcgatgactttgaaatcgggcgtcccctgggcaaggggaaatttgggaatgtgtacctggctcggctcaaggaaagccatttcattgtggccctgaaggttctcttcaagtcgcagatagagaaggaaggactggagcaccagctgcgccgggaaattgagatccaggctcatctacaacaccccaatatcctgcgcctgtataactatttccatgatgcacgccgggtgtacctgattctggaatatgctccaaggggtgagctctacaaggagctgcagaaaagcgagaaattagatgaacagcgcacagccacgataatagaggagttggcagatgccctgacctactgccatgacaagaaagtgattcacagagatattaagccagagaacctgctgctggggttcaggggtgaggtgaagattgcagattttggctggtctgtgcacaccccctccctgaggaggaagacaatgtgtgggacactggactacttgccgccagaaatgattgaggggagaacatatgatgaaaaggtggatttgtggtgcattggagtgctctgctatgagctgctggtgggatatccaccctttgagagcgcctcccacagtgagacttacagacgcatcctcaaggtagatgtgaggtttccactatcaatgcctctgggggcccgggacttgatttccaggcttctcagataccagcccttggagagactgcccctggcccagatcctgaagcacccctgggttcaggcccactcccgaagggtgctgcctccctgtgctcagatggcttcctgagccctgtctgcctctgttccctttgtgtgtgttcagggagctctcctggctctgccacctcatttgtctttatttttttctcttttaagatgtaagatgctaattaataaaagctgaatcatttcataccaaaaaaaaaaaa

SEQ ID NO: 1609 - protein, 275 aa, Homo sapiens
MRRLTVDDFEIGRPLGKGKFGNVYLARLKESHFIVALKVLFKSQIEKEGLEHQLRREIEIQAHLQHPNILRLYNYFHDARRVYLILEYAPRGELYKELQKSEKLDEQRTATIIEELADALTYCHDKKVIHRDIKPENLLLGFRGEVKIADFGWSVHTPSLRRKTMCGTLDYLPPEMIEGRTYDEKVDLWCIGVLCYELLVGYPPFESASHSETYRRILKVDVRFPLSMPLGARDLISRLLRYQPLERLPLAQILKHPWVQAHSRRVLPPCAQMAS

SEQ ID NO: 1610 - DNA, 3849 bp, Homo sapiens
gaaacagtgtggggcctagagcgctgggtgggcgcgttctgcggcctgagcagggacgggtagtgaagcggttacgccccttcttcgcgtcttggcgggagcctgacgccccgcttctcccctaacgaggtgtcccaccggcgcccgccgaggcctaggcctccgcagccgccctccgtctcctcagccccgacgctgcgccttgggccttgtgcgcatttttttcgggggaaaactgaggctcggagtgcgaaagtcagccgaggtcgccccgcccaggacagagaagggctgtggtcggctgatccgcggcattcccgggatggcggcggcgtggatggctccggcgcaggagtctgtgaccttcgaggatgtggctgtgacatttacccaggaggagtgggggcagttggacgtgacccagagggccttgtacgtggaggtgatgctggagacctgtgggcttctggtcgcactgggtgacagcacaaaacctgagaccgtagagcctatcccttctcatctggccttgcctgaggaagtctcactccaggaacagctggcacagggagtcccaagatactcctatttggggcaggccatggatcaagatgggccatctgaaatgcaggaatactttttgagaccagggacagacccacagagtgagaaactccatgggaaaatgagccttgaacacgaaggtttggcgacagctgatggtatttgttcaatgatgatacagaaccaagtctcaccagaagatgctctctatggatttgactcatatggaccagttacagattccttgattcatgaaggggaaaattcctataaattcgaggaaatgtttaatgagaattgcttccttgttcagcatgagcagattctccctcgtgtgaagccctatgattgcccagaatgtgggaaagccttcggcaagagcaaacacctccttcagcatcacatcatccatactggggagaagccctataaatgcctggagtgtgggaaagacttcaaccgcaggtcacacctcacacggcaccagcggactcacaatggagataagccctttgtgtgcagtgaatgtggaaggaccttcaatcgcgggtcgcaccttacacggcaccagcgggttcacagtggagagaagccttttgtgtgcaatgaatgtggaaaggcctttacctaccgctccaattttgtcttgcataacaagagccacaatgagaagaaacccttcgcatgcagcgaatgtggaaaaggcttttatgagagtacagccctcattcaacacttcattatccatactggggagaggccctttaagtgccttgagtgtgggaaggccttcaactgcaggtcacacctcaagcagcatgagcggattcacactggtgagaagccctttgtgtgcagtcaatgtggaaaggccttcactcactattccacctatgtcctgcatgaaagagcccacactggagaaaagccttttgagtgcaaagaatgtgggaaagcctttagcattcgaaaagacctcattcgacacttcaacatccacactggagagaagccctatgagtgtttacagtgtggaaaggcttttacccgcatgtcagggctcacaaggcaccagtggattcatactggagagaagccgtatgtatgcatccaatgtgggaaagccttttgtcggaccacaaacctgattcgacactttagcatccacactggagagaagccctatgaatgcgtggagtgcgggaaggccttcaaccgcaggtcacccctcacaaggcaccagcggattcacactgcagagaagtcccacgaacccatccagagtgggaacgtttcttgtgagagcacagatctcattcaacactccatcatccacactgagagtagcccagtgagtgcagtgaatatggaaacgccttcaattgccgctcattcctcctcactcgacatcaacggattcatagtggaagaaaccctaccattgtaacagatgtggaaagactttttacgtacacttcagtcaacatccaagaattcctattagcgaaatagttttttaatataaccactgaagaaaatctgtggtgagaggaaacatcttaccatctggtcattcatactgaagagaaactccataagtatcatctctgtgggaaaacctgttttagatcatcatttgtcatctaaacaattatgttagaaattgacacagccaagagtcttattctacatctgataattcacccatgaaagagacccagtggttactgtgcacttaggaaaaccttcagccacatctttcttattagtttacagtgaaatgttatctcagggacattcaaacaaaggaggaggagtcatagggaagagaaagaaatggaagcacagcttctttcagacttccctgacaagcccatggcaatttgtcatcccctccttattttatttgggagagggaaatgtttcagaaacaaaagggcctcatcccctttattttccctgtgtatacattcactgctgtccagtgctgtagacaaacggtttgtttgaaaacattttgtgaaagcctgctttgttccacagcattgtctccactcttgaggagcagaagcatatatctttatgagaaagatggaggcttgagttatgaaatacttttacatttaaggagataaaggatgtacatatgaatgggcacattttactgcacacttcagacgctttgacttttttaaaaaaattgtttctccgtgtgtctttaaccacccagtaccatacttttttcttgatctggatctacttgtcaatttcttctttatttttctgtaggatggagatgatattgtagctgtttgtacataatgtaatccagggagtcctaattcttccctctgattgtggtttctcagcttttttactgctctttagagagagtaaatagttcaaaattcacctcaacaattttctagaggtcaatttggaaccaaaaatgaaataagacatgtagctaaagtaagttaaaagattatgataaactcagaaaataaacacagagaaggaatctcatttttcagtcttacagaagattgtgtgaaggctgactatacataaagtgactggaattttaacaggtgaacctgcatatgtatatgcaggtagttgtcaccatggattgagtccagtcgtagtaattaatatgtttaatcagaatattttggaatttctcttttggtattctttttgtttcttttattgtttttaattgacaatgtttatggggtttggtgtgatatttcaatacatgtgtgctaagagtaatgatcaaatcagggtaattagcatatccatctcaatcatttatcatttctttgtgtttagaaacattcacagtctgcttttctagctatttgaaaatataaaatgtattattgccaattgtactcattctgcagtgccacagaacactacaacttattcaaatggaatcttacttgctgtaattttgtatttgttaaccaatctctatctgcctctctgctgtccttcccagcctctggttaccaccattctcaaccttttatgcttgcatatgagtagaaacatggagtatttctctttctgtgtctagcttatttcacttaatgtctttcaagctcattcatgttgctgtgaatgacaggtttatttttcatggctgagtagtattccattgtgtatatatgccatgttttctttcttcattcatctgataatggacacttagactgatttcttagctattatgaatagtgcttcaataaacataggagtgtagatctctctttg

SEQ ID NO: 1611 - protein, 562 aa, Homo sapiens
MAAAWMAPAQESVTFEDVAVTFTQEEWGQLDVTQRALYVEVMLETCGLLVALGDSTKPETVEPIPSHLALPEEVSLQEQLAQGVPRYSYLGQAMDQDGPSEMQEYFLRPGTDPQSEKLHGKMSLEHEGLATADGICSMMIQNQVSPEDALYGFDSYGPVTDSLIHEGENSYKFEEMFNENCFLVQHEQILPRVKPYDCPECGKAFGKSKHLLQHHIIHTGEKPYKCLECGKDFNRRSHLTRHQRTHNGDKPFVCSECGRTFNRGSHLTRHQRVHSGEKPFVCNECGKAFTYRSNFVLHNKSHNEKKPFACSECGKGFYESTALIQHFIIHTGERPFKCLECGKAFNCRSHLKQHERIHTGEKPFVCSQCGKAFTHYSTYVLHERAHTGEKPFECKECGKAFSIRKDLIRHFNIHTGEKPYECLQCGKAFTRMSGLTRHQWIHTGEKPYVCIQCGKAFCRTTNLIRHFSIHTGEKPYECVECGKAFNRRSPLTRHQRIHTAEKSHEPIQSGNVSCESTDLIQHSIIHTESSPVSAVNMETPSIAAHSSSLDINGFIVEETLPL

SEQ ID NO: 1612 - DNA, 3658 bp, Homo sapiens
ggaacagtgtggggcctggaccgctgggtaggcgcgtccagcggcctgagcaggggagggtaatgaggctgttacgcgccttctccgcatcttggcgggagcctgacgccccgcttcttccctaacggggtgttccaccggcgcctgccgaggcctaggcctccgcagccgccctccgtctcctcagccccgacgctgcgcccgctttgtgcgcatttttctctggggaaactgaggctccgagtgcgaaagtcagccgaggtcgccccgcccaggacagagaagggctgggggtcggctgagccgcggcattcccgggccccgctagggctgcagggtctcaggatggcagcctcggcgcaggtgtctgtgacctttgaggatgtggctgtgacattcacccaggaggagtggggacagttggatgcagcccagagaaccttgtatcaggaggtgatgctggagacctgcggacttctcatgtctctgggctgtcctttgttcaaaccagagctgatctaccagttggatcacagacaggagctatggatggctacaaaagacctctcccaaagctcctatccaggtgacaacacaaaacccaagaccacagagcctaccttttctcacctggccttgcctgaggaagtcttactccaggaacaactgacacaaggagcctcaaagaactcccaattagggcaatccaaggatcaggatgggccatctgaaatgcaagaagtccacttgaaaatagggataggcccccagcgggggaagctgctggagaaaatgagttctgaacgtgatggtttggggtcagatgatggtgtatgtacaaagattacacagaaacaagtttcaacagaaggtgatctctatgaatgtgattcacatggaccagttacagatgccttgattcgcgaagagaaaaattcctataaatgtgaggaatgcgggaaagtgtttaaaaagaatgccctccttgttcagcatgaacggattcacactcaagtgaagccctatgaatgcacagagtgtgggaaaacctttagcaagagcactcatcttcttcagcacctcatcatccacactggggagaagccctataagtgcatggagtgtgggaaggcttttaaccgcaggtcgcacctcacacggcaccagcggattcacagtggagagaagccttataagtgcagtgaatgtggaaaggccttcacccaccgctccacttttgtcttgcatcacaggagccacactggagaaaaaccctttgtgtgcaaagagtgtggcaaagcctttcgagataggccaggtttcattcgacactacatcatccacacgggagagaagccctatgagtgcattgagtgtgggaaggccttcaaccgccggtcatacctcacgtggcaccaacagattcacactggagtgaaaccctttgaatgcaacgagtgtggaaaagctttttgcgagagtgcagacctcattcaacactacattatccacactggggagaagccctataagtgcatggagtgtgggaaggcgttcaaccgtaggtcacacctcaagcagcatcaacggattcacactggggagaagccttatgaatgcagtgaatgtggaaaggccttcacccactgctccacttttgtcttgcataaaaggacccacacaggagaaaaaccctatgaatgcaaagaatgtggaaaagcctttagtgatagggcagacctcattcgccacctcagcatccacactggagagaaaccctatgagtgcgtggagtgtggaaaggccttcaaccgcagctcacacctcacgaggcaccaacagattcacactggagagaaaccctatgaatgcatccagtgtgggaaagccttttgccggagcgcaaaccttattcgacactccatcattcacactggagagaagccgtatgaatgcagtgagtgtggaaaggcttttaatcgcggctcatccctcacacatcatcaaaggattcatactgggagaaaccctaccattgtaacagatgtgggaagaccttttatgactgcacagacttcagtcaacatccaggaacttttattagggaaagagtttttgaatatcaccactgaagaaaatctgtggtgaaagggaacatcttaccatctggccattcacactgaagagaaacttcataagcatcctctctttgagaaaacgtgtaatagatgatcatttgtcgtctaaacaatcaagttagaaattgaaccagcctggagtcttattctccacctgagaattcacccatgagagagacccagtggttgctatgcacttaggaaaactttcagccacatctttcttcttagtttacagtgaaatattatctcagggatatttttttttttttttgagacggagtctcgctctgtcgcccaggctggagtgcagtggcgggatctcggctcactgcaagctccgcctcccgggttcacgccattctcctgcctcagcctcccgggtggctgggactacaggcacccgccactacgcctggctagttttttgtatttttagtagagacggggtttcaccgttttggccgggatggtctcgatctcctgacctcgtgatccgcccgcctcagcctcccaaagtgctgggattacaggcgtgagccaccgcgcccggccatctcagggatatttaaacaaaggaagaggaaatatagggaagagaaagaaaccacagcttcttttagacttgtctgacaagcctatggcaattttgtcgtccctttgttattttatgtgggagagggaaatgtttcagaaacgaaagatctcatcccctttatttttctgtgtatgcattcactgctgcccagtgtcagaacagttatacaaacgagggcttgaaaacattttgtgaaaacttgcttagtcctgcaacgttctccactctcgaggtgcaggagcatacatctttataaaaaatatggaggcttgagttatgaaacacttttataaggagataaggatgtacatatgtttggacacattgtccacttcagatgcttgtttaaaaaaatgtttcaccatgtgtctttacccaatacacatactttttcttgatgtggatttactttttttttttttttttaagtttttctgggatagggatgatagtgtaattgttcatgcccacagtaatcctgggaatcttagttttttcctatgattgtggtttctcagcttctttacctctcctttgagttaggtccacctcagttttctaaaggtcaaattaaggcccccccaaaaatacagtatgtagctgaattcctttgaaagatcatgataaactcagaagaacaaacatagaaggaatgtcatttttaatctttttaaagagtgtgtgaaaattcactttaactggaattttaacaggcaagccggcatgcatatatgtagggatgtgtgactttcacagttgtcaccatggacttaggcttgattaaaatgctacacatttagagcgttttgtaattccttttttatatttttaagactagattttgagccatgtgatagttttacctcatattaaatatattgtacagaagtaaaaataatcatgtattcactttgaactcctc

SEQ ID NO: 1613 - protein, 600 aa, Homo sapiens
MAASAQVSVTFEDVAVTFTQEEWGQLDAAQRTLYQEVMLETCGLLMSLGCPLFKPELIYQLDHRQELWMATKDLSQSSYPGDNTKPKTTEPTFSHLALPEEVLLQEQLTQGASKNSQLGQSKDQDGPSEMQEVHLKIGIGPQRGKLLEKMSSERDGLGSDDGVCTKITQKQVSTEGDLYECDSHGPVTDALIREEKNSYKCEECGKVFKKNALLVQHERIHTQVKPYECTECGKTFSKSTHLLQHLIIHTGEKPYKCMECGKAFNRRSHLTRHQRIHSGEKPYKCSECGKAFTHRSTFVLHHRSHTGEKPFVCKECGKAFRDRPGFIRHYIIHTGEKPYECIECGKAFNRRSYLTWHQQIHTGVKPFECNECGKAFCESADLIQHYIIHTGEKPYKCMECGKAFNRRSHLKQHQRIHTGEKPYECSECGKAFTHCSTFVLHKRTHTGEKPYECKECGKAFSDRADLIRHLSIHTGEKPYECVECGKAFNRSSHLTRHQQIHTGEKPYECIQCGKAFCRSANLIRHSIIHTGEKPYECSECGKAFNRGSSLTHHQRIHTGRNPTIVTDVGRPFMTAQTSVNIQELLLGKEFLNITTEENLW

SEQ ID NO: 1614 - DNA, 4317 bp, Homo sapiens
tgaaggctgagttctagagatcgggtcggctttctacgcggctctcgtggaacctagcaaagaaagacagtgaagactgcaggaccttccttcgcgcttttgttacaatccacacacgtcctcttgtccttgtctcccccagaagcagccgccttagtcttgtgagcgtttttacaccgggtagattgagacttggagtgctacactcagcccgagggcgtccagcgcggtggaggcgtggggtttcggctgagcccacagggcacagactgttcatccgcttctcatggcagcggcggtgctgatggaccgggttcagagttgtgtgaccttcgaggatgtgttcgtgtacttctctcgggaggagtgggaactccttgaggaggcacagagattcctgtaccgtgatgtgatgctggagaactttgcacttgtggctacactaggtttttggtgtgaagcagaacatgaggcaccttctgagcagagcgtttctgtagaaggagtgtcacaggtcaggactgctgagtcaggtcttttccagaaagcacacccatgtgagatgtgtgacccactcttgaaagacattttgcacctggctgaacaccagggatcacaccttacacagaaactgtgcacacgtgggctgtgtaggagaagattctcgttcagtgcaaacttttaccagcaccagaagcaacataatggagagaattgcttcagaggggatgatggaggggcctcatttgtgaagagctgtacagtccacatgttagggagatcctttacgtgcagggaggaagggatggacttaccagatagctctggccttttccagcaccagaccacttacaatagggtgagtccatgcagaaggactgaatgcatggagtctttcccacacagctccagtctcaggcaacaccaaggagactatgatggacagatgcttttcagttgcggtgatgaagggaaagccttcctggacacctttactcttcttgacagccagatgactcatgctgaggtgagacccttcagatgcctaccatgtggaaatgtgttcaaggagaaatcagctcttattaatcacagaaaaatccacagtggagaaatatctcatgtgtgtaaggagtgtggaaaagccttcattcacttgcaccacctaaaaatgcaccagaaatttcacactggaaaaagacactatacatgcagtgaatgtgggaaggccttcagccgcaaggacacacttgctcagcatcagagagttcacactggagaaagaccttatgactgcagtgaatgtggaaaagcctacagcagaagctcccaccttgttcagcaccagagaattcacacaggagaaaggccttataagtgcaacgaatgtgggaaagcctttagccgtaaagacacacttgttcagcaccagagatttcatactggagaaaggccttatgagtgcagtgaatgtggaaaattctttagccaaagctcccaccttattgagcactggagaattcataccggggcaaggccctatgaatgcatagaatgtggaaaattctttagccataactctagcctcattaaacatcggagagtccacacaggagcaagctcctacgtgtgcagcaaatgtgggaaggcctttggctgcaaagacacacttgttcagcaccagataattcacactggagcaaggccttatgagtgcagtgaatgtgggaaggccttcagccgtaaagacacacttgtgcaacaccaaaaaatccacactggagaaaggccttatgagtgtggtgaatgtggtaaattcttcagccatagctccaaccttattgtacaccagagaattcacactggagcaaagccttatgagtgcaatgaatgtgggaaatgctttagccacaactccagcctcattttgcaccagagagttcacacaggagcaaggccttatgtgtgcagtgaatgtgggaaggcttacattagtagctcccaccttgttcaacacaagaaagttcacactggagcaagaccttatgagtgcagtgaatgtgggaaattctttagccgcaactctggcctcattctgcaccagagggttcacactggagaaaagccttacgtatgcagcgaatgtgggaaagcctatagcagaagctcccatcttgttcgtcaccagaaagctcacactggagaaagagctcacgagtgcaacagttttggtggccctttagctgcatctcttaaacttgtttaacaccagaaaattcacacaagagaaaggccttatgaatgcagaaaatatgtcatcttgttcatcctcataggactcacaccagagcaatgctctgtgagtaccctttgtgagggaaccatcagctagcagatgagcaccgtatattcattccaccctggggagattcctgataagcaccacatatgtgggaggctttcatgaggtgtgttgcactttgtaactgtctagagctcttgatggaattatatcactgccagtgcctgtggcggaagccatcttattgctaccagctgtgtgtgtcaatcactccattttgctcagggaaggcagacttctgtgctttctttcctgttccctacaggtaatcatgaatattttcaaggacttccccccccccccacttcaccccctaccattgagggtcctcatcttttccctcatgattaggttctgagcaaacatgatctagctctcaccaaaaggacctgagctagggtctgctgggatttcctgacacgattttccatcttcatggacaatgttaactgtaaacgtgatagctgtgacttacttgtcttactgccaaatcgcccaaatttggaactgcttgtcccatgctgctctgatttatacagtgataagggcctattgtggcagtctttactcttggggattttgttactgtgtagagtggattgagaaaagaattgggttctgtcatgaagggagtagcaccttttgtgggcaccacctttatgtgcctcagaggggaccaaaggatggcagaaaactgttctcagtctagtttgacctaatttacactattgccctaggcttgctaggaaagactgaaaaaaatttttgtgcctaactttgtggcctggctgccaggatttcctgtgagcccagtgaggagggcatagttggtgcgaaaatctcctgtgcttgtggaagcaacataagttgggtcccttaactgtcacgtactccccagcactgttgagggattgctgtcttctgtacctgtacaggatcaagtccctgatatccagaaccccataggcaagtaacattgactgtaagacctctgtagggcaatgtgaaaatcatgattgctacagaagcactgagataatggagtggggatgactgtggcaaacaaaaggagattcgaacattctagaggggacatccacaagtctcggtgcagttatgatggtgtgggatgggagtgcatagaaattctcaggaccttcagacatctgtatctcctgtggccaaggccactgtcagaggaaataatctaaatgtttgtggattcctgtgtctccctgggcagttgacctgcacagacaggaacctcagcagtgacagaagagagatccagggatgggtcttctctgacccagccagcattccgagtgactgaggtggatgtggacatcattgcttaccaatttttaccaacattgaggcagggctcactctcctaaattgtagggagaggaatatggtaaagccaaaatagttgacagatctaactttcctagtggaacagtatatatagattttaatgaggaacatttatttaatagctttatggaggtatgattaacatgcaataaactgcaaatatgtaaagtgtaaaatgtgctgtttcagcatgtgtgtacacctatgaaaccaccacagtcaagatatccaacacaacaaaagattgtccctttataatcctcaatttttccttatcttgttttccacaattcacaagcaacagcaagcattttctataattttataaatgaaaccatatggtgtgtactttttagggggtggggctctggctttttcagtaaacataactattttaaggttaatccattatcttgttgcatgaatcaattgtttgctcatttgtattgctgcgtagtatttcagtatttcattgtataccacaatttttcttctttgtcaacttaattgttatggatgtttgggtaactttcagtttttggctattacaaataaacctctgaagatttgtgtgcaaa

SEQ ID NO: 1615 - protein, 659 aa, Homo sapiens
MAAAVLMDRVQSCVTFEDVFVYFSREEWELLEEAQRFLYRDVMLENFALVATLGFWCEAEHEAPSEQSVSVEGVSQVRTAESGLFQKAHPCEMCDPLLKDILHLAEHQGSHLTQKLCTRGLCRRRFSFSANFYQHQKQHNGENCFRGDDGGASFVKSCTVHMLGRSFTCREEGMDLPDSSGLFQHQTTYNRVSPCRRTECMESFPHSSSLRQHQGDYDGQMLFSCGDEGKAFLDTFTLLDSQMTHAEVRPFRCLPCGNVFKEKSALINHRKIHSGEISHVCKECGKAFIHLHHLKMHQKFHTGKRHYTCSECGKAFSRKDTLAQHQRVHTGERPYDCSECGKAYSRSSHLVQHQRIHTGERPYKCNECGKAFSRKDTLVQHQRFHTGERPYECSECGKFFSQSSHLIEHWRIHTGARPYECIECGKFFSHNSSLIKHRRVHTGASSYVCSKCGKAFGCKDTLVQHQIIHTGARPYECSECGKAFSRKDTLVQHQKIHTGERPYECGECGKFFSHSSNLIVHQRIHTGAKPYECNECGKCFSHNSSLILHQRVHTGARPYVCSECGKAYISSSHLVQHKKVHTGARPYECSECGKFFSRNSGLILHQRVHTGEKPYVCSECGKAYSRSSHLVRHQKAHTGERAHECNSFGGPLAASLKLV

SEQ ID NO: 1616 - DNA, 2788 bp, Homo sapiens
aaaagcgcgagaagcggcttggttccttgtacgcagaggcggtagtgacacaggcacaactgacagtggcagaagctcagctgacaaggactggggacggcggtgtccttgtcttgcctttgtcgcccccgcccctctcttccctggctggacttgcggagtccccgccgaagaacccgagggtcccctggcgatggcagaaatgaaccctgcacagggtcatgtggtttttgaagacgtggccatatatttctcccaggaggagtgggggcatctcgatgaggctcagagattgctgtaccgtgatgtgatgctggagaatttggcccttttgtcctcactaggttgttgccatggagctgaggatgaggaggcacctttagagccaggtgtttctgtaggagtgtcacaggtcatggctccaaagccctgtctatctacccagaatacccagccctgtgagacatgtagctcacttctgaaggacattctgcgtctggctgagcatgacggaacacaccccgagcagggactgtacacgtgtccagcacatcttcaccagcaccaaaaggagcagattagagagaaactttctagaggggatggaggaagaccgacatttgtgaagaaccacagagttcacatggcagggaagaccttcttgtgcagtgaatgtgggaaagcctttagccacaaacataaactttctgaccatcagaaaatccacactggagaaagaacttataagtgcagcaaatgtgggatattgtttatggaaaggtccacactcaatagacatcagagaactcacactggagaaaggccttatgagtgcaatgaatgtgggaaagcctttctttgtaagtctcaccttgttcgtcaccagacaatccactctggagaaaggccttatgagtgcagtgaatgtgggaaattgtttatgtggagttccacactcattacacatcagagggttcacactggaaagaggccttatggttgcagtgaatgtgggaagttctttaagtgcaactcaaacctctttaggcattacagaattcatacaggaaaaaggtcttatggttgcagtgaatgtgggaaattctttatggaaaggtctacactcagtagacatcagagagttcacactggagaaaggccttatgagtgcaatgaatgtgggaaattcttcagcttgaaatccgtcctcattcaacaccaaagagttcacactggagaacggccttatgaatgcagtgagtgtgggaaggccttccttacaaagtcccacctcatttgtcatcagacagttcacactgcagcaaagcagtgcagtgaatgtgggaaattctttaggtataactctacacttctcagacatcagaaagtccacactggataaggcccttatgaatgcagtggatatgggaaagccttcagtcaccaacatattgtggctggacagcaggcagtacacactggagaaagactgaatgccgtgaacgtgggtaattatgtaggtacagctctccagtcgctatgtatcagagaattcacactgcagaaatgtgtgttcagcaaactcgggacattattttggtttgactctcatctcattagacattggagagtttacactgaagaagagtcttttcaataaagtagaaagtggtaaagattcaacatgcaagattgtacttattgggcttcagaatatccacactagtgaaagtcttctgagtacagcaaatgtgtgacattattttgctactactccacactacttagacatcatgtagttcacactggaaaaaggccacgtatgtgccttgaatgtagccaaaatgatgaacaacacccagaaatctgtgatttagcactgagaactagtattatatggtttttaaaaaacaatggtgaagtacatgccacataaaatttgccatcttaactattgtaatgtcttgtttaatacttgaagtacattaacattgttgagcaaagaatatcctgaactctttatcttgtaaaatgaaactctataaccaccattaaaaaaacaactcattcccacattcttcagtccctggcgaccaccatatttttaagtcattatgactctgactattcttggtacttctcagaagaagaatcttagagtgtttttcattattttttttcacttaggataatatcctcaaagttcatccattttttagcatgtgtcagaaattttaaggctgagcaatatttcattgtttgcatttaccacatttcctttatttctgacatctattcatggacacttgggttacttctacctctggctattgtgaatattgctactacaagcataagggcacaaatatctctttgagaccctgctttcaattcttattgggtaccccaaaaagtggaactgctggatcacatggtacttctaactttaattctttgatgaactgagaaacttttccataaaacttgcaccgttttacattcctaacattccacaaaagttgtgatttgtcctcattctaatccatagaaggcaacatttctaacaggtttctaggtgattttgttgttgctgatgtagggactacattttgagaactgtcctatcccatttttataacaatgcagagcttctctgtaaataccccttgtttctatgttctatcctgtgagccttttcattttgttaatttttcccagtgtttacaaccaggaaatagcttgtcatctttgatacaaaacagaaatctttgcaaaaaaaaaaaaaaaa

SEQ ID NO: 1617 - protein, 402 aa, Homo sapiens
MAEMNPAQGHVVFEDVAIYFSQEEWGHLDEAQRLLYRDVMLENLALLSSLGCCHGAEDEEAPLEPGVSVGVSQVMAPKPCLSTQNTQPCETCSSLLKDILRLAEHDGTHPEQGLYTCPAHLHQHQKEQIREKLSRGDGGRPTFVKNHRVHMAGKTFLCSECGKAFSHKHKLSDHQKIHTGERTYKCSKCGILFMERSTLNRHQRTHTGERPYECNECGKAFLCKSHLVRHQTIHSGERPYECSECGKLFMWSSTLITHQRVHTGKRPYGCSECGKFFKCNSNLFRHYRIHTGKRSYGCSECGKFFMERSTLSRHQRVHTGERPYECNECGKFFSLKSVLIQHQRVHTGERPYECSECGKAFLTKSHLICHQTVHTAAKQCSECGKFFRYNSTLLRHQKVHTG

SEQ ID NO: 1618 - DNA, 3396 bp, Homo sapiens
gggcgggacttccgccgtcctcctggtggtggtcgttttggttctgtgtggtgtttcaccaacttcggcctatggctctgtctgacgtcaccgaagtgacggaacggaaaagcgcgagaagcggctcggttcccaccacggagaggcgggagtgagtcaactgacaagcgctggggacagtggcgtccttgtcttgcctttgtcgctcccgccccgctcttccctggctgggctggcggaggccttgctgatgaacctgactgagggccgtgtggtctttgaggacgtggccatatatttctcccaggaggagtgggggcaccttgatgaggctcagagattgctgtaccgtgatgtgatgctggagaatttggcccttttgtcctcactaggttcttggcatggagctgaggatgaggagtcaccttcacagcaaggtttttctgtaggagtgtcagaggttacaacttcaaagccctgtctgtccagccagaaggtccaccctagtgagacatgtggcccacccttgaaagacattctgtgcctggttgagcacaatggaattcatcctgagcaacacatatatatttgtgaggcagagctttttcagcacccaaagcagcaaattggagaaaatctttccagaggggatgattggataccttcatttgggaagaaccacagagttcacatggcagaggagatcttcacatgcatggagggctggaaggacttaccagccacctcatgccttctccagcaccagggccctcaaagcgagtggaagccatacagggacacagaggacagagaagcctttcagactggacaaaatgattacaaatgtagtgaatgtgggaaaaccttcacctgcagctattcatttgttgagcaccagaaaatccacacaggagaaaggtcttatgaatgtaacaaatgtgggaaattctttaagtacagtgccaatttcatgaaacatcagacagttcacactagtgaaaggacttatgagtgcagagaatgtggaaaatcctttatgtacaactaccgactcatgagacataagcgagttcacactggagaaaggccttatgagtgcaacacatgtgggaaattctttcggtacagctccacatttgttagacatcagagagttcacaccggagaaaggccgtatgagtgcagggaatgtgggaaattctttatggacagctccacactcattaaacatcagagagttcacaccggagaaagaccttataagtgcaatgattgtgggaaattttttaggtatatctccacactcattagacatcagagaattcacactggagaaaggccttatgagtgcagtgtatgtggggaattgtttaggtacaactccagccttgttaaacattggagaaatcacactggagaaaggccttataaatgcagtgaatgtgggaaatcatttaggtaccactgcaggctcattagacaccagagagtccacacgggagaaaggccttatgagtgcagcgaatgcgggaaattctttcgttacaactccaacctcattaaacattggagaaatcacactggagaaaggccttacgagtgcagagagtgtgggaaagcctttagccacaagcatatacttgttgagcaccagaaaatccacagtggagaaagaccttatgagtgcagcgaatgccagaaggcctttattagaaagtctcacctggttcatcaccagaaaatccacagtgaagagaggcttgtgtgctccatgaatgtggggaattctttagctaaaactccaacctcattaaacatcagagatttcacaatggagaaagtttaccattgactattgtaattgggtagtaatgttatataaattccacatttttatgcaactaatctccagaacatttttcctcttaccaagaagtaaaatgctgtacccattaacaacaactcattccccttccctacttccccagaaatgtctcaactatatttctatactctatggtacttatatgaggtaccaatagatatctatgaatttgatatatatttgtacctcatataagtggattctacagtatttatcttttgagactggcttatttcacttaggataaggtcttcacggttcacccatgttgtataatgtgtcagaatatccttcctttttaggtgaaataatattctatggtatttatataccacatttatttatccattcatctgttagtggatacttgggctacttccaccttttgcctattgaaataatgctgctatgaagatgagtgtacaagtgtctattcaagattctactttcaattcttatagggtatatactcagaaatggtggtgctggatcatataggatttctattttttttttttgtttgtttttgagacagagtcttgctctgtcacccaggctggagtgcagtgctgtgatcttggctcactgcaagctccgcctcccaggttcatgccattctcctgcctcaccctcccgagtagctgggactacaggtgcctgccaccacgcctggctaatttttttgtatttttagtagagacggggtttcaccgtgttagccaggatggtcctgatctcctgaccttgtgatctgcctgccttggcctctcaaagtgctgggattacgggcgtgagccaccgcgcctggccaggatttctatttttaatatttttgggaaaatttttccatagtacctgtgccattttacattcccaccagcagtgcacaaggattgcaatctatatacatcctcaccaacattgttcattttctatttctgtttttggggttttttgtagtgccttttgttttggatagcagctatcttgttggatgtgaggtggaatctatagtgtctttcatttttattttgtgaatgattaatgatgttgaggatcttttcatgtgcttgttaggcatttgtgtatctggaaaaatattcaagtcttttttttccatttttaatgggactatttgctttttgttgttgagttgtagttctttatacattctggatattaactccttaccaaatatatgctttttacatattacctcccagtccataggttgctttttcgctctgttgattgtgtcctttgatgaaattttaagttttgatgtactgttgactctttctgtctgtgggttctgtattcatggatcgaagcaaccatggatcaaaagtatttggagcatccatggattgcagtgatcattaatcaaaaatatttggaaaacaaaaagggtagttgcatctgtactaaacatgaacagacattttttcttgtcattattccctaaactatatagtataataaatatttacatagcaaaaaaaaaaaaaaaa

SEQ ID NO: 1619 - protein, 533 aa, Homo sapiens
MNLTEGRVVFEDVAIYFSQEEWGHLDEAQRLLYRDVMLENLALLSSLGSWHGAEDEESPSQQGFSVGVSEVTTSKPCLSSQKVHPSETCGPPLKDILCLVEHNGIHPEQHIYICEAELFQHPKQQIGENLSRGDDWIPSFGKNHRVHMAEEIFTCMEGWKDLPATSCLLQHQGPQSEWKPYRDTEDREAFQTGQNDYKCSECGKTFTCSYSFVEHQKIHTGERSYECNKCGKFFKYSANFMKHQTVHTSERTYECRECGKSFMYNYRLMRHKRVHTGERPYECNTCGKFFRYSSTFVRHQRVHTGERPYECRECGKFFMDSSTLIKHQRVHTGERPYKCNDCGKFFRYISTLIRHQRIHTGERPYECSVCGELFRYNSSLVKHWRNHTGERPYKCSECGKSFRYHCRLIRHQRVHTGERPYECSECGKFFRYNSNLIKHWRNHTGERPYECRECGKAFSHKHILVEHQKIHSGERPYECSECQKAFIRKSHLVHHQKIHSEERLVCSMNVGNSLAKTPTSLNIRDFTMEKVYH

SEQ ID NO: 1620 - DNA, 2678 bp, Homo sapiens
gcaacgcctcctggggttgtcaatatggctgcgttgggatctgttcaccttcaggctgagtcgagactgaggtgaaaaagcggaaaaacgcgagaaaaggtttccccgttgtacagaggctagagtgaggctcggttgaatcggttgcaggcgttggtgcctctgtcagcgtccaggtcactgccgctcccgccccgctcttccctggctgtgctggcggaggctgcgccgatgaacctgactgaggattatatggtttttgaggacgtggccatacatttctcccaggaggagtggggaattcttaatgacgttcagagacacctgcacagcgatgtgatgctggagaactttgcacttttgtcctcagtaggttgttggcatggagccaaggatgaggaggcaccttccaagcaatgtgtttctgtaggagtgtcacaggtcacaactttaaagccagctttgtccacccagaaggcccagccctgtgagacatgtagctcacttctgaaggacattctacacctggctgagcatgacggaacacaccccaagcgtacagccaagctttacctgcaccaaaaggagcatcttagagagaagctcaccagaagtgatgaagggaggccttcgtttgtgaatgacagtgttcacctggcaaagaggaacctcacatgcatgcagggtggcaaggattttactggtgattcagatcttcaacaacaggctcttcacagtgggtggaagccacacagggacactcatggtgtggaggcctttcaaagtggacagaataattacagctgcacccaatgtgggaaagacttttgccaccaacatacactgtttgagcaccagaaaatccacacagaggaaaggccttatgagtgcagtgaatgtggcaaattgtttaggtacaactccgaccttattaaacatcagcgaaatcatactggagaaaggccttataagtgtagtgaatgtggaaaagccttcagcctcaaatacaatgttgttcaacaccagaaaattcacactggagaaaggccttatgagtgcagtgaatgtgggaaagcttttcttagaaagtctcacctacttcagcaccagaggattcacaccaggccaaggccttatgtgtgtagtgaatgtgggaaggccttccttacacaggctcaccttgttggtcaccagaaaattcatactggagaacggccttatggatgcaatgaatgtgggaaatactttatgtacagttcagcactcattagacatcagaaagttcacactggagaaaggcctttttattgctgtgaatgtgggaaattctttatggacagctgcacactcattattcaccagagagttcatactggagaaaaaccttatgaatgcaacgaatgtgggaaattctttagataccgttccacactcattagacatcagaaagttcacactggagaaaagccttatgagtgtagtgaatgtgggaagttctttatggacacttccacactcattattcatcagagagttcatactggagaaaagccttatgaatgcaacaaatgtgggaaattctttaggtattgcttcacactgaatagacatcagagagttcactctggagagaggccttatgaatgcagtgaatgtggcaaattctttgtggacagctgtacactgaagagtcatcagagagttcacactggagaaagaccttttgaatgcagcatttgtgggaaatcctttagatgtcgctccacacttgatacacatcagagaattcacactggtgaaaggccttatgagtgtagtgaatgtgggaaattctttaggcacaactcaaatcatattagacatcggagaaatcactttggagaaaggtcttttgagtgcactgagtgtgggagagtttttagccaaaattcccacctcattcggcaccaaaaagttcacactagggaaagaacttacaaatgcagcaaatgtgggaaattttttatggacagctccacactcattagtcatgagagagttcatactggagaaaagccttatgagtgcagtgaatgtgggaaagtctttagatacaactccagcctcattaaacatcggagaattcacactggagagagaccttatcagtgcagtgaatgtggaagagtctttaaccaaaattctcatctcattcagcaccagaaagttcacaccagataaagaatgtatatataaagcagatggggaaagacttcacacagaaatctactctgatttagcactgggacctacgttttaaaaaaagtattcttgtagaatacagataacataaaatctaacatcttaaccatgttaaagtgtatagttcagtactgttaagtcattcacattgtgcaatgaatatctagaagtcttttcaacttatgaaactaagtctataccttttaaaaccttattcctcactccatccagcctcttgacaagcaccgctctgtatgaattttactagtccgggtacctcatataagaaaacttaagttttggtcttcttgtggtttattttgtggcttattttgcttaacgttatatttttaaggtttcatgttctaatccattagaatttccatcctttttaaaggctgaataaaattctgttagtcatgtgttgcttaacagtg

SEQ ID NO: 1621 - protein, 662 aa, Homo sapiens
MNLTEDYMVFEDVAIHFSQEEWGILNDVQRHLHSDVMLENFALLSSVGCWHGAKDEEAPSKQCVSVGVSQVTTLKPALSTQKAQPCETCSSLLKDILHLAEHDGTHPKRTAKLYLHQKEHLREKLTRSDEGRPSFVNDSVHLAKRNLTCMQGGKDFTGDSDLQQQALHSGWKPHRDTHGVEAFQSGQNNYSCTQCGKDFCHQHTLFEHQKIHTEERPYECSECGKLFRYNSDLIKHQRNHTGERPYKCSECGKAFSLKYNVVQHQKIHTGERPYECSECGKAFLRKSHLLQHQRIHTRPRPYVCSECGKAFLTQAHLVGHQKIHTGERPYGCNECGKYFMYSSALIRHQKVHTGERPFYCCECGKFFMDSCTLIIHQRVHTGEKPYECNECGKFFRYRSTLIRHQKVHTGEKPYECSECGKFFMDTSTLIIHQRVHTGEKPYECNKCGKFFRYCFTLNRHQRVHSGERPYECSECGKFFVDSCTLKSHQRVHTGERPFECSICGKSFRCRSTLDTHQRIHTGERPYECSECGKFFRHNSNHIRHRRNHFGERSFECTECGRVFSQNSHLIRHQKVHTRERTYKCSKCGKFFMDSSTLISHERVHTGEKPYECSECGKVFRYNSSLIKHRRIHTGERPYQCSECGRVFNQNSHLIQHQKVHTR

SEQ ID NO: 1622 - DNA, 2929 bp, Homo sapiens
acttctggcggcgccctcatggttgcgttagcatggctacctagggatctgttcactgatttagagggtcccagagctctgggtcgggactgaggtgaaagagcggaaaaacgcgagaagcggtgttccttctacacagaggctagagtgcggatcggctgagtcggctgcaggcgcccctgcctccgtcagcgtccaggtgaccgccgttcccgccccgctcttccctgggtggactggaggaggccgcgccgatgaacctgaccgaggattgtatggtctttgaggatgtggccatatatttctcccaagaggaatgggggatccttaatgatgctcagagacacctgcacagcaatgtgatgttggagaactttgcgcttttgtcatcagtaggttgttggcatggagccaaggatgaggaggtaccttccaagcagtgtgtttctgtaagagtgttacaggtcacaattccaaagccagctttgtccaccctgaaggcccagccctgcaagatgtgtagctcaattctgaaggacattctgcacctggctgagcacgatggaacacaccctgagcaagggctgtacacatgtgcagcagagcatgacctgcaccaaaaggagcagattagagagaagctcaccagaagtgatgagtggaggccttcatttgtgaaccacagtgctcacgtgggagagaggaacttcacatgcacgcagggtggcaaggattttactgccagctcagaccttctccagcaacaggtcttaaacagtgggtggaagctgtacagggatacccaggatggggaagcctttcaaggtgaacagaatgatttcaactccagccaaggtgggaaagacttttgccaccaacatgggctgtttgagcaccaaaaaacccataatggggagaggccttatgagttcagtgaatgtggggaattgtttaggtacaactccaaccttattaaatatcagcaaaatcatgctggagaaaggccttatgagggcactgaatatggaaagacctttattagaaagtccaacctagttcagcaccagaaaattcacagtgaaggctttctttcaaaaaggtctgaccccattgaacatcaggagattctcagtagaccaacaccttatgaatgcacccagtgtgggaaggcctttcttacacaggctcatctggttggtcaccagaaaacccatactggagaacagccctatgaatgcaacaagtgtgggaagttttttatgtataactccaaactcatcagacatcagaaagttcacactggggagaggcgttacgagtgcagtgaatgtgggaaattgtttatggacagcttcacactcggtagacatcagagagttcatactggagaaaggccttttgaatgcagcatatgtggaaaattctttagtcaccgctccacactcaatatgcaccagagagttcatgctggcaaaaggctttataagtgtagcgaatgtgggaaagcctttagcctcaaacataatgttgttcagcatctgaaaattcatactggagaacggccttatgagtgcactgaatgtgagaaggcctttgttagaaagtcccacctagttcagcaccagaaaatccacactgatgcattttcaaaaaggtctgacctcattcaacacaagaggattgacattaggccaaggccttatacatgcagtgaatgtgggaaggccttccttacacaggctcatctggttggtcaccagaaaatccatactggagaacggccttatgaatgcactcaatgtgcgaaggcctttgttagaaagtcccacctagttcagcatgagaaaatccacactgatgcattttcaaaaaggtctgacctcattcaacacaagaggattgacctcaggccaaggccttatgtgtgtagtgaatgtgggaaggccttccttacacaggctcatctagatggtcaccagaaaatccagactggagaacggcgttatgaatgcaatgaatgtgggaaattctttttggacagctacaaacttgttattcatcagagaattcacactggagaaaagccttataaatgcagcaaatgtgggaaattctttagatatcgctgtacactgagtagacatcagaaagttcacactggagaaagaccttatgagtgtagtgaatgtgggaaattttttagagatagctacaaactcattattcatcagagagttcatactggagaaaagccttatgaatgcagcaactgtgggaagtttcttagataccgctctacattcattaaacatcataaagtttgcactggggagaagcctcatgagtgcagtaaatgtagggaattgtttaggactaaatcgagccttattatacatcagcagtctcacactggagaaagtccttttaagttaagggaatgtgggaaagacttcaacaaatgtaatactggtcagcgccaaaaaactcacactggagaaaggtcttatgagtgtggtgaatccagcaaagtgtttaaatacaactccagcctcattaaacatcagataattcatactggaaaaaggccttagtggagtgaatgcaggaaagtcaccaaaactgtcacctcattcagcaccaaaaggttcacatcggaccaagaacctattaatatatgtaaatctaatgttgaaagagttcagatggaaatctgcgaggatttcctgctgggaactacattaaaaacatttatgtccaggcgtggtggctcacgcctgtaatcccagcactttgggaggcagaggtgggtggatcacctgaggtcaggagtttgagaccagccgggccaacatggtgaagccccatctctactaaaaatacaaaaattagctgggcatggtggcaggtgcctgtaatcccagctattcag

SEQ ID NO: 1623 - protein, 778 aa, Homo sapiens
MNLTEDCMVFEDVAIYFSQEEWGILNDAQRHLHSNVMLENFALLSSVGCWHGAKDEEVPSKQCVSVRVLQVTIPKPALSTLKAQPCKMCSSILKDILHLAEHDGTHPEQGLYTCAAEHDLHQKEQIREKLTRSDEWRPSFVNHSAHVGERNFTCTQGGKDFTASSDLLQQQVLNSGWKLYRDTQDGEAFQGEQNDFNSSQGGKDFCHQHGLFEHQKTHNGERPYEFSECGELFRYNSNLIKYQQNHAGERPYEGTEYGKTFIRKSNLVQHQKIHSEGFLSKRSDPIEHQEILSRPTPYECTQCGKAFLTQAHLVGHQKTHTGEQPYECNKCGKFFMYNSKLIRHQKVHTGERRYECSECGKLFMDSFTLGRHQRVHTGERPFECSICGKFFSHRSTLNMHQRVHAGKRLYKCSECGKAFSLKHNVVQHLKIHTGERPYECTECEKAFVRKSHLVQHQKIHTDAFSKRSDLIQHKRIDIRPRPYTCSECGKAFLTQAHLVGHQKIHTGERPYECTQCAKAFVRKSHLVQHEKIHTDAFSKRSDLIQHKRIDLRPRPYVCSECGKAFLTQAHLDGHQKIQTGERRYECNECGKFFLDSYKLVIHQRIHTGEKPYKCSKCGKFFRYRCTLSRHQKVHTGERPYECSECGKFFRDSYKLIIHQRVHTGEKPYECSNCGKFLRYRSTFIKHHKVCTGEKPHECSKCRELFRTKSSLIIHQQSHTGESPFKLRECGKDFNKCNTGQRQKTHTGERSYECGESSKVFKYNSSLIKHQIIHTGKRP

SEQ ID NO: 1624 - DNA, 3695 bp, Homo sapiens
cttccggcttccccgccccgccccgtccccgggcgtctccattttggtctcaggtgtggactcggcaagaaccagcgcaagagggaagcagagttatagctaccccggccgcggagccggctcactgcactacccccgcccccttctttcctccagacgccgaagtcgcgggcgctcatggcgggcctggaggtactgttcgcatcggcagcgccggccatcacctgcaggcaggacgcgctcgtctgcttcttgcattgggaagtggtgacacacggttacttcggcttgggtgtcggtgaccagccgggtcccaatgataagaagtcagaactgctgccagctgggtggaacaacaataaagacctgtatgtcctccggtatgagtataaggatgggtccagaaagctccttgtgaaagccatcaccgtggagagcagcatgatcctcaatgtgctggaatatggctcacagcaagtggcagacttgaccctgaacttggatgattatatcgatgcagaacacctgggtgacttccacaggacctacaagaacagtgaggagcttcggtctcgtattgtgtctggaatcatcacacctatccatgagcagtgggaaaaggctaatgtaagcagtccccaccgggagttcccccctgctaccgccagagaggtggacccactccggattcctccacaccacccacacaccagtcggcagcctccctggtgtgatcccctgggcccgtttgttgtcgggggagaagacttagacccttttgggcctcggagaggtggcatgattgtggatcccctgagatctggcttcccaagagcacttattgacccttcctcaggcctcccgaaccgacttcctccaggcgctgtgcccccaggagctcgctttgacccctttggacccattgggaccagcccacccggacctaacccagaccatctccccccgccgggctacgatgacatgtacctgtgaaggcctcaagaatgtaacatcccaggcttccctccattctcctggagctgccaccgctgtccccatcagcaaccatgttcttgcaggctgggggcaagggattctgctcatgtgtttgcagaccggctgggatagcctccccaccccttatcagagccaagacacctgctgcagctctccacctagctgcagatagctcccaaagagaaatcagtgtgtctctttcaccatcagctcctcccctttcaccaccagctcctctccacttcccaagggagactccggcaaccttcagcaacatatatcctcgaccagatgcagtgctataagaacagaacgcattttggatgttattattaagaaccaaatgtcaatacagaattcatgttgccggtttcccacttttctttttacattaatgcatagctgcttccatttatgagactttagagtttgagtttctgtagggctgaatgactctttttcctgcccagggcccattcttgcttctcaggcaccttccgtttattaattgccattgctcctgacatcactaagatgggtccccttctggctgcatgaatggaaatgagtgactggaaatcccataggccacaagaatgactttcacaagggcaggaacattgtggaaagactgcatcattctgatgaggcaaaatcctccagctattcctgtctgggccagttttgtaggtccatctgtgcatgggcagcagtagtcaaaaagccaaggaaaaaacagagcagacctgaaggctaatcttatttttgccactaacttagtgaatgaccctaagcaagttccttctcctcttagggccttgtgccaagcctatgaaattggaggtggctttcctgctctaaagcattttgatgtctcattctgtgtttggtaacccctataaactggggcagaggaaaagaatgatggttcaaggccatacttcccttgaaccttgtgtggttcttgcctaactctgtggtttttggaccccatggggcccagacagagcacaggagcatgggctgcctctgagtgtggtgttgaacttcgggaggagcagggagccctgcaccttgtgtcctggcccacctgacctttggtgttctccggatccttttcagcccgaggcctgacagacgcgggcagtgatgagccctgttctggagtggaaagagcacgatagagcaccaggctaagaggcacgagatcaaggcggtagtcacttccgctctgcagctagcatttcaaccatatgtggatcctttcatttctcagctccctggattccttcccctaaattaggacctattatttacctgtaggtaagcaagctactgtagctcttctgaggtatctgccaggctgttttctgtagcctcagattgcctatctgcttagcctgagaacaggtagatgaaaactaaactgatgcctaggcccagggtcagtctcagatggaagctgggcctgggtggggaggctagcatgcgtggctccctgggtatttctgtcagtccccatggcaagcagtgatttagtaaaacaccccagagtcagggaagccaaccaccttgaaacctttagaacatctctgctttggagaaagacccagagatcaggcagaggtgcagattcaatcattactcataacctttgagagatggcaaatgggaggagtgttagtctttgttttggaattggaccattcttgcaaccaaaaggacttagagcagtttgctcataaagacatcctttattataaaaggaagtatttaaaggatgatagagaccatcagatagaagcagggaaggtagataacttttaggaccttgatgtgaggaaaagataaaatttaaacaataaatttgccacttagattttctagcagcaaagtccgaaaagatagttatatacaaaattctgttttctgaaaacaaaattgtgattcaccttcagaattggccattttttttgtgagtttccttgcatcaaggacactgagaaacacagtcattgtcttaggtgttctatgggaggaagtgaatagagcctttaggaacttcctggtcaagcttatggtgcttattttgatctgggccacttccctccttccagtcatgagtaatcatcaaggagcaagttggagtgtttcaggtgtatattttgtagaacccaaaagattggagccttaacaataaacatcagcactaagtgacctgttcctccttttttaaatagcagctttattgagatataatttacatacccataatttacatacctgtttaaagtatacaattcagtggatttagtatgttcacagtgttgcacatccaccaccatttctaattcctgaacattttcaccacctcaaaaagaaaccacacacccattggcatgactccccattcccttgctcccagccccaggcaaccactaacatctgtctctaaagattttttttttttttctggacagttctcataagtggaatcactcagtattatggccttttgtgtctggcttctttcatttcatgtgatgttttcaagattcattcatgctgtagcatgtatccatggtatggatatatcacattttgcttatccttttatcagttgatggacagttgggttgtttctacaaaaaggctattatgagtaatgcagccaagaa

SEQ ID NO: 1625 - protein, 271 aa, Homo sapiens
MAGLEVLFASAAPAITCRQDALVCFLHWEVVTHGYFGLGVGDQPGPNDKKSELLPAGWNNNKDLYVLRYEYKDGSRKLLVKAITVESSMILNVLEYGSQQVADLTLNLDDYIDAEHLGDFHRTYKNSEELRSRIVSGIITPIHEQWEKANVSSPHREFPPATAREVDPLRIPPHHPHTSRQPPWCDPLGPFVVGGEDLDPFGPRRGGMIVDPLRSGFPRALIDPSSGLPNRLPPGAVPPGARFDPFGPIGTSPPGPNPDHLPPPGYDDMYL

SEQ ID NO: 1626 - DNA, 3686 bp, Homo sapiens
agccaagttctttccatcatcctgggccctcacctctggcataggctcttggtagtgggggcccagacagggaggcacctgccacctgcttcccttctcagccacccacagccctcatagggcagaatgggactcttgctgatgtagacgccgaagtcgcgggcgctcatggcgggcctggaggtactgttcgcatcggcagcgccggccatcacctgcaggcaggacgcgctcgtctgcttcttgcattgggaagtggtgacacacggttacttcggcttgggtgtcggtgaccagccgggtcccaatgataagaagtcagaactgctgccagctgggtggaacaacaataaagacctgtatgtcctccggtatgagtataaggatgggtccagaaagctccttgtgaaagccatcaccgtggagagcagcatgatcctcaatgtgctggaatatggctcacagcaagtggcagacttgaccctgaacttggatgattatatcgatgcagaacacctgggtgacttccacaggacctacaagaacagtgaggagcttcggtctcgtattgtgtctggaatcatcacacctatccatgagcagtgggaaaaggctaatgtaagcagtccccaccgggagttcccccctgctaccgccagagaggtggacccactccggattcctccacaccacccacacaccagtcggcagcctccctggtgtgatcccctgggcccgtttgttgtcgggggagaagacttagacccttttgggcctcggagaggtggcatgattgtggatcccctgagatctggcttcccaagagcacttattgacccttcctcaggcctcccgaaccgacttcctccaggcgctgtgcccccaggagctcgctttgacccctttggacccattgggaccagcccacccggacctaacccagaccatctccccccgccgggctacgatgacatgtacctgtgaaggcctcaagaatgtaacatcccaggcttccctccattctcctggagctgccaccgctgtccccatcagcaaccatgttcttgcaggctgggggcaagggattctgctcatgtgtttgcagaccggctgggatagcctccccaccccttatcagagccaagacacctgctgcagctctccacctagctgcagatagctcccaaagagaaatcagtgtgtctctttcaccatcagctcctcccctttcaccaccagctcctctccacttcccaagggagactccggcaaccttcagcaacatatatcctcgaccagatgcagtgctataagaacagaacgcattttggatgttattattaagaaccaaatgtcaatacagaattcatgttgccggtttcccacttttctttttacattaatgcatagctgcttccatttatgagactttagagtttgagtttctgtagggctgaatgactctttttcctgcccagggcccattcttgcttctcaggcaccttccgtttattaattgccattgctcctgacatcactaagatgggtccccttctggctgcatgaatggaaatgagtgactggaaatcccataggccacaagaatgactttcacaagggcaggaacattgtggaaagactgcatcattctgatgaggcaaaatcctccagctattcctgtctgggccagttttgtaggtccatctgtgcatgggcagcagtagtcaaaaagccaaggaaaaaacagagcagacctgaaggctaatcttatttttgccactaacttagtgaatgaccctaagcaagttccttctcctcttagggccttgtgccaagcctatgaaattggaggtggctttcctgctctaaagcattttgatgtctcattctgtgtttggtaacccctataaactggggcagaggaaaagaatgatggttcaaggccatacttcccttgaaccttgtgtggttcttgcctaactctgtggtttttggaccccatggggcccagacagagcacaggagcatgggctgcctctgagtgtggtgttgaacttcgggaggagcagggagccctgcaccttgtgtcctggcccacctgacctttggtgttctccggatccttttcagcccgaggcctgacagacgcgggcagtgatgagccctgttctggagtggaaagagcacgatagagcaccaggctaagaggcacgagatcaaggcggtagtcacttccgctctgcagctagcatttcaaccatatgtggatcctttcatttctcagctccctggattccttcccctaaattaggacctattatttacctgtaggtaagcaagctactgtagctcttctgaggtatctgccaggctgttttctgtagcctcagattgcctatctgcttagcctgagaacaggtagatgaaaactaaactgatgcctaggcccagggtcagtctcagatggaagctgggcctgggtggggaggctagcatgcgtggctccctgggtatttctgtcagtccccatggcaagcagtgatttagtaaaacaccccagagtcagggaagccaaccaccttgaaacctttagaacatctctgctttggagaaagacccagagatcaggcagaggtgcagattcaatcattactcataacctttgagagatggcaaatgggaggagtgttagtctttgttttggaattggaccattcttgcaaccaaaaggacttagagcagtttgctcataaagacatcctttattataaaaggaagtatttaaaggatgatagagaccatcagatagaagcagggaaggtagataacttttaggaccttgatgtgaggaaaagataaaatttaaacaataaatttgccacttagattttctagcagcaaagtccgaaaagatagttatatacaaaattctgttttctgaaaacaaaattgtgattcaccttcagaattggccattttttttgtgagtttccttgcatcaaggacactgagaaacacagtcattgtcttaggtgttctatgggaggaagtgaatagagcctttaggaacttcctggtcaagcttatggtgcttattttgatctgggccacttccctccttccagtcatgagtaatcatcaaggagcaagttggagtgtttcaggtgtatattttgtagaacccaaaagattggagccttaacaataaacatcagcactaagtgacctgttcctccttttttaaatagcagctttattgagatataatttacatacccataatttacatacctgtttaaagtatacaattcagtggatttagtatgttcacagtgttgcacatccaccaccatttctaattcctgaacattttcaccacctcaaaaagaaaccacacacccattggcatgactccccattcccttgctcccagccccaggcaaccactaacatctgtctctaaagattttttttttttttctggacagttctcataagtggaatcactcagtattatggccttttgtgtctggcttctttcatttcatgtgatgttttcaagattcattcatgctgtagcatgtatccatggtatggatatatcacattttgcttatccttttatcagttgatggacagttgggttgtttctacaaaaaggctattatgagtaatgcagccaagaa

SEQ ID NO: 1627 - protein, 271 aa, Homo sapiens; identical to SEQ ID NO: 1625

SEQ ID NO: 1628 - DNA, 3644 bp, Homo sapiens
aactaggggtaaggaggtacaaagaacaaggaagttaggctttgaaaatagagaacaaagaacaagtaagctgaacaagtaagttcctctttggagaggcaagagggcaaagaagctgaggacccagaagacaggattgtgcctaagaaagtggccttggagcagaggcccaaagaaagcggggagagcgccttgcccatcggtaagggaaaggtgctccaggcacagaagcagctaatgcaacggccctgaggcaaatgcaagataactggcaagttccaggaacagcaaggagggcaaggcgcctggagcagaggaagctagcggatcccttgatgagagggaggaactggcccatctctcatgggtcctgcaggcaggccatgagactgtcttttatgcggggcgagataacgaggcatggacgtgttgtgagcggaggcctagcctgttcaaggtctgaatttttacccctagaatgtaagaagcatgggagcagggactttgttttgctccctgccatatccacagccctagaaaaacgtcgggccattgatagctctcagtaaatgcttgacaagtaagtgaatgaacgaatgcacaattaatgaaatgagggctgcgtcaatgaataactgggaatctgactcctgcagggagccttcagcccacaggtgtatgtaagacccgccccgcctctcatccttcgggctcccacccccgccgttaggctgcggttcgcgccgcggtcgccagagggcgcggagcggcggggcttcccgcacggagggctttgcgtgaggcaccgcgtggggcggggctgcgggcgggctcccagctgctgggccctcatcggctgggcctcgtcgaccggcaagcggaacgcggcagcggggctgggcctgtgcggcggccgccggagcgctttggaaggcgcacggggcgaagatggcggcggagcgacaggaggcgctgagggagttcgtggcggtgacgggcgccgaggaggaccgggcccgcttctttctcgagtcggccggctgggacttgcagatcgcgctagcgagcttttatgaggacggaggggatgaagacattgtgaccatttcgcaggcaacccccagttcagtgtccagaggcacagcccccagtgataatagagtgacatccttcagagacctcattcatgaccaagatgaagatgaggaggaagaggaaggccagaggttttatgctgggggctcagagagaagtggacagcagattgttggccctcccaggaagaaaagtcccaacgagctggtggatgatctctttaaaggtgccaaagagcatggagctgtagctgtggagcgagtgaccaagagccctggagagaccagtaaaccgagaccatttgcaggaggtggctaccgccttggggcagcaccagaggaagagtctgcctatgtggcaggagaaaagaggcagcattccagccaagatgttcatgtagtattgaaactctggaagagtggattcagcctggataatggagaactcagaagctaccaagacccatccaatgcccagtttctggagtctatccgcagaggggaggtgccagcagagcttcggaggctagctcacggtggacaggtgaacttggatatggaggaccatcgggacgaggactttgtgaagcccaaaggagccttcaaagccttcactggcgagggtcagaaactgggcagcactgccccccaggtgttgagtaccagctctccagcccaacaggcagaaaatgaagccaaagccagctcttccatcttaatcgacgaatcagagcctaccacaaacatccaaattcggcttgcagacggcgggaggctggtgcagaaatttaaccacagccacaggatcagcgacatccgactcttcatcgtggatgcccggccagccatggctgccaccagctttatcctcatgactactttcccgaacaaagagctggctgatgagagccagaccctgaaggaagccaacctgctcaatgctgtcatcgtgcagcggttaacataaccgcccagccagctgcctggcctccctcctgtgtttcccatggccagtggccatgccccatggggatcgcccctcctgcccccttgtgcacacccagcagtccagtgcaacgtctcctccatagctctgggttcttagatcttggttggacgtttgttttctccttagttgcatttcctgggtttttgtgatgatcaatggactttaatgaaaaaaaaaataaaaacaaccaaaaaaattgaaggaatatcaccagcatgttgtacggaaactctcccactgaagcaggctttaattgctttaaaattatatttatcttggggcctgtgggaggaaacttccttccatcttctctgcataaaaacttgtggcacacaatgcttattcactagtgtgtcccacccgccagccccacagatgactggaggaaggaggggaaatgtgtagaaagaggcttcgccaccacttgttcccacgagaatatgtcacttgcccagataaaactgggcggcagccagagttccctgaagtgggaagtcagagctccatgcacacagtgtcttcagaaggtgaaaataaatatttccctgtgctccttttactcaacccctggggtatctaatcttgccaggtcttggccagttgagattctgttccacctgcctgcctggccctttcctccattaccatccagactgctcgcctcctggggattctcaggggctccattatggcttgatttactccacgtgcagaagtcttgagtggacctaggaggtaggtgggatattttttttcactaggatacagctcatgccaacccatcctaagtgagttcagaatcagggtatcttgccctataagataaacagtcaaaatgccaccgagctgttcactagtgatgtgtggcaaatcaaatcaactgttgaagaaggggtgagttttctgtgctacaagcacctgtcactgttggtacttgcaggaggcttctgctgggtatgttttggaagtgagtgtcactacttggctttgcttagcaggttctgcttcacacttgttctttgacctgctgacttgtgacttgcagaaacataggcagtagtcctagcctggtaaagaccctccaccacccctataagtttgattgctatgcaggtttgggagaggaggcctattgggctcttggatggaaccctttcccgtattaaacaaaccagagacagaatcagtgctgactcaggatctcctggtttggaatcgtaatgtgcctcaatcctctttccaagcaggcctcaccagtctctttctctttcctgcttcacccctgcaatgagccaagaaccaacactacatccacctagaactgcagaagggcttgtggtttcaaccaagacccatcctgagcaagggacttggcttggtgcttttgatcccaaagttcccacaccggcagtggcctgctggggcaatggcatctgtcacggtgttttctccagcaggtggagattatggaacctacatatgggtctggaaaaactgtacactgttgtcaccttgaccattaaaaaccagaatgaggacaa

SEQ ID NO: 1629 - protein, 370 aa, Homo sapiens
MAAERQEALREFVAVTGAEEDRARFFLESAGWDLQIALASFYEDGGDEDIVTISQATPSSVSRGTAPSDNRVTSFRDLIHDQDEDEEEEEGQRFYAGGSERSGQQIVGPPRKKSPNELVDDLFKGAKEHGAVAVERVTKSPGETSKPRPFAGGGYRLGAAPEEESAYVAGEKRQHSSQDVHVVLKLWKSGFSLDNGELRSYQDPSNAQFLESIRRGEVPAELRRLAHGGQVNLDMEDHRDEDFVKPKGAFKAFTGEGQKLGSTAPQVLSTSSPAQQAENEAKASSSILIDESEPTTNIQIRLADGGRLVQKFNHSHRISDIRLFIVDARPAMAATSFILMTTFPNKELADESQTLKEANLLNAVIVQRLT

SEQ ID NO: 1630 - DNA, 3551 bp, Homo sapiens
aactaggggtaaggaggtacaaagaacaaggaagttaggctttgaaaatagagaacaaagaacaagtaagctgaacaagtaagttcctctttggagaggcaagagggcaaagaagctgaggacccagaagacaggattgtgcctaagaaagtggccttggagcagaggcccaaagaaagcggggagagcgccttgcccatcggtaagggaaaggtgctccaggcacagaagcagctaatgcaacggccctgaggcaaatgcaagataactggcaagttccaggaacagcaaggagggcaaggcgcctggagcagaggaagctagcggatcccttgatgagagggaggaactggcccatctctcatgggtcctgcaggcaggccatgagactgtcttttatgcggggcgagataacgaggcatggacgtgttgtgagcggaggcctagcctgttcaaggtctgaatttttacccctagaatgtaagaagcatgggagcagggactttgttttgctccctgccatatccacagccctagaaaaacgtcgggccattgatagctctcagtaaatgcttgacaagtaagtgaatgaacgaatgcacaattaatgaaatgagggctgcgtcaatgaataactgggaatctgactcctgcagggagccttcagcccacaggtgtatgtaagacccgccccgcctctcatccttcgggctcccacccccgccgttaggctgcggttcgcgccgcggtcgccagagggcgcggagcggcggggcttcccgcacggagggctttgcgtgaggcaccgcgtggggcggggctgcgggcgggctcccagctgctgggccctcatcggctgggcctcgtcgaccggcaagcggaacgcggcagcggggctgggcctgtgcggcggccgccggagcgctttggaaggcgcacggggcgaagatggcggcggagcgacaggaggcgctgagggagttcgtggcggtgacgggcgccgaggaggaccgggcccgcttctttctcgagtcggccggctgggacttgcagatcgcgctagcgagcttttatgaggacggaggggatgaagacattgtgaccatttcgcaggcaacccccagttcagtgtccagaggcacagcccccagtgataatagagtgacatccttcagagacctcattcatgaccaagatgaagatgaggaggaagaggaaggccagaggttttatgctgggggctcagagagaagtggacagcagattgttggccctcccaggaagaaaagtcccaacgagctggtggatgatctctttaaaggtgccaaagagcatggagctgtagctgtggagcgagtgaccaagagccctggagagaccagtaaaccgagagttcatgtagtattgaaactctggaagagtggattcagcctggataatggagaactcagaagctaccaagacccatccaatgcccagtttctggagtctatccgcagaggggaggtgccagcagagcttcggaggctagctcacggtggacaggtgaacttggatatggaggaccatcgggacgaggactttgtgaagcccaaaggagccttcaaagccttcactggcgagggtcagaaactgggcagcactgccccccaggtgttgagtaccagctctccagcccaacaggcagaaaatgaagccaaagccagctcttccatcttaatcgacgaatcagagcctaccacaaacatccaaattcggcttgcagacggcgggaggctggtgcagaaatttaaccacagccacaggatcagcgacatccgactcttcatcgtggatgcccggccagccatggctgccaccagctttatcctcatgactactttcccgaacaaagagctggctgatgagagccagaccctgaaggaagccaacctgctcaatgctgtcatcgtgcagcggttaacataaccgcccagccagctgcctggcctccctcctgtgtttcccatggccagtggccatgccccatggggatcgcccctcctgcccccttgtgcacacccagcagtccagtgcaacgtctcctccatagctctgggttcttagatcttggttggacgtttgttttctccttagttgcatttcctgggtttttgtgatgatcaatggactttaatgaaaaaaaaaataaaaacaaccaaaaaaattgaaggaatatcaccagcatgttgtacggaaactctcccactgaagcaggctttaattgctttaaaattatatttatcttggggcctgtgggaggaaacttccttccatcttctctgcataaaaacttgtggcacacaatgcttattcactagtgtgtcccacccgccagccccacagatgactggaggaaggaggggaaatgtgtagaaagaggcttcgccaccacttgttcccacgagaatatgtcacttgcccagataaaactgggcggcagccagagttccctgaagtgggaagtcagagctccatgcacacagtgtcttcagaaggtgaaaataaatatttccctgtgctccttttactcaacccctggggtatctaatcttgccaggtcttggccagttgagattctgttccacctgcctgcctggccctttcctccattaccatccagactgctcgcctcctggggattctcaggggctccattatggcttgatttactccacgtgcagaagtcttgagtggacctaggaggtaggtgggatattttttttcactaggatacagctcatgccaacccatcctaagtgagttcagaatcagggtatcttgccctataagataaacagtcaaaatgccaccgagctgttcactagtgatgtgtggcaaatcaaatcaactgttgaagaaggggtgagttttctgtgctacaagcacctgtcactgttggtacttgcaggaggcttctgctgggtatgttttggaagtgagtgtcactacttggctttgcttagcaggttctgcttcacacttgttctttgacctgctgacttgtgacttgcagaaacataggcagtagtcctagcctggtaaagaccctccaccacccctataagtttgattgctatgcaggtttgggagaggaggcctattgggctcttggatggaaccctttcccgtattaaacaaaccagagacagaatcagtgctgactcaggatctcctggtttggaatcgtaatgtgcctcaatcctctttccaagcaggcctcaccagtctctttctctttcctgcttcacccctgcaatgagccaagaaccaacactacatccacctagaactgcagaagggcttgtggtttcaaccaagacccatcctgagcaagggacttggcttggtgcttttgatcccaaagttcccacaccggcagtggcctgctggggcaatggcatctgtcacggtgttttctccagcaggtggagattatggaacctacatatgggtctggaaaaactgtacactgttgtcaccttgaccattaaaaaccagaatgaggacaa

SEQ ID NO: 1631 - protein, 339 aa, Homo sapiens
MAAERQEALREFVAVTGAEEDRARFFLESAGWDLQIALASFYEDGGDEDIVTISQATPSSVSRGTAPSDNRVTSFRDLIHDQDEDEEEEEGQRFYAGGSERSGQQIVGPPRKKSPNELVDDLFKGAKEHGAVAVERVTKSPGETSKPRVHVVLKLWKSGFSLDNGELRSYQDPSNAQFLESIRRGEVPAELRRLAHGGQVNLDMEDHRDEDFVKPKGAFKAFTGEGQKLGSTAPQVLSTSSPAQQAENEAKASSSILIDESEPTTNIQIRLADGGRLVQKFNHSHRISDIRLFIVDARPAMAATSFILMTTFPNKELADESQTLKEANLLNAVIVQRLT

SEQ ID NO: 1632 - DNA, 3451 bp, Homo sapiens
aactaggggtaaggaggtacaaagaacaaggaagttaggctttgaaaatagagaacaaagaacaagtaagctgaacaagtaagttcctctttggagaggcaagagggcaaagaagctgaggacccagaagacaggattgtgcctaagaaagtggccttggagcagaggcccaaagaaagcggggagagcgccttgcccatcggtaagggaaaggtgctccaggcacagaagcagctaatgcaacggccctgaggcaaatgcaagataactggcaagttccaggaacagcaaggagggcaaggcgcctggagcagaggaagctagcggatcccttgatgagagggaggaactggcccatctctcatgggtcctgcaggcaggccatgagactgtcttttatgcggggcgagataacgaggcatggacgtgttgtgagcggaggcctagcctgttcaaggtctgaatttttacccctagaatgtaagaagcatgggagcagggactttgttttgctccctgccatatccacagccctagaaaaacgtcgggccattgatagctctcagtaaatgcttgacaagtaagtgaatgaacgaatgcacaattaatgaaatgagggctgcgtcaatgaataactgggaatctgactcctgcagggagccttcagcccacaggtgtatgtaagacccgccccgcctctcatccttcgggctcccacccccgccgttaggctgcggttcgcgccgcggtcgccagagggcgcggagcggcggggcttcccgcacggagggctttgcgtgaggcaccgcgtggggcggggctgcgggcgggctcccagctgctgggccctcatcggctgggcctcgtcgaccggcaagcggaacgcggcagcggggctgggcctgtgcggcggccgccggagcgctttggaaggcgcacggggcgaagatggcggcggagcgacaggaggcgctgagggagttcgtggcggtgacgggcgccgaggaggaccgggcccgcttctttctcgagtcggccggctgggacttgcagtgataatagagtgacatccttcagagacctcattcatgaccaagatgaagatgaggaggaagaggaaggccagaggtgccaaagagcatggagctgtagctgtggagcgagtgaccaagagccctggagagaccagtaaaccgagaccatttgcaggaggtggctaccgccttggggcagcaccagaggaagagtctgcctatgtggcaggagaaaagaggcagcattccagccaagatgttcatgtagtattgaaactctggaagagtggattcagcctggataatggagaactcagaagctaccaagacccatccaatgcccagtttctggagtctatccgcagaggggaggtgccagcagagcttcggaggctagctcacggtggacaggtgaacttggatatggaggaccatcgggacgaggactttgtgaagcccaaaggagccttcaaagccttcactggcgagggtcagaaactgggcagcactgccccccaggtgttgagtaccagctctccagcccaacaggcagaaaatgaagccaaagccagctcttccatcttaatcgacgaatcagagcctaccacaaacatccaaattcggcttgcagacggcgggaggctggtgcagaaatttaaccacagccacaggatcagcgacatccgactcttcatcgtggatgcccggccagccatggctgccaccagctttatcctcatgactactttcccgaacaaagagctggctgatgagagccagaccctgaaggaagccaacctgctcaatgctgtcatcgtgcagcggttaacataaccgcccagccagctgcctggcctccctcctgtgtttcccatggccagtggccatgccccatggggatcgcccctcctgcccccttgtgcacacccagcagtccagtgcaacgtctcctccatagctctgggttcttagatcttggttggacgtttgttttctccttagttgcatttcctgggtttttgtgatgatcaatggactttaatgaaaaaaaaaataaaaacaaccaaaaaaattgaaggaatatcaccagcatgttgtacggaaactctcccactgaagcaggctttaattgctttaaaattatatttatcttggggcctgtgggaggaaacttccttccatcttctctgcataaaaacttgtggcacacaatgcttattcactagtgtgtcccacccgccagccccacagatgactggaggaaggaggggaaatgtgtagaaagaggcttcgccaccacttgttcccacgagaatatgtcacttgcccagataaaactgggcggcagccagagttccctgaagtgggaagtcagagctccatgcacacagtgtcttcagaaggtgaaaataaatatttccctgtgctccttttactcaacccctggggtatctaatcttgccaggtcttggccagttgagattctgttccacctgcctgcctggccctttcctccattaccatccagactgctcgcctcctggggattctcaggggctccattatggcttgatttactccacgtgcagaagtcttgagtggacctaggaggtaggtgggatattttttttcactaggatacagctcatgccaacccatcctaagtgagttcagaatcagggtatcttgccctataagataaacagtcaaaatgccaccgagctgttcactagtgatgtgtggcaaatcaaatcaactgttgaagaaggggtgagttttctgtgctacaagcacctgtcactgttggtacttgcaggaggcttctgctgggtatgttttggaagtgagtgtcactacttggctttgcttagcaggttctgcttcacacttgttctttgacctgctgacttgtgacttgcagaaacataggcagtagtcctagcctggtaaagaccctccaccacccctataagtttgattgctatgcaggtttgggagaggaggcctattgggctcttggatggaaccctttcccgtattaaacaaaccagagacagaatcagtgctgactcaggatctcctggtttggaatcgtaatgtgcctcaatcctctttccaagcaggcctcaccagtctctttctctttcctgcttcacccctgcaatgagccaagaaccaacactacatccacctagaactgcagaagggcttgtggtttcaaccaagacccatcctgagcaagggacttggcttggtgcttttgatcccaaagttcccacaccggcagtggcctgctggggcaatggcatctgtcacggtgttttctccagcaggtggagattatggaacctacatatgggtctggaaaaactgtacactgttgtcaccttgaccattaaaaaccagaatgaggacaa

SEQ ID NO: 1633 - protein, 259 aa, Homo sapiens
MTKMKMRRKRKARGAKEHGAVAVERVTKSPGETSKPRPFAGGGYRLGAAPEEESAYVAGEKRQHSSQDVHVVLKLWKSGFSLDNGELRSYQDPSNAQFLESIRRGEVPAELRRLAHGGQVNLDMEDHRDEDFVKPKGAFKAFTGEGQKLGSTAPQVLSTSSPAQQAENEAKASSSILIDESEPTTNIQIRLADGGRLVQKFNHSHRISDIRLFIVDARPAMAATSFILMTTFPNKELADESQTLKEANLLNAVIVQRLT

SEQ ID NO: 1634 - DNA, 2642 bp, Homo sapiens
agaggagccccaagtcttggggaccacagaagatgccatgtgctccacgatgtcggcccccacctgcctggcccacttgcctccctgcttcctgctgctggcactggtccttgtcccctcagatgcctctgggcagagcagcaggaatgactggcaggtgctacagcccgagggccccatgctggtggcagaaggtgagacacttctactgaggtgtatggtggtcggctcctgcactgatggtatgataaaatgggtgaaggtgagcactcaggaccaacaggaaatttataactttaaacgtggctccttccctggggtaatgcccatgatccaacggacatcagaaccactgaattgtgattattccatctatatccacaatgtcaccagggagcacactggaacctaccactgtgtgaggtttgatggtttgagtgaacactcagaaatgaaatcggatgaaggcacctcagtgcttgtgaagggagctggggaccctgaaccagacctgtggatcatccagccccaggaattggtgttggggaccactggagacactgtctttctgaactgcacagtgcttggagacggtccccctggacccatcaggtggttccagggagctggtctgagccgggaggccatttacaactttggaggcatctcccaccccaaggagacagcggtgcaggcctccaacaatgacttcagcattcttctgcaaaacgtctccagtgaggatgcaggcacctattactgtgtaaagtttcagaggaaacccaacaggcaatacctgtctggacagggcaccagcctgaaagtgaaagcaaaatctacctcttccaaagaggcagaattcaccagtgaacctgcaactgagatgtctccaacaggcctcctggttgtgttcgcacctgtggtcctggggctgaaggcaattaccttggctgcactcctactggccctggctacctctcggaggagccctgggcaagaagatgtcaagaccacaggcccagcaggagccatgaacaccttagcatggagcaagggtcaagagtgaggggtcagccccagagtgaggaccctctgagttggagaggagccagggctcctcaaccatttccctacctccagtcccagcctctaggtgcccccaggcctcatgacaaactcctagatccctacatctggttttggtccacctagtgaaattcccttctttgcaccgggcttccctctaaaatgtctccctttctctttttggcctgttcaagacctccttgcttttcagtccctggctcagtctctcctcaacacccttgcccctgctgcagccctttctggtgcgccctgcccctttccccacctcgctacatccttcttggcctccaacatccaactcagagtcttcttcccaggagatgtctgtaagaatctctgaactcaaccagccagaccatctgtgcccctccatctacacctttctccccactccttcctgccttccttccatccccctcatggctggcttgggcaggtataatattagaatgcaggttcagcaactataacaaagctcttaaataacagtggcttaaaccagtggaaatcaaccagaaagttgaccatcagcaggccaagcaatacagagactccctggtattgagacccaggattcactgatctcattgctaccaggtccaccttctaggcagccagactggaaaagagggcaggaaaggggagcaggaccctcccctttaagtgcacagtcaggaacttggccacctcacttatctctacttggctggaatgtggtcacatggtcacacctagctgcaagaaacactgggagatgtagtctttatttctggcagcaatgcgcccagctgcaagttttcactagagaaaccagatggcagatatcaggggataaccagttatctccaccacagcagcatacagacagcctctcacctgccctgtgggacacctgagttcaatgcccagctagctagccagcacttcttcccactatcacctcccctggggcagcatgatgtggggcagtagttcccaagatgagtgattttgcccccactggacttttggcaatgtctagagatgtttttggttggcacaacctgggggggtgctaccaccatctagtggactgagaagccctgacatggggaagagtgtgcatgcccaggagtcagacacacctgcctttaaccctgaggcctctgcctcctccctgtgcaccctcagtgactaatcagagtcccttcccatcacggaacatccaggatactaatgtggacttctctgcattgtgtaagaaccaattcaagaccaggcacggtggcttatgcatgtaatcccagcactttgggaggccgaggtgggtggatcacctgagttcaggagtttgagaccagcctggctaacatggtgaaacctcgtctctactaaaaatacaaaaaattagccaggcgtggtggtgtgcacctgtaatcccagctacttgggaggatggggcaggagaaccgcttgaactgggaggcagaggctgcagtgagctgagatcgcgccattgcactccagcctgggcaacaagagcaaaactccgtctc

SEQ ID NO: 1635 - protein, 342 aa, Homo sapiens
MCSTMSAPTCLAHLPPCFLLLALVLVPSDASGQSSRNDWQVLQPEGPMLVAEGETLLLRCMVVGSCTDGMIKWVKVSTQDQQEIYNFKRGSFPGVMPMIQRTSEPLNCDYSIYIHNVTREHTGTYHCVRFDGLSEHSEMKSDEGTSVLVKGAGDPEPDLWIIQPQELVLGTTGDTVFLNCTVLGDGPPGPIRWFQGAGLSREAIYNFGGISHPKETAVQASNNDFSILLQNVSSEDAGTYYCVKFQRKPNRQYLSGQGTSLKVKAKSTSSKEAEFTSEPATEMSPTGLLVVFAPVVLGLKAITLAALLLALATSRRSPGQEDVKTTGPAGAMNTLAWSKGQE

SEQ ID NO: 1636 - DNA, 770 bp, Homo sapiens
acaaaagcaggaaaccctttgaccgggctccttcctattgcaccaacagccttgtgttgctgcaatgaaaacacttccccaagcagctgtggccaagagacgcagaaactgccttgtccacgggccccgcctcagactccaacactcacaagagagcagaggagccccaagtcttggggaccacagaagatgccatgtgctccacgatgtcggcccccacctgcctggcccacttgcctccctgcttcctgctgctggcactggtccttgtcccctcagatgcctctgggcagagcagcaggaatgactggcaggtgctacagcccgagggccccatgctggtggcagaaggagctggggaccctgaaccagacctgtggatcatccagccccaggaattggtgttggggaccactggagacactgtctttctgaactgcacagtgcttggagacggtccccctggacccatcaggtggttccagggagctggtctgagccgggaggccatttacaactttggaggcatctcccaccccaaggagacagcggtgcaggcctccaacaatgacttcagcattcttctgcaaaacgtctccagtgaggatgcaggcacctattactgtgtaaagtttcagaggaaacccaacaggcaatacctgtctggacagggcaccagcctgaaagtgaaagcaaaatctacctcttccaaagaggcagaattcaccagtgaacctgcaactgagatgtctccaacaggtttgcagtga

SEQ ID NO: 1637 - protein, 187 aa, Homo sapiens
MSAPTCLAHLPPCFLLLALVLVPSDASGQSSRNDWQVLQPEGPMLVAEGAGDPEPDLWIIQPQELVLGTTGDTVFLNCTVLGDGPPGPIRWFQGAGLSREAIYNFGGISHPKETAVQASNNDFSILLQNVSSEDAGTYYCVKFQRKPNRQYLSGQGTSLKVKAKSTSSKEAEFTSEPATEMSPTGLQ

SEQ ID NO: 1638 - DNA, 2936 bp, Homo sapiens
ctcgctgcgggaagggtcctgggccccgggcggcggtcgccaggtctcagggccgggggtacccgagtctcgtttcctctcagtccatccacccttcatggggccagagccctctctccagaatctgagcagcaatgccgtttgctgaagacaagacctataagtatatctgccgcaatttcagcaatttttgcaatgtggatgttgtagagattctgccttacctgccctgcctcacagcaagagaccaggatcgactgcgggccacctgcacactctcagggaaccgggacaccctctggcatctcttcaatacccttcagcggcggcccggctgggtggagtacttcattgcggcactgaggggctgtgagctagttgatctcgcggacgaagtggcctctgtctaccagagctaccagcctcggacctcggaccgtcccccagacccactggagccaccgtcacttcctgctgagaggccagggccccccacacctgctgcggcccacagcatcccctacaacagctgcagagagaaggagccaagttaccccatgcctgtccaggagacccaggcgccagagtccccaggagagaattcagagcaagccctgcagacgctcagccccagagccatcccaaggaatccagatggtggccccctggagtcctcctctgacctggcagccctcagccctctgacctccagcgggcatcaggagcaggacacagaactgggcagtacccacacagcaggtgcgacctccagcctcacaccatcccgtgggcctgtgtctccatctgtctccttccagcccctggcccgttccacccccagggcaagccgcttgcctggacccacagggtcagttgtatctactggcacctccttctcctcctcatcccctggcttggcctctgcaggggctgcagagggtaaacagggtgcagagagtgaccaggccgagcctatcatctgctccagtggggcagaggcacctgccaactctctgccctccaaagtgcctaccaccttgatgcctgtgaacacagtggccctgaaagtgcctgccaacccagcatctgtcagcacagtgccctccaagttgccaactagctcaaagccccctggtgcagtgccttctaatgcgctcaccaatccagcaccatccaaattgcccatcaactcaacccgtgctggcatggtgccatccaaagtgcctactagcatggtgctcaccaaggtgtctgccagcacagtccccactgacgggagcagcagaaatgaggagaccccagcagctccaacacccgccggcgccactggaggcagctcagcctggctagacagcagctctgagaataggggccttgggtcggagctgagtaagcctggcgtgctggcatcccaggtagacagcccgttctcgggctgcttcgaggatcttgccatcagtgccagcacctccttgggcatggggccctgccatggcccagaggagaatgagtataagtccgagggcacctttgggatccacgtggctgagaaccccagcatccagctcctggagggcaaccctgggccacctgcggacccggatggcggccccaggccacaagccgaccggaagttccaggagagggaggtgccatgccacaggccctcacctggggctctgtggctccaggtggctgtgacaggggtgctggtagtcacactcctggtggtgctgtaccggcggcgtctgcactagtgaagccctgggctcttcccaccacccatctgttccgttcctgcagtacacctggcccctctccgaagccccttgtccctttcttggggattgtggaggctgggtcagaggggagttaagggactgcaggcctggcagcaggacatgccttggctgaaccaagtcctgagagcagcatctctgtccccacggtgccttgtgtgggtccccgtccttggctttctgggtcctgggctgcccccagtgctccagaccttccccactggcaatccaggttatcatccatgtcctccagaggagcttcctcctccaggcctcagccctgttggcccaggtggagcaggagggaccactggaacatgtggtgcttgggaatgcctctcctgttgcattggtccctgaaggcctcagggcaggtatgtggtgtgtgggcgactccacaagacctgcctcccatcctggcagcccagcctgagaccgttgcattgaggcaggcaggagcggcagggtggctgctctccaggagcccaactgccttgagttcctgccccactgggccccctcccctgctgggcaatcctgggaaggtctggaggttcctgtggacctcagggaagccaggggcagctgtcaggcctgaggaagacctgtggagctcctctccagcctcctctttccctcccctctggtctccattctcttcagctccctacatgggctggggaggagacacctggtgggcagagctcaggcagaggtttggatttcagctccctcacttccggggctgtgtggctttggcagatgtcagacttctggtcttgcttctccacgtggacagtgagtatctggctcattcttcactgggttcttctgagattgaacctacaggtgtttgccaagtgcctggcccagagcaagtggccactgcttctcccatctctctcctgcccaacctggtagagctgagggcatgagaggcagagtgcacagtggtcaagggtgcagctctgcagcacaggcagcctaggcctgcgtcccaacctgcctctcaccagctctgtgaccttgggcaagggatttatctgtctgtcccttagttttctcacctgtaaaaggaggataagtatatatatatatttcccagtgttgtgaagattaaaggagtttatcgatgta

SEQ ID NO: 1639 - protein, 540 aa, Homo sapiens
MPFAEDKTYKYICRNFSNFCNVDVVEILPYLPCLTARDQDRLRATCTLSGNRDTLWHLFNTLQRRPGWVEYFIAALRGCELVDLADEVASVYQSYQPRTSDRPPDPLEPPSLPAERPGPPTPAAAHSIPYNSCREKEPSYPMPVQETQAPESPGENSEQALQTLSPRAIPRNPDGGPLESSSDLAALSPLTSSGHQEQDTELGSTHTAGATSSLTPSRGPVSPSVSFQPLARSTPRASRLPGPTGSVVSTGTSFSSSSPGLASAGAAEGKQGAESDQAEPIICSSGAEAPANSLPSKVPTTLMPVNTVALKVPANPASVSTVPSKLPTSSKPPGAVPSNALTNPAPSKLPINSTRAGMVPSKVPTSMVLTKVSASTVPTDGSSRNEETPAAPTPAGATGGSSAWLDSSSENRGLGSELSKPGVLASQVDSPFSGCFEDLAISASTSLGMGPCHGPEENEYKSEGTFGIHVAENPSIQLLEGNPGPPADPDGGPRPQADRKFQEREVPCHRPSPGALWLQVAVTGVLVVTLLVVLYRRRLH

SEQ ID NO: 1640 - DNA, 1712 bp, Homo sapiens
atgctgggggaggggctggcggcctcgacggcagctgcggaactaggccgagggacaaaggctaagtttttccatggtttggactggatatcggtggaactctggtcaagctggtatattttgaacccaaagacatcactgctgaagaagaagaggaagaagtggaaagtcttaaaagcattcggaagtacctgacctccaatgtggcttatgggtctacaggcattcgggacgtgcacctcgagctgaaggacctgactctgtgtggacgcaaaggcaatctgcactttatacgctttcccactcatgacatgcctgcttttattcaaatgggcagagataaaaacttctcgagtctccacactgtcttttgtgccactggaggtggagcgtacaaatttgagcaggattttctcacaataggtgatcttcagctttgcaaactggatgaactagattgcttgatcaaaggaattttatacattgactcagtcggattcaatggacggtcacagtgctattactttgaaaaccctgctgattctgaaaagtgtcagaagttaccatttgatttgaaaaatccgtatcctctgcttctggtgaacattggctcaggggttagcatcttagcagtatattccaaagataattacaaacgggtcacaggtactagtcttggaggaggaactttttttggtctctgctgtcttcttactggctgtaccacttttgaagaagctcttgaaatggcatctcgtggagatagcaccaaagtggataaactagtacgagatatttatggaggggactatgagaggtttggactgccaggctgggctgtggcttcaagctttggaaacatgatgagcaaggagaagcgagaggctgtcagtaaagaggacctggccagagcgactttgatcaccatcaccaacaacattggctcaatagcaagaatgtgtgcccttaatgaaaacattaaccaggtggtatttgttggaaatttcttgagaattaatacgatcgccatgcggcttttggcatatgctttggattattggtccaaggggcagttgaaagcacttttttcggaacacgagggttattttggagctgttggagcactccttgagctgttgaagatcccgtgatcattacctggggaggggttcctgaaaccttccacaatgggatctgtggactttcatttttttaagagacttactcaatttcatgactgtactacctgaaacaaagtgagaaaggacaggtgtatttttctaagtcatcaagataaatccttaagaattcagtctaaattagcaaccaggaaggaaaaatatattaaaaacaacaaaaaagtggcacatgtccaggcagtgtgaggatttgctgtatataagttgcctgctttgtatttttgaaatctctgcatcactcattggaagtgcttctgaagagagctgctctgtgttcagttgactggttttgtgtcctgtttgaacttgctgaatgtaaggcaggctactatgcgttataatctaatcacaatttgtcaatatggtcttggcaatcatctgtgcattactctggtttgcattaagcctgtgtgtgaacttactgtaaaacatgttttatttcaaggttctgcaaaattaattgggcaggttaattgtgtacctgaaacttaacaagcagtttttggaagggca

SEQ ID NO: 1641 - protein, 279 aa, Homo sapiens
MPAFIQMGRDKNFSSLHTVFCATGGGAYKFEQDFLTIGDLQLCKLDELDCLIKGILYIDSVGFNGRSQCYYFENPADSEKCQKLPFDLKNPYPLLLVNIGSGVSILAVYSKDNYKRVTGTSLGGGTFFGLCCLLTGCTTFEEALEMASRGDSTKVDKLVRDIYGGDYERFGLPGWAVASSFGNMMSKEKREAVSKEDLARATLITITNNIGSIARMCALNENINQVVFVGNFLRINTIAMRLLAYALDYWSKGQLKALFSEHEGYFGAVGALLELLKIP

SEQ ID NO: 1642 - DNA, 2280 bp, Homo sapiens
gggtggatgaggaggctcgggcccttccacccacgcgtccattgggcggcgccgccatcactctcttctgggctacaccgccttctcttcctccgcggaacccggatcccctcctccaccaccctctccccgccccgtcacgatagcctctcattggacggaggcacggtcaatcctcctcgagttagggagccgactggacgcgaggcctttgggccgtccccagcctcgtcggattggcttcctgcgcgttggcgcaacggaagaggcggccggccgagggcgcgcctctgctctggctggactgccgcggaggaggcgagaaggaatccgacgctggggggcttgctcgggcggcagcgactgctgctgcggatgggagggggccggctcggcgcgcccatggagcgccacggcagggcttccgccacctccgtctcgtcggctggggagcaggcggccggggaccccgaagggcggcggcaggagccactgcggcgccgggcgagcagcgcgtcggtgcccgcggtcggggcctcggctgagggcacgaggcgggatcgactgggctcttacagcggccccacctcggtctcccgccagcgcgtcgaaagcctgaggaaaaagcggccgctttttccatggtttggactggatatcggtggaactctggtcaagctggtatattttgaacccaaagacatcactgctgaagaagaagaggaagaagtggaaagtcttaaaagcattcggaagtacctgacctccaatgtggcttatgggtctacaggcattcgggacgtgcacctcgagctgaaggacctgactctgtgtggacgcaaaggcaatctgcactttatacgctttcccactcatgacatgcctgcttttattcaaatgggcagagataaaaacttctcgagtctccacactgtcttttgtgccactggaggtggagcgtacaaatttgagcaggattttctcacaataggtgatcttcagctttgcaaactggatgaactagattgcttgatcaaaggaattttatacattgactcagtcggattcaatggacggtcacagtgctattactttgaaaaccctgctgattctgaaaagtgtcagaagttaccatttgatttgaaaaatccgtatcctctgcttctggtgaacattggctcaggggttagcatcttagcagtatattccaaagataattacaaacgggtcacaggtactagtcttggaggaggaactttttttggtctctgctgtcttcttactggctgtaccacttttgaagaagctcttgaaatggcatctcgtggagatagcaccaaagtggataaactagtacgagatatttatggaggggactatgagaggtttggactgccaggctgggctgtggcttcaagctttggaaacatgatgagcaaggagaagcgagaggctgtcagtaaagaggacctggccagagcgactttgatcaccatcaccaacaacattggctcaatagcaagaatgtgtgcccttaatgaaaacattaaccaggtggtatttgttggaaatttcttgagaattaatacgatcgccatgcggcttttggcatatgctttggattattggtccaaggggcagttgaaagcacttttttcggaacacgagggttattttggagctgttggagcactccttgagctgttgaagatcccgtgatcattacctggggaggggttcctgaaaccttccacaatgggatctgtggactttcatttttttaagagacttactcaatttcatgactgtactacctgaaacaaagtgagaaaggacaggtgtatttttctaagtcatcaagataaatccttaagaattcagtctaaattagcaaccaggaaggaaaaatatattaaaaacaacaaaaaagtggcacatgtccaggcagtgtgaggatttgctgtatataagttgcctgctttgtatttttgaaatctctgcatcactcattggaagtgcttctgaagagagctgctctgtgttcagttgactggttttgtgtcctgtttgaacttgctgaatgtaaggcaggctactatgcgttataatctaatcacaatttgtcaatatggtcttggcaatcatctgtgcattactctggtttgcattaagcctgtgtgtgaacttactgtaaaacatgttttatttcaaggttctgcaaaattaattgggcaggttaattgtgtacctgaaacttaacaagcagtttttggaagggca

SEQ ID NO: 1643 - protein, 570 aa, Homo sapiens
MRRLGPFHPRVHWAAPPSLSSGLHRLLFLRGTRIPSSTTLSPPRHDSLSLDGGTVNPPRVREPTGREAFGPSPASSDWLPARWRNGRGGRPRARLCSGWTAAEEARRNPTLGGLLGRQRLLLRMGGGRLGAPMERHGRASATSVSSAGEQAAGDPEGRRQEPLRRRASSASVPAVGASAEGTRRDRLGSYSGPTSVSRQRVESLRKKRPLFPWFGLDIGGTLVKLVYFEPKDITAEEEEEEVESLKSIRKYLTSNVAYGSTGIRDVHLELKDLTLCGRKGNLHFIRFPTHDMPAFIQMGRDKNFSSLHTVFCATGGGAYKFEQDFLTIGDLQLCKLDELDCLIKGILYIDSVGFNGRSQCYYFENPADSEKCQKLPFDLKNPYPLLLVNIGSGVSILAVYSKDNYKRVTGTSLGGGTFFGLCCLLTGCTTFEEALEMASRGDSTKVDKLVRDIYGGDYERFGLPGWAVASSFGNMMSKEKREAVSKEDLARATLITITNNIGSIARMCALNENINQVVFVGNFLRINTIAMRLLAYALDYWSKGQLKALFSEHEGYFGAVGALLELLKIP

SEQ ID NO: 1644 - DNA, 1763 bp, Homo sapiens
ccgcgcgcggacactgtccccgcacggtggtccctcgttggtgcgtggcctgacatccggctggaggcctcgggtgctccgaaagcggtaccttcgggggcccccccgcacccattgtttttccatggtttggactggatatcggtggaactctggtcaagctggtatattttgaacccaaagacatcactgctgaagaagaagaggaagaagtggaaagtcttaaaagcattcggaagtacctgacctccaatgtggcttatgggtctacaggcattcgggacgtgcacctcgagctgaaggacctgactctgtgtggacgcaaaggcaatctgcactttatacgctttcccactcatgacatgcctgcttttattcaaatgggcagagataaaaacttctcgagtctccacactgtcttttgtgccactggaggtggagcgtacaaatttgagcaggattttctcacaataggtgatcttcagctttgcaaactggatgaactagattgcttgatcaaaggaattttatacattgactcagtcggattcaatggacggtcacagtgctattactttgaaaaccctgctgattctgaaaagtgtcagaagttaccatttgatttgaaaaatccgtatcctctgcttctggtgaacattggctcaggggttagcatcttagcagtatattccaaagataattacaaacgggtcacaggtactagtcttggaggaggaactttttttggtctctgctgtcttcttactggctgtaccacttttgaagaagctcttgaaatggcatctcgtggagatagcaccaaagtggataaactagtacgagatatttatggaggggactatgagaggtttggactgccaggctgggctgtggcttcaagctttggaaacatgatgagcaaggagaagcgagaggctgtcagtaaagaggacctggccagagcgactttgatcaccatcaccaacaacattggctcaatagcaagaatgtgtgcccttaatgaaaacattaaccaggtggtatttgttggaaatttcttgagaattaatacgatcgccatgcggcttttggcatatgctttggattattggtccaaggggcagttgaaagcacttttttcggaacacgagggttattttggagctgttggagcactccttgagctgttgaagatcccgtgatcattacctggggaggggttcctgaaaccttccacaatgggatctgtggactttcatttttttaagagacttactcaatttcatgactgtactacctgaaacaaagtgagaaaggacaggtgtatttttctaagtcatcaagataaatccttaagaattcagtctaaattagcaaccaggaaggaaaaatatattaaaaacaacaaaaaagtggcacatgtccaggcagtgtgaggatttgctgtatataagttgcctgctttgtatttttgaaatctctgcatcactcattggaagtgcttctgaagagagctgctctgtgttcagttgactggttttgtgtcctgtttgaacttgctgaatgtaaggcaggctactatgcgttataatctaatcacaatttgtcaatatggtcttggcaatcatctgtgcattactctggtttgcattaagcctgtgtgtgaacttactgtaaaacatgttttatttcaaggttctgcaaaattaattgggcaggttaattgtgtacctgaaacttaacaagcagtttttggaagggca

SEQ ID NO: 1645 - protein, 279 aa, Homo sapiens; identical to SEQ ID NO: 1641

SEQ ID NO: 1646 - DNA, 1692 bp, Homo sapiens
ctggggtttgggggaccgagccgctccgggttcgggatgctgaggagaccgcgggcccgcgccagcctcccacacacacacactctcccggcgcctcggccggccgggcgcggtgtgcaggggtgaggcggtgtctccaggctgaggagggacgcggaggagggtccggcgcggccccgggactggagggtgagtccctcacaaagggcggagcggggctgtcacctggagatcacggagggaagttcatccatgagctcggatttcccacattacaacttcaggatgcctaatattggattccagaatctgcctctcaacatatatattgtggtttttggtactgctatatttgtcttcatccttagtttactcttctgttgctacttgattaggctaagacatcaagcacacaaagaattttatgcctacaaacaggttatattaaaagagaaagtaaaagaattgaatttacatgagctctgtgcagtgtgcctagaagacttcaagcctcgagatgagttggggatttgcccatgtaagcacgccttccacagaaagtgccttattaagtggctggaggttcgtaaagtgtgtcccctgtgcaacatgccagttctacagctggcccagttgcacagtaagcaggaccgtggaccccctcaggggccccttcctggggcagagaacattgtatagcttaccgcaaggatcagactgttgctggacacgacgtctgtgtggagccaggaggaacacatgtggtgtctgtatggctgctctctacctaggacaccagctgccacttcttttgcctcatgaagaactcttgggccagccaaactgggaacctaggtgtctgggtcttgtgacaaccaaagcactttgacactaccccctgccgagagaagaggagtggatgagcctgcgggtttgcctcaagaaacttcatgagggtctcttactaactccattacactctctctcctggagcctcatctccatgtcaagcaggagggtaaagaagggaactaagagcaggtctttcaagccacacccccacctgcggatggatgggtttctctgtaggccatgcaggcctttgtcgcagcaaaccttcccagcagcccttgagccaagtaaaaccagcacaaccagccaccagtggttggtgaggcagtgcccacaaggctcatgttgtatgcctttgataaggccatcttggctttgagtagcagtgttcctcgtcacccatttccccctcaggattacaacacctgctatcaaatcatctaagctgaaaacatgagatgcgcttggaaaggcctagtcagaagccatttcctcttatcatttccctctcctatgcaccagtaaggcccgtccagagccccagcagggagtgggccctgagtccacactgtccctgagtgatccaggaggctgcccacatccccacatgtgcactgtggttccagtgtagctgctgtgagcccactgccactgcctcagaagggagccactgtgaacctcttggctccaaagagcagtggctttttgagaatggcccatacttctggcccggctggatgaagggaatgccgaccctttggcctctccccctccttccatctcttctctctcttgccctatctctctttctacttcagaaaaaaaaaaaaaaaaaaaaaa

SEQ ID NO: 1647 - protein, 148 aa, Homo sapiens
MSSDFPHYNFRMPNIGFQNLPLNIYIVVFGTAIFVFILSLLFCCYLIRLRHQAHKEFYAYKQVILKEKVKELNLHELCAVCLEDFKPRDELGICPCKHAFHRKCLIKWLEVRKVCPLCNMPVLQLAQLHSKQDRGPPQGPLPGAENIV

SEQ ID NO: 1648 - DNA, 1203 bp, Homo sapiens
ccgcgttccggttgcggatggtgagtgtgtcggggggcttggcggcttttctcctcagttttctggagtgctttggaggagaggactatggcagccagggacgccacttcaggcagcctgtcagaggagagcagtgctttggacctgccatcagcgtgtgacataagagattacgtcctgcagggacccagccaagaagccaacagcgaggctttcagttctttggaattccattcttttccttattcttctgatgtggatccagacaccagtaacttaaatatagaacaaaataactcctggaccgctgagaacttctggcttgaccctgctgtgaaaggccagtcagagaaggaagaggatgatggccttcggaaatccctggatagattctatgaaatgtttggtcatccacagccaggctctgcaaactcactctctgcatctgtctgcaagtgcctgtctcagaaaatcactcaactaagaggccaggagagccaaaagtatgccctccgcagttttcaaatggcccgggtgatcttcaaccgggacggctgctccgtcttacagaggcattccagggacacccacttctacccactggaggaaggaagtacatctttggatgatgaaaagccaaacccaggactgtcaaaggatattactcatttcctcttgcagcagaatgtaatgaaagacctgtaactggtgccgggcggtgtgcagggtagtaatggaggtgctgtgccatgaccagcagtgttggtggccacccagatcccctagggtctctggccagctctgtgtgcccaatcccaattaagtgctttgaggttaaaggctggcacctgtgacctggtattggagccagtcagcccatatggagagccagcagggtctgggagttctccgtcctcttggccaaggccgctgactgactgggctacgagtcaaaagcccagctcccttgcctcaaggaaggacattctctgaggagtaatttatgctctagcactccctttcctctagatcggcctgaggctgggacattacatgaaatcacacccttgctgggcttaatccctttccctaccctcccatttatttactggtgtctctgggagcctttccttaataaacctcttatatctgaaaaaaaaaaaaaaaaaaaaaaaaaaaaaaaaaaaaaaaaaaaaaaaaaaa

SEQ ID NO: 1649 - protein, 205 aa, Homo sapiens
MAARDATSGSLSEESSALDLPSACDIRDYVLQGPSQEANSEAFSSLEFHSFPYSSDVDPDTSNLNIEQNNSWTAENFWLDPAVKGQSEKEEDDGLRKSLDRFYEMFGHPQPGSANSLSASVCKCLSQKITQLRGQESQKYALRSFQMARVIFNRDGCSVLQRHSRDTHFYPLEEGSTSLDDEKPNPGLSKDITHFLLQQNVMKDL

SEQ ID NO: 1650 - DNA, 4655 bp, Homo sapiens
cagtagtagttccccagcgtgcgcccggggagaccgggaacatggcgctgggagcgctgtagcagctgagaaggggctgaggcaccgccgcttcgctgacagccggccaccaggtttctgtctcccagtataatcatatccagccccatggctcttactggggcctctgaaatgtttatcaccaaatctgtgtctgcagttccaacctcttccctgagcatcaaagctgtatttccaactttcgctggatgcttctatctggaaatacactgtggtgaaatgcttccacctcttgctaaaatgaacactgaggaaaaatgaagaagactgacaagcaccagcgaaaagttgcagaatagaaatagccacactcctctggagtctttaattcatccacagccatcatataaaggttttggcatcatgtttgggaagaaaaagaaaaagattgaaatatctggcccgtccaactttgaacacagggttcatactgggtttgatccacaagagcagaagtttaccggccttccccagcagtggcacagcctgttagcagatacggccaacaggccaaagcctatggtggacccttcatgcatcacacccatccagctggctcctatgaagacaatcgttagaggaaacaaaccctgcaaggaaacctccatcaacggcctgctagaggattttgacaacatctcggtgactcgctccaactccctaaggaaagaaagcccacccaccccagatcagggagcctccagccacggtccaggccacgcggaagaaaatggcttcatcaccttctcccagtattccagcgaatccgatactactgctgactacacgaccgaaaagtacagggagaagagtctctatggagatgatctggatccgtattatagaggcagccacgcagccaagcaaaatgggcacgtaatgaaaatgaagcacggggaggcctactattctgaggtgaagcctttgaaatccgattttgccagattttctgccgattatcactcacatttggactcactgagcaaaccaagtgaatacagtgacctcaagtgggagtatcagagagcctcgagtagctcccctctggattattcattccaattcacaccttctagaactgcagggaccagcgggtgctccaaggagagcctggcgtacagtgaaagtgaatggggacccagcctggatgactatgacaggaggccaaagtcttcgtacctgaatcagacaagccctcagcccaccatgcggcagaggtccaggtcaggctcgggactccaggaaccgatgatgccatttggagcaagtgcatttaaaacccatccccaaggacactcctacaactcctacacctaccctcgcttgtccgagcccacaatgtgcattccaaaggtggattacgatcgagcacagatggtcctcagccctccactgtcagggtctgacacctaccccaggggccctgccaaactacctcaaagtcaaagcaaatcgggctattcctcaagcagtcaccagtacccgtctgggtaccacaaagccaccttgtaccatcacccctccctgcagagcagttcgcagtacatctccacggcttcctacctgagctccctcagcctctcatccagcacctacccgccgcccagctggggctcctcctccgaccagcagccctccagggtgtcccatgaacagtttcgggcggccctgcagctggtggtcagcccaggagaccccagggaatacttggccaactttatcaaaatcggggaaggctcaaccggcatcgtatgcatcgccaccgagaaacacacagggaaacaagttgcagtgaagaaaatggacctccggaagcaacagagacgagaactgcttttcaatgaggtcgtgatcatgcgggattaccaccatgacaatgtggttgacatgtacagcagctaccttgtcggcgatgagctctgggtggtcatggagtttctagaaggtggtgccttgacagacattgtgactcacaccagaatgaatgaagaacagatagctactgtctgcctgtcagttctgagagctctctcctaccttcataaccaaggagtgattcacagggacataaaaagtgactccatcctcctgacaagcgatggccggataaagttgtctgattttggtttctgtgctcaagtttccaaagaggtgccgaagaggaaatcattggttggcactccctactggatggcccctgaggtgatttctaggctaccttatgggacagaggtggacatctggtccctcgggatcatggtgatagaaatgattgatggcgagcccccctacttcaatgagcctcccctccaggcgatgcggaggatccgggacagtttacctccaagagtgaaggacctacacaaggtttcttcagtgctccggggattcctagacttgatgttggtgagggagccctctcagagagcaacagcccaggaactcctcggacatccattcttaaaactagcaggtccaccgtcttgcatcgtccccctcatgagacaatacaggcatcactgagcagaggattcgtgtaggtggcaaagctagatgaggacatgagaataattcaggagaacaaaaggaaacacagaacatgcaaaaggcctgtgcattctagaccagccaattggtgggacagcgtgatgaccggcagggttcaacagaccagggcatcttcttgtgtcttaaacaggcatctctccactgacagccggtgtggtcacttggagcacggctttaataagtcattattatatttttcagcccttcatccagcaaatcagaaggactcagtacaaactccgttatgatatatcctagccacatgcagggtaacatgtaggattttctatattgaaagaatacttttctggcaaaaaaaaaaaaaaaagaaagaaaggaaaacaaaaagcacttttttcttaatggtagcagtataatgtattttgcaacgaatttgtaatttttctgtacgatagttttgataatttatagtactttgatgtcatgtagccattgtatcagttgaagtaatacttgtttactagaggagtttgaacaaagcctttcctacttttttatccctttaagagaaccaatgattctttaggaactttgaatactgaatgactctcaatcaccgtcagctttagtaaaatctctttcttatcctaacaagtgtcttatttggtggaagaagaattaagagtgatggtgatggtgtgcacgtttcattaatccaaccaaaaataatgaaataaaatttgagccacagtataccactccttgggataaagttaaatatttttaaagatcacattttccatgaacgcctctagtagcaaaccattcttttgcacaccacaatgtttccctcagtgccctttctcaaatgggtacaatgttcccttgtggccaaatttccctcccagggagcaatttcagtgctaggatcattggattcagttcccaaaatagaatgtttcagtgagaccatgagaattccaggctcacaaagggagaggagagaacagggcaagacgtttggtttcatttgtcaccatttttaaaactctgtatgctagcacaccaaactcttgtctatatttacctttgtaccacagtattaatcgctattgttcatgtatcgtgctggaagtctgaactgactctagaggatgaattagcaagagggtattttaccaggtatgatctgacttcagttgtgcccatgttataatgtgtttccgacataggagagtcgtgctgctgtctagatcttcttgaatgttgataaaaatgaatgactactacaatacattttgtgttgcttgttggatgaatttgcatgttaactgtaggccaatatagatttgcctttaaaactctggaagagctacatagtcatcattagtttctattaattatgcatcagacaaaagccatttgttaccaaactgggaaaacagaggcttttcttaactatttcacatactgtaacaaatatgaatttaaatttgtgatagcgctctggttgctctaagcataattaagaatttttgtaattaataggttgctaattatttatcactgctaaaaaggaaaaaaggcataaaatgaccttctactgattagattttcagttttctttcaaactggaaatgcctccataaatatgatctatgattttgcttcataaaacagcaaatcaatgttttatgtaaaatattaaagcattaatataaatatgtgagaataaaaacaatctaaatccagaaaatggcagtcctaaatgttcatgagacagattgtattaatttaaccaggactatgtagaagtagaaagaaaagaaaaagaaaatcttttttaaaccagaataaacattaaaaactattgcagaaaatagtggattttggattccaaacattttcgacagtgtaatggaaatttttctgtaattttcttaccatcgggtattttttaaagtattcattgagtttaccaaaagttactgtagcttaaaaggttttgtgagcactaactattggcagaaactgcatttgcaaataaaaataaatgtttgcctttt

SEQ ID NO: 1651 - protein, 719 aa, Homo sapiens
MFGKKKKKIEISGPSNFEHRVHTGFDPQEQKFTGLPQQWHSLLADTANRPKPMVDPSCITPIQLAPMKTIVRGNKPCKETSINGLLEDFDNISVTRSNSLRKESPPTPDQGASSHGPGHAEENGFITFSQYSSESDTTADYTTEKYREKSLYGDDLDPYYRGSHAAKQNGHVMKMKHGEAYYSEVKPLKSDFARFSADYHSHLDSLSKPSEYSDLKWEYQRASSSSPLDYSFQFTPSRTAGTSGCSKESLAYSESEWGPSLDDYDRRPKSSYLNQTSPQPTMRQRSRSGSGLQEPMMPFGASAFKTHPQGHSYNSYTYPRLSEPTMCIPKVDYDRAQMVLSPPLSGSDTYPRGPAKLPQSQSKSGYSSSSHQYPSGYHKATLYHHPSLQSSSQYISTASYLSSLSLSSSTYPPPSWGSSSDQQPSRVSHEQFRAALQLVVSPGDPREYLANFIKIGEGSTGIVCIATEKHTGKQVAVKKMDLRKQQRRELLFNEVVIMRDYHHDNVVDMYSSYLVGDELWVVMEFLEGGALTDIVTHTRMNEEQIATVCLSVLRALSYLHNQGVIHRDIKSDSILLTSDGRIKLSDFGFCAQVSKEVPKRKSLVGTPYWMAPEVISRLPYGTEVDIWSLGIMVIEMIDGEPPYFNEPPLQAMRRIRDSLPPRVKDLHKVSSVLRGFLDLMLVREPSQRATAQELLGHPFLKLAGPPSCIVPLMRQYRHH

SEQ ID NO: 1652 - DNA, 4506 bp, Homo sapiens
cagtagtagttccccagcgtgcgcccggggagaccgggaacatggcgctgggagcgctgtagcagctgagaaggggctgaggcaccgccgcttcgctgacagccggccaccagaaatacactgtggtgaaatgcttccacctcttgctaaaatgaacactgaggaaaaatgaagaagactgacaagcaccagcgaaaagttgcagaatagaaatagccacactcctctggagtctttaattcatccacagccatcatataaaggttttggcatcatgtttgggaagaaaaagaaaaagattgaaatatctggcccgtccaactttgaacacagggttcatactgggtttgatccacaagagcagaagtttaccggccttccccagcagtggcacagcctgttagcagatacggccaacaggccaaagcctatggtggacccttcatgcatcacacccatccagctggctcctatgaagacaatcgttagaggaaacaaaccctgcaaggaaacctccatcaacggcctgctagaggattttgacaacatctcggtgactcgctccaactccctaaggaaagaaagcccacccaccccagatcagggagcctccagccacggtccaggccacgcggaagaaaatggcttcatcaccttctcccagtattccagcgaatccgatactactgctgactacacgaccgaaaagtacagggagaagagtctctatggagatgatctggatccgtattatagaggcagccacgcagccaagcaaaatgggcacgtaatgaaaatgaagcacggggaggcctactattctgaggtgaagcctttgaaatccgattttgccagattttctgccgattatcactcacatttggactcactgagcaaaccaagtgaatacagtgacctcaagtgggagtatcagagagcctcgagtagctcccctctggattattcattccaattcacaccttctagaactgcagggaccagcgggtgctccaaggagagcctggcgtacagtgaaagtgaatggggacccagcctggatgactatgacaggaggccaaagtcttcgtacctgaatcagacaagccctcagcccaccatgcggcagaggtccaggtcaggctcgggactccaggaaccgatgatgccatttggagcaagtgcatttaaaacccatccccaaggacactcctacaactcctacacctaccctcgcttgtccgagcccacaatgtgcattccaaaggtggattacgatcgagcacagatggtcctcagccctccactgtcagggtctgacacctaccccaggggccctgccaaactacctcaaagtcaaagcaaatcgggctattcctcaagcagtcaccagtacccgtctgggtaccacaaagccaccttgtaccatcacccctccctgcagagcagttcgcagtacatctccacggcttcctacctgagctccctcagcctctcatccagcacctacccgccgcccagctggggctcctcctccgaccagcagccctccagggtgtcccatgaacagtttcgggcggccctgcagctggtggtcagcccaggagaccccagggaatacttggccaactttatcaaaatcggggaaggctcaaccggcatcgtatgcatcgccaccgagaaacacacagggaaacaagttgcagtgaagaaaatggacctccggaagcaacagagacgagaactgcttttcaatgaggtcgtgatcatgcgggattaccaccatgacaatgtggttgacatgtacagcagctaccttgtcggcgatgagctctgggtggtcatggagtttctagaaggtggtgccttgacagacattgtgactcacaccagaatgaatgaagaacagatagctactgtctgcctgtcagttctgagagctctctcctaccttcataaccaaggagtgattcacagggacataaaaagtgactccatcctcctgacaagcgatggccggataaagttgtctgattttggtttctgtgctcaagtttccaaagaggtgccgaagaggaaatcattggttggcactccctactggatggcccctgaggtgatttctaggctaccttatgggacagaggtggacatctggtccctcgggatcatggtgatagaaatgattgatggcgagcccccctacttcaatgagcctcccctccaggcgatgcggaggatccgggacagtttacctccaagagtgaaggacctacacaaggtttcttcagtgctccggggattcctagacttgatgttggtgagggagccctctcagagagcaacagcccaggaactcctcggacatccattcttaaaactagcaggtccaccgtcttgcatcgtccccctcatgagacaatacaggcatcactgagcagaggattcgtgtaggtggcaaagctagatgaggacatgagaataattcaggagaacaaaaggaaacacagaacatgcaaaaggcctgtgcattctagaccagccaattggtgggacagcgtgatgaccggcagggttcaacagaccagggcatcttcttgtgtcttaaacaggcatctctccactgacagccggtgtggtcacttggagcacggctttaataagtcattattatatttttcagcccttcatccagcaaatcagaaggactcagtacaaactccgttatgatatatcctagccacatgcagggtaacatgtaggattttctatattgaaagaatacttttctggcaaaaaaaaaaaaaaaagaaagaaaggaaaacaaaaagcacttttttcttaatggtagcagtataatgtattttgcaacgaatttgtaatttttctgtacgatagttttgataatttatagtactttgatgtcatgtagccattgtatcagttgaagtaatacttgtttactagaggagtttgaacaaagcctttcctacttttttatccctttaagagaaccaatgattctttaggaactttgaatactgaatgactctcaatcaccgtcagctttagtaaaatctctttcttatcctaacaagtgtcttatttggtggaagaagaattaagagtgatggtgatggtgtgcacgtttcattaatccaaccaaaaataatgaaataaaatttgagccacagtataccactccttgggataaagttaaatatttttaaagatcacattttccatgaacgcctctagtagcaaaccattcttttgcacaccacaatgtttccctcagtgccctttctcaaatgggtacaatgttcccttgtggccaaatttccctcccagggagcaatttcagtgctaggatcattggattcagttcccaaaatagaatgtttcagtgagaccatgagaattccaggctcacaaagggagaggagagaacagggcaagacgtttggtttcatttgtcaccatttttaaaactctgtatgctagcacaccaaactcttgtctatatttacctttgtaccacagtattaatcgctattgttcatgtatcgtgctggaagtctgaactgactctagaggatgaattagcaagagggtattttaccaggtatgatctgacttcagttgtgcccatgttataatgtgtttccgacataggagagtcgtgctgctgtctagatcttcttgaatgttgataaaaatgaatgactactacaatacattttgtgttgcttgttggatgaatttgcatgttaactgtaggccaatatagatttgcctttaaaactctggaagagctacatagtcatcattagtttctattaattatgcatcagacaaaagccatttgttaccaaactgggaaaacagaggcttttcttaactatttcacatactgtaacaaatatgaatttaaatttgtgatagcgctctggttgctctaagcataattaagaatttttgtaattaataggttgctaattatttatcactgctaaaaaggaaaaaaggcataaaatgaccttctactgattagattttcagttttctttcaaactggaaatgcctccataaatatgatctatgattttgcttcataaaacagcaaatcaatgttttatgtaaaatattaaagcattaatataaatatgtgagaataaaaacaatctaaatccagaaaatggcagtcctaaatgttcatgagacagattgtattaatttaaccaggactatgtagaagtagaaagaaaagaaaaagaaaatcttttttaaaccagaataaacattaaaaactattgcagaaaatagtggattttggattccaaacattttcgacagtgtaatggaaatttttctgtaattttcttaccatcgggtattttttaaagtattcattgagtttaccaaaagttactgtagcttaaaaggttttgtgagcactaactattggcagaaactgcatttgcaaataaaaataaatgtttgcctttt

SEQ ID NO: 1653 - protein, 719 aa, Homo sapiens; identical to SEQ ID NO: 1651

SEQ ID NO: 1654 - DNA, 2678 bp, Homo sapiens
gggaaaacactttaggttgagtgctgagagaaaggctctctgagtaggtgacatctgaactaagagctgaagcagaagaataagccatcctctgtggaccaaaggggacaagattctctacttttctgctacgcactaggaatatagcagagaagacaagtggctgctaccttctgttatcgtgggtggcagtgactagtttttctagatcttgactccctgccgtaactaaagatggagtacactgatgctgaagtactatgagccttcggaacttgtggagagactacaaagttttggttgttatggtccctttagttgggctcatacatttggggtggtacagaatcaaaagcagccctgttttccaaatacctaaaaacgacgacattcctgagcaagatagtctgggactttcaaatcttcagaagagccaaatccaggggaagtagcaggcttgcaatcttcaggtaaagaagcagctttgaatctgagcttcatatcgaaagaagagatgaaaaataccagttggattagaaagaactggcttcttgtagctgggatatctttcataggtgtccatcttggaacatactttttgcagaggtctgcaaagcagtctgtaaaatttcagtctcaaagcaaacaaaagagtattgaagagtgaagtaaaataaatatttggaattactaatttgtcattaaatcattctatgctgattagcttcataaacattgaactttttgattttatagccacaatgctgcatattcatactttaattcctaaagaataatttttaatgttaaaacgtgataatgcaataaatagaaaaatgtggtttacaaaataaaaacggtcttcactagttaccacctgaagtaagatgtctcgtttggaagctaagaagccatcattgtgtaagagtgaaccactgacaactgagagagtcaggaccacactttctgtcttgaaaagaattgtaacatcatgctatggcccctcaggtaggctgaagcagctgcacaatggctttggaggttacgtgtgtacaacctcacagtcctcagctctgctcagtcaccttttggtcacacatcccattttaaagatcctgacagcctccatacagaatcatgtgtcaagcttcagtgattgtggcttattcacagctattctttgctgcaacctgattgaaaatgttcagagattaggcttgacacccaccactgtcattagattaaataaacatcttttgagtctttgcatcagttatctcaagtctgagacctgtggttgtcgaatcccagtggactttagtagtactcagatcctcctttgtttggtgcgtagtatattaacaagtaaacctgcctgtatgctcaccagaaaggaaacagagcatgtcagtgctttgatcctgagagcctttttgcttacaattccagaaaatgctgaaggccacatcattttaggaaagagtttaattgtacctttaaaaggtcaaagagttatagattccactgtattacctgggatactcattgaaatgtcagaagttcaattaatgaggctattacctatcaaaaaatcaactgccctcaaggtggcactcttttgtacaactttatccggagacacttctgacactggagaaggaactgtggtggtcagttatggggtttctcttgaaaatgcagtcttggaccagctgcttaacctaggaaggcagctaatcagtgaccacgtagatcttgtcctgtgccaaaaagttatacatccatctttgaagcagtttctcaatatgcatcgtattattgccatagacagaattggagtgactctgatggaacccctgactaaaatgacaggaacacagcctattggatccctaggctcaatatgtcctaatagttatggaagtgtgaaagatgtgtgcactgcaaaatttggctccaaacatttttttcatcttattcctaatgaagcaacaatctgcagcttgcttctctgcaacagaaatgacactgcctgggatgagctgaagctcacgtgtcagacggcactgcatgtcctgcagttaacactcaaggaaccatgggctttgttgggaggtggctgtactgaaactcatttggctgcatatatcagacacaagactcacaacgacccagaaagcattctcaaagatgatgaatgtactcaaacagaacttcaattaattgctgaagcattttgcagtgccctagaatctgttgttggctctttagaacatgatggaggtgaaattctcactgacatgaagtatggacacctttggtcagttcaggcagattctccctgtgttgctaactggccagatttgctttcacagtgtggctgtggattatacaatagccaggaagaactcaactggtctttcttaagaagcacacgtcgtccatttgtgccacaaagctgccttccacatgaagctgtgggctcagccagcaacctgaccttggactgtttgactgcaaagcttagtggcctacaggtggctgtagagacagccaatttgattttggatctttcatatgttattgaagataaaaactaagagaatagcatgttcgtattacaagagaaacaaataaactagtctgttggcaattgagaaaaaaaaaaaaaaaaaaaa

SEQ ID NO: 1655 - protein, 570 aa, Homo sapiens
MSRLEAKKPSLCKSEPLTTERVRTTLSVLKRIVTSCYGPSGRLKQLHNGFGGYVCTTSQSSALLSHLLVTHPILKILTASIQNHVSSFSDCGLFTAILCCNLIENVQRLGLTPTTVIRLNKHLLSLCISYLKSETCGCRIPVDFSSTQILLCLVRSILTSKPACMLTRKETEHVSALILRAFLLTIPENAEGHIILGKSLIVPLKGQRVIDSTVLPGILIEMSEVQLMRLLPIKKSTALKVALFCTTLSGDTSDTGEGTVVVSYGVSLENAVLDQLLNLGRQLISDHVDLVLCQKVIHPSLKQFLNMHRIIAIDRIGVTLMEPLTKMTGTQPIGSLGSICPNSYGSVKDVCTAKFGSKHFFHLIPNEATICSLLLCNRNDTAWDELKLTCQTALHVLQLTLKEPWALLGGGCTETHLAAYIRHKTHNDPESILKDDECTQTELQLIAEAFCSALESVVGSLEHDGGEILTDMKYGHLWSVQADSPCVANWPDLLSQCGCGLYNSQEELNWSFLRSTRRPFVPQSCLPHEAVGSASNLTLDCLTAKLSGLQVAVETANLILDLSYVIEDKN

SEQ ID NO: 1656 - DNA, 2540 bp, Homo sapiens
cctcgcgcgacgcgaaggttgtcgggatccgcggcagcagcggctgcttgagatctgtttctggggcctctggcggtggcggcctggggcggcgcgacggctggtgcgcaggtacactgatgctgaagtactatgagccttcggaacttgtggagagactacaaagttttggttgttatggtccctttagttgggctcatacatttggggtggtacagaatcaaaagcagccctgttttccaaatacctaaaaacgacgacattcctgagcaagatagtctgggactttcaaatcttcagaagagccaaatccaggggaagtagcaggcttgcaatcttcaggtaaagaagcagctttgaatctgagcttcatatcgaaagaagagatgaaaaataccagttggattagaaagaactggcttcttgtagctgggatatctttcataggtgtccatcttggaacatactttttgcagaggtctgcaaagcagtctgtaaaatttcagtctcaaagcaaacaaaagagtattgaagagtgaagtaaaataaatatttggaattactaatttgtcattaaatcattctatgctgattagcttcataaacattgaactttttgattttatagccacaatgctgcatattcatactttaattcctaaagaataatttttaatgttaaaacgtgataatgcaataaatagaaaaatgtggtttacaaaataaaaacggtcttcactagttaccacctgaagtaagatgtctcgtttggaagctaagaagccatcattgtgtaagagtgaaccactgacaactgagagagtcaggaccacactttctgtcttgaaaagaattgtaacatcatgctatggcccctcaggtaggctgaagcagctgcacaatggctttggaggttacgtgtgtacaacctcacagtcctcagctctgctcagtcaccttttggtcacacatcccattttaaagatcctgacagcctccatacagaatcatgtgtcaagcttcagtgattgtggcttattcacagctattctttgctgcaacctgattgaaaatgttcagagattaggcttgacacccaccactgtcattagattaaataaacatcttttgagtctttgcatcagttatctcaagtctgagacctgtggttgtcgaatcccagtggactttagtagtactcagatcctcctttgtttggtgcgtagtatattaacaagtaaacctgcctgtatgctcaccagaaaggaaacagagcatgtcagtgctttgatcctgagagcctttttgcttacaattccagaaaatgctgaaggccacatcattttaggaaagagtttaattgtacctttaaaaggtcaaagagttatagattccactgtattacctgggatactcattgaaatgtcagaagttcaattaatgaggctattacctatcaaaaaatcaactgccctcaaggtggcactcttttgtacaactttatccggagacacttctgacactggagaaggaactgtggtggtcagttatggggtttctcttgaaaatgcagtcttggaccagctgcttaacctaggaaggcagctaatcagtgaccacgtagatcttgtcctgtgccaaaaagttatacatccatctttgaagcagtttctcaatatgcatcgtattattgccatagacagaattggagtgactctgatggaacccctgactaaaatgacaggaacacagcctattggatccctaggctcaatatgtcctaatagttatggaagtgtgaaagatgtgtgcactgcaaaatttggctccaaacatttttttcatcttattcctaatgaagcaacaatctgcagcttgcttctctgcaacagaaatgacactgcctgggatgagctgaagctcacgtgtcagacggcactgcatgtcctgcagttaacactcaaggaaccatgggctttgttgggaggtggctgtactgaaactcatttggctgcatatatcagacacaagactcacaacgacccagaaagcattctcaaagatgatgaatgtactcaaacagaacttcaattaattgctgaagcattttgcagtgccctagaatctgttgttggctctttagaacatgatggaggtgaaattctcactgacatgaagtatggacacctttggtcagttcaggcagattctccctgtgttgctaactggccagatttgctttcacagtgtggctgtggattatacaatagccaggaagaactcaactggtctttcttaagaagcacacgtcgtccatttgtgccacaaagctgccttccacatgaagctgtgggctcagccagcaacctgaccttggactgtttgactgcaaagcttagtggcctacaggtggctgtagagacagccaatttgattttggatctttcatatgttattgaagataaaaactaagagaatagcatgttcgtattacaagagaaacaaataaactagtctgttggcaattgagaaaaaaaaaa

SEQ ID NO: 1657 - protein, 570 aa, Homo sapiens; identical to SEQ ID NO: 1655

SEQ ID NO: 1658 - DNA, 1407 bp, Homo sapiens
gcgaaagtgcttcccttaagcttctgaaggttggctgcagttccggctacctgtgtagtccgagtttccacagccaggtactactccgccagtgaccctggacagtaacaaaacatataaagcccgagcccaaaccccgccaccatcataggtctgtagttactgtggaatcaataagccatggcatctaagaaatttgctgttaaatgtgggaattttgctgtcctcgtggatcttcatatcttgccacaaggttcaaacaaagatacaagctggttttctgaacagaagaaagaggaagtctgtttactgttaaaagaaaccattgattcaagagttcaggagtacttggaagttcgcaaacagcacaggccatcaaatgcagaattcacaagatccaatcccttgtccttaaaaggttatggctttcaaatcacagcctatttcctcaagagagggatacgccttcgctgcatcaggagcacacagaatgctgaactctgtgtattccctgacagatttgtggtttgtgtcagtcagcttgcattcagtcgtgatcttttagcaagtcagaatgaagatttgacagaaagagttctccatggagtgtctgattactttgctgagtgtgcagagagttcacttcctcccagtgcaaagctccggagaaatgctctgaaagaaattgtgaaaagaactgaaacaaaaagcagtgtcacgagcaaatcgcagaccagaagagacactgtggaaacatctagtgactcagtgattgcagagatagcaaggaggaggaatgatggtcaggcttcctccagtcccccatcagaatccatgggacaagcaaaggattccataaaggcagctgagagccactgggggcttcctgttcaaaagctggaaaaagttaatcagacccagccagaagacactagtggccagcaaaaacctcatcctggggagcggttaaagacagggcttctaagcaggagccccgtctgtagctgtgagtcagcatcaccatgtccaaaacaaagtccacgagtggccaaaacccaacagaaacgcaggaactgcagctctgcggaagacttcgaccaccacgggagagtttctcttggaagtgatcgattagtcccgagagaaataatagtggaaaaaagcaaagctgtcagggttttgccagcttcagagttgtcagatccagggttacttttgaaacaagatttggcaaaaaccacgtctaaggaagagttgcatgttttggaaagtctctcctccagacatcttatgaaaaataacccagggcaggcacagcaaaccggcttagccacaaacactgaaagattatctacaattcagaacagcccaaccaagaaaagaaagaaatacgaaagaggccattaa

SEQ ID NO: 1659 - protein, 408 aa, Homo sapiens
MASKKFAVKCGNFAVLVDLHILPQGSNKDTSWFSEQKKEEVCLLLKETIDSRVQEYLEVRKQHRPSNAEFTRSNPLSLKGYGFQITAYFLKRGIRLRCIRSTQNAELCVFPDRFVVCVSQLAFSRDLLASQNEDLTERVLHGVSDYFAECAESSLPPSAKLRRNALKEIVKRTETKSSVTSKSQTRRDTVETSSDSVIAEIARRRNDGQASSSPPSESMGQAKDSIKAAESHWGLPVQKLEKVNQTQPEDTSGQQKPHPGERLKTGLLSRSPVCSCESASPCPKQSPRVAKTQQKRRNCSSAEDFDHHGRVSLGSDRLVPREIIVEKSKAVRVLPASELSDPGLLLKQDLAKTTSKEELHVLESLSSRHLMKNNPGQAQQTGLATNTERLSTIQNSPTKKRKKYERGH

SEQ ID NO: 1660 - DNA, 718 bp, Homo sapiens
atgactggtcctgcctttccttctgacttgctttccagcagccgcccaaccagggacccagggctgcgggctcagctgacgaccctgggctccgtgtccaaccagcagttagcaggtggctgcgctaaggtggcagaggaggcgcctaaagaggtgccggaggacacggccccgccggcggacaagcctcagctgctgcacgatgcgggcatctgtaagcggttcaacgtgggcttggggtttgtcttcctgtccatgaccgccctagccagggtcgcgctcgatcccccagtggacgtctttgtgtaccagagtaagctgcacacggagggcttcctggagcctgaaggaggacgaaacagtggaggagtcacccaagggtgtggaaactacctgtgtcaccggacctggtggggtgttctgcattgggagtgagaggcggccaaaggagaagaacatgcagaaacgcacatcaaaaggagacgggtactacaactgtggaggtctagaccatcatgctaaggaatgcaagctgccaccccagcccaagaagtgccacttctgccagagcatcagccatgtggtagcctcgtgtctgctgaaggcccagcaggcccctagcgcacagggcaagccaacctactctccaagggaagaagaagaaatccacagccctgccctgattctggggttccaagaattgagccacaaagggtga

SEQ ID NO: 1661 - DNA, 782 bp, Homo sapiens
gggctccctgcctcgggctctcaccctcctctcctgcagctccagctttgtgctctgcctctgaggagaccatggcccagtatctgagtaccctgctgctcctgctggccaccctagctgtggccctggcctggagccccaaggaggaggataggataatcccgggtggcatctataacgcagacctcaatgatgagtgggtacagcgtgcccttcacttcgccatcagcgagtataacaaggccaccaaagatgactactacagacgtccgctgcgggtactaagagccaggcaacagaccgttgggggggtgaattacttcttcgacgtagaggtgggccgcaccatatgtaccaagtcccagcccaacttggacacctgtgccttccatgaacagccagaactgcagaagaaacagttgtgctctttcgagatctacgaagttccctgggagaacagaaggtccctggtgaaatccaggtgtcaagaatcctagggatctgtgccaggccattcgcaccagccaccacccactcccaccccctgtagtgctcccacccctggactggtggcccccaccctgcgggaggcctccccatgtgcctgcgccaagagacagacagagaaggctgcaggagtcctttgttgctcagcagggcgctctgccctccctccttccttcttgcttctaatagccctggtacatggtacacacccccccacctcctgcaattaaacagtagcatcgcctccctctgaaaaaaaaaaaaaaaaaaaaaaa

SEQ ID NO: 1662 - protein, 141 aa, Homo sapiens
MAQYLSTLLLLLATLAVALAWSPKEEDRIIPGGIYNADLNDEWVQRALHFAISEYNKATKDDYYRRPLRVLRARQQTVGGVNYFFDVEVGRTICTKSQPNLDTCAFHEQPELQKKQLCSFEIYEVPWENRRSLVKSRCQES

SEQ ID NO: 1663 - DNA, 694 bp, Homo sapiens
gcctccgaggagaccatggcctggcccctgtgcaccctgctgctcctgctggccacccaggctgtggccctggcctggagcccccaggaggaggacaggataatcgagggtggcatctatgatgcagacctcaatgatgagcgggtacagcgtgcccttcactttgtcatcagcgagtataacaaggccactgaagatgagtactacagacgcctgctgcgggtgctacgagccagggagcagatcgtgggcggggtgaattacttcttcgacatagaggtgggccgaaccatatgtaccaagtcccagcccaacttggacacctgtgccttccatgaacagccagaactgcagaagaaacagttgtgctctttccagatctacgaagttccctgggaggacagaatgtccctggtgaattccaggtgtcaagaagcctagggatctgtgccagggagtcacactgaccacctcctactcccaccccttgtagtgctcccacccctggactggtggcccccaccctgtgggaggtctccccatgcacctgcagcaggagaagacagagaaggctgcaggaggcctttgttgctcagcaggggactctgccctccctccttccttttgcttctcatagccctggtacatggtacacacacccccacctcctgcaattaaacagtagcatcacctc

SEQ ID NO: 1664 - protein, 141 aa, Homo sapiens
MAWPLCTLLLLLATQAVALAWSPQEEDRIIEGGIYDADLNDERVQRALHFVISEYNKATEDEYYRRLLRVLRAREQIVGGVNYFFDIEVGRTICTKSQPNLDTCAFHEQPELQKKQLCSFQIYEVPWEDRMSLVNSRCQEA

SEQ ID NO: 1665 - DNA, 2383 bp, Homo sapiens
ctccttcaagccctcagtcagttgtgcaggagaaagggggcggttggctttctcctttcaagaacgagttattttcagctgctgactggagacggtgcacgtctggatacgagagcatttccactatgggactggatacaaacacacacccggcagacttcaagagtctcagactgaggagaaagcctttccttctgctgctactgctgctgccgctgcttttgaaagtccactcctttcatggtttttcctgccaaaccagaggcacctttgctgctgccgctgttctctttggtgtcattcagcggctggccagaggatgagactccccaaactcctcactttcttgctttggtacctggcttggctggacctggaattcatctgcactgtgttgggtgcccctgacttgggccagagaccccaggggaccaggccaggattggccaaagcagaggccaaggagaggccccccctggcccggaacgtcttcaggccagggggtcacagctatggtgggggggccaccaatgccaatgccagggcaaagggaggcaccgggcagacaggaggcctgacacagcccaagaaggatgaacccaaaaagctgccccccagaccgggcggccctgaacccaagccaggacaccctccccaaacaaggcaggctacagcccggactgtgaccccaaaaggacagcttcccggaggcaaggcacccccaaaagcaggatctgtccccagctccttcctgctgaagaaggccagggagcccgggcccccacgagagcccaaggagccgtttcgcccaccccccatcacaccccacgagtacatgctctcgctgtacaggacgctgtccgatgctgacagaaagggaggcaacagcagcgtgaagttggaggctggcctggccaacaccatcaccagctttattgacaaagggcaagatgaccgaggtcccgtggtcaggaagcagaggtacgtgtttgacattagtgccctggagaaggatgggctgctgggggccgagctgcggatcttgcggaagaagccctcggacacggccaagccagcggcccccggaggcgggcgggctgcccagctgaagctgtccagctgccccagcggccggcagccggcctccttgctggatgtgcgctccgtgccaggcctggacggatctggctgggaggtgttcgacatctggaagctcttccgaaactttaagaactcggcccagctgtgcctggagctggaggcctgggaacggggcagggccgtggacctccgtggcctgggcttcgaccgcgccgcccggcaggtccacgagaaggccctgttcctggtgtttggccgcaccaagaaacgggacctgttctttaatgagattaaggcccgctctggccaggacgataagaccgtgtatgagtacctgttcagccagcggcgaaaacggcgggccccactggccactcgccagggcaagcgacccagcaagaaccttaaggctcgctgcagtcggaaggcactgcatgtcaacttcaaggacatgggctgggacgactggatcatcgcaccccttgagtacgaggctttccactgcgaggggctgtgcgagttcccattgcgctcccacctggagcccacgaatcatgcagtcatccagaccctgatgaactccatggaccccgagtccacaccacccacctgctgtgtgcccacgcggctgagtcccatcagcatcctcttcattgactctgccaacaacgtggtgtataagcagtatgaggacatggtcgtggagtcgtgtggctgcaggtagcagcactggccctctgtcttcctgggtggcacatcccaagagccccttcctgcactcctggaatcacagaggggtcaggaagctgtggcaggagcatctacacagcttgggtgaaaggggattccaataagcttgctcgctctctgagtgtgacttgggctaaaggcccccttttatccacaagttcccctggctgaggattgctgcccgtctgctgatgtgaccagtggcaggcacaggtccagggagacagactctgaatgggactgagtcccaggaaacagtgctttccgatgagactcagcccaccatttctcctcacctgggccttctcagcctctggactctcctaagcacctctcaggagagccacaggtgccactgcctcctcaaatcacatttgtgcctggtgacttcctgtccctgggacagttgagaagctgactgggcaagagtgggagagaagaggagagggcttggatagagttgaggagtgtgaggctgttagactgttagatttaaatgtatattgatgagataaaaagcaaaactgtgcct

SEQ ID NO: 1666 - protein, 501 aa, Homo sapiens
MRLPKLLTFLLWYLAWLDLEFICTVLGAPDLGQRPQGTRPGLAKAEAKERPPLARNVFRPGGHSYGGGATNANARAKGGTGQTGGLTQPKKDEPKKLPPRPGGPEPKPGHPPQTRQATARTVTPKGQLPGGKAPPKAGSVPSSFLLKKAREPGPPREPKEPFRPPPITPHEYMLSLYRTLSDADRKGGNSSVKLEAGLANTITSFIDKGQDDRGPVVRKQRYVFDISALEKDGLLGAELRILRKKPSDTAKPAAPGGGRAAQLKLSSCPSGRQPASLLDVRSVPGLDGSGWEVFDIWKLFRNFKNSAQLCLELEAWERGRAVDLRGLGFDRAARQVHEKALFLVFGRTKKRDLFFNEIKARSGQDDKTVYEYLFSQRRKRRAPLATRQGKRPSKNLKARCSRKALHVNFKDMGWDDWIIAPLEYEAFHCEGLCEFPLRSHLEPTNHAVIQTLMNSMDPESTPPTCCVPTRLSPISILFIDSANNVVYKQYEDMVVESCGCR

SEQ ID NO: 1667 - DNA, 8197 bp, Homo sapiens
cgttcgggcagcggcctcttgttacccggggcccgcttgcctcagcttcttgctgccgccagcacgctaagctccagtcggcgccgaaggagagcttcccgaccctcgtgtccagtagccgcaatcccaggctgggagggtgaggcgccgcgctctgccgcccccccgcccctcgctccctgtgtcctggcggatttgcacgtaatctatccgaaagcccagtcccacccgccacccgactctggagctcccattcttcaggaccctgctgaagtatcgcttctcagccgccttctccaggcgcagctgcattcgcttctcggtttttgcactcgctgtgcaccgagttactttcccggcccctcgttgacaccgttcacaggtggctgttggtctttagtaagggtgctgtcttccctgtctgatccttagcaaaagtaggaaggtagagttgttggcagaaatcctgggataagagaatagtttcctggaagatctgtgcctccaaccagcagagagggattgagcttcattgaactcaacagagccaacatttcatagcaccatgttcaagaggaggttgaagtggcatggcaatggttagagaccctgctgggcgtgaacaccctctggctacctagggacctgtgggcctaccacctggtgccctcatggagacaagaagccctgggttgaacaacatgaagccccagtcactgcagctggtactggaagagcaggtgctggcactacagcagcagatggcagagaatcaggcagcctcctggcggaagctgaagaactcccaggaggcccagcagagacaagcaacccttgtgaggaagctgcaggccaaggtgctgcagtaccgaagctggtgccaagagctggagaagcggctagaagccactggaggaccaatcccccagaggtgggaaaatgtggaggagccaaacctggatgagctgctggtccgattggaggaggagcaacagaggtgtgagagtctagcagaggtgaacacccagcttcgactgcacatggaaaaagctgacgtggtgaataaagcccttagggaagatgtggaaaaactgacagtggactggagccgggcccgggatgagctaatgaggaaggagagccagtggcagatggagcaggagttcttcaagggctacctgaaaggggagcacggtcgccttctcagtctatggcgggaggttgtgacattccgacgccacttcctggaaatgaagtcagctactgacagagatctgatggagctaaaagctgagcatgtgaggctttcagggtctctgttgacctgttgtctgcgcttgactgtgggagcacagtctcgggaacccaacggatctggaagaatggatgggcgggagccggcccagctgctgctgctactagccaagacccaggagctggagaaggaagcccatgaaaggagccaggagttaatacagctgaagagtcaaggggatctggagaaggctgaacttcaggaccgggtgaccgagctctctgctctgttgacccagtctcagaagcaaaatgaagattatgaaaagatgataaaggctctgagagagacagtggagatcctggagacaaatcacacagaattaatggaacatgaagcatctcttagtaggaatgcgcaagaggagaagttgtctttacagcaggtgatcaaggatataacccaggtcatggtggaagaaggggacaatatagcccaaggctctggtcatgagaactctttggaattggactctagtatcttctcccagtttgattaccaggatgcagacaaggctcttactctggtgcgttcagtgctgactcggagacgccaggctgtgcaggacctaaggcagcagcttgcaggctgtcaagaggctgtgaacttgttgcaacagcagcatgatcagtgggaggaagagggcaaagccttgagacagcggctgcagaagctcactggggagcgggacactctggcagggcagactgtggacctccagggagaggtggactctctcagcaaggagcgagagctgctgcagaaggccagggaagagctgcggcagcagctggaggtgctagagcaggaggcatggcgcctgcgaagggtaaatgtggagcttcagctgcagggggactctgcccagggccagaaggaggaacagcaggaggagctgcacctggctgtccgggagagggagcgtcttcaggagatgctgatgggcctggaagccaaacagtcagaatcactcagtgaactgatcactcttcgggaagccctggagtcaagtcacctggaaggggagttactgaggcaagagcaaacggaagtgaccgcagcgctggctagggcagagcagtcaattgcagagctgtcgagttctgaaaacaccctgaagacagaagtagctgatcttcgggctgcagctgtcaagctcagtgccttaaatgaggctttggcgttagataaagttgggctgaaccagcagcttctccagttagaggaggagaaccagtctgtgtgcagcagaatggaggccgcagagcaggcgagaaatgctttgcaggtcgacctggcggaggcagagaagaggagggaagccctgtgggaaaagaacactcacctggaggctcagctgcagaaagctgaggaggctggggctgagctgcaggcagatctcagggacatccaagaagagaaggaagaaattcaaaagaaactaagtgagtcacgtcaccagcaggaggcagccacgactcagctggagcagctacatcaggaggcaaagcgacaggaagaagtgcttgccagggcagtccaggagaaggaggccctagtacgagagaaagcggctctagaggtgcggctgcaggccgtggagcgtgaccggcaggacctcgctgaacaactacaggggctcagctcagccaaggagctactggagagcagtctgtttgaagcccaacaacaaaattctgtgatagaggtcaccaaggggcagctggaggtccagattcaaactgtcactcaagccaaggaagtaatccaaggggaagtgaggtgcctgaagctggaactggacactgaacggagtcaggcagagcaggagcgggatgctgcagccagacagctggcccaggctgagcaagaagggaagactgccttggagcagcagaaggcagcccatgagaaagaggtgaaccagctccgggagaaatggatgcagctggaaacagagaaggagagagtatccctcctggagacactgctgcagacgcagaaggagctagcagatgccagccaacaactggaacgactgaggcaggacatgaaagtccagaaattaaaggagcaggagaccactgggatactacagacccagctccaggaggctcaacgggagctgaaggaggcagcccggcagcacagagatgaccttgctgccctccaagaagagagcagctccctgctgcaggataagatggacctgcagaagcaggtggaggacttgaagtctcagctggtggcccaggatgactcccagaggctggtggagcaggaggttcaggagaagctgagagagacccaggagtataaccgaattcagaaggagctggagagagagaaagccagcctgactctgtcactgatggaaaaggaacagagactccttgttttacaagaagctgactctattcgacaacaagagctgagtgccctgcgccaggacatgcaggaggcccagggagaacagaaagagctcagtgctcagatggaattactaaggcaagaggtgaaggaaaaggaggctgactttctggcccaggaagcacagctgctggaggagctggaggcgtctcatatcacggagcagcagctgcgagcctccttgtgggcccaggaagccaaggcagcccaactacagctgcgactgcgcagcacagagagccagctagaagcgctggccgcagagcagcagcccgggaaccaggcccaggcccaggcccagctggccagcctctactctgccctgcagcaggccctggggtctgtttgtgagagcaggcctgagctgagtggtgggggagactctgctccttccgtctggggccttgagccagaccagaatggagctaggagcctctttaagagagggcccctgctgactgctctctccgctgaggcagtagcatctgccctccacaagcttcatcaagacctgtggaagactcaacagacccgggatgttctgagggatcaggtccagaaactggaagagcgtctaactgatactgaggctgagaagagccaggtccacacagagttgcaggatctgcagagacagctctcccagaatcaggaagagaaatccaagtgggaaggaaagcagaactccctagaatctgagctgatggaactacatgaaactatggcatccttacagagtcgcctgcggagagcagagctacagcgaatggaagcccagggtgagcgagagttacttcaggcagccaaggagaacctgacagcccaggtggaacacctgcaagcagctgtcgtagaagccagggctcaggcaagtgctgctggcatcctggaagaagacctgagaacggctcgctcagcactgaagctgaaaaatgaggaagtagagagtgagcgtgagagagcccaggctctgcaagagcagggcgaactgaaggtggcccaagggaaggctctgcaagagaatttggccctcctgacccagaccctagctgaaagagaagaggaggtggagactctgcggggacaaatccaggaactggagaagcaacgggaaatgcagaaggctgctttggaattgctgtctctggacctgaagaagaggaaccaagaggtagatctgcagcaagaacagattcaggagctagagaagtgtaggtctgttttagagcatctgcccatggccgtccaggagcgagagcagaagctgactgtgcagagggagcagatcagagagctcgagaaggatcgggagactcagaggaacgtcttggagcatcagcttctagaacttgagaagaaagaccaaatgattgagtcccagagaggacaggttcaggacctgaaaaagcagttggttactctggaatgcctggccctggaactggaggaaaaccatcacaagatggagtgccagcaaaaactgatcaaggagctggagggccagagggaaacccagagagtggctttgacccaccttacgctggacctagaagaaaggagccaggagctgcaggcacaaagcagccagatccatgacctggagagccacagcaccgttctggcaagagagctgcaggagagggaccaggaggtgaagtctcagcgagaacagatcgaggagctgcagaggcagaaagagcatctgactcaggatctcgagaggagagaccaggagctgatgctgcagaaggagaggattcaggttctcgaggatcagaggacccggcagaccaagatcctggaggaggacctggaacagatcaagctgtccttgagagagcgaggccgggagctgaccactcagaggcagctgatgcaggaacgggcagaggaagggaagggcccaagtaaagcacagcgcgggagcctagagcacatgaagctgatcctgcgtgataaggagaaggaggtggaatgtcagcaggagcatatccatgaactccaggagctcaaagaccagctggagcagcagctccagggcctgcacaggaaggtaggtgagaccagcctcctcctgtcccagcgagagcaggaaatagtggtcctgcagcagcaactgcaggaagccagggaacaaggggagctgaaggagcagtcacttcagagtcaactggatgaggcccagagagccctagcccagagggaccaggaactggaggctctgcagcaagaacagcagcaggcccagggacaggaggagagggtgaaggaaaaggcagacgccctccagggagctctggagcaagcccatatgacactgaaggagcgtcatggagagcttcaggaccacaaggaacaggcacgaaggctggaggaagagctggcagtggagggacggcgggtccaggccctggaggaggtgctgggagacctaagggctgagtctcgggaacaggagaaagctctgttggccctccagcagcagtgtgctgagcaggcacaggagcatgaggtggagaccagggccctgcaggacagctggctgcaggcccaggcagtgctcaaggaacgggaccaggagctggaagctctgcgggcagaaagtcagtcctcccggcatcaggaggaggctgcccgggcccgggctgaggctctgcaggaggcccttggcaaggctcatgctgccctgcaggggaaagagcagcatctcctcgagcaggcagaattgagccgcagtctggaggccagcactgcaaccctgcaagcctccctggatgcctgccaggcacacagtcggcagctggaggaggctctgaggatacaagaaggtgagatccaggaccaggatctccgataccaggaggatgtgcagcagctgcagcaggcacttgcccagagggatgaagagctgagacatcagcaggaacgggagcagctgctggagaagtctctggcccagagggtccaagagaatatgatccaagagaagcagaatctggggcaagagagagaagaggaggagataaggggccttcatcagagtgtaagggagctacagctgactctagcccaaaaggaacaggagattctggagctgagggagacccagcaaaggaacaacctggaagccttaccccacagccacaaaacctccccaatggaggaacaatctctaaaacttgattctttagagcccaggctgcagcgggagctggagcggctacaggcagccctgagacagacagaagccagggagattgagtggagggagaaggcccaggacttggcactctccctagcgcagaccaaggccagtgtcagcagtctgcaggaggtagccatgttcctacaagcctctgtcctggagcgggactcagaacagcaaaggctgcaggatgaactggagctcaccagacgggctctggagaaggagcggctacacagcccaggtgcaaccagcacagcagaactggggtccagaggggagcagggtgtgcagctgggagaggtctcaggagtggaggctgagcctagtcctgatggaatggagaagcagtcatggagacaaaggcttgaacacctgcagcaagcagtggcccggctggagattgacaggagcaggctgcagcgccacaatgtccagctgcggagtaccttggagcaggtggagcgagaacggaggaagctgaagagggaggccatgcgtgcggcccaggcagggtccctagagatcagcaaggccacggcttcttcacccacacagcaggatgggagaggacagaagaactcagatgccaagtgtgtggctgaactgcagaaagaggtggtcctgctgcaagctcagctgactttggagcggaagcagaagcaggactacatcacccgctcagcacagaccagccgtgagctagcaggcctgcaccacagcctctcacactcacttcttgccgtggcccaggcccctgaggccactgtcctggaggcagagacccgcaggctggatgagtccctgactcaaagtctgacatccccagggccagtcctgctacaccccagccccagcactacccaagccgcctccaggtagcagccacagccaggagcacacagacagaagactgtgtcatgggtcatggcccctccgcacacctacaggtttgccaaaggaaaagcctggctctgttaggcacccaggagccccaggtcggcgggtgttcccaggaagaggaagtaaatctgcaaccctggggaggaccccaactcacctgggaatgaggcaaattgcatttgcttgctccctatggaatcacccagaggggtgccttgccctggctgagggacatgtactgcctctcatctagaatttattttcctagcacttcaccacctccttcatcttctccttcaacaataaaccctgagatctttgcattcaaaaaaaaaaaaaaaaaa

SEQ ID NO: 1668 - protein, 2386 aa, Homo sapiens
METRSPGLNNMKPQSLQLVLEEQVLALQQQMAENQAASWRKLKNSQEAQQRQATLVRKLQAKVLQYRSWCQELEKRLEATGGPIPQRWENVEEPNLDELLVRLEEEQQRCESLAEVNTQLRLHMEKADVVNKALREDVEKLTVDWSRARDELMRKESQWQMEQEFFKGYLKGEHGRLLSLWREVVTFRRHFLEMKSATDRDLMELKAEHVRLSGSLLTCCLRLTVGAQSREPNGSGRMDGREPAQLLLLLAKTQELEKEAHERSQELIQLKSQGDLEKAELQDRVTELSALLTQSQKQNEDYEKMIKALRETVEILETNHTELMEHEASLSRNAQEEKLSLQQVIKDITQVMVEEGDNIAQGSGHENSLELDSSIFSQFDYQDADKALTLVRSVLTRRRQAVQDLRQQLAGCQEAVNLLQQQHDQWEEEGKALRQRLQKLTGERDTLAGQTVDLQGEVDSLSKERELLQKAREELRQQLEVLEQEAWRLRRVNVELQLQGDSAQGQKEEQQEELHLAVRERERLQEMLMGLEAKQSESLSELITLREALESSHLEGELLRQEQTEVTAALARAEQSIAELSSSENTLKTEVADLRAAAVKLSALNEALALDKVGLNQQLLQLEEENQSVCSRMEAAEQARNALQVDLAEAEKRREALWEKNTHLEAQLQKAEEAGAELQADLRDIQEEKEEIQKKLSESRHQQEAATTQLEQLHQEAKRQEEVLARAVQEKEALVREKAALEVRLQAVERDRQDLAEQLQGLSSAKELLESSLFEAQQQNSVIEVTKGQLEVQIQTVTQAKEVIQGEVRCLKLELDTERSQAEQERDAAARQLAQAEQEGKTALEQQKAAHEKEVNQLREKWMQLETEKERVSLLETLLQTQKELADASQQLERLRQDMKVQKLKEQETTGILQTQLQEAQRELKEAARQHRDDLAALQEESSSLLQDKMDLQKQVEDLKSQLVAQDDSQRLVEQEVQEKLRETQEYNRIQKELEREKASLTLSLMEKEQRLLVLQEADSIRQQELSALRQDMQEAQGEQKELSAQMELLRQEVKEKEADFLAQEAQLLEELEASHITEQQLRASLWAQEAKAAQLQLRLRSTESQLEALAAEQQPGNQAQAQAQLASLYSALQQALGSVCESRPELSGGGDSAPSVWGLEPDQNGARSLFKRGPLLTALSAEAVASALHKLHQDLWKTQQTRDVLRDQVQKLEERLTDTEAEKSQVHTELQDLQRQLSQNQEEKSKWEGKQNSLESELMELHETMASLQSRLRRAELQRMEAQGERELLQAAKENLTAQVEHLQAAVVEARAQASAAGILEEDLRTARSALKLKNEEVESERERAQALQEQGELKVAQGKALQENLALLTQTLAEREEEVETLRGQIQELEKQREMQKAALELLSLDLKKRNQEVDLQQEQIQELEKCRSVLEHLPMAVQEREQKLTVQREQIRELEKDRETQRNVLEHQLLELEKKDQMIESQRGQVQDLKKQLVTLECLALELEENHHKMECQQKLIKELEGQRETQRVALTHLTLDLEERSQELQAQSSQIHDLESHSTVLARELQERDQEVKSQREQIEELQRQKEHLTQDLERRDQELMLQKERIQVLEDQRTRQTKILEEDLEQIKLSLRERGRELTTQRQLMQERAEEGKGPSKAQRGSLEHMKLILRDKEKEVECQQEHIHELQELKDQLEQQLQGLHRKVGETSLLLSQREQEIVVLQQQLQEAREQGELKEQSLQSQLDEAQRALAQRDQELEALQQEQQQAQGQEERVKEKADALQGALEQAHMTLKERHGELQDHKEQARRLEEELAVEGRRVQALEEVLGDLRAESREQEKALLALQQQCAEQAQEHEVETRALQDSWLQAQAVLKERDQELEALRAESQSSRHQEEAARARAEALQEALGKAHAALQGKEQHLLEQAELSRSLEASTATLQASLDACQAHSRQLEEALRIQEGEIQDQDLRYQEDVQQLQQALAQRDEELRHQQEREQLLEKSLAQRVQENMIQEKQNLGQEREEEEIRGLHQSVRELQLTLAQKEQEILELRETQQRNNLEALPHSHKTSPMEEQSLKLDSLEPRLQRELERLQAALRQTEAREIEWREKAQDLALSLAQTKASVSSLQEVAMFLQASVLERDSEQQRLQDELELTRRALEKERLHSPGATSTAELGSRGEQGVQLGEVSGVEAEPSPDGMEKQSWRQRLEHLQQAVARLEIDRSRLQRHNVQLRSTLEQVERERRKLKREAMRAAQAGSLEISKATASSPTQQDGRGQKNSDAKCVAELQKEVVLLQAQLTLERKQKQDYITRSAQTSRELAGLHHSLSHSLLAVAQAPEATVLEAETRRLDESLTQSLTSPGPVLLHPSPSTTQAASR

SEQ ID NO: 1669 - DNA, 8365 bp, Homo sapiens
cgttcgggcagcggcctcttgttacccggggcccgcttgcctcagcttcttgctgccgccagcacgctaagctccagtcggcgccgaaggagagcttcccgaccctcgtgtccagtagccgcaatcccaggctgggagggtgaggcgccgcgctctgccgcccccccgcccctcgctccctgtgtcctggcggatttgcacgtaatctatccgaaagcccagtcccacccgccacccgactctggagctcccattcttcaggaccctgctgaagtatcgcttctcagccgccttctccaggcgcagctgcattcgcttctcggtttttgcactcgctgtgcaccgagttactttcccggcccctcgttgacaccgttcacaggtggctgttggtctttagtaagggtgctgtcttccctgtctgatccttagcaaaagtaggaaggtagagttgttggcagaaatcctgggataagagaatagtttcctggaagatctgtgcctccaaccagcagagagggattgagcttcattgaactcaacagagccaacatttcatagcaccatgttcaagaggaggttgaagtggcatggcaatggttagagaccctgctgggcgtgaacaccctctggctacctagggacctgtgggcctaccacctggtgccctcatggagacaagaagccctgggttgaacaacatgaagccccagtcactgcagctggtactggaagagcaggtgctggcactacagcagcagatggcagagaatcaggcagcctcctggcggaagctgaagaactcccaggaggcccagcagagacaagcaacccttgtgaggaagctgcaggccaaggtgctgcagtaccgaagctggtgccaagagctggagaagcggctagaagccactggaggaccaatcccccagaggtgggaaaatgtggaggagccaaacctggatgagctgctggtccgattggaggaggagcaacagaggtgtgagagtctagcagaggtgaacacccagcttcgactgcacatggaaaaagctgacgtggtgaataaagcccttagggaagatgtggaaaaactgacagtggactggagccgggcccgggatgagctaatgaggaaggagagccagtggcagatggagcaggagttcttcaagggctacctgaaaggggagcacggtcgccttctcagtctatggcgggaggttgtgacattccgacgccacttcctggaaatgaagtcagctactgacagagatctgatggagctaaaagctgagcatgtgaggctttcagggtctctgttgacctgttgtctgcgcttgactgtgggagcacagtctcgggaacccaacggatctggaagaatggatgggcgggagccggcccagctgctgctgctactagccaagacccaggagctggagaaggaagcccatgaaaggagccaggagttaatacagctgaagagtcaaggggatctggagaaggctgaacttcaggaccgggtgaccgagctctctgctctgttgacccagtctcagaagcaaaatgaagattatgaaaagatgataaaggctctgagagagacagtggagatcctggagacaaatcacacagaattaatggaacatgaagcatctcttagtaggaatgcgcaagaggagaagttgtctttacagcaggtgatcaaggatataacccaggtcatggtggaagaaggggacaatatagcccaaggctctggtcatgagaactctttggaattggactctagtatcttctcccagtttgattaccaggatgcagacaaggctcttactctggtgcgttcagtgctgactcggagacgccaggctgtgcaggacctaaggcagcagcttgcaggctgtcaagaggctgtgaacttgttgcaacagcagcatgatcagtgggaggaagagggcaaagccttgagacagcggctgcagaagctcactggggagcgggacactctggcagggcagactgtggacctccagggagaggtggactctctcagcaaggagcgagagctgctgcagaaggccagggaagagctgcggcagcagctggaggtgctagagcaggaggcatggcgcctgcgaagggtaaatgtggagcttcagctgcagggggactctgcccagggccagaaggaggaacagcaggaggagctgcacctggctgtccgggagagggagcgtcttcaggagatgctgatgggcctggaagccaaacagtcagaatcactcagtgaactgatcactcttcgggaagccctggagtcaagtcacctggaaggggagttactgaggcaagagcaaacggaagtgaccgcagcgctggctagggcagagcagtcaattgcagagctgtcgagttctgaaaacaccctgaagacagaagtagctgatcttcgggctgcagctgtcaagctcagtgccttaaatgaggctttggcgttagataaagttgggctgaaccagcagcttctccagttagaggaggagaaccagtctgtgtgcagcagaatggaggccgcagagcaggcgagaaatgctttgcaggtcgacctggcggaggcagagaagaggagggaagccctgtgggaaaagaacactcacctggaggctcagctgcagaaagctgaggaggctggggctgagctgcaggcagatctcagggacatccaagaagagaaggaagaaattcaaaagaaactaagtgagtcacgtcaccagcaggaggcagccacgactcagctggagcagctacatcaggaggcaaagcgacaggaagaagtgcttgccagggcagtccaggagaaggaggccctagtacgagagaaagcggctctagaggtgcggctgcaggccgtggagcgtgaccggcaggacctcgctgaacaactacaggggctcagctcagccaaggagctactggagagcagtctgtttgaagcccaacaacaaaattctgtgatagaggtcaccaaggggcagctggaggtccagattcaaactgtcactcaagccaaggaagtaatccaaggggaagtgaggtgcctgaagctggaactggacactgaacggagtcaggcagagcaggagcgggatgctgcagccagacagctggcccaggctgagcaagaagggaagactgccttggagcagcagaaggcagcccatgagaaagaggtgaaccagctccgggagaaatgggagaaggagcgctcctggcaccagcaggagctggcaaaggctctggagagcttagaaagggaaaaaatggagctggaaatgaggctaaaggagcagcagacagaaatggaggccatccaggcccagagggaagaagaacggacccaggcagagagtgccctatgccagatgcagctggaaacagagaaggagagagtatccctcctggagacactgctgcagacgcagaaggagctagcagatgccagccaacaactggaacgactgaggcaggacatgaaagtccagaaattaaaggagcaggagaccactgggatactacagacccagctccaggaggctcaacgggagctgaaggaggcagcccggcagcacagagatgaccttgctgccctccaagaagagagcagctccctgctgcaggataagatggacctgcagaagcaggtggaggacttgaagtctcagctggtggcccaggatgactcccagaggctggtggagcaggaggttcaggagaagctgagagagacccaggagtataaccgaattcagaaggagctggagagagagaaagccagcctgactctgtcactgatggaaaaggaacagagactccttgttttacaagaagctgactctattcgacaacaagagctgagtgccctgcgccaggacatgcaggaggcccagggagaacagaaagagctcagtgctcagatggaattactaaggcaagaggtgaaggaaaaggaggctgactttctggcccaggaagcacagctgctggaggagctggaggcgtctcatatcacggagcagcagctgcgagcctccttgtgggcccaggaagccaaggcagcccaactacagctgcgactgcgcagcacagagagccagctagaagcgctggccgcagagcagcagcccgggaaccaggcccaggcccaggcccagctggccagcctctactctgccctgcagcaggccctggggtctgtttgtgagagcaggcctgagctgagtggtgggggagactctgctccttccgtctggggccttgagccagaccagaatggagctaggagcctctttaagagagggcccctgctgactgctctctccgctgaggcagtagcatctgccctccacaagcttcatcaagacctgtggaagactcaacagacccgggatgttctgagggatcaggtccagaaactggaagagcgtctaactgatactgaggctgagaagagccaggtccacacagagttgcaggatctgcagagacagctctcccagaatcaggaagagaaatccaagtgggaaggaaagcagaactccctagaatctgagctgatggaactacatgaaactatggcatccttacagagtcgcctgcggagagcagagctacagcgaatggaagcccagggtgagcgagagttacttcaggcagccaaggagaacctgacagcccaggtggaacacctgcaagcagctgtcgtagaagccagggctcaggcaagtgctgctggcatcctggaagaagacctgagaacggctcgctcagcactgaagctgaaaaatgaggaagtagagagtgagcgtgagagagcccaggctctgcaagagcagggcgaactgaaggtggcccaagggaaggctctgcaagagaatttggccctcctgacccagaccctagctgaaagagaagaggaggtggagactctgcggggacaaatccaggaactggagaagcaacgggaaatgcagaaggctgctttggaattgctgtctctggacctgaagaagaggaaccaagaggtagatctgcagcaagaacagattcaggagctagagaagtgtaggtctgttttagagcatctgcccatggccgtccaggagcgagagcagaagctgactgtgcagagggagcagatcagagagctcgagaaggatcgggagactcagaggaacgtcttggagcatcagcttctagaacttgagaagaaagaccaaatgattgagtcccagagaggacaggttcaggacctgaaaaagcagttggttactctggaatgcctggccctggaactggaggaaaaccatcacaagatggagtgccagcaaaaactgatcaaggagctggagggccagagggaaacccagagagtggctttgacccaccttacgctggacctagaagaaaggagccaggagctgcaggcacaaagcagccagatccatgacctggagagccacagcaccgttctggcaagagagctgcaggagagggaccaggaggtgaagtctcagcgagaacagatcgaggagctgcagaggcagaaagagcatctgactcaggatctcgagaggagagaccaggagctgatgctgcagaaggagaggattcaggttctcgaggatcagaggacccggcagaccaagatcctggaggaggacctggaacagatcaagctgtccttgagagagcgaggccgggagctgaccactcagaggcagctgatgcaggaacgggcagaggaagggaagggcccaagtaaagcacagcgcgggagcctagagcacatgaagctgatcctgcgtgataaggagaaggaggtggaatgtcagcaggagcatatccatgaactccaggagctcaaagaccagctggagcagcagctccagggcctgcacaggaaggtaggtgagaccagcctcctcctgtcccagcgagagcaggaaatagtggtcctgcagcagcaactgcaggaagccagggaacaaggggagctgaaggagcagtcacttcagagtcaactggatgaggcccagagagccctagcccagagggaccaggaactggaggctctgcagcaagaacagcagcaggcccagggacaggaggagagggtgaaggaaaaggcagacgccctccagggagctctggagcaagcccatatgacactgaaggagcgtcatggagagcttcaggaccacaaggaacaggcacgaaggctggaggaagagctggcagtggagggacggcgggtccaggccctggaggaggtgctgggagacctaagggctgagtctcgggaacaggagaaagctctgttggccctccagcagcagtgtgctgagcaggcacaggagcatgaggtggagaccagggccctgcaggacagctggctgcaggcccaggcagtgctcaaggaacgggaccaggagctggaagctctgcgggcagaaagtcagtcctcccggcatcaggaggaggctgcccgggcccgggctgaggctctgcaggaggcccttggcaaggctcatgctgccctgcaggggaaagagcagcatctcctcgagcaggcagaattgagccgcagtctggaggccagcactgcaaccctgcaagcctccctggatgcctgccaggcacacagtcggcagctggaggaggctctgaggatacaagaaggtgagatccaggaccaggatctccgataccaggaggatgtgcagcagctgcagcaggcacttgcccagagggatgaagagctgagacatcagcaggaacgggagcagctgctggagaagtctctggcccagagggtccaagagaatatgatccaagagaagcagaatctggggcaagagagagaagaggaggagataaggggccttcatcagagtgtaagggagctacagctgactctagcccaaaaggaacaggagattctggagctgagggagacccagcaaaggaacaacctggaagccttaccccacagccacaaaacctccccaatggaggaacaatctctaaaacttgattctttagagcccaggctgcagcgggagctggagcggctacaggcagccctgagacagacagaagccagggagattgagtggagggagaaggcccaggacttggcactctccctagcgcagaccaaggccagtgtcagcagtctgcaggaggtagccatgttcctacaagcctctgtcctggagcgggactcagaacagcaaaggctgcaggatgaactggagctcaccagacgggctctggagaaggagcggctacacagcccaggtgcaaccagcacagcagaactggggtccagaggggagcagggtgtgcagctgggagaggtctcaggagtggaggctgagcctagtcctgatggaatggagaagcagtcatggagacaaaggcttgaacacctgcagcaagcagtggcccggctggagattgacaggagcaggctgcagcgccacaatgtccagctgcggagtaccttggagcaggtggagcgagaacggaggaagctgaagagggaggccatgcgtgcggcccaggcagggtccctagagatcagcaaggccacggcttcttcacccacacagcaggatgggagaggacagaagaactcagatgccaagtgtgtggctgaactgcagaaagaggtggtcctgctgcaagctcagctgactttggagcggaagcagaagcaggactacatcacccgctcagcacagaccagccgtgagctagcaggcctgcaccacagcctctcacactcacttcttgccgtggcccaggcccctgaggccactgtcctggaggcagagacccgcaggctggatgagtccctgactcaaagtctgacatccccagggccagtcctgctacaccccagccccagcactacccaagccgcctccaggtagcagccacagccaggagcacacagacagaagactgtgtcatgggtcatggcccctccgcacacctacaggtttgccaaaggaaaagcctggctctgttaggcacccaggagccccaggtcggcgggtgttcccaggaagaggaagtaaatctgcaaccctggggaggaccccaactcacctgggaatgaggcaaattgcatttgcttgctccctatggaatcacccagaggggtgccttgccctggctgagggacatgtactgcctctcatctagaatttattttcctagcacttcaccacctccttcatcttctccttcaacaataaaccctgagatctttgcattcaaaaaaaaaaaaaaaaaa

SEQ ID NO: 1670 - protein, 2442 aa, Homo sapiens
METRSPGLNNMKPQSLQLVLEEQVLALQQQMAENQAASWRKLKNSQEAQQRQATLVRKLQAKVLQYRSWCQELEKRLEATGGPIPQRWENVEEPNLDELLVRLEEEQQRCESLAEVNTQLRLHMEKADVVNKALREDVEKLTVDWSRARDELMRKESQWQMEQEFFKGYLKGEHGRLLSLWREVVTFRRHFLEMKSATDRDLMELKAEHVRLSGSLLTCCLRLTVGAQSREPNGSGRMDGREPAQLLLLLAKTQELEKEAHERSQELIQLKSQGDLEKAELQDRVTELSALLTQSQKQNEDYEKMIKALRETVEILETNHTELMEHEASLSRNAQEEKLSLQQVIKDITQVMVEEGDNIAQGSGHENSLELDSSIFSQFDYQDADKALTLVRSVLTRRRQAVQDLRQQLAGCQEAVNLLQQQHDQWEEEGKALRQRLQKLTGERDTLAGQTVDLQGEVDSLSKERELLQKAREELRQQLEVLEQEAWRLRRVNVELQLQGDSAQGQKEEQQEELHLAVRERERLQEMLMGLEAKQSESLSELITLREALESSHLEGELLRQEQTEVTAALARAEQSIAELSSSENTLKTEVADLRAAAVKLSALNEALALDKVGLNQQLLQLEEENQSVCSRMEAAEQARNALQVDLAEAEKRREALWEKNTHLEAQLQKAEEAGAELQADLRDIQEEKEEIQKKLSESRHQQEAATTQLEQLHQEAKRQEEVLARAVQEKEALVREKAALEVRLQAVERDRQDLAEQLQGLSSAKELLESSLFEAQQQNSVIEVTKGQLEVQIQTVTQAKEVIQGEVRCLKLELDTERSQAEQERDAAARQLAQAEQEGKTALEQQKAAHEKEVNQLREKWEKERSWHQQELAKALESLEREKMELEMRLKEQQTEMEAIQAQREEERTQAESALCQMQLETEKERVSLLETLLQTQKELADASQQLERLRQDMKVQKLKEQETTGILQTQLQEAQRELKEAARQHRDDLAALQEESSSLLQDKMDLQKQVEDLKSQLVAQDDSQRLVEQEVQEKLRETQEYNRIQKELEREKASLTLSLMEKEQRLLVLQEADSIRQQELSALRQDMQEAQGEQKELSAQMELLRQEVKEKEADFLAQEAQLLEELEASHITEQQLRASLWAQEAKAAQLQLRLRSTESQLEALAAEQQPGNQAQAQAQLASLYSALQQALGSVCESRPELSGGGDSAPSVWGLEPDQNGARSLFKRGPLLTALSAEAVASALHKLHQDLWKTQQTRDVLRDQVQKLEERLTDTEAEKSQVHTELQDLQRQLSQNQEEKSKWEGKQNSLESELMELHETMASLQSRLRRAELQRMEAQGERELLQAAKENLTAQVEHLQAAVVEARAQASAAGILEEDLRTARSALKLKNEEVESERERAQALQEQGELKVAQGKALQENLALLTQTLAEREEEVETLRGQIQELEKQREMQKAALELLSLDLKKRNQEVDLQQEQIQELEKCRSVLEHLPMAVQEREQKLTVQREQIRELEKDRETQRNVLEHQLLELEKKDQMIESQRGQVQDLKKQLVTLECLALELEENHHKMECQQKLIKELEGQRETQRVALTHLTLDLEERSQELQAQSSQIHDLESHSTVLARELQERDQEVKSQREQIEELQRQKEHLTQDLERRDQELMLQKERIQVLEDQRTRQTKILEEDLEQIKLSLRERGRELTTQRQLMQERAEEGKGPSKAQRGSLEHMKLILRDKEKEVECQQEHIHELQELKDQLEQQLQGLHRKVGETSLLLSQREQEIVVLQQQLQEAREQGELKEQSLQSQLDEAQRALAQRDQELEALQQEQQQAQGQEERVKEKADALQGALEQAHMTLKERHGELQDHKEQARRLEEELAVEGRRVQALEEVLGDLRAESREQEKALLALQQQCAEQAQEHEVETRALQDSWLQAQAVLKERDQELEALRAESQSSRHQEEAARARAEALQEALGKAHAALQGKEQHLLEQAELSRSLEASTATLQASLDACQAHSRQLEEALRIQEGEIQDQDLRYQEDVQQLQQALAQRDEELRHQQEREQLLEKSLAQRVQENMIQEKQNLGQEREEEEIRGLHQSVRELQLTLAQKEQEILELRETQQRNNLEALPHSHKTSPMEEQSLKLDSLEPRLQRELERLQAALRQTEAREIEWREKAQDLALSLAQTKASVSSLQEVAMFLQASVLERDSEQQRLQDELELTRRALEKERLHSPGATSTAELGSRGEQGVQLGEVSGVEAEPSPDGMEKQSWRQRLEHLQQAVARLEIDRSRLQRHNVQLRSTLEQVERERRKLKREAMRAAQAGSLEISKATASSPTQQDGRGQKNSDAKCVAELQKEVVLLQAQLTLERKQKQDYITRSAQTSRELAGLHHSLSHSLLAVAQAPEATVLEAETRRLDESLTQSLTSPGPVLLHPSPSTTQAASR

SEQ ID NO: 1671 - DNA, 637 bp, Homo sapiens
atgcgcgttatgtaccctgggattgccagccctcaggaccccggtacccaactgctgctgcttccatttcagacggttcaggttcctggtggaaccgaagacagcaaagataaggtgctggtgatcagcctctacttcctcaggtatatccaggaaagttggctggagaaccatggtcagtatccgtccttggagtttgtggctctgttgtatgccttgcatacctgtgaccaggtatccttgtttggttttggggaagacaattgcaaaaggtggtcccattactgggatgacaaatattggtttgagaacaccatgcaaaatttcccagcagaataccagatcatcttgaaactgcagtgtgagaggaagattgctgtctacggctgagatgtttccagtggagtccccaggaggcttgacaggtagccaaggggaccttgtggtgtcagagagggactagggcttcaagcagaccctggatggagattactctgctactgaataaaaccctagcttatttctctctctggatttctggtggcattaaagggctacattctattactgattctgtcttatcaccatgtgactctcttatgctgtatcttaccaaaaaataaaattaaatgagaaa

SEQ ID NO: 1672 - protein, 129 aa, Homo sapiens
MRVMYPGIASPQDPGTQLLLLPFQTVQVPGGTEDSKDKVLVISLYFLRYIQESWLENHGQYPSLEFVALLYALHTCDQVSLFGFGEDNCKRWSHYWDDKYWFENTMQNFPAEYQIILKLQCERKIAVYG

SEQ ID NO: 1673 - DNA, 1368 bp, Homo sapiens
gtggctccaggccggaagagggagtctgtaggggcgggccggctggcgtcccctttccggccggtccccatggaggcgctggggaagctgaagcagttcgatgcctaccccaagactttggaggacttccgggtcaagacctgcgggggcgccaccgtgaccattgtcagtggccttctcatgctgctactgttcctgtccgagctgcagtattacctcaccacggaggtgcatcctgagctctacgtggacaagtcgcggggagataaactgaagatcaacatcgatgtactttttccgcacatgccttgtgcctatctgagtattgatgccatggatgtggccggagaacagcagctggatgtggaacacaacctgttcaagcaacgactagataaagatggcatccccgtgagctcagaggctgagcggcatgagcttgggaaagtcgaggtgacggtgtttgaccctgactccctggaccctgatcgctgtgagagctgctatggtgctgaggcagaagatatcaagtgctgtaacacctgtgaagatgtgcgggaggcatatcgccgtagaggctgggccttcaagaacccagatactattgagcagtgccggcgagagggcttcagccagaagatgcaggagcagaagaatgaaggctgccaggtgtatggcttcttggaagtcaataaggtggccggaaacttccactttgcccctgggaagagcttccagcagtcccatgtgcacgtccatgacttgcagagctttggccttgacaacatcaacatgacccactacatccagcacctgtcatttggggaggactatccaggcattgtgaaccccctggaccacaccaatgtcactgcgccccaagcctccatgatgttccagtactttgtgaaggtggtgcccactgtgtacatgaaggtggacggagaggtactgaggacaaatcagttctctgtgaccagacatgagaaggttgccaatgggctgttgggcgaccaaggccttcccggagtcttcgtcctctatgagctctcgcccatgatggtgaagctgacggagaagcacaggtccttcacccacttcctgacaggtgtgtgcgccatcattgggggcatgttcacagtggctggactcatcgattcgctcatctaccactcagcacgagccatccagaagaaaattgatctagggaagacaacgtagtcaccctcggtgcttcctctgtctcctctttctccctggcctgtggttgtcccccagcctctgccaccctccacctcctcggtcagccccagccccaggttgataaatctattgattgattgtgatagtaaaaaaaaaaaaaaaaaa

SEQ ID NO: 1674 - protein, 383 aa, Homo sapiens
MEALGKLKQFDAYPKTLEDFRVKTCGGATVTIVSGLLMLLLFLSELQYYLTTEVHPELYVDKSRGDKLKINIDVLFPHMPCAYLSIDAMDVAGEQQLDVEHNLFKQRLDKDGIPVSSEAERHELGKVEVTVFDPDSLDPDRCESCYGAEAEDIKCCNTCEDVREAYRRRGWAFKNPDTIEQCRREGFSQKMQEQKNEGCQVYGFLEVNKVAGNFHFAPGKSFQQSHVHVHDLQSFGLDNINMTHYIQHLSFGEDYPGIVNPLDHTNVTAPQASMMFQYFVKVVPTVYMKVDGEVLRTNQFSVTRHEKVANGLLGDQGLPGVFVLYELSPMMVKLTEKHRSFTHFLTGVCAIIGGMFTVAGLIDSLIYHSARAIQKKIDLGKTT

SEQ ID NO: 1675 - DNA, 1383 bp, Homo sapiens
gtggctccaggccggaagagggagtctgtaggggcgggccggctggcgtcccctttccggccggtccccatggaggcgctggggaagctgaagcagttcgatgcctaccccaagactttggaggacttccgggtcaagacctgcgggggcgccaccgtgaccattgtcagtggccttctcatgctgctactgttcctgtccgagctgcagtattacctcaccacggaggtgcatcctgagctctacgtggacaagtcgcggggagataaactgaagatcaacatcgatgtactttttccgcacatgccttgtgcctatctgagtattgatgccatggatgtggccggagaacagcagctggatgtggaacacaacctgttcaagcaacgactagataaagatggcatccccgtgagctcagaggctgagcggcatgagcttgggaaagtcgaggtgacggtgtttgaccctgactccctggaccctgatcgctgtgagagctgctatggtgctgaggcagaagatatcaagtgctgtaacacctgtgaagatgtgcgggaggcatatcgccgtagaggctgggccttcaagaacccagatactattgagcagtgccggcgagagggcttcagccagaagatgcaggagcagaagaatgaaggctgccaggtgtatggcttcttggaagtcaataaggtggccggaaacttccactttgcccctgggaagagcttccagcagtcccatgtgcacgtacatgctgtggagatccatgacttgcagagctttggccttgacaacatcaacatgacccactacatccagcacctgtcatttggggaggactatccaggcattgtgaaccccctggaccacaccaatgtcactgcgccccaagcctccatgatgttccagtactttgtgaaggtggtgcccactgtgtacatgaaggtggacggagaggtactgaggacaaatcagttctctgtgaccagacatgagaaggttgccaatgggctgttgggcgaccaaggccttcccggagtcttcgtcctctatgagctctcgcccatgatggtgaagctgacggagaagcacaggtccttcacccacttcctgacaggtgtgtgcgccatcattgggggcatgttcacagtggctggactcatcgattcgctcatctaccactcagcacgagccatccagaagaaaattgatctagggaagacaacgtagtcaccctcggtgcttcctctgtctcctctttctccctggcctgtggttgtcccccagcctctgccaccctccacctcctcggtcagccccagccccaggttgataaatctattgattgattgtgatagtaaaaaaaaaaaaaaaaaa

SEQ ID NO: 1676 - protein, 388 aa, Homo sapiens
MEALGKLKQFDAYPKTLEDFRVKTCGGATVTIVSGLLMLLLFLSELQYYLTTEVHPELYVDKSRGDKLKINIDVLFPHMPCAYLSIDAMDVAGEQQLDVEHNLFKQRLDKDGIPVSSEAERHELGKVEVTVFDPDSLDPDRCESCYGAEAEDIKCCNTCEDVREAYRRRGWAFKNPDTIEQCRREGFSQKMQEQKNEGCQVYGFLEVNKVAGNFHFAPGKSFQQSHVHVHAVEIHDLQSFGLDNINMTHYIQHLSFGEDYPGIVNPLDHTNVTAPQASMMFQYFVKVVPTVYMKVDGEVLRTNQFSVTRHEKVANGLLGDQGLPGVFVLYELSPMMVKLTEKHRSFTHFLTGVCAIIGGMFTVAGLIDSLIYHSARAIQKKIDLGKTT

SEQ ID NO: 1677 - DNA, 2581 bp, Homo sapiens
gctcgcgccccgcggcagctccgcagtgcactagccaccaccgccgccgccgccgctccgccagacctgctgccagcttgcccggtccagccctgagagagcctcgaacgccagctgcgagggtcatgagccagagagccccggggcgccgcgcggagagcaagcggagatagcgactttgcgccccccagccctcgccttcttgcatcgcgttccccgcatcctcgggtccttctgtcctttccgctgtccccaccgccgccatggccaccttgctccgcagcaagctgtccaacgtggccacgtccgtgtccaacaagtcccaggccaagatgagcggcatgttcgccaggatgggttttcaggcggccacggatgaggaggcggtgggcttcgcgcattgcgacgacctcgactttgagcaccgccagggcctgcagatggacatcctgaaagccgagggagagccctgcggggacgagggcgctgaagcgcccgtcgagggagacatccattatcagcgaggcagcggagctcctctgccgccctccggctccaaggaccaggtgggaggtggtggcgaattcgggggccacgacaagcccaaaatcacggcgtgggaggcaggctggaacgtgaccaacgccatccagggcatgttcgtgctgggcctaccctacgccatcctgcacggcggctacctggggttgtttctcatcatcttcgccgccgttgtgtgctgctacaccggcaagatcctcatcgcgtgcctgtacgaggagaatgaagacggcgaggtggtgcgcgtgcgggactcgtacgtggccatagccaacgcctgctgcgccccgcgcttcccaacgctgggcggccgagtggtgaacgtagcgcagatcatcgagctggtgatgacgtgcatcctgtacgtggtggtgagtggcaacctcatgtacaacagcttcccggggctgcccgtgtcgcagaagtcctggtccattatcgccacggccgtgctgctgccttgcgccttccttaagaacctcaaggccgtgtccaagttcagtctgctgtgcactctggcccacttcgtcatcaatatcctggtcatagcctactgtctatcgcgggcgcgcgactgggcctgggagaaggtcaagttctacatcgacgtcaagaagttccccatctccattggcatcatcgtgttcagctacacgtctcagatcttcctgccttcgctggagggcaatatgcagcagcccagcgagttccactgcatgatgaactggacgcacatcgcagcctgcgtgctcaagggcctcttcgcgctcgtcgcctacctcacctgggccgacgagaccaaggaggtcatcacggataacctgcccggctccatccgcgccgtggtcaacatctttctggtggccaaggcgctgttgtcctatcctctgccattctttgccgctgtcgaggtgctggagaagtcgctcttccaggaaggcagccgcgcctttttcccggcctgctacagcggcgacgggcgcctgaagtcctgggggctgacgctgcgctgcgcgctcgtcgtcttcacgctgctcatggccatttatgtgccgcacttcgcgctgctcatgggcctcaccggcagcctcacgggcgccggcctctgtttcttgctgcccagcctctttcacctgcgcctgctctggcgcaagctgctgtggcaccaagtcttcttcgacgtcgccatcttcgtcatcggcggcatctgcagcgtgtccggcttcgtgcactccctcgagggcctcatcgaagcctaccgaaccaacgcggaggactagggcgcaagggcgagcccccgccgcgcttctgcgctctctcccttctcccctcaccccgcccccaccagcccagtgcgccctgccgccgcgcttgggaggccaagctttaaacatctctggttcctagtttctgattattcggggatgggggggatgggaggggacagggattcacgatccatcgcgtctgcgtttctgttgtcctttcttttccacaacaccctggttttggggggaggcggggtgcatttgcgggcagggttctctgtccttccaagtggggccccgacactttggttccagtcatcgagggggttgggaagggagggagagggggcgcagctcgcaggcgtggcaacttgaccttgggggaatatttcacatccatccagagctcggaatctacagcgtccagccatttccagcaagagcgcttcccattccggagacgtttcaaccctgcagcgggaaaggctgactgggaaatccattttgggtgggcaatttccttcaacgaagccggaaggcgagaagccgcggcggggccagcttgcctgccggttttcaggaatctaaactctcatcttgtgcaatttatcaggtgtggaactgttctactgtgcgtgtggtgtgctcgtggtgaataagatgaaatgtatatcagaaaaaaatctatctctaatttagagtgcggtacataattatatccgcaaataaagaagagacaaaggctaaaaaaa

SEQ ID NO: 1678 - protein, 525 aa, Homo sapiens
MATLLRSKLSNVATSVSNKSQAKMSGMFARMGFQAATDEEAVGFAHCDDLDFEHRQGLQMDILKAEGEPCGDEGAEAPVEGDIHYQRGSGAPLPPSGSKDQVGGGGEFGGHDKPKITAWEAGWNVTNAIQGMFVLGLPYAILHGGYLGLFLIIFAAVVCCYTGKILIACLYEENEDGEVVRVRDSYVAIANACCAPRFPTLGGRVVNVAQIIELVMTCILYVVVSGNLMYNSFPGLPVSQKSWSIIATAVLLPCAFLKNLKAVSKFSLLCTLAHFVINILVIAYCLSRARDWAWEKVKFYIDVKKFPISIGIIVFSYTSQIFLPSLEGNMQQPSEFHCMMNWTHIAACVLKGLFALVAYLTWADETKEVITDNLPGSIRAVVNIFLVAKALLSYPLPFFAAVEVLEKSLFQEGSRAFFPACYSGDGRLKSWGLTLRCALVVFTLLMAIYVPHFALLMGLTGSLTGAGLCFLLPSLFHLRLLWRKLLWHQVFFDVAIFVIGGICSVSGFVHSLEGLIEAYRTNAED

SEQ ID NO: 1679 - DNA, 2479 bp, Homo sapiens
ggcggggctggacgcgcgctccaagatggcggcgaacgtgttcccgttccgcgacgcccgtgccgcaccggacccagtgctggaggccggcccggtggcacacgggccactgccggtaccgctggtgctggacaacgggtcgttccaagtccgcgctggctgggcgtgtcccgggcaggacccaggtcccgagccgcgcctgcagttccgcgcggtgtgcgcccgcggtcgtggcggggcacggggcgcgtcgggcccgcaggtggggaacgctctgggcagcctggagccactgcgctggatgctgcgctcgcccttcgaccgcaacgtgccggtcaacctggagcttcaggagttgctgctggactacagcttccagcacctgggtgtctcctcacagggctgtgttgatcatcccatagttttgacagaagctgtgtgcaacccactgtattcacggcaaatgatgtctgagcttctttttgagtgctacgggattcccaaggttgcctatggaatagacagcctcttcagcttctaccacaataagccaaagaactcgatgtgcagtgggctaatcatttcatctggataccagtgtacgcatgttttacccatcttagaagggagattagatgctaaaaactgcaagcgcatcaatcttggaggaagccaagcagctggttacctccagcgtctcctccagctgaagtaccctgggcacctggcagccatcaccctcagccgcatggaggagattctgcatgagcacagctacatcgctgaggattatgtggaagaattacacaaatggcggtgtcctgattattatgagaataatgtccacaagatgcagctcccattttccagcaagctcctgggcagcactctgacctctgaggagaaacaagaaaggcggcagcagcaattgcggcggctgcaggagctcaatgcccggcggcgggaggagaagctgcagctggatcaggagcgtctggaccgactgctatatgtgcaggaacttctagaggatggccagatggatcagtttcacaaagctctgatagagctgaatatggactccccagaagagctgcagtcctacatccagaagctcagtatagcagtggagcaggctaagcagaaaatcctccaagcggaagtcaacctcgaggtggatgtggtagacagcaagccagagacccctgacctggagcagctggagccgtctttggaagatgtggaaagcatgaatgattttgatcccttgttttcagaggaaacacctggagtggagaagccggtcaccactgttcagcccgtgtttaacttggcagcatatcatcagctatttgttgggacagaaagaattcgagctccagagattattttccagccatctctcataggagaagaacaggctgggattgcagagactcttcagtacattctggacaggtacccaaaggacattcaggaaatgctggttcagaacgttttcctcactggcggcaacacgatgtatcctggcatgaaagccagaatggagaaggaactgttggagatgagacccttccggtcttcttttcaggttcaacttgcctcgaaccctgtgctggatgcctggtacggtgctcgtgactgggccttgaaccacctagatgataatgaagtttggatcaccaggaaagagtatgaagaaaagggaggagagtacctcaaggagcactgtgcttccaacatctatgtccccatccgcctgccgaagcaggcctcccgctcctcagatgcccaggcatccagcaagggctccgctgctggtggaggtggtgctggtgagcaggcatagcagaggccctccagagagactgccctgcacgccatgccttgggccacgttggcagtgtgacaggactgtgattgtgctagatgtacctgcccaagtctgctggtcacatttggcagcaaaatggatttctcctggggagaacaaagttaagggacactgagacctgcccttcagaattcggttcacttgggggcttctgtggtagagactaactggccttctgatgtctttgttcaactgtggccagctgtggcatcagcttcctggagcagtaaatgaagacagagtggaggacacaaatgtacaaaatgcacaagactgatttcttaccacattttagtctttcttgttttaaaaaaaattctttaaaatttatcttgtccgtgtagatactttattcttctggatgtattcagaaattgcatgaatgcccagtgaggggaggtctttcatgcatataaaaaggtaatgtttattgccgggcacagtggcacgtgcctgttaaggcccagctttgtgggaggctaaggcaggaggatcgctggagcttaggagttcgaggctatcgtgtgctgtgatcgcacctgtgaataaccactgcactccagcctgggcaacataggaagacat

SEQ ID NO: 1680 - protein, 607 aa, Homo sapiens
MAANVFPFRDARAAPDPVLEAGPVAHGPLPVPLVLDNGSFQVRAGWACPGQDPGPEPRLQFRAVCARGRGGARGASGPQVGNALGSLEPLRWMLRSPFDRNVPVNLELQELLLDYSFQHLGVSSQGCVDHPIVLTEAVCNPLYSRQMMSELLFECYGIPKVAYGIDSLFSFYHNKPKNSMCSGLIISSGYQCTHVLPILEGRLDAKNCKRINLGGSQAAGYLQRLLQLKYPGHLAAITLSRMEEILHEHSYIAEDYVEELHKWRCPDYYENNVHKMQLPFSSKLLGSTLTSEEKQERRQQQLRRLQELNARRREEKLQLDQERLDRLLYVQELLEDGQMDQFHKALIELNMDSPEELQSYIQKLSIAVEQAKQKILQAEVNLEVDVVDSKPETPDLEQLEPSLEDVESMNDFDPLFSEETPGVEKPVTTVQPVFNLAAYHQLFVGTERIRAPEIIFQPSLIGEEQAGIAETLQYILDRYPKDIQEMLVQNVFLTGGNTMYPGMKARMEKELLEMRPFRSSFQVQLASNPVLDAWYGARDWALNHLDDNEVWITRKEYEEKGGEYLKEHCASNIYVPIRLPKQASRSSDAQASSKGSAAGGGGAGEQA

SEQ ID NO: 1681 - DNA, 6251 bp, Homo sapiens
ctctgtcgccgctggagcagctgcggctcggggacccacagacacagccggggtcgggagccgcccggggcagggctcgggagagcgggccacaccatgaggccccagccccaccagaggccccgcgctgccctggcccccggtgcaccgtgctagcccccagccagggcgttggggagggcggtggccatggccagtcacgtggacctgctgacggagctgcagctgctggagaaggtgcccacgctggagcggctgcgggctgcccagaagcgccgggcccagcagctgaagaaatgggcacagtacgagcaggacttgcagcaccgcaagcgaaagcatgagcggaagcgcagcacgggcggccgccgcaagaaagtgtccttcgaggccagcgtggccctgctggaggcctcgctgaggaacgacgccgaggaagtacgctacttcctgaagaataaggtcagccctgatttgtgcaatgaggacggactcacagccctacaccagtgctgcatcgacaactttgaggaaattgtgaagctgctcctctcccatggtgccaatgtgaacgccaaggacaacgagctgtggacacctctccatgctgcagccacctgcggccacatcaacctggtgaagatcctcgttcagtatggggccgacttgcttgctgtcaactcggatgggaacatgccatatgacctctgcgaggatgaacccaccctggatgtcatcgagacctgcatggcataccagggcatcacccaagagaaaatcaacgagatgcgggtggctcctgagcagcagatgattgcggacatccactgcatgatcgcagcgggccaggacctggactggatagatgcccagggtgccacactgctgcacatagctggagccaatggatacctgcgggcagctgagctcctcctggaccatggagtgcgtgtggatgtgaaggactgggatggctgggagcccctgcatgcagctgccttctggggacagatgcagatggcagagctattggtgtcccatggagctagtctcagtgcaaggacatccatggatgagatgccaatagacctgtgcgaggaggaagagttcaaggtcctgctgctggagctaaaacacaagcatgatgtgatcatgaagtcacagctgaggcacaagtcatccttgagccggaggacctccagcgcaggcagccgtgggaaggtggtgcggcgagccagcctgtcggacaggaccaacctgtataggaaggagtatgagggagaggccatcctgtggcagcggagtgcagctgaggatcagcggacctccacctacaacggggacatcagggagaccaggacagaccaagagaataaggaccctaaccccaggctggagaagcccgtgctactctccgaatttcctaccaagatcccacgaggtgaactggacatgcctgttgagaatggcctccgggctccggtcagtgcctaccagtatgcgctggccaacggggatgtctggaaggtgcatgaggtgcctgactacagcatggcctatggcaaccctggcgtggccgacgccaccccgccctggagcagctacaaggaacagagccctcagacgcttctggagctgaagcggcagcgggctgcagccaagctgctcagccaccccttccttagcacacacctgggcagcagcatggccaggacgggcgagagtagcagtgaaggcaaggcccccttgatcggaggcagaacttcaccgtacagcagcaatgggacctcggtatattacacggtcaccagcggagatcccccactcttaaagttcaaggcccccatagaggagatggaggagaaggtgcatggctgttgccgtatctcctagtctccgtgtgatggaggagggagatgcctggggaggggctcctggaatccaggccagcccaacagccctggctggggaggtgtcagggcagctggggagaggtgggctctgcttttcagaggaactcagaccccagccctcagctggctgcccatagcatcccatgtcccacgtcccgtggttctgcttcctgctgcatcgtctgccatctgacacaaggcctgtcgtggcctcctggttcactctgctgtctgatcttgggagggtgggcttgagatcccagctctattcttggtataaaggcttctccggatcagtacatgcatgtcacattaacacacacacacacacacatatacacacacacacaagctcgatcagtgtgtgtaggaatgacatacctgggctcaggggaagcaagggggcttagaatttgtggggtattcccaaaaggatggaagttaagactcagagtctcattaccactgccaatgtggttttagcaggggaggggacctgctaagctgagacccatagtcctgctcagagttatcccaaagtctgagccaccagccacacctgacaggggtgagaagtcctcgctgtgttcagagggagccaggaatctacatgggtagatgagatagacacagacctgctccccgcagccttgttgagagccacacttctgcccatgccaggagccagctgtgtgaccatccaggggtggagggggaaaaccaggcaatttcgttcctggaatcaaccaaatcatgttttcctcttggatggaagtgtcaaaggcagaagggtgtgggagggggacaaggtcagtatttaccaaagtgtatctgattttaaaaattcctttagtctgtaaaactcctagagggagggaggtaactgaattcacttctttttgtggatcgtatcaaggtcactgggttttactggctggtgctgggaaaatgaagctaagtgaggagcttccattggaatgcttttccagggagagaggccagttaatttaaaaaaaacagtcgctagttaacagcgacagagcccagcaccctggggtctttgtgaatatccagactgtttcagcccagcccatctcagccaaccctccttagactgagctgtcagagcaagcaattaggggccagcctgcctccacctcccacccccttccacctccatcagtcatgtgtgcagagtcagtgctcgggatcccgggcccagcttttgcctttttggggatgcttggtgagacagatttgccagtcagcccttttgagttcccgcctcacccaggggctcccagcctgcacttgcaggagtggtgatgccccaagtctgcgaatccagggtgcacgtggtcaatatcccctcctgcattcaggagagccatggtagggctagagttgggtcttgcccagccctgcagtttcatagtcccagccttcctggtgctggggagggaggactgtgaatggctgttctcccctcactgctgagtctcccaggaccccctttggagatgcccatggcatgggcactgcccacaggctcagccagaacctcttggtgtacccgataagctgcaggttatcccttgctctgtgcgccttttatttgtccttaaactacctccttagagctctgaaggggtctcctagttccagattttaatttggggaacagatctgggttctttttaaccctcttctttctcagtctatgagaaacttgccctgaggggcacctgggctaggggcttgggactggaagaccatccccgccttgtgccacaactttggtcatgggatctgctctttgtcattcttagccccctactgtggcccccatagccccataacccagagagggagctggacttcagggagcctgagtgatgctttcccaggagcagggcagctggctggaccagaaagtagagggcccatgggagtgactgcacccttggtggctgctggaaggggagaggttctcagcatcaggccacctccaccccaatgccaggatagatgtattctagagtaggggtggaggcggcccaggaggctgaagacaggtgcacagatgcttcccacgaccttgccatttggggtgggctcttcaacatctcaggctgtggctggaacaggacaggatgatctaaaacacacgtaccattggctgtaaaacagtatgagcccagactgacgctgaaatccctcatgagccaaccttagctacaaggtagggagttctgagggaagccgcgtgctcctcaggagagagctgtttaggttttccgatctttttgctcaggggccaaacactgaaggcacgtactgcccaacccactgagcgcctgaggccattccctccttttccgcatgcctcctgcctcctgggctattcctctccacccagaaggctgggaatcccagctgattccctgacaggagccgacttcacacacaggtgactctcaggcattggctcatgttttcagccagggataaaccatcccttcttggggctttaagtccctggggagctttccctgtaggtctcctgggtgttgagagacaagttggagaccaacctccaatgaatgagccgcggtcattcattaattcactcacgtaatttactgagtagctgcaacatgccagcctctacgttaggttctgcggataaaggaggaataagacagagtcaggagaactgttccttgtggtttccgtcccttggggaccacaggcatcagcagtcccattcaagtcacctgaggcaaagtgtctgcatcttcgtccagcgaccctttgcttttcggctcctagaatccttagagtctgaattcctttagctgggaacagctgtcatggtcacccctggataacatttgccaccaagtatagatgctggatcttgggttccaggcagacatcatccaggtccatctggaactttcagtgatagctgccttcagccagcatctttgggggactctataatagcagcttgagatcagtgtctagaagactgttctgcaatttgctgccaaatgcatctcaggtttttaaagtcattgtttcttgctcatggtggctcatttattacatagtcccctcaccccactaatggataatgggaggaaaagttgctgcttccttcagcatcaaagcctttccttgggaatctgcctccctccatggcaggggtggattcgggagctgggagtaaccaggcaaagtcaaccagatgcctagctcctgctgagacccaggtcctatggcagctcctcattagattaaaggagaccacttccaaagcaggtgctgcatggctcaccatcatatgccccaaacaactgaaagttggcggttatcaccagactgtgagtttctggcaagtagcttggggaagctgaataaactctaggcccagggctactaaagacttcaggatagaattctccatcaaatatacagcataagtaaaactgctctgcactgtttaatccatttccaaggggcttagaaaagctaacaagggtgtgtcccctgtcctgccccaccggtttgctggctttgtaataacataagaccattgtggttgttggtgtcagataccttcccatcctgagctctctcacctacctgctctctctcctagagcaggatactggggtacttttaagaagggtgctccttttaagatgcccagaaaagctgtatttaactcttgctatttgtaacttggggatggtctcccctgccccagggcacataagagcaaaggctccaatggtcagtggatgactctgcaaaagtgaccccctgtgccagaagctatagccctctccccaacaggtctctcttgttggccagagggcctgcttcccatgggcattgcaagtgccaccgtgcggggcctggctctgcacacccaggaaaagtctgcagacccccagccctccgcaataattcaccagaccagaagccactggtgtacagagaacacttaaaaaaatgtattttatgtgaaaaaaaattaaaactctgtatactgtatcagcagctttgtgtaaaaatggcaatcaagagagtctaatatatttaaaacttttttaaaaaaaatcttcgcagatctttgatatcgtactgaggtaacttccacgtagccccttgccacgcggcaccggtgggccttgggtccaaaactgtggctcagccacatcccaaagggggcacatgtccctggagttgcttccagctgccaaggcctgtgacagaattcgctgttaagagtttttaattaaaattattaaattccttttaataaca

SEQ ID NO: 1682 - protein, 567 aa, Homo sapiens
MASHVDLLTELQLLEKVPTLERLRAAQKRRAQQLKKWAQYEQDLQHRKRKHERKRSTGGRRKKVSFEASVALLEASLRNDAEEVRYFLKNKVSPDLCNEDGLTALHQCCIDNFEEIVKLLLSHGANVNAKDNELWTPLHAAATCGHINLVKILVQYGADLLAVNSDGNMPYDLCEDEPTLDVIETCMAYQGITQEKINEMRVAPEQQMIADIHCMIAAGQDLDWIDAQGATLLHIAGANGYLRAAELLLDHGVRVDVKDWDGWEPLHAAAFWGQMQMAELLVSHGASLSARTSMDEMPIDLCEEEEFKVLLLELKHKHDVIMKSQLRHKSSLSRRTSSAGSRGKVVRRASLSDRTNLYRKEYEGEAILWQRSAAEDQRTSTYNGDIRETRTDQENKDPNPRLEKPVLLSEFPTKIPRGELDMPVENGLRAPVSAYQYALANGDVWKVHEVPDYSMAYGNPGVADATPPWSSYKEQSPQTLLELKRQRAAAKLLSHPFLSTHLGSSMARTGESSSEGKAPLIGGRTSPYSSNGTSVYYTVTSGDPPLLKFKAPIEEMEEKVHGCCRIS

SEQ ID NO: 1683 - DNA, 7580 bp, Homo sapiens
atgacggacaacatcccgctgcagccggtgcgccagaagaagcggatggacagcaggccccgcgccgggtgctgcgagtggctgagatgctgcggtggaggggaggccaggccccgcactgtctggctggggcaccccgagaagagagaccagaggtatcctcggaatgtcatcaacaatcagaagtacaatttcttcacctttcttcctggggtgctgttcaaccagttcaaatactttttcaacctctatttcttacttcttgcctgctctcagtttgttcccgaaatgagacttggtgcactctatacctactgggttcccctgggcttcgtgctggccgtcactgtcatccgtgaggcggtggaggagatccgatgctacgtgcgggacaaggaagtcaactcccaggtctacagccggctcacagcacgaggcacagtgaaggtgaagagttctaacatccaagttggagaccttatcatcgttgaaaagaaccagcgggtccctgccgacatgatcttcctgaggacatcagaaaaaaacgggtcatgcttcttgcggacggatcagctggatggggagacggactggaagctgcggcttcccgtggcctgcacgcagaggctccccacggccgccgaccttcttcagattcgatcgtatgtgtacgcagaagagccaaatattgacattcacaacttcgtgggaacttttacccgagaagacagcgaccccccgatcagcgagagcctgagcatagagaacacgctgtgggctggcactgtggtcgcatcaggtactgttgtgggtgttgttctttacactggcagagaactccggagtgtcatgaatacctcaaatccccgaagtaagatcggcctgttcgacttggaagtgaactgcctcaccaagatcctctttggtgccctggtggtggtctcgctggtcatggttgcccttcagcactttgcaggccgttggtacctgcagatcatccgcttcctcctcttgttttccaacatcatccccattagtttgcgcgtgaacctggacatgggcaagatcgtgtacagctgggtgattcgaagggactcgaaaatccccgggaccgtggttcgctccagcacgattcctgagcagctgggcaggatttcgtacttactcacagacaagacaggcactcttacccagaacgagatgattttcaaacggctccatctcggaacagtagcctacggcctcgactcaatggacgaagtacaaagccacattttcagcatttacacccagcaatcccaggacccaccggctcagaagggcccaacgctcaccactaaggtccggcggaccatgagcagccgcgtgcacgaagccgtgaaggccatcgcgctctgccacaacgtgactcccgtgtatgagtccaacggtgtgactgatcaggctgaggccgagaagcagtacgaagactcctgccgcgtataccaggcatccagccccgatgaggtggccctggtacagtggacggaaagtgtgggcttaaccctggtgggccgagaccagtcttccatgcagctgaggacccctggcgaccagatcctgaacttcaccatcctacagatcttccctttcacctatgaaagcaaacgtatgggcatcatcgtgcgggatgaatcaactggagaaattacgttttacatgaagggagcagatgtggtcatggctggcattgtgcagtacaatgactggttggaggaagagtgtggcaacatggcccgagaagggctgcgggtgctcgtggtggcaaagaagtctcttgcagaggagcagtatcaggactttgaagcccgctacgtccaggccaagctgagtgtgcacgaccgctccctcaaagtggccacggtgatcgagagcctggagatggagatggaactgctgtgcctgacgggcgtggaggaccagctgcaggcagatgtgcggcccacgctggagaccctgaggaatgctggcatcaaggtttggatgctgacaggggacaagctggagacagctacgtgcacagcgaagaatgcacatctggtgaccagaaaccaagacatccacgtttttcggctggtgaccaaccgcggggaggctcacctcgagctgaacgccttccgcaggaagcatgattgtgccctggtcatctcgggagactccctggaggtttgcctcaagtactatgagtacgagttcatggagctggcctgccagtgcccggccgtagtctgctgccgatgtgcccccacccagaaggcccagatcgtgcgcctgcttcaggagcgcacgggcaagctcacctgtgcagtaggggacggaggcaatgacgtcagcatgattcaggaatctgactgcggcgtgggagtggaaggaaaggaaggaaaacaggcttcgttggctgcagacttctccatcactcaatttaagcatcttggccggttgcttatggtgcatggccggaacagctacaagcggtcagccgccctcagccagttcgtgattcacaggagcctctgtatcagcaccatgcaggctgtcttttcctccgtgttttactttgcctccgtccctctctatcaaggattcctcatcattgggtactccacaatttacaccatgtttcctgtgttttctctggtcctggacaaagatgtcaaatcggaagttgccatgctgtatcctgagctctacaaggatcttctcaagggacggccgttgtcctacaagacattcttaatatgggttttgattagcatctatcaagggagcaccatcatgtacggggcgctgctgctgtttgagtcggagttcgtgcacatcgtggccatctccttcacctcgctgatcctcaccgagctgctcatggtggcgctgaccatccagacctggcactggctcatgacagtggcggagctgctcagcctggcctgctacatcgcctccctggtgttcttacacgagttcatcgatgtgtacttcatcgccaccttgtcattcttgtggaaagtctccgtcatcactctggtcagctgcctccccctctatgtcctcaagtacctgcgaagacggttctctccccccagctactcaaagctcacatcataggccgtgcgttcgctggagggggccctggtcttggcgcttccctgatggacagagctcaagttccatttatattaaccgccacctgtggattttgcagtaattgctaacacatgcagttttaatgggaagtggctctgcgcctaaacggagtcctaacgctgcatcaacgggagggagggtcctgaaagagacccatctgggcctgtctgaacccctcgttcttcatgtttaggtgaatatgaatatgttaaagctggtggctcagctgggagatttatatgggtcactgtgcgagcttccttatgacttgaattttgttgtcacatgataaaagtttctgtgtagctgaaggttgtagaaggcttgtgtgtgtgtgtgtgtgtgtgtgtgtgtgtgtgtgtgtttttaaagagtcctaatgtgtatgtactctttatgtctttcttgctcttacaaagaggtgtcagaaaaatagaaagctcttggtgtcggtttgggaggaaaagacagtgacatttggtaaaaagttatccacacaataatctccattcggaaatgctcagtatcgtctccagccagccctgcttatccaggttacactggattcctgggatcgtaaccagtaaatgagaggagagggagagagagtgtcctaagtccaatctgttatccttgatctgattcagcatccatagtgtgtgagttaacttcacctgccacctcgtaaaagaatttcagaggtgtgatcccgctttattgggacctggtaacaatcacaaagccagtggctgtttgagaaggacctcagacattttcagcagagttgttttagcaggaaacgtgccactgaatggcccctaaatgtgtcgacagtgtgataagagactcaactaattctttaggcaacatggcagatgtgactcagatcctccaagaccaaagcggaaaggtcagggggctgggactcttctcttccatagaagcctgtttcctgttaggaggcataatggaagatgaccccacaaaggcagaggcatctttcggaacaacactggtggcagctttcagaacaaggaacccctggtgggaggacgcccaagctacagcgttgggatctgggatctgttccactgccggcagatttcaaggggaacttgctgaaaggcagccagtggtgaagatttctcccctcccaggatggactacatgccggcatgtttcttataaagctgtggctgcttgtttcagaggaagggagtttgcagtcgcgggacgtggtagagcaaggcattcttgggttttcaagttgcttcttgcagaagccacatatgcatgccataagggttaagttggtggatctttaagagccaagtgtggttgagatcttggatttgcgtttacttcttgatgaatacatatccttcaaaccctctgcctggcgctacttctgtgtgcttcagagatgtacatcacagcctggtttctgatgcctactaactcctgctcttggagagctggagacacgaggatcagatagtcccttgcctttggagcactcttgataagcttttgtattttgtgttgtccttttaaaatgttctagaatgactttacgttgcaggtactggttaattggctgttgacaccacatctattttgtcttatgattctgcagttttgcagtacttttctctatctgattcagccatttctgccagagggaaaaggtcggcagaaaagatgtattgagtgaatagttaaggataggatctttgtccaaaaatttcagaaagattgagcaaatctgacgtattcattgagtgagtttctgtgttttcaaaggtggaggagaaatttgtgctggaagtttttaagcctccgttttcttggaaatcagtctgtaacactggcaagtcttaagatagtcccatttagactttgcagatgctgaacctggctctgtaacgctgggaagtcttaagatagtcctgtttagactttgcaaaccctgtacctggctttgctcggagattcgggatgctggctcctgcaggcagggcgtgtgggagcctcgtcagaaagttttagaggtttccagcagaagcagaatgaagatggtctccctggccttttccttaattctcaattttgattgaggtgcacaagttgacttttaaagccaacgcttaagatactgattgacatcttcaagggagaatgctcccaggaggggctgaagaagccatagttggaagtggaaggtactcgtcagtgttctccacaaacctttttactctgttgtctcagccgcactggggcggaggcggtcaagggtgagaagtaccgacactcaagtgcaaactgccacgtcgttggcccatcccatcagtgggcagctggctgacgccattcactggacggtccctgaacacctaggaatgcacacaccgtgcttctcagacactggagacgcaaaggcaggaggatgcagtccggtgagaggacacgatctttacctgcacaatcagactgtaagcccagcagagaaccccaggggcgcctgggtacttctcggaggtcatcttagttgtggtggggaagacaaagaaataagcaaacaagaaactagagttactatacaagaaactctcctgagtttgtaaaccttaagcataaggattcagttgacctttttcttggttcatcaatctggaaagaacttacataaagcgccattgacactgtcacctgggagctccatgggccgtaagtctttgacagccaatttaatttgaggtcagagggccttgaggtacacagtcagcactgtttgaacacttttcctgaaagcaaaactcacagctccctgcgccctctgacaacactagctatttctgccagagtaagaacttctattactattttattattgttcatatgtcttttgatgatggttgtgtgacagggggaagcaggatctatttggtttcttcccctccccccaccccttcctttttgtctctctttttttttctctaagaaaatcaccagactagtttttccatcttgagtaatttcttatgtgggacagttttgatcctcattttgaaagcatgcgtgtgcacatgtgtgttgcctgtggtgccaggtgagacaggtggcactaactccagctgcttggaaggcatcccaagggcgcatcttaaagttggagcagacctcccttttccagcccctggggccattagaccacgtgctggaactagcattgtaaaattcccatcccagttccactcccctgaagtgaaacccttttttttttgtgacagtaaatcttaaaaatcattgtctctttatgaacatttcctcagtttcttctctgctgaaaatgtaagccatgctactttttaatgtattttgaattttgtgctcattggaaattgatatgctaatgcctcccccaccccccgccagacttttctttttatactttgtcttgtttttactggggtaggctgggcatgcgtgcgtgcctttagggcagcattttaaacctttgccaaaattgcaaatgggacatgtacattcttctgctccatcctacttaaacacctatcagctatttttatctttaaccttttctgtatgtttgaagtgtgtggggggtgtgtgtgtgtgtgaaagagcgagagaatgatgtcatctaaagttttttgaagaattatttggttttcattgcattaaaattctatcactcccagctttgttttcatttaaaaaaatatacaaagagctttgtaaatacaacacattttatttctcccccttcttttaatgtacagcttttttgccacttatatatacttaaaatattcccatgaattatgtccagttcttcttggaaaaaaatttggttttgaatgaacctgcaaagcatcctgcagcgtgagcagctcctccacctggagctccgaagcatcttctcaggccaaagcggcattacccgtgaatctgtcttctccgccacagcatggtttgaggcgcagtctgttaatatagctgggccatgtcagtgactgttgtgtttgtggggtcaggtggggggcatggtatttgcaaaaaaaacaaattatggctaatttattattttgttgcagtggggttaactgtaaactcatgtaagagtctgtgatttcctcattggttgatctctctctctgtaatcctcattgcaaattttcaccaggacagcgttttttgattagaggggagctctggcacagtatgctttaatttagcaggaacttccagatgatttaaattctcgatgctgtgatgacacacatatgatctttcgtgtttctgagcgactctactttcattgtttgccagcgtggctcgttgctgttgcccaataaagcttgtgtacgttctgc

SEQ ID NO: 1684 - protein, 1047 aa, Homo sapiens
MTDNIPLQPVRQKKRMDSRPRAGCCEWLRCCGGGEARPRTVWLGHPEKRDQRYPRNVINNQKYNFFTFLPGVLFNQFKYFFNLYFLLLACSQFVPEMRLGALYTYWVPLGFVLAVTVIREAVEEIRCYVRDKEVNSQVYSRLTARGTVKVKSSNIQVGDLIIVEKNQRVPADMIFLRTSEKNGSCFLRTDQLDGETDWKLRLPVACTQRLPTAADLLQIRSYVYAEEPNIDIHNFVGTFTREDSDPPISESLSIENTLWAGTVVASGTVVGVVLYTGRELRSVMNTSNPRSKIGLFDLEVNCLTKILFGALVVVSLVMVALQHFAGRWYLQIIRFLLLFSNIIPISLRVNLDMGKIVYSWVIRRDSKIPGTVVRSSTIPEQLGRISYLLTDKTGTLTQNEMIFKRLHLGTVAYGLDSMDEVQSHIFSIYTQQSQDPPAQKGPTLTTKVRRTMSSRVHEAVKAIALCHNVTPVYESNGVTDQAEAEKQYEDSCRVYQASSPDEVALVQWTESVGLTLVGRDQSSMQLRTPGDQILNFTILQIFPFTYESKRMGIIVRDESTGEITFYMKGADVVMAGIVQYNDWLEEECGNMAREGLRVLVVAKKSLAEEQYQDFEARYVQAKLSVHDRSLKVATVIESLEMEMELLCLTGVEDQLQADVRPTLETLRNAGIKVWMLTGDKLETATCTAKNAHLVTRNQDIHVFRLVTNRGEAHLELNAFRRKHDCALVISGDSLEVCLKYYEYEFMELACQCPAVVCCRCAPTQKAQIVRLLQERTGKLTCAVGDGGNDVSMIQESDCGVGVEGKEGKQASLAADFSITQFKHLGRLLMVHGRNSYKRSAALSQFVIHRSLCISTMQAVFSSVFYFASVPLYQGFLIIGYSTIYTMFPVFSLVLDKDVKSEVAMLYPELYKDLLKGRPLSYKTFLIWVLISIYQGSTIMYGALLLFESEFVHIVAISFTSLILTELLMVALTIQTWHWLMTVAELLSLACYIASLVFLHEFIDVYFIATLSFLWKVSVITLVSCLPLYVLKYLRRRFSPPSYSKLTS

SEQ ID NO: 1685 - DNA, 5653 bp, Homo sapiens
gacaaagagaactaatgctttgtgctgattcatatttgaatcgaggcattgggaaccctgtatgccttgtttgtggaaagaaccagtgacaccatcactgagcttcctaaaagttcgaagaagttagaggactatacactttcttttgaacttttataataaatatttgctctggtttttggaacccagggctgttagaggggtgagtgacaagtcttacaagtggccttattccaactccagaaattgcccaacggaactttgagattatatgcaatcgaaagtgacaggaaacatgccaactcaatccctcttaatgtacatggatgggccagaagtgattggcagctctcttggcagtccgatggagatggaggatgccttgtcaatgaaagggaccgctgttgttccattccgagctacacaagaaaaaaatgtcatccaaatcgaggggtatatgcccttggattgcatgttctgcagccagaccttcacacattcagaagaccttaataaacatgtcttaatgcaacaccggcctaccctctgtgaaccagcagttcttcgggttgaagcagagtatctcagtccgcttgataaaagtcaagtgcgaacagaacctcccaaggaaaagaattgcaaggaaaatgaatttagctgtgaggtatgtgggcagacatttagagtcgcttttgatgttgagatccacatgagaacacacaaagattctttcacttacgggtgtaacatgtgcggaagaagattcaaggagccttggtttcttaaaaatcacatgcggacacataatggcaaatcgggggccagaagcaaactgcagcaaggcttggagagtagtccagcaacgatcaacgaggtcgtccaggtgcacgcggccgagagcatctcctctccttacaaaatctgcatggtttgtggcttcctatttccaaataaagaaagtctaattgagcaccgcaaggtgcacaccaaaaaaactgctttcggtaccagcagcgcgcagacagactctccacaaggaggaatgccgtcctcgagggaggacttcctgcagttgttcaacttgagaccaaaatctcaccctgaaacggggaagaagcctgtcagatgcatccctcagctcgatccgttcaccaccttccaggcttggcagctggctaccaaaggaaaagttgccatttgccaagaagtgaaggaatcggggcaagaagggagcaccgacaacgacgattcgagttccgagaaggagcttggagaaacaaataagggcagttgtgcaggcctctcgcaagagaaagagaagtgcaaacactcccacggcgaagcgccctccgtggacgcggatcccaagttacccagtagcaaggagaagcccactcactgctccgagtgcggcaaagctttcagaacctaccaccagctggtcttgcactccagggtccacaagaaggaccggagggccggcgcggagtcgcccaccatgtctgtggacgggaggcagccggggacgtgttctcctgacctcgccgcccctctggatgaaaatggagccgtggatcgaggggaaggtggttctgaagacggatctgaggatgggcttcccgaaggaatccatctggataaaaatgatgatggaggaaaaataaaacatcttacatcttcaagagagtgtagttattgtggaaagtttttccgttcaaattattacctcaatattcatctcagaacgcatacaggtgaaaaaccatacaaatgtgaattttgtgaatatgctgcagcccagaagacatctctgaggtatcacttggagagacatcacaaggaaaaacaaaccgatgttgctgctgaagtcaagaacgatggtaaaaatcaggacactgaagatgcactattaaccgctgacagtgcgcaaaccaaaaatttgaaaagattttttgatggtgccaaagatgttacaggcagtccacctgcaaagcagcttaaggagatgccttctgtttttcagaatgttctgggcagcgctgtcctctcaccagcacacaaagatactcaggatttccataaaaatgcagctgatgacagtgctgataaagtgaataaaaaccctacccctgcttacctggacctgttaaaaaagagatcagcagttgaaactcaggcaaataacctcatctgtagaaccaaggcggatgttactcctcctccggatggcagtaccacccataaccttgaagttagccccaaagagaagcaaacggagaccgcagctgactgcagatacaggccaagtgtggattgtcacgaaaaacctttaaatttatccgtgggggctcttcacaattgcccggcaatttctttgagtaaaagtttgattccaagtatcacctgtccattttgtaccttcaagacattttatccagaagttttaatgatgcaccagagactggagcataaatacaatcctgacgttcataaaaactgtcgaaacaagtccttgcttagaagtcgacgtaccggatgcccgccagcgttgctgggaaaagatgtgcctcccctctctagtttctgtaaacccaagcccaagtctgctttcccggcgcagtccaaatccctgccatctgcgaaggggaagcagagccctcctgggccaggcaaggcccctctgacttcagggatagactctagcactttagccccaagtaacctgaagtcccacagaccacagcagaatgtgggggtccaaggggccgccaccaggcaacagcaatctgagatgtttcctaaaaccagtgtttcccctgcaccggataagacaaaaagacccgagacaaaattgaaacctcttccagtagctccttctcagcccaccctcggcagcagtaacatcaatggttccatcgactaccccgccaagaacgacagcccgtgggcacctccgggaagagactatttctgtaatcggagtgccagcaatactgcagcagaatttggtgagccccttccaaaaagactgaagtccagcgtggttgcccttgacgttgaccagcccggggccaattacagaagaggctatgaccttcccaagtaccatatggtcagaggcatcacatcactgttaccgcaggactgtgtgtatccgtcgcaggcgctgcctcccaaaccaaggttcctgagctccagcgaggtcgattctccaaatgtgctgactgttcagaagccctatggtggctccgggccactttacacttgtgtgcctgctggtagtccagcatccagctcgacgttagaaggaaaaaggcctgtgtcatatcaacacttatctaacagcatggcacaaaagagaaactatgagaattttattgggaatgcacattatcgaccaaatgacaaaaaaacttgattcactaattagggggaaaaaaggtcttggtggatgtcagtgcttactccccatgaaattaaattttacttcatcctttgagaagcgaatggtgaaagctactgaaataagctgtgattgtactgtacataaaacatatgaggaatctgcaaggaacactacagttgtgtaaagttgttctgttaacttttgtaccaaatagcaatacaaactagttggaacagttggaacttacatacatggggactggaaatctctattttgtccctgaataatatttttcttagaattgaccaaataagaagtggaatttttgcatacttgagcgctgctgaaaagaaatcatttgggttgggtggggcgggatgggggaaaagtatataatgcttgcacctcaggtaaaaatctgtaaatatctaagttgtaaacctgcttgttcaaatactgtgtgtattccttttctctaatgcagctcatcacttggagcagtttctgctattgtgctctttcatttaaaatgtatgtttttttttttttaaactgtcaatgattttgtattatgttgaatccacccaaatctattgttgtcttaaaattgttaatggaagtattgaccctctatgatatgtgctgcagatatcgaggtcagccattcggaagctggcagcattttatcgcaactttgagcatctcagatggggaaggcaccttcttcctcgcctctccagattgtcctggaacctccaggatccttgactgagggcgttgggatggcttgtaggatttttaagagagtgtgtctacagacaagcattttctctgtagagcagccacacgttgtataaacataaactgtatgtgcagttatttaaatttgtttctgtcaaattaatcatttttgttggacgattcagtggcgggggggttttgcctaaattagtatataaaaacaaaaatgctaaattatatctgtgaattgcaggtattggggaacagttttaagggaaattttggggggaacattttaggtttgtatttggtagtcttaatgtatctggcatttgggtgaactgtggacatactagagttgattatagacacattgattttgaataaggaactgctggccgagcccgctgggagtctagaaagagaaaatctgtttctagacctcagttattttcccatttttggttgttttgaagcagtaacatttttctcagtgcacatgcaatttgggttttagagaagatggccaccagctggcttcctagatattttaaacttttgttctttaatatgctgtccatggctgagtttattagtacatgggcttagtgaccacaaaatattttattaagaaactgtttcaaaaataaatttgcactgttcatttttctggcctcgctgttctccatagagcaagggtaatcctagaaaaaattttttttttttaaattatgcaacgtaagatgtcctccttgatagaagtcttagctcctgtgttacaagggagaactcatttgagatcagtctgttggcattgcaatgaagtgctttgtatcaggaaagtgtacactattgaccttttttcctgttcacaagctgagccatatgtacataatctagattttgttttcatagttttgcacttttatagcctatttttgaagattaacacatttgcaagatgattgactcaatctttgcctaatccaatgagtgttacagagagcttgctgtgactagaaccataaatcttaaagggggtatgtgataatagagggctggaatttaaacctgtatttaaaaaaaagaatcaccaaatctatttgaaaacaagtcgatttgtattatgctggaattttttgggctttcagatttctctttttaaccacatttctgaatgtataaaaataccaattattttcctacagccctttgtacttcaaaatatgtttttgtgtccatcagtattaactattggtatactactggttttatatttttttttctttgagacaacagtacatataatagaggtacaattcgttggatttttgtttatgtatttatttcattccagtttgatttattttaattgttgatacttaagttgtcgaacagtagacattacttgttttatttatgatatatttcagcttaaagttatgttattatatgtggaagtgtaaatatagatttggtgttttgcaaaaaaaaaaaaaaaaaaaa

SEQ ID NO: 1686 - protein, 1048 aa, Homo sapiens
MQSKVTGNMPTQSLLMYMDGPEVIGSSLGSPMEMEDALSMKGTAVVPFRATQEKNVIQIEGYMPLDCMFCSQTFTHSEDLNKHVLMQHRPTLCEPAVLRVEAEYLSPLDKSQVRTEPPKEKNCKENEFSCEVCGQTFRVAFDVEIHMRTHKDSFTYGCNMCGRRFKEPWFLKNHMRTHNGKSGARSKLQQGLESSPATINEVVQVHAAESISSPYKICMVCGFLFPNKESLIEHRKVHTKKTAFGTSSAQTDSPQGGMPSSREDFLQLFNLRPKSHPETGKKPVRCIPQLDPFTTFQAWQLATKGKVAICQEVKESGQEGSTDNDDSSSEKELGETNKGSCAGLSQEKEKCKHSHGEAPSVDADPKLPSSKEKPTHCSECGKAFRTYHQLVLHSRVHKKDRRAGAESPTMSVDGRQPGTCSPDLAAPLDENGAVDRGEGGSEDGSEDGLPEGIHLDKNDDGGKIKHLTSSRECSYCGKFFRSNYYLNIHLRTHTGEKPYKCEFCEYAAAQKTSLRYHLERHHKEKQTDVAAEVKNDGKNQDTEDALLTADSAQTKNLKRFFDGAKDVTGSPPAKQLKEMPSVFQNVLGSAVLSPAHKDTQDFHKNAADDSADKVNKNPTPAYLDLLKKRSAVETQANNLICRTKADVTPPPDGSTTHNLEVSPKEKQTETAADCRYRPSVDCHEKPLNLSVGALHNCPAISLSKSLIPSITCPFCTFKTFYPEVLMMHQRLEHKYNPDVHKNCRNKSLLRSRRTGCPPALLGKDVPPLSSFCKPKPKSAFPAQSKSLPSAKGKQSPPGPGKAPLTSGIDSSTLAPSNLKSHRPQQNVGVQGAATRQQQSEMFPKTSVSPAPDKTKRPETKLKPLPVAPSQPTLGSSNINGSIDYPAKNDSPWAPPGRDYFCNRSASNTAAEFGEPLPKRLKSSVVALDVDQPGANYRRGYDLPKYHMVRGITSLLPQDCVYPSQALPPKPRFLSSSEVDSPNVLTVQKPYGGSGPLYTCVPAGSPASSSTLEGKRPVSYQHLSNSMAQKRNYENFIGNAHYRPNDKKT

SEQ ID NO: 1687 - DNA, 2813 bp, Homo sapiens
ctccaccgacagccaggcactgggcagcacgcactggagacccaggaccctgtgcaggagcagctccgggtgacacgaggggactgaagatactcccacaggggctcagcaggagcaatgggtaaccaaatgagtgttccccaaagagttgaagaccaagagaatgaaccagaagcagagacttaccaggacaacgcgtctgctctgaacggggttccagtggtggtgtcgacccacacagttcagcacttagaggaagtcgacttgggaataagtgtcaagacggataatgtggccacttcttcccccgagacaacggagataagtgctgttgcggatgccaacggaaagaatcttgggaaagaggccaaacccgaggcaccagctgctaaatctcgttttttcttgatgctctctcggcctgtaccaggacgtaccggagaccaagccgcagattcatcccttggatcagtgaagcttgatgtcagctccaataaagctccagcgaacaaagacccaagtgagagctggacacttccggtggcagctggaccggggcaggacacagataaaaccccagggcacgccccggcccaagacaaggtcctctctgccgccagggatcccacgcttctcccacctgagacagggggagcaggaggagaagctccctccaagcccaaggactccagcttttttgacaaattcttcaagctggacaagggacaggaaaaggtgccaggtgacagccaacaggaagccaagagggcagagcatcaagacaaggtggatgaggttcctggcttatcagggcagtccgatgatgtccctgcagggaaggacatagttgacggcaaggaaaaagaaggacaagaacttggaactgcggattgctctgtccctggggacccagaaggactggagactgcaaaggacgattcccaggcagcagctatagcagagaataataattccatcatgagtttctttaaaactctggtttcacctaacaaagctgaaacaaaaaaggacccagaagacacgggtgctgaaaagtcacccaccacttcagctgaccttaagtcagacaaagccaactttacatcccaggagacccaaggggctggcaagaattccaaaggatgcaacccatcggggcacacacagtccgtgacaacccctgaacctgcgaaggaaggcaccaaggagaaatcaggacccacctctctgcctctgggcaaactgttttggaaaaagtcagttaaagaggactcagtccccacaggtgcggaggagaatgtggtgtgtgagtcaccagtagagattataaagtccaaggaagtagaatcagccttacaaacagtggacctcaacgaaggagatgctgcacctgaacccacagaagcgaaactcaaaagagaagaaagcaaaccaagaacctctctgatggcgtttctcagacaaatgtcagtgaaaggggatggagggatcacccactcagaagaaataaatgggaaagactccagctgccaaacatcagactccacagaaaagactatcacaccgccagagcctgaaccaacaggagcaccacagaagggtaaagagggctcctcgaaggacaagaagtcagcagccgagatgaacaagcagaagagcaacaagcaggaagccaaagaaccagcccagtgcacagagcaggccacggtggacacgaactcactgcagaatggggacaagctccaaaagagacctgagaagcggcagcagtcccttgggggcttctttaaaggcctgggaccaaagcggatgttggatgctcaagtgcaaacagacccagtatccatcggaccagttggcaaacccaagtaaacaaatcagcacggttcccaccaggttctcctgccaccaagatgtgttctccttactccatctcctccccaaacacgctccatgtatatattcttctgatggccagcaaatgaaattctgcctagaaattaagcccgagctgttgtatattgaggtgtattatttacgtctctggtccagtcttttctggcaaataacagtaaagatggtttagcaggtcacctagttgggtcagaagagtcgatgatcaccaagcaggaaagggagggaatagaggaatgtgttcgggttaagtgatgaaaatggcagtggtggccgggcgtggtggctctcgcctgtaatctcagcactttgggaggccgaggcaggtggatcacctgaggtcaggagttcaagactagcctggccaacatcatgaaaccccgtctctactaaaaatacaaaaattagccaggcatggtggcacacacctgtagtcccagctactcgggagcccaacgcacgagaaccgcttgtacccaggaggtggaggttgcagtgagccgaagttgcaccattgcactccaccctgggcgacagagcaagattctatcaaaaaaaaaaggcagtggcaagtaagttatagaagagaaatgctgctagaaggaattaagcgttgtagtaaacgcgtgctcatcctctaagcttgaagaagggagacgaaaatccatttgtttaaattcacatctcaaggagggagaacccgggctgtgttgggtggttgccaatttcctagaacggaatgtgtggggtatagaaaaaggaatgaataagcgttgtttttcaaatagggtccttgtaagttattgatgagagggaaaagattgactggggagggcttaaaatgatttgggaaaacaattgcttttgaggctcagtgacaacggcaaagattacaactt

SEQ ID NO: 1688 - protein, 584 aa, Homo sapiens
MGNQMSVPQRVEDQENEPEAETYQDNASALNGVPVVVSTHTVQHLEEVDLGISVKTDNVATSSPETTEISAVADANGKNLGKEAKPEAPAAKSRFFLMLSRPVPGRTGDQAADSSLGSVKLDVSSNKAPANKDPSESWTLPVAAGPGQDTDKTPGHAPAQDKVLSAARDPTLLPPETGGAGGEAPSKPKDSSFFDKFFKLDKGQEKVPGDSQQEAKRAEHQDKVDEVPGLSGQSDDVPAGKDIVDGKEKEGQELGTADCSVPGDPEGLETAKDDSQAAAIAENNNSIMSFFKTLVSPNKAETKKDPEDTGAEKSPTTSADLKSDKANFTSQETQGAGKNSKGCNPSGHTQSVTTPEPAKEGTKEKSGPTSLPLGKLFWKKSVKEDSVPTGAEENVVCESPVEIIKSKEVESALQTVDLNEGDAAPEPTEAKLKREESKPRTSLMAFLRQMSVKGDGGITHSEEINGKDSSCQTSDSTEKTITPPEPEPTGAPQKGKEGSSKDKKSAAEMNKQKSNKQEAKEPAQCTEQATVDTNSLQNGDKLQKRPEKRQQSLGGFFKGLGPKRMLDAQVQTDPVSIGPVGKPK

SEQ ID NO: 1689 - DNA, 5910 bp, Homo sapiens
agctccagccgcactgccccgatggctccctacccctgtggctgccacatcctgctgctgctcttctgctgcctggcggctgcccgggccaacctgctgaacctgaactggctttggttcaataatgaggacaccagccatgcagctaccacgatccctgagccccaggggcccctgcctgtgcagcccacagcagataccaccacacacgtgaccccccggaatggttccacagagccagcgacagcccctggcagccctgagccaccctcagagctgctggaagatggccaggacacccccacttctgccgagagcccggacgcgccagaggagaacattgccggtgtcggagccgagatcctgaacgtggccaaaggcatccggagcttcgtccagctgtggaatgacactgtccccactgagagcttggccagggcggaaaccctggtcctggagactcctgtgggcccccttgccctcgctgggccttccagcaccccccaggagaatgggaccactctctggcccagccgtggcattcctagctctccgggcgcccacacaaccgaggctggcaccttgcctgcacccaccccatcgcctccctccctgggcaggccctgggcaccactcacggggccctcagtgccaccaccatcttcagagcgcatcagcgaggaggtggggctgctgcagctccttggggaccccccgccccagcaggtcacccagacggatgaccccgacgtcgggctggcctacgtctttgggccagatgccaacagtggccaagtggcccggtaccacttccccagcctcttcttccgtgacttctcactgctgttccacatccggccagccacagagggcccaggggtgctgttcgccatcacggactcggcgcaggccatggtcttgctgggcgtgaagctctctggggtgcaggacgggcaccaggacatctccctgctctacacagaaccaggtgcaggccagacccacacagccgccagcttccggctccccgccttcgtcggccagtggacacacttagccctcagtgtggcaggtggctttgtggccctctacgtggactgtgaggagttccagagaatgccgcttgctcggtcctcacggggcctggagctggagcctggcgccgggctcttcgtggctcaggcggggggagcggaccctgacaagttccagggggtgatcgctgagctgaaggtgcgcagggacccccaggtgagccccatgcactgcctggacgaggaaggcgatgactcagatggggcatccggagactctggcagcgggctcggggacgcccgggagcttctcagggaggagacgggcgcggccctaaaacccaggctccccgcgccaccccccgtcaccacgccacccttggctggaggcagcagcacggaagattccagaagtgaagaagtcgaggagcagaccacggtggcttcgttaggagctcagacacttcctggctcagattctgtctccacgtgggacgggagtgtccggacccctgggggccgcgtgaaagagggcggcctgaaggggcagaaaggggagccaggtgttccgggcccacctggccgggcaggccccccaggatccccatgcctacctggtcccccgggtctcccgtgcccagtgagtcccctgggtcctgcaggcccagcgttgcaaactgtccccggaccacaaggacccccagggcctccggggagggacggcacccctggaagggacggcgagccgggcgaccccggtgaagacggaaagccgggcgacaccgggccacaaggcttccccgggactccaggggacgtaggtcccaagggcgacaagggagaccctggggttggagagagagggcccccaggaccccaagggcctccagggcccccaggaccctccttcagacacgacaagctgaccttcattgacatggagggatctggcttcgggggcgatctggaggccctgcggggtcctcgaggcttccctggacctcccggaccccccggtgtcccaggcctgcccggcgagccaggccgctttggggtgaacagctccgacgtcccaggacccgccggccttcctggtgtgcctgggcgcgagggtccccccgggtttcctggcctcccgggacccccaggccctccgggaagagaggggcccccaggaaggactgggcagaaaggcagcctgggtgaagcaggcgccccaggacataaggggagcaagggagcccccggtcctgctggtgctcgtggggagagcggcctggcaggagcccccggacctgctggaccaccaggcccccctgggccccctgggcccccaggaccaggactccccgctggatttgatgacatggaaggctccggggggcccttctggtcaacagcccgaagcgctgatgggccacagggacctcccggcctgccgggacttaagggggatcctggcgtgcctgggctgccgggggcgaagggagaagttggagcagatggagtccccgggttccccggcctccctggcagagagggcattgctgggccccaggggccaaagggagacagaggcagccggggagaaaagggagatccagggaaggacggagtcgggcagccgggcctccctggcccccccggacccccgggacctgtggtctacgtgtcggagcaggacggatccgtcctgagcgtgccgggacctgagggccggccgggtttcgcaggctttcccggacctgcaggacccaagggcaacctgggctctaagggcgaacgaggctccccgggacccaagggtgagaagggtgaaccgggcagcatcttcagccccgacggcggtgccctgggccctgcccagaaaggagccaagggagagccgggcttccgaggacccccgggtccatacggacggccggggtacaagggagagattggctttcctggacggccgggtcgccccgggatgaacggattgaaaggagagaaaggggagccgggagatgccagccttggatttggcatgaggggaatgcccggccccccaggacctccagggcccccaggccctccagggactcctgtttacgacagcaatgtgtttgctgagtccagccgccccgggcctccaggattgccagggaatcagggccctccaggacccaagggcgccaaaggagaagtgggcccccccggaccaccagggcagtttccgtttgactttcttcagttggaggctgaaatgaagggggagaagggagaccgaggtgatgcaggacagaaaggcgaaaggggggagcccgggggcggcggtttcttcggctccagcctgcccggcccccccggccccccaggcccacgtggctaccctgggattccaggtcccaagggagagagcatccggggccagcccggcccacctggacctcagggaccccccggcatcggctacgaggggcgccagggccctcccggccccccaggccccccagggcccccttcatttcctggccctcacaggcagactatcagcgttcccggccctccgggcccccctgggccccctgggccccctggaaccatgggcgcctcctcaggggtgaggctctgggctacacgccaggccatgctgggccaggtgcacgaggttcccgagggctggctcatcttcgtggccgagcaggaggagctctacgtccgcgtgcagaacgggttccggaaggtccagctggaggcccggacaccactcccacgagggacggacaatgaagtggccgccttgcagccccccgtggtgcagctgcacgacagcaacccctacccgcggcgggagcacccccaccccaccgcgcggccctggcgggcagatgacatcctggccagcccccctcgcctgcccgagccccagccctaccccggagccccgcaccacagctcctacgtgcacctgcggccggcgcgacccacaagcccacccgcccacagccaccgcgacttccagccggtgctccacctggttgcgctcaacagccccctgtcaggcggcatgcggggcatccgcggggccgacttccagtgcttccagcaggcgcgggccgtggggctggcgggcaccttccgcgccttcctgtcctcgcgcctgcaggacctgtacagcatcgtgcgccgtgccgaccgcgcagccgtgcccatcgtcaacctcaaggacgagctgctgtttcccagctgggaggctctgttctcaggctctgagggtccgctgaagcccggggcacgcatcttctcctttgacggcaaggacgtcctgaggcaccccacctggccccagaagagcgtgtggcatggctcggaccccaacgggcgcaggctgaccgagagctactgtgagacgtggcggacggaggctccctcggccacgggccaggcctcctcgctgctggggggcaggctcctggggcagagtgccgcgagctgccatcacgcctacatcgtgctctgcattgagaacagcttcatgactgcctccaagtagccaccgcctggatgcggatggccggagaggaccggcggctcggaggaagcccccaccgtgggcagggagcggccggccagcccctggccccaggacctggctgccatactttcctgtatagttcacgtttcatgtaatcctcaagaaataaaaggaagccaaagagtgtatttttttaaaagtttaaaacagaagcctgatgctgacattcacctgccccaactctcccctgacctgtgagcccagctgggtcaggcagggtgcagtatcatgccctgtgcaacctcttggcctgatcagaccacggctcgatttctccaggatttcctgctttgggaagccgtgctcgccccagcaggtgctgacttcatctcccacctagcagcaccgttctgtgcacaaaacccagacctgttagcagacaggccccgtgaggcaatgggagctgaggccacactcagcacaaggccatctgggctcctccagggtgtgtgctcgccctgcggtagatgggagggaggctcaggtccctggggctagggggagccccttctgctcagctctgggccattctccacagcaaccccaggctgaagcaggttcccaagctcagaggcgcactgtgacccccagctccggcctgtcctccaacaccaagcacagcagcctggggctggcctcccaaatgagccatgagatgatacatccaaagcagacagctccaccctggccgagtccaagctgggagattcaagggacccatgagttggggtctggcagcctcccatccagggcccccatctcatgcccctggctgggacgtggctcagccagcacttgtccagctgagcgccaggatggaacacggccacatcaaagaggctgaggctggcacaggacatgcggtagccagcacacagggcagtgagggagggctgtcatctgtgcactgcccatggacaggctggctccagatgcagggcagtcattggctgtctcctaggaaacccatatccttaccctccttgggactgaaggggaaccccggggtgcccacaggccgccctgcgggtgaacaaagcagccacgaggtgcaacaaggtcctctgtcagtcacagccacccctgagatccggcaacatcaacccgagtcattcgttctgtggagggacaagtggactcagggcagcgccaggctgaccacagcacagccaacacgcacctgcctcaggactgcgacgaaaccggtggggctggttctgtaattgtgtgtgatgtgaagccaattcagacaggcaaataaaagtgaccttttacactgaaaaaaaaaaaaaaaaa

SEQ ID NO: 1690 - protein, 1516 aa, Homo sapiens
MAPYPCGCHILLLLFCCLAAARANLLNLNWLWFNNEDTSHAATTIPEPQGPLPVQPTADTTTHVTPRNGSTEPATAPGSPEPPSELLEDGQDTPTSAESPDAPEENIAGVGAEILNVAKGIRSFVQLWNDTVPTESLARAETLVLETPVGPLALAGPSSTPQENGTTLWPSRGIPSSPGAHTTEAGTLPAPTPSPPSLGRPWAPLTGPSVPPPSSERISEEVGLLQLLGDPPPQQVTQTDDPDVGLAYVFGPDANSGQVARYHFPSLFFRDFSLLFHIRPATEGPGVLFAITDSAQAMVLLGVKLSGVQDGHQDISLLYTEPGAGQTHTAASFRLPAFVGQWTHLALSVAGGFVALYVDCEEFQRMPLARSSRGLELEPGAGLFVAQAGGADPDKFQGVIAELKVRRDPQVSPMHCLDEEGDDSDGASGDSGSGLGDARELLREETGAALKPRLPAPPPVTTPPLAGGSSTEDSRSEEVEEQTTVASLGAQTLPGSDSVSTWDGSVRTPGGRVKEGGLKGQKGEPGVPGPPGRAGPPGSPCLPGPPGLPCPVSPLGPAGPALQTVPGPQGPPGPPGRDGTPGRDGEPGDPGEDGKPGDTGPQGFPGTPGDVGPKGDKGDPGVGERGPPGPQGPPGPPGPSFRHDKLTFIDMEGSGFGGDLEALRGPRGFPGPPGPPGVPGLPGEPGRFGVNSSDVPGPAGLPGVPGREGPPGFPGLPGPPGPPGREGPPGRTGQKGSLGEAGAPGHKGSKGAPGPAGARGESGLAGAPGPAGPPGPPGPPGPPGPGLPAGFDDMEGSGGPFWSTARSADGPQGPPGLPGLKGDPGVPGLPGAKGEVGADGVPGFPGLPGREGIAGPQGPKGDRGSRGEKGDPGKDGVGQPGLPGPPGPPGPVVYVSEQDGSVLSVPGPEGRPGFAGFPGPAGPKGNLGSKGERGSPGPKGEKGEPGSIFSPDGGALGPAQKGAKGEPGFRGPPGPYGRPGYKGEIGFPGRPGRPGMNGLKGEKGEPGDASLGFGMRGMPGPPGPPGPPGPPGTPVYDSNVFAESSRPGPPGLPGNQGPPGPKGAKGEVGPPGPPGQFPFDFLQLEAEMKGEKGDRGDAGQKGERGEPGGGGFFGSSLPGPPGPPGPRGYPGIPGPKGESIRGQPGPPGPQGPPGIGYEGRQGPPGPPGPPGPPSFPGPHRQTISVPGPPGPPGPPGPPGTMGASSGVRLWATRQAMLGQVHEVPEGWLIFVAEQEELYVRVQNGFRKVQLEARTPLPRGTDNEVAALQPPVVQLHDSNPYPRREHPHPTARPWRADDILASPPRLPEPQPYPGAPHHSSYVHLRPARPTSPPAHSHRDFQPVLHLVALNSPLSGGMRGIRGADFQCFQQARAVGLAGTFRAFLSSRLQDLYSIVRRADRAAVPIVNLKDELLFPSWEALFSGSEGPLKPGARIFSFDGKDVLRHPTWPQKSVWHGSDPNGRRLTESYCETWRTEAPSATGQASSLLGGRLLGQSAASCHHAYIVLCIENSFMTASK

SEQ ID NO: 1691 - DNA, 5398 bp, Homo sapiens
cgcggcggaggaggcagcatcccgcggcgctgacggtcctggggagagcatggcgccgaggtgcccctggccatggccgcggcggcggcgcctcctggacgtgctcgcgcccctggtcctgctgctcggggtccgcgcggcctccgcggagccagagcgcatcagcgaggaggtggggctgctgcagctccttggggaccccccgccccagcaggtcacccagacggatgaccccgacgtcgggctggcctacgtctttgggccagatgccaacagtggccaagtggcccggtaccacttccccagcctcttcttccgtgacttctcactgctgttccacatccggccagccacagagggcccaggggtgctgttcgccatcacggactcggcgcaggccatggtcttgctgggcgtgaagctctctggggtgcaggacgggcaccaggacatctccctgctctacacagaaccaggtgcaggccagacccacacagccgccagcttccggctccccgccttcgtcggccagtggacacacttagccctcagtgtggcaggtggctttgtggccctctacgtggactgtgaggagttccagagaatgccgcttgctcggtcctcacggggcctggagctggagcctggcgccgggctcttcgtggctcaggcggggggagcggaccctgacaagttccagggggtgatcgctgagctgaaggtgcgcagggacccccaggtgagccccatgcactgcctggacgaggaaggcgatgactcagatggggcatccggagactctggcagcgggctcggggacgcccgggagcttctcagggaggagacgggcgcggccctaaaacccaggctccccgcgccaccccccgtcaccacgccacccttggctggaggcagcagcacggaagattccagaagtgaagaagtcgaggagcagaccacggtggcttcgttaggagctcagacacttcctggctcagattctgtctccacgtgggacgggagtgtccggacccctgggggccgcgtgaaagagggcggcctgaaggggcagaaaggggagccaggtgttccgggcccacctggccgggcaggccccccaggatccccatgcctacctggtcccccgggtctcccgtgcccagtgagtcccctgggtcctgcaggcccagcgttgcaaactgtccccggaccacaaggacccccagggcctccggggagggacggcacccctggaagggacggcgagccgggcgaccccggtgaagacggaaagccgggcgacaccgggccacaaggcttccccgggactccaggggacgtaggtcccaagggcgacaagggagaccctggggttggagagagagggcccccaggaccccaagggcctccagggcccccaggaccctccttcagacacgacaagctgaccttcattgacatggagggatctggcttcgggggcgatctggaggccctgcggggtcctcgaggcttccctggacctcccggaccccccggtgtcccaggcctgcccggcgagccaggccgctttggggtgaacagctccgacgtcccaggacccgccggccttcctggtgtgcctgggcgcgagggtccccccgggtttcctggcctcccgggacccccaggccctccgggaagagaggggcccccaggaaggactgggcagaaaggcagcctgggtgaagcaggcgccccaggacataaggggagcaagggagcccccggtcctgctggtgctcgtggggagagcggcctggcaggagcccccggacctgctggaccaccaggcccccctgggccccctgggcccccaggaccaggactccccgctggatttgatgacatggaaggctccggggggcccttctggtcaacagcccgaagcgctgatgggccacagggacctcccggcctgccgggacttaagggggatcctggcgtgcctgggctgccgggggcgaagggagaagttggagcagatggagtccccgggttccccggcctccctggcagagagggcattgctgggccccaggggccaaagggagacagaggcagccggggagaaaagggagatccagggaaggacggagtcgggcagccgggcctccctggcccccccggacccccgggacctgtggtctacgtgtcggagcaggacggatccgtcctgagcgtgccgggacctgagggccggccgggtttcgcaggctttcccggacctgcaggacccaagggcaacctgggctctaagggcgaacgaggctccccgggacccaagggtgagaagggtgaaccgggcagcatcttcagccccgacggcggtgccctgggccctgcccagaaaggagccaagggagagccgggcttccgaggacccccgggtccatacggacggccggggtacaagggagagattggctttcctggacggccgggtcgccccgggatgaacggattgaaaggagagaaaggggagccgggagatgccagccttggatttggcatgaggggaatgcccggccccccaggacctccagggcccccaggccctccagggactcctgtttacgacagcaatgtgtttgctgagtccagccgccccgggcctccaggattgccagggaatcagggccctccaggacccaagggcgccaaaggagaagtgggcccccccggaccaccagggcagtttccgtttgactttcttcagttggaggctgaaatgaagggggagaagggagaccgaggtgatgcaggacagaaaggcgaaaggggggagcccgggggcggcggtttcttcggctccagcctgcccggcccccccggccccccaggcccacgtggctaccctgggattccaggtcccaagggagagagcatccggggccagcccggcccacctggacctcagggaccccccggcatcggctacgaggggcgccagggccctcccggccccccaggccccccagggcccccttcatttcctggccctcacaggcagactatcagcgttcccggccctccgggcccccctgggccccctgggccccctggaaccatgggcgcctcctcaggggtgaggctctgggctacacgccaggccatgctgggccaggtgcacgaggttcccgagggctggctcatcttcgtggccgagcaggaggagctctacgtccgcgtgcagaacgggttccggaaggtccagctggaggcccggacaccactcccacgagggacggacaatgaagtggccgccttgcagccccccgtggtgcagctgcacgacagcaacccctacccgcggcgggagcacccccaccccaccgcgcggccctggcgggcagatgacatcctggccagcccccctcgcctgcccgagccccagccctaccccggagccccgcaccacagctcctacgtgcacctgcggccggcgcgacccacaagcccacccgcccacagccaccgcgacttccagccggtgctccacctggttgcgctcaacagccccctgtcaggcggcatgcggggcatccgcggggccgacttccagtgcttccagcaggcgcgggccgtggggctggcgggcaccttccgcgccttcctgtcctcgcgcctgcaggacctgtacagcatcgtgcgccgtgccgaccgcgcagccgtgcccatcgtcaacctcaaggacgagctgctgtttcccagctgggaggctctgttctcaggctctgagggtccgctgaagcccggggcacgcatcttctcctttgacggcaaggacgtcctgaggcaccccacctggccccagaagagcgtgtggcatggctcggaccccaacgggcgcaggctgaccgagagctactgtgagacgtggcggacggaggctccctcggccacgggccaggcctcctcgctgctggggggcaggctcctggggcagagtgccgcgagctgccatcacgcctacatcgtgctctgcattgagaacagcttcatgactgcctccaagtagccaccgcctggatgcggatggccggagaggaccggcggctcggaggaagcccccaccgtgggcagggagcggccggccagcccctggccccaggacctggctgccatactttcctgtatagttcacgtttcatgtaatcctcaagaaataaaaggaagccaaagagtgtatttttttaaaagtttaaaacagaagcctgatgctgacattcacctgccccaactctcccctgacctgtgagcccagctgggtcaggcagggtgcagtatcatgccctgtgcaacctcttggcctgatcagaccacggctcgatttctccaggatttcctgctttgggaagccgtgctcgccccagcaggtgctgacttcatctcccacctagcagcaccgttctgtgcacaaaacccagacctgttagcagacaggccccgtgaggcaatgggagctgaggccacactcagcacaaggccatctgggctcctccagggtgtgtgctcgccctgcggtagatgggagggaggctcaggtccctggggctagggggagccccttctgctcagctctgggccattctccacagcaaccccaggctgaagcaggttcccaagctcagaggcgcactgtgacccccagctccggcctgtcctccaacaccaagcacagcagcctggggctggcctcccaaatgagccatgagatgatacatccaaagcagacagctccaccctggccgagtccaagctgggagattcaagggacccatgagttggggtctggcagcctcccatccagggcccccatctcatgcccctggctgggacgtggctcagccagcacttgtccagctgagcgccaggatggaacacggccacatcaaagaggctgaggctggcacaggacatgcggtagccagcacacagggcagtgagggagggctgtcatctgtgcactgcccatggacaggctggctccagatgcagggcagtcattggctgtctcctaggaaacccatatccttaccctccttgggactgaaggggaaccccggggtgcccacaggccgccctgcgggtgaacaaagcagccacgaggtgcaacaaggtcctctgtcagtcacagccacccctgagatccggcaacatcaacccgagtcattcgttctgtggagggacaagtggactcagggcagcgccaggctgaccacagcacagccaacacgcacctgcctcaggactgcgacgaaaccggtggggctggttctgtaattgtgtgtgatgtgaagccaattcagacaggcaaataaaagtgaccttttacactgaaaaaaaaaaaaaaaaa

SEQ ID NO: 1692 - protein, 1336 aa, Homo sapiens
MAPRCPWPWPRRRRLLDVLAPLVLLLGVRAASAEPERISEEVGLLQLLGDPPPQQVTQTDDPDVGLAYVFGPDANSGQVARYHFPSLFFRDFSLLFHIRPATEGPGVLFAITDSAQAMVLLGVKLSGVQDGHQDISLLYTEPGAGQTHTAASFRLPAFVGQWTHLALSVAGGFVALYVDCEEFQRMPLARSSRGLELEPGAGLFVAQAGGADPDKFQGVIAELKVRRDPQVSPMHCLDEEGDDSDGASGDSGSGLGDARELLREETGAALKPRLPAPPPVTTPPLAGGSSTEDSRSEEVEEQTTVASLGAQTLPGSDSVSTWDGSVRTPGGRVKEGGLKGQKGEPGVPGPPGRAGPPGSPCLPGPPGLPCPVSPLGPAGPALQTVPGPQGPPGPPGRDGTPGRDGEPGDPGEDGKPGDTGPQGFPGTPGDVGPKGDKGDPGVGERGPPGPQGPPGPPGPSFRHDKLTFIDMEGSGFGGDLEALRGPRGFPGPPGPPGVPGLPGEPGRFGVNSSDVPGPAGLPGVPGREGPPGFPGLPGPPGPPGREGPPGRTGQKGSLGEAGAPGHKGSKGAPGPAGARGESGLAGAPGPAGPPGPPGPPGPPGPGLPAGFDDMEGSGGPFWSTARSADGPQGPPGLPGLKGDPGVPGLPGAKGEVGADGVPGFPGLPGREGIAGPQGPKGDRGSRGEKGDPGKDGVGQPGLPGPPGPPGPVVYVSEQDGSVLSVPGPEGRPGFAGFPGPAGPKGNLGSKGERGSPGPKGEKGEPGSIFSPDGGALGPAQKGAKGEPGFRGPPGPYGRPGYKGEIGFPGRPGRPGMNGLKGEKGEPGDASLGFGMRGMPGPPGPPGPPGPPGTPVYDSNVFAESSRPGPPGLPGNQGPPGPKGAKGEVGPPGPPGQFPFDFLQLEAEMKGEKGDRGDAGQKGERGEPGGGGFFGSSLPGPPGPPGPRGYPGIPGPKGESIRGQPGPPGPQGPPGIGYEGRQGPPGPPGPPGPPSFPGPHRQTISVPGPPGPPGPPGPPGTMGASSGVRLWATRQAMLGQVHEVPEGWLIFVAEQEELYVRVQNGFRKVQLEARTPLPRGTDNEVAALQPPVVQLHDSNPYPRREHPHPTARPWRADDILASPPRLPEPQPYPGAPHHSSYVHLRPARPTSPPAHSHRDFQPVLHLVALNSPLSGGMRGIRGADFQCFQQARAVGLAGTFRAFLSSRLQDLYSIVRRADRAAVPIVNLKDELLFPSWEALFSGSEGPLKPGARIFSFDGKDVLRHPTWPQKSVWHGSDPNGRRLTESYCETWRTEAPSATGQASSLLGGRLLGQSAASCHHAYIVLCIENSFMTASK

SEQ ID NO: 1693 - DNA, 2341 bp, Homo sapiens
actgactggcccccgagcccggggcatctgagaaacctcctgcgaatggctacagaggaaattttcaggtgcgagagatctgaagaaagttctggaacccgcgcctggaccggtttggaccctcagtggaaacacatcaaagagaaggaaaaccagctggggaaggatcctggcagcggtggctcagggtgctgggcggaggccccgtttttcaccaaccgacggctgggagagcccgtgccacccactgtgccctgagacccgcacaggacggcgactcacagatgccttttgctgccctgcccgggtcctggcacggcgcgaggtgcgtcaggccaggcagccacgcaaaggccccggctcctggcttctgccatctattctgtcctgcaactctatcctggagcctcccatcccttcaaaagctgcaggaagaggcctgcaggcaagagaagaggactgcaggagtgagcaatttaagaaatggaaggccgaggttttccaatctaattaacagcatgacaagccaggatgggctgctgacccgcgtggagccttgcacagccagaaacgcggtgtcctgctccgctcctgagacgccagggctgtcactgcaacacagcccccaacacttccacacgggcggactctggctctccaggcaccgcagtgccctctccttcccttcccagctctcctgaggcctgtggttctgggagtctctgccccgtgcaagcgtgaccgtggccctcctcccatgtccagccgcaccaggccctgggatcccagatctggcttcacctttgcaaggggctcaaagcaagcacctatgggggtgggggcggcaaagccatctggccaaggtcccttctctagagtgcctgtctgtccgtctgtccttgaggagcctgaggagtgcagggcaggacaggcaggcaccagctgacccggtaccgggcagggaccagtgcaggacctcgaggcagggctgggtggggtgggggtggccagagtctcctggctcggagcagacacgggtgagtggcacagaccgtcctcacaccctcctgggacagaggtaggaatccgtgaccaggacagacacaggcaggactgggagaggcagagcaggtgcctgagcttggccacgcacagcttccaatgaggttgggccatccacagctccccaaggttccccgccactgttcaccccaccccagcacagccgagagctgtggtttctcctcccatggagtcctgcatggctgcccactgcaggcccagcccaagggcaccgccttctccaggctgccttccctgcacatgccacacctccagccccagaaggttctgaggaggggaggagctggggcccccactcgccctcctgttgccaggatacaggcccaggaaaaaatgccacagtgctggattaatgtctagacaacgtgacctttcccctggttctctagatataattgggacccaaattgtccggtgtcatgagctgacagcagggatgaaggaggggtctgttctcggtgccccgaggggactccgggagagggagagggcagcccactacctgcgtgggggctgcagggggacgagccagggtcgcccacaaaggcgctttctgtggaggggacgtcacctcttccatcagcgatgacgcagctctgagatcacagtgtcctcgcagtggctcccgttaactccctgctgcccgtcctgccaggctggtgccacgagaccctcggggctgggccgtgggacaggtgcctgcccagccctgcaaacacatccagcaggtgtcgagggctgccaagcacagacttctgctgccagccatgcacagtgccagctgcgacagcaacgcctctgccaggagactcggaggagaccggccctgacgctcctgtcggggggagctgctgcacactcaggcaggatgcaggggtcctgagggggaccctcggctcacccacggctcccgtggccggtctggtcctggtatttatctcaacttcattgttgtccagaagctgctttttattatttgtgaccgtgaaaggatggaaacaaattcctgttttgagtcaaagctacctgcgtccaccgggccacagagcggggacacggccgtaatgtggagtcagtaagccaaggttgtgagaagattctcaggaggggggtccagggagggagaactgagggctggggttccgggggacattttactttttattccaggcagcgctgtactggctggggcctcaaatgctgaataatgctcctgttggacttcagtaattttaaaaaataaaactgtttaaaaatc

SEQ ID NO: 1694 - protein, 138 aa, Homo sapiens
MPFAALPGSWHGARCVRPGSHAKAPAPGFCHLFCPATLSWSLPSLQKLQEEACRQEKRTAGVSNLRNGRPRFSNLINSMTSQDGLLTRVEPCTARNAVSCSAPETPGLSLQHSPQHFHTGGLWLSRHRSALSFPSQLS

SEQ ID NO: 1695 - DNA, 3455 bp, Homo sapiens
gcttactcggcgcccgcgcctcgggccgtcgggagcggagcctcctcgggaccaggacttcagggccacaggtgctgccaagatgctccagggcacctgctccgtgctcctgctctggggaatcctgggggccatccaggcccagcagcaggaggtcatctcgccggacactaccgagagaaacaacaactgcccagagaagaccgactgccccatccacgtgtacttcgtgctggacacctcggagagcgtcaccatgcagtcccccacggacatcctgctcttccacatgaagcagttcgtgccgcagttcatcagccagctgcagaacgagttctacctggaccaggtggcgctgagctggcgctacggcggcctgcacttctctgaccaggtggaggtgttcagcccaccgggcagcgaccgggcctccttcatcaagaacctgcagggcatcagctccttccgccgcggcaccttcaccgactgcgcgctggccaacatgacggagcagatccggcaggaccgcagcaagggcaccgtccacttcgccgtggtcatcaccgacggccacgtcaccggcagcccctgcgggggcatcaagctgcaggccgagcgggcccgcgaggagggcatccggctcttcgccgtggcccccaaccagaacctgaaggagcagggcctgcgggacatcgccagcacgccgcacgagctctaccgcaacgactacgccaccatgctgcccgactccaccgagatcgaccaggacaccatcaaccgcatcatcaaggtcatgaaacacgaagcctacggagagtgctacaaggtgagctgcctggaaatccctgggccctctggccccaagggctaccgtggacagaagggtgccaagggcaacatgggtgagccgggagagcctggccagaagggaagacagggagacccgggcatcgaaggccccattggattcccaggacccaagggcgttcctggcttcaaaggagagaagggtgaatttggagccgacggtcgcaagggggcccctggcctggctggcaagaacgggaccgatggacagaagggcaagctggggcgcatcggacctcctggctgcaagggagaccctggaaaccggggccccgacggttacccgggggaagcagggagtccaggggagcgaggagaccaaggcggcaagggggaccctggccgcccaggacgcagagggcccccgggagaaatcggggccaagggaagcaaggggtatcaaggcaacagtggagccccaggaagtcctggtgtgaaaggagccaagggcgggcctgggccccgcggacccaaaggcgagccggggcgcaggggagaccccggcaccaagggcagcccaggcagcgatggccccaagggggagaagggggaccctggccctgaggggccccgcggcctggctggagaggttggcaacaaaggagccaagggagaccgaggcttgcctggacccagaggcccccagggagctcttggggagcccggaaagcagggatctcggggagaccccggtgatgcaggaccccgtggagactcaggacagccaggccccaagggagaccccggcaggcctggattcagctacccaggaccccgaggagcacccggagaaaaaggcgagcccggcccacgcggccccgagggaggccgaggcgactttggcttgaaaggagaacctgggaggaaaggagagaaaggagagcctgcggatcctggtccccctggtgagccaggccctcgggggccaagaggagtcccaggacccgagggtgagcccggcccccctggagaccccggtctcacggagtgtgacgtcatgacctacgtgagggagacctgcgggtgctgcgactgtgagaagcgctgtggcgccctggacgtggtcttcgtcatcgacagctccgagagcattgggtacaccaacttcacactggagaagaacttcgtcatcaacgtggtcaacaggctgggtgccatcgctaaggaccccaagtccgagacagggacgcgtgtgggcgtggtgcagtacagccacgagggcacctttgaggccatccagctggacgacgaacgtatcgactccctgtcgagcttcaaggaggctgtcaagaacctcgagtggattgcgggcggcacctggacaccctcagccctcaagtttgcctacgaccgcctcatcaaggagagccggcgccagaagacacgtgtgtttgcggtggtcatcacggacgggcgccacgaccctcgggacgatgacctcaacttgcgggcgctgtgcgaccgcgacgtcacagtgacggccatcggcatcggggacatgttccacgagaagcacgagagtgaaaacctctactccatcgcctgcgacaagccacagcaggtgcgcaacatgacgctgttctccgacctggtcgctgagaagttcatcgatgacatggaggacgtcctctgcccggaccctcagatcgtgtgcccagaccttccctgccaaacagagctgtccgtggcacagtgcacgcagcggcccgtggacatcgtcttcctgctggacggctccgagcggctgggtgagcagaacttccacaaggcccggcgcttcgtggagcaggtggcgcggcggctgacgctggcccggagggacgacgaccctctcaacgcacgcgtggcgctgctgcagtttggtggccccggcgagcagcaggtggccttcccgctgagccacaacctcacggccatccacgaggcgctggagaccacacaatacctgaactccttctcgcacgtgggcgcaggcgtggtgcacgccatcaatgccatcgtgcgcagcccgcgtggcggggcccggaggcacgcagagctgtccttcgtgttcctcacggacggcgtcacgggcaacgacagtctgcacgagtcggcgcactccatgcgcaagcagaacgtggtacccaccgtgctggccttgggcagcgacgtggacatggacgtgctcaccacgctcagcctgggtgaccgcgccgccgtgttccacgagaaggactatgacagcctggcgcaacccggcttcttcgaccgcttcatccgctggatctgctagcgccgccgcccgggccccgcagtcgagggtcgtgagcccaccccgtccatggtgctaagcgggcccgggtcccacacggccagcaccgctgctcactcggacgacgccctgggcctgcacctctccagctcctcccacggggtccccgtagccccggcccccgcccagccccaggtctccccaggccctccgcaggctgcccggcctccctccccctgcagccatcccaaggctcctgacctacctggcccctgagctctggagcaagccctgacccaataaaggctttgaacccataaaaaaaaaaaaaaaa

SEQ ID NO: 1696 - protein, 1019 aa, Homo sapiens
MLQGTCSVLLLWGILGAIQAQQQEVISPDTTERNNNCPEKTDCPIHVYFVLDTSESVTMQSPTDILLFHMKQFVPQFISQLQNEFYLDQVALSWRYGGLHFSDQVEVFSPPGSDRASFIKNLQGISSFRRGTFTDCALANMTEQIRQDRSKGTVHFAVVITDGHVTGSPCGGIKLQAERAREEGIRLFAVAPNQNLKEQGLRDIASTPHELYRNDYATMLPDSTEIDQDTINRIIKVMKHEAYGECYKVSCLEIPGPSGPKGYRGQKGAKGNMGEPGEPGQKGRQGDPGIEGPIGFPGPKGVPGFKGEKGEFGADGRKGAPGLAGKNGTDGQKGKLGRIGPPGCKGDPGNRGPDGYPGEAGSPGERGDQGGKGDPGRPGRRGPPGEIGAKGSKGYQGNSGAPGSPGVKGAKGGPGPRGPKGEPGRRGDPGTKGSPGSDGPKGEKGDPGPEGPRGLAGEVGNKGAKGDRGLPGPRGPQGALGEPGKQGSRGDPGDAGPRGDSGQPGPKGDPGRPGFSYPGPRGAPGEKGEPGPRGPEGGRGDFGLKGEPGRKGEKGEPADPGPPGEPGPRGPRGVPGPEGEPGPPGDPGLTECDVMTYVRETCGCCDCEKRCGALDVVFVIDSSESIGYTNFTLEKNFVINVVNRLGAIAKDPKSETGTRVGVVQYSHEGTFEAIQLDDERIDSLSSFKEAVKNLEWIAGGTWTPSALKFAYDRLIKESRRQKTRVFAVVITDGRHDPRDDDLNLRALCDRDVTVTAIGIGDMFHEKHESENLYSIACDKPQQVRNMTLFSDLVAEKFIDDMEDVLCPDPQIVCPDLPCQTELSVAQCTQRPVDIVFLLDGSERLGEQNFHKARRFVEQVARRLTLARRDDDPLNARVALLQFGGPGEQQVAFPLSHNLTAIHEALETTQYLNSFSHVGAGVVHAINAIVRSPRGGARRHAELSFVFLTDGVTGNDSLHESAHSMRKQNVVPTVLALGSDVDMDVLTTLSLGDRAAVFHEKDYDSLAQPGFFDRFIRWIC

SEQ ID NO: 1697 - DNA, 3168 bp, Homo sapiens
gcttactcggcgcccgcgcctcgggccgtcgggagcggagcctcctcgggaccaggacttcagggccacaggtgctgccaagatgctccagggcacctgctccgtgctcctgctctggggaatcctgggggccatccaggcccagcagcaggaggtcatctcgccggacactaccgagagaaacaacaactgcccagagaagaccgactgccccatccacgtgtacttcgtgctggacacctcggagagcgtcaccatgcagtcccccacggacatcctgctcttccacatgaagcagttcgtgccgcagttcatcagccagctgcagaacgagttctacctggaccaggtggcgctgagctggcgctacggcggcctgcacttctctgaccaggtggaggtgttcagcccaccgggcagcgaccgggcctccttcatcaagaacctgcagggcatcagctccttccgccgcggcaccttcaccgactgcgcgctggccaacatgacggagcagatccggcaggaccgcagcaagggcaccgtccacttcgccgtggtcatcaccgacggccacgtcaccggcagcccctgcgggggcatcaagctgcaggccgagcgggcccgcgaggagggcatccggctcttcgccgtggcccccaaccagaacctgaaggagcagggcctgcgggacatcgccagcacgccgcacgagctctaccgcaacgactacgccaccatgctgcccgactccaccgagatcgaccaggacaccatcaaccgcatcatcaaggtcatgaaacacgaagcctacggagagtgctacaaggtgagctgcctggaaatccctgggccctctggccccaagggctaccgtggacagaagggtgccaagggcaacatgggtgagccgggagagcctggccagaagggaagacagggagacccgggcatcgaaggccccattggattcccaggacccaagggcgttcctggcttcaaaggagagaagggtgaatttggagccgacggtcgcaagggggcccctggcctggctggcaagaacgggaccgatggacagaagggcaagctggggcgcatcggacctcctggctgcaagggagaccctggaaaccggggccccgacggttacccgggggaagcagggagtccaggggagcgaggagaccaaggcggcaagggggaccctggccgcccaggacgcagagggcccccgggagaaatcggggccaagggaagcaaggggtatcaaggcaacagtggagccccaggaagtcctggtgtgaaaggagccaagggcgggcctgggccccgcggacccaaaggcgagccggggcgcaggggagaccccggcaccaagggcagcccaggcagcgatggccccaagggggagaagggggaccctggccctgaggggccccgcggcctggctggagaggttggcaacaaaggagccaagggagaccgaggcttgcctggacccagaggcccccagggagctcttggggagcccggaaagcagggatctcggggagaccccggtgatgcaggaccccgtggagactcaggacagccaggccccaagggagaccccggcaggcctggattcagctacccaggaccccgaggagcacccggagaaaaaggcgagcccggcccacgcggccccgagggaggccgaggcgactttggcttgaaaggagaacctgggaggaaaggagagaaaggagagcctgcggatcctggtccccctggtgagccaggccctcgggggccaagaggagtcccaggacccgagggtgagcccggcccccctggagaccccggtctcacggagtgtgacgtcatgacctacgtgagggagacctgcgggtgctgcgactgtgagaagcgctgtggcgccctggacgtggtcttcgtcatcgacagctccgagagcattgggtacaccaacttcacactggagaagaacttcgtcatcaacgtggtcaacaggctgggtgccatcgctaaggaccccaagtccgagacagggacgcgtgtgggcgtggtgcagtacagccacgagggcacctttgaggccatccagctggacgacgaacgtatcgactccctgtcgagcttcaaggaggctgtcaagaacctcgagtggattgcgggcggcacctggacaccctcagccctcaagtttgcctacgaccgcctcatcaaggagagccggcgccagaagacacgtgtgtttgcggtggtcatcacggacgggcgccacgaccctcgggacgatgacctcaacttgcgggcgctgtgcgaccgcgacgtcacagtgacggccatcggcatcggggacatgttccacgagaagcacgagagtgaaaacctctactccatcgcctgcgacaagccacagcaggtgcgcaacatgacgctgttctccgacctggtcgctgagaagttcatcgatgacatggaggacgtcctctgcccggaccctcagatcgtgtgcccagaccttccctgccaaacagatgcaccgtggcctggcggcgagcccccggtcaccttcctccgcacggaagaggggccggacgccaccttccccaggaccattcccctgatccaacagttgctaaacgccacggagctcacgcaggacccggccgcctactcccagctggtggccgtgctggtctacaccgccgagcgggccaagttcgccaccggggtagagcggcaggactggatggagctgttcattgacacctttaagctggtgcacagggacatcgtgggggaccccgagaccgcgctggccctctgctaaagcccgggcacccgcccagccgggctgggccctccctgccacactagcttcccagggctgcccccgacaggctggctctcagtggaggccagagatctggaatcggggtcagcggggctacagtccttccaggggctctggggcagctcccagcctcttcccatgctggtggccaccgtgtcccttgctgcggctgcatcttccagtctctcctccgtcttcctgtggccgctctctttataagaaccctggtcattgaatttaaggcccaccccaagtccagaatgacctcgcaagacccttaactcactcccaaaaaaaaaaaaaaa

SEQ ID NO: 1698 - protein, 918 aa, Homo sapiens
MLQGTCSVLLLWGILGAIQAQQQEVISPDTTERNNNCPEKTDCPIHVYFVLDTSESVTMQSPTDILLFHMKQFVPQFISQLQNEFYLDQVALSWRYGGLHFSDQVEVFSPPGSDRASFIKNLQGISSFRRGTFTDCALANMTEQIRQDRSKGTVHFAVVITDGHVTGSPCGGIKLQAERAREEGIRLFAVAPNQNLKEQGLRDIASTPHELYRNDYATMLPDSTEIDQDTINRIIKVMKHEAYGECYKVSCLEIPGPSGPKGYRGQKGAKGNMGEPGEPGQKGRQGDPGIEGPIGFPGPKGVPGFKGEKGEFGADGRKGAPGLAGKNGTDGQKGKLGRIGPPGCKGDPGNRGPDGYPGEAGSPGERGDQGGKGDPGRPGRRGPPGEIGAKGSKGYQGNSGAPGSPGVKGAKGGPGPRGPKGEPGRRGDPGTKGSPGSDGPKGEKGDPGPEGPRGLAGEVGNKGAKGDRGLPGPRGPQGALGEPGKQGSRGDPGDAGPRGDSGQPGPKGDPGRPGFSYPGPRGAPGEKGEPGPRGPEGGRGDFGLKGEPGRKGEKGEPADPGPPGEPGPRGPRGVPGPEGEPGPPGDPGLTECDVMTYVRETCGCCDCEKRCGALDVVFVIDSSESIGYTNFTLEKNFVINVVNRLGAIAKDPKSETGTRVGVVQYSHEGTFEAIQLDDERIDSLSSFKEAVKNLEWIAGGTWTPSALKFAYDRLIKESRRQKTRVFAVVITDGRHDPRDDDLNLRALCDRDVTVTAIGIGDMFHEKHESENLYSIACDKPQQVRNMTLFSDLVAEKFIDDMEDVLCPDPQIVCPDLPCQTDAPWPGGEPPVTFLRTEEGPDATFPRTIPLIQQLLNATELTQDPAAYSQLVAVLVYTAERAKFATGVERQDWMELFIDTFKLVHRDIVGDPETALALC

SEQ ID NO: 1699 - DNA, 3461 bp, Homo sapiens
gcttactcggcgcccgcgcctcgggccgtcgggagcggagcctcctcgggaccaggacttcagggccacaggtgctgccaagatgctccagggcacctgctccgtgctcctgctctggggaatcctgggggccatccaggcccagcagcaggaggtcatctcgccggacactaccgagagaaacaacaactgcccagagaagaccgactgccccatccacgtgtacttcgtgctggacacctcggagagcgtcaccatgcagtcccccacggacatcctgctcttccacatgaagcagttcgtgccgcagttcatcagccagctgcagaacgagttctacctggaccaggtggcgctgagctggcgctacggcggcctgcacttctctgaccaggtggaggtgttcagcccaccgggcagcgaccgggcctccttcatcaagaacctgcagggcatcagctccttccgccgcggcaccttcaccgactgcgcgctggccaacatgacggagcagatccggcaggaccgcagcaagggcaccgtccacttcgccgtggtcatcaccgacggccacgtcaccggcagcccctgcgggggcatcaagctgcaggccgagcgggcccgcgaggagggcatccggctcttcgccgtggcccccaaccagaacctgaaggagcagggcctgcgggacatcgccagcacgccgcacgagctctaccgcaacgactacgccaccatgctgcccgactccaccgagatcgaccaggacaccatcaaccgcatcatcaaggtcatgaaacacgaagcctacggagagtgctacaaggtgagctgcctggaaatccctgggccctctggccccaagggctaccgtggacagaagggtgccaagggcaacatgggtgagccgggagagcctggccagaagggaagacagggagacccgggcatcgaaggccccattggattcccaggacccaagggcgttcctggcttcaaaggagagaagggtgaatttggagccgacggtcgcaagggggcccctggcctggctggcaagaacgggaccgatggacagaagggcaagctggggcgcatcggacctcctggctgcaagggagaccctggaaaccggggccccgacggttacccgggggaagcagggagtccaggggagcgaggagaccaaggcggcaagggggaccctggccgcccaggacgcagagggcccccgggagaaatcggggccaagggaagcaaggggtatcaaggcaacagtggagccccaggaagtcctggtgtgaaaggagccaagggcgggcctgggccccgcggacccaaaggcgagccggggcgcaggggagaccccggcaccaagggcagcccaggcagcgatggccccaagggggagaagggggaccctggccctgaggggccccgcggcctggctggagaggttggcaacaaaggagccaagggagaccgaggcttgcctggacccagaggcccccagggagctcttggggagcccggaaagcagggatctcggggagaccccggtgatgcaggaccccgtggagactcaggacagccaggccccaagggagaccccggcaggcctggattcagctacccaggaccccgaggagcacccggagaaaaaggcgagcccggcccacgcggccccgagggaggccgaggcgactttggcttgaaaggagaacctgggaggaaaggagagaaaggagagcctgcggatcctggtccccctggtgagccaggccctcgggggccaagaggagtcccaggacccgagggtgagcccggcccccctggagaccccggtctcacggagtgtgacgtcatgacctacgtgagggagacctgcgggtgctgcgactgtgagaagcgctgtggcgccctggacgtggtcttcgtcatcgacagctccgagagcattgggtacaccaacttcacactggagaagaacttcgtcatcaacgtggtcaacaggctgggtgccatcgctaaggaccccaagtccgagacagggacgcgtgtgggcgtggtgcagtacagccacgagggcacctttgaggccatccagctggacgacgaacgtatcgactccctgtcgagcttcaaggaggctgtcaagaacctcgagtggattgcgggcggcacctggacaccctcagccctcaagtttgcctacgaccgcctcatcaaggagagccggcgccagaagacacgtgtgtttgcggtggtcatcacggacgggcgccacgaccctcgggacgatgacctcaacttgcgggcgctgtgcgaccgcgacgtcacagtgacggccatcggcatcggggacatgttccacgagaagcacgagagtgaaaacctctactccatcgcctgcgacaagccacagcaggtgcgcaacatgacgctgttctccgacctggtcgctgagaagttcatcgatgacatggaggacgtcctctgcccggaccctcagatcgtgtgcccagaccttccctgccaaacaggtttggacggagctgttttgtgctgaaaggttttctcggggtccgtggtgtcccccaaaggtgccaccgtgcgggtctcctagctccctgccagcttcctgtccctgtgctcactgcccccacgcctcctgccaaggccgagccacacacccgctccacctgcatttcctctaccgactcgccagcccaaatgccgctcttcactctggcctcgctgagcggctgcccgaggaggagctctaggccgacgcccaccgcaggccttacagtcttctctggacgctcccttgcagatgcaccgtggcctggcggcgagcccccggtcaccttcctccgcacggaagaggggccggacgccaccttccccaggaccattcccctgatccaacagttgctaaacgccacggagctcacgcaggacccggccgcctactcccagctggtggccgtgctggtctacaccgccgagcgggccaagttcgccaccggggtagagcggcaggactggatggagctgttcattgacacctttaagctggtgcacagggacatcgtgggggaccccgagaccgcgctggccctctgctaaagcccgggcacccgcccagccgggctgggccctccctgccacactagcttcccagggctgcccccgacaggctggctctcagtggaggccagagatctggaatcggggtcagcggggctacagtccttccaggggctctggggcagctcccagcctcttcccatgctggtggccaccgtgtcccttgctgcggctgcatcttccagtctctcctccgtcttcctgtggccgctctctttataagaaccctggtcattgaatttaaggcccaccccaagtccagaatgacctcgcaagacccttaactcactcccaaaaaaaaaaaaaaa

SEQ ID NO: 1700 - protein, 828 aa, Homo sapiens
MLQGTCSVLLLWGILGAIQAQQQEVISPDTTERNNNCPEKTDCPIHVYFVLDTSESVTMQSPTDILLFHMKQFVPQFISQLQNEFYLDQVALSWRYGGLHFSDQVEVFSPPGSDRASFIKNLQGISSFRRGTFTDCALANMTEQIRQDRSKGTVHFAVVITDGHVTGSPCGGIKLQAERAREEGIRLFAVAPNQNLKEQGLRDIASTPHELYRNDYATMLPDSTEIDQDTINRIIKVMKHEAYGECYKVSCLEIPGPSGPKGYRGQKGAKGNMGEPGEPGQKGRQGDPGIEGPIGFPGPKGVPGFKGEKGEFGADGRKGAPGLAGKNGTDGQKGKLGRIGPPGCKGDPGNRGPDGYPGEAGSPGERGDQGGKGDPGRPGRRGPPGEIGAKGSKGYQGNSGAPGSPGVKGAKGGPGPRGPKGEPGRRGDPGTKGSPGSDGPKGEKGDPGPEGPRGLAGEVGNKGAKGDRGLPGPRGPQGALGEPGKQGSRGDPGDAGPRGDSGQPGPKGDPGRPGFSYPGPRGAPGEKGEPGPRGPEGGRGDFGLKGEPGRKGEKGEPADPGPPGEPGPRGPRGVPGPEGEPGPPGDPGLTECDVMTYVRETCGCCDCEKRCGALDVVFVIDSSESIGYTNFTLEKNFVINVVNRLGAIAKDPKSETGTRVGVVQYSHEGTFEAIQLDDERIDSLSSFKEAVKNLEWIAGGTWTPSALKFAYDRLIKESRRQKTRVFAVVITDGRHDPRDDDLNLRALCDRDVTVTAIGIGDMFHEKHESENLYSIACDKPQQVRNMTLFSDLVAEKFIDDMEDVLCPDPQIVCPDLPCQTGLDGAVLC

SEQ ID NO: 1701 - DNA, 2602 bp, Homo sapiens
ccgcctcgcgcctcccgcctcccgcctcccgcctccctccagctgcgagtgcggcctcggctggcggcggcaccaggccacagttgtaagggatcttgtggctgtcaggatggcagaggagcaggagttcacccagctctgcaagttgcctgcacagccctcacacccacactgcgtgaacaacacctaccgcagcgcacagcactcccaggctctgctccgagggctgctggctctccgggacagcggaatcctcttcgatgttgtgctggtggtggagggcagacacatcgaggcccatcgcatcctgctggctgcgtcctgcgattacttcagaggaatgtttgctgggggattgaaggagatggaacaggaagaggtcctgatccacggtgtgtcctacaatgctatgtgccaaatcctacatttcatatacacctccgagctggagctcagcctgagcaatgtacaagagacactggtggctgcctgccagcttcagatcccagaaattatccatttctgctgtgatttcctcatgtcctgggtggacgaagagaacattctcgatgtctaccggctggcagagctgtttgacttgagccgcctgactgagcaactggacacctatatcctcaaaaactttgtggccttctctcggactgacaagtaccgccagcttccattggagaaggtctactccctcctcagcagcaatcgcctggaggtctcctgcgagaccgaggtatatgagggggcccttctctaccattatagcctggagcaggtgcaggctgaccagatctcgctgcacgagcccccaaagctccttgagacagtgcggtttccgctgatggaagctgaggtcctgcagcggctgcatgacaagctggaccccagccctttgagggacacagtggccagcgccctcatgtaccaccggaacgagagcctacagcccagcctgcagagcccgcaaacggagctgcggtcggacttccagtgcgttgtgggcttcgggggcattcactccacgccgtccactgtcctcagcgaccaggccaagtatctaaaccccttactgggagagtggaagcacttcactgcctccctggccccccgcatgtccaaccagggcatcgcggtgctcaacaacttcgtatacttgattggaggggacaacaatgtccaaggatttcgagcagagtcccgatgctggaggtatgacccacggcacaaccgctggttccagatccagtccctgcagcaggagcacgccgacctgtccgtgtgtgttgtaggcaggtacatctacgctgtggcgggccgtgactaccacaatgacctgaatgctgtggagcgctacgaccctgccaccaactcctgggcatacgtggccccactcaagagggaggtgtatgcccacgcaggcgcgacgctggaggggaagatgtatatcacctgcggccgcagaggggaggattacctgaaagagacacactgctacgatccaggcagcaacacttggcacacactggctgatgggcctgtgcggcgcgcctggcacggcatggcaaccctcctcaacaagctgtatgtgatcgggggcagcaacaacgatgccggatacaggagggacgtgcaccaggtggcctgctacagctgcacgtctggacagtggtcatctgtctgcccactccctgctgggcacggtgagcctggcattgctgtgctggacaacaggatctatgtgttaggtggccgctcacacaaccgcggcagccgcacaggctacgtgcacatttacgatgtggagaaggactgctgggaggaagggccccagctggacaactccatctcaggcctggcggcctgtgtgctcaccctgccccgctccctgctccttgagccgccccgcgggacccctgaccgcagccaggccgacccggactttgcctctgaggtgatgagtgtgtctgactgggaggagtttgacaactccagtgaggactaggctccctgtgcctggcatcagagggaagggaggctggggctgcagggcagtgaaacccacgcagcctaggccagagcactttactccaggcagggcccctgcccctgttggccacagcttatgggccctgccctctttcttcacaccagccccttggccagcctgccgcaggcatctcagggccatgcagatcccaggctgtggattacgtcactgcaggaactgcttctgaaaggctttggccttcctcagtgagccctggaggggttggccttctctcctccctgcctagatcagtccttctccaaaaggacctgggagctggcagcctgggcaggggggctgaggcacgtggtagccctctttctgtgaatggggtggggctgtgggggcagctggggttggaggatgagagctcctgaggggcagaggagcagagatgcatcagctcgcctgggactggctctgtgataaaaagacccctcccgctgggttttcagaccccatgttgttggtcaatgaaataaagcatcttacagaaggtgttaactgttaaaaaaaaaaaaaaaaaaaaaaaaaaaaaaaaaa

SEQ ID NO: 1702 - protein, 634 aa, Homo sapiens
MAEEQEFTQLCKLPAQPSHPHCVNNTYRSAQHSQALLRGLLALRDSGILFDVVLVVEGRHIEAHRILLAASCDYFRGMFAGGLKEMEQEEVLIHGVSYNAMCQILHFIYTSELELSLSNVQETLVAACQLQIPEIIHFCCDFLMSWVDEENILDVYRLAELFDLSRLTEQLDTYILKNFVAFSRTDKYRQLPLEKVYSLLSSNRLEVSCETEVYEGALLYHYSLEQVQADQISLHEPPKLLETVRFPLMEAEVLQRLHDKLDPSPLRDTVASALMYHRNESLQPSLQSPQTELRSDFQCVVGFGGIHSTPSTVLSDQAKYLNPLLGEWKHFTASLAPRMSNQGIAVLNNFVYLIGGDNNVQGFRAESRCWRYDPRHNRWFQIQSLQQEHADLSVCVVGRYIYAVAGRDYHNDLNAVERYDPATNSWAYVAPLKREVYAHAGATLEGKMYITCGRRGEDYLKETHCYDPGSNTWHTLADGPVRRAWHGMATLLNKLYVIGGSNNDAGYRRDVHQVACYSCTSGQWSSVCPLPAGHGEPGIAVLDNRIYVLGGRSHNRGSRTGYVHIYDVEKDCWEEGPQLDNSISGLAACVLTLPRSLLLEPPRGTPDRSQADPDFASEVMSVSDWEEFDNSSED

SEQ ID NO: 1703 - DNA, 1834 bp, Homo sapiens
ggctcatgcatgtaatcccagcacaatgggtgcccaaggccggcagatcacttgaggccaggagttcaagaccagtgtggccaacatggcaaaaacccatctctactaaaaatacaaaaattagctgggcgtagtggtgcacacctgtaattctagctactcaggagggtgaggctcaagaatcgcttgagcctgggaggtggaggttgtagtgagctgagatcgcgtcactgcactccagactggatgagagagtgagattctgcctcaaaaagcaaaaaacaaacaaagctgggcacggtggctcatgcctgtaatcctagcactttgggaggctgaggcgggtggatcacctgaggtccagagttggagaccagcctggccaacatggcgaaaccccgtctctactaaaaatacaaaaattaggtcatcagcaaagcctgagtcctgtcctcttgctctcctccccggacagcatgagcttcaccactcgctctaccttctccaccaactactggtccctgggctctgtccaggctcccagctatggcgcctggctggtcagcagcgtggccagcgtctatgcaggcaccgagggctctggttcctggatcttcgtgtcccgctccaccagcttccagggctgcatggggtctgggggcctggccgcggggatggctggggatctggcaggaatgggaagcatccagaatgagaaggagaccatacaaagcctgaatgaccgcctggcctcctacctggacagagcgaggagcctggagaccgagaaccggaagctggagagcaaaatccagaagcacttggagaagaagggacccagatcagagactggaggcattacttcaagaccatcgaggacctgagggctcagatctttgcaaatactgtggacaacgcccgtatctttctgtagatcgacaatgcccgtcttgctgctgatgactttagagtcaagtatgagacagaactgcccatgcactagtctgtggagagcgacatacatgggcttcgcaaagtgattgatgacaccaatgtccctcagctgtagctggagacagagatcgaagctctcaaggaggagctgctcttcatgaagaagaaccatgaagaggaagtaaaaggcctacaagaccagattgccagctctgggttgactgtggaggtagatgcccccaaatctcaggaccttgccaagatcgtggcagacatccaggctcaatatgatgagctggctcggaagaaacgacaggagctggacaagtactggtctcagcagattgaggagagcaccacagtggtcaccatgcagtccactgaggttggaactgctgagatgacaatcacggagttgagacgtacgtccagtccttggagatcaacctggactccttgagaaatctgaaggccagcttgtagaacagcctcagggaggtggaggccttctatgccctgtagatggagcagctcaatgggatcctgctgcacctggagtcagaggtggcacaaatccgggcagagggacagtgccaggcctaggagtaggacgccctggtgaacgttaaggtcaagctggaggctaagatcaccacctactgccgcctgctggaagatggcgaggacttcagtcttggtgatgccctggacagcagcaactccatgcaaaccatccaaaagaccaccacctgccagataatggatggcaaagtggtgtctgagaccaatgacaccaaagttctgagacattaagccaccagaagcagggtatcctttggggagcaggaggccaataaaaagttcagaggtcaaaaaaaaa

SEQ ID NO: 1704 - DNA, 3384 bp, Homo sapiens
ggtttgggcctggctctgtgactgaggcggcggcggtggcggccaagcgggatacgggcggcgggagctggggaacaggcatggacgtttccgggcaagagaccgactggcggagcaccgccttccggcagaagctggtcagtcaaatcgaggatgccatgaggaaagctggtgtggcacacagtaaatccagcaaggatatggagagccatgttttcctgaaggccaagacccgggacgaatacctttctctcgtggccaggctcattatccattttcgagacattcataacaagaaatctcaagcttccgtcagtgatcctatgaatgcactccagagcctgactggcggacctgctgcgggagccgctggaattggcatgcctcctcggggcccgggacagtctctgggcgggatgggtagccttggtgccatgggacagccaatgtctctctcagggcagccgcctcctgggacctcggggatggcccctcacagcatggctgtcgtgtctacggcaactccacagacccagctgcagctccagcaggtggcgctgcagcagcagcagcaacagcagcagttccagcagcagcagcaggcggcgctacagcagcagcagcagcagcagcaacagcagcagttccaggctcagcagagtgccatgcagcagcagttccaagcagtagtgcagcagcagcagcagctccagcagcagcagcagcagcagcagcatctaattaaattgcatcatcaaaatcagcaacagatacagcagcagcaacagcagctgcagcgaatagcacagctgcagctccaacaacagcaacagcagcagcagcagcagcagcagcagcagcagcaggctttgcaggcccagccaccaattcagcagccaccgatgcagcagccacagcctccgccctcccaggctctgccccagcagctgcagcagatgcatcacacacagcaccaccagccgccaccacagccccagcagcctccagttgctcagaaccaaccatcacaactcccgccacagtcgcagacccagcctttggtgtcacaggcgcaagctctccctggacaaatgttgtatacccaaccaccactgaaatttgtccgagctccgatggtggtgcagcagcccccagtgcagccccaggtgcagcagcagcagacagcagtacagacagctcaggctgcccagatggtggctcccggagtccagatgatcacggaagccttggcccaaggtgggatgcacataagagcccggttcccgcctaccaccgctgtgtccgccatcccgtcaagctccatccctttgggcagacagcccatggcacaggtcagccagagcagcctccccatgctgtcctcgccgtcaccgggccagcaggtgcagaccccgcagtcgatgccccctcccccccagccgtccccgcagcccggccagcccagctcacagcccaactccaacgtcagctctggccctgccccatctcccagtagcttcctgcccagcccctcaccgcagccctcccagagcccagtgacggcgcggaccccacagaacttcagtgtcccctcacctggacctttaaacacacctgtgaaccccagctctgtcatgagcccagctggctccagccaggctgaggagcagcagtacctggacaagctgaagcagctgtcgaagtacatcgagcccctgcgccgcatgatcaacaagatcgacaagaacgaagacagaaaaaaggacctgagtaagatgaagagccttctggacattctgacagacccctcgaagcggtgtcccctgaagaccttgcaaaagtgtgagatcgccctggagaaactcaagaatgacatggcggtgcccactcccccaccgcccccggtgccaccgaccaaacagcagtacctatgccagccgctcctggatgccgtcctggccaacatccgctcacctgtcttcaaccattccctgtaccgcacattcgttccagccatgaccgccattcacggcccacccatcacggccccagtggtgtgcacccggaagcgcaggcttgaggatgatgagcggcagagcatccccagtgtgctccagggtgaggtggccaggctggaccccaagttcctggtaaacctggacccttctcactgcagcaacaatggcactgtccacctgatctgcaagctggatgacaaggacctcccaagtgtgccaccactggagctcagtgtgcccgctgactatcctgcccaaagcccgctgtggatagaccggcagtggcagtacgacgccaaccccttcctccagtcggtgcaccgctgcatgacctccaggctgctgcagctcccggacaagcactcggtcaccgccttgctcaacacctgggcccagagcgtccaccaggcctgcctctcagccgcctagccaagactgcagggatggcccgcagcctcatcggggccaaggacacacgcctcctgtcagacacttctaggtgttggcttccttagagagcctggggttaggttagctttcctgcttttatcttctgccttggggacctgccaaacgaaatcccacacctgtacagaactgggataggcgcagtggagcgggttgcttggggggcgttggccgacttcttagagaaggccctccatgtgacttcctcccaggagccagatgcgatcctcaggctgctctcaccgtggcctgtccacggtccaggtccatctcagcagcgtgagggtgcactcagggtgttgttagagcgtctcgtgtgtgctagacgcacccctactcgttcctatagaacacagaggacataggaaacccttaaaacacacatgggattctctggtcacagttttgggttcaggctatgctgctttgggcaggtggagcaccccccgaggaagcctgcaagtccagggcacaggctgccttttggagggagggctggcccataggtgctgctggctccccgccaccagctgggcctcagccctcacggcattcctgctgagcaccgtggggcacccagggagcaggggcgtcagggatcctgctgccggcacccctgtgccgctggcatgagggccgtgtccccactgtgaaggatgaagagcaaggccctcaggacccgtgtcctcagagcaccacacactgagcacccagagacagcgggcctggcagcgggccgggccatgcagggagcgcctccctatgttgcctgccactctgggcaccggccagcaccctctggtgagaagaggtcccccctttttatgtgcactaccccaccatctgtgattataataaatttattattcctgtgtttgtcagttgttcaaaaaaaaaa

SEQ ID NO: 1705 - protein, 788 aa, Homo sapiens
MDVSGQETDWRSTAFRQKLVSQIEDAMRKAGVAHSKSSKDMESHVFLKAKTRDEYLSLVARLIIHFRDIHNKKSQASVSDPMNALQSLTGGPAAGAAGIGMPPRGPGQSLGGMGSLGAMGQPMSLSGQPPPGTSGMAPHSMAVVSTATPQTQLQLQQVALQQQQQQQQFQQQQQAALQQQQQQQQQQQFQAQQSAMQQQFQAVVQQQQQLQQQQQQQQHLIKLHHQNQQQIQQQQQQLQRIAQLQLQQQQQQQQQQQQQQQQALQAQPPIQQPPMQQPQPPPSQALPQQLQQMHHTQHHQPPPQPQQPPVAQNQPSQLPPQSQTQPLVSQAQALPGQMLYTQPPLKFVRAPMVVQQPPVQPQVQQQQTAVQTAQAAQMVAPGVQMITEALAQGGMHIRARFPPTTAVSAIPSSSIPLGRQPMAQVSQSSLPMLSSPSPGQQVQTPQSMPPPPQPSPQPGQPSSQPNSNVSSGPAPSPSSFLPSPSPQPSQSPVTARTPQNFSVPSPGPLNTPVNPSSVMSPAGSSQAEEQQYLDKLKQLSKYIEPLRRMINKIDKNEDRKKDLSKMKSLLDILTDPSKRCPLKTLQKCEIALEKLKNDMAVPTPPPPPVPPTKQQYLCQPLLDAVLANIRSPVFNHSLYRTFVPAMTAIHGPPITAPVVCTRKRRLEDDERQSIPSVLQGEVARLDPKFLVNLDPSHCSNNGTVHLICKLDDKDLPSVPPLELSVPADYPAQSPLWIDRQWQYDANPFLQSVHRCMTSRLLQLPDKHSVTALLNTWAQSVHQACLSAA

SEQ ID NO: 1706 - DNA, 3264 bp, Homo sapiens
ggtttgggcctggctctgtgactgaggcggcggcggtggcggccaagcgggatacgggcggcgggagctggggaacaggcatggacgtttccgggcaagagaccgactggcggagcaccgccttccggcagaagctggtcagtcaaatcgaggatgccatgaggaaagctggtgtggcacacagtaaatccagcaaggatatggagagccatgttttcctgaaggccaagacccgggacgaatacctttctctcgtggccaggctcattatccattttcgagacattcataacaagaaatctcaagcttccgtcagtgatcctatgaatgcactccagagcctgactggcggacctgctgcgggagccgctggaattggcatgcctcctcggggcccgggacagtctctgggcgggatgggtagccttggtgccatgggacagccaatgtctctctcagggcagccgcctcctgggacctcggggatggcccctcacagcatggctgtcgtgtctacggcaactccacagacccagctgcagctccagcaggtggcgctgcagcagcagcagcaacagcagcagttccagcagcagcagcaggcggcgctacagcagcagcagcagcagcagcaacagcagcagttccaggctcagcagagtgccatgcagcagcagttccaagcagtagtgcagcagcagcagcagctccagcagcagcagcagcagcagcagcatctaattaaattgcatcatcaaaatcagcaacagatacagcagcagcaacagcagctgcagcgaatagcacagctgcagctccaacaacagcaacagcagcagcagcagcagcagcagcagcagcagcaggctttgcaggcccagccaccaattcagcagccaccgatgcagcagccacagcctccgccctcccaggctctgccccagcagctgcagcagatgcatcacacacagcaccaccagccgccaccacagccccagcagcctccagttgctcagaaccaaccatcacaactcccgccacagtcgcagacccagcctttggtgtcacaggcgcaagctctccctggacaaatgttgtatacccaaccaccactgaaatttgtccgagctccgatggtggtgcagcagcccccagtgcagccccaggtgcagcagcagcagacagcagtacagacagctcaggctgcccagatggtggctcccggagtccaggtcagccagagcagcctccccatgctgtcctcgccgtcaccgggccagcaggtgcagaccccgcagtcgatgccccctcccccccagccgtccccgcagcccggccagcccagctcacagcccaactccaacgtcagctctggccctgccccatctcccagtagcttcctgcccagcccctcaccgcagccctcccagagcccagtgacggcgcggaccccacagaacttcagtgtcccctcacctggacctttaaacacacctgtgaaccccagctctgtcatgagcccagctggctccagccaggctgaggagcagcagtacctggacaagctgaagcagctgtcgaagtacatcgagcccctgcgccgcatgatcaacaagatcgacaagaacgaagacagaaaaaaggacctgagtaagatgaagagccttctggacattctgacagacccctcgaagcggtgtcccctgaagaccttgcaaaagtgtgagatcgccctggagaaactcaagaatgacatggcggtgcccactcccccaccgcccccggtgccaccgaccaaacagcagtacctatgccagccgctcctggatgccgtcctggccaacatccgctcacctgtcttcaaccattccctgtaccgcacattcgttccagccatgaccgccattcacggcccacccatcacggccccagtggtgtgcacccggaagcgcaggcttgaggatgatgagcggcagagcatccccagtgtgctccagggtgaggtggccaggctggaccccaagttcctggtaaacctggacccttctcactgcagcaacaatggcactgtccacctgatctgcaagctggatgacaaggacctcccaagtgtgccaccactggagctcagtgtgcccgctgactatcctgcccaaagcccgctgtggatagaccggcagtggcagtacgacgccaaccccttcctccagtcggtgcaccgctgcatgacctccaggctgctgcagctcccggacaagcactcggtcaccgccttgctcaacacctgggcccagagcgtccaccaggcctgcctctcagccgcctagccaagactgcagggatggcccgcagcctcatcggggccaaggacacacgcctcctgtcagacacttctaggtgttggcttccttagagagcctggggttaggttagctttcctgcttttatcttctgccttggggacctgccaaacgaaatcccacacctgtacagaactgggataggcgcagtggagcgggttgcttggggggcgttggccgacttcttagagaaggccctccatgtgacttcctcccaggagccagatgcgatcctcaggctgctctcaccgtggcctgtccacggtccaggtccatctcagcagcgtgagggtgcactcagggtgttgttagagcgtctcgtgtgtgctagacgcacccctactcgttcctatagaacacagaggacataggaaacccttaaaacacacatgggattctctggtcacagttttgggttcaggctatgctgctttgggcaggtggagcaccccccgaggaagcctgcaagtccagggcacaggctgccttttggagggagggctggcccataggtgctgctggctccccgccaccagctgggcctcagccctcacggcattcctgctgagcaccgtggggcacccagggagcaggggcgtcagggatcctgctgccggcacccctgtgccgctggcatgagggccgtgtccccactgtgaaggatgaagagcaaggccctcaggacccgtgtcctcagagcaccacacactgagcacccagagacagcgggcctggcagcgggccgggccatgcagggagcgcctccctatgttgcctgccactctgggcaccggccagcaccctctggtgagaagaggtcccccctttttatgtgcactaccccaccatctgtgattataataaatttattattcctgtgtttgtcagttgttcaaaaaaaaaa

SEQ ID NO: 1707 - protein, 748 aa, Homo sapiens
MDVSGQETDWRSTAFRQKLVSQIEDAMRKAGVAHSKSSKDMESHVFLKAKTRDEYLSLVARLIIHFRDIHNKKSQASVSDPMNALQSLTGGPAAGAAGIGMPPRGPGQSLGGMGSLGAMGQPMSLSGQPPPGTSGMAPHSMAVVSTATPQTQLQLQQVALQQQQQQQQFQQQQQAALQQQQQQQQQQQFQAQQSAMQQQFQAVVQQQQQLQQQQQQQQHLIKLHHQNQQQIQQQQQQLQRIAQLQLQQQQQQQQQQQQQQQQALQAQPPIQQPPMQQPQPPPSQALPQQLQQMHHTQHHQPPPQPQQPPVAQNQPSQLPPQSQTQPLVSQAQALPGQMLYTQPPLKFVRAPMVVQQPPVQPQVQQQQTAVQTAQAAQMVAPGVQVSQSSLPMLSSPSPGQQVQTPQSMPPPPQPSPQPGQPSSQPNSNVSSGPAPSPSSFLPSPSPQPSQSPVTARTPQNFSVPSPGPLNTPVNPSSVMSPAGSSQAEEQQYLDKLKQLSKYIEPLRRMINKIDKNEDRKKDLSKMKSLLDILTDPSKRCPLKTLQKCEIALEKLKNDMAVPTPPPPPVPPTKQQYLCQPLLDAVLANIRSPVFNHSLYRTFVPAMTAIHGPPITAPVVCTRKRRLEDDERQSIPSVLQGEVARLDPKFLVNLDPSHCSNNGTVHLICKLDDKDLPSVPPLELSVPADYPAQSPLWIDRQWQYDANPFLQSVHRCMTSRLLQLPDKHSVTALLNTWAQSVHQACLSAA

SEQ ID NO: 1708 - DNA, 2868 bp, Homo sapiens
atgaccaggatgagctctgatgaacctgtgtacactgagttgcaagtgatggacaatagctcagaccaacagtccacagagcaagtcctggcatacagcaagtgctgtacaagcattaccaaggattcatggtttgctaagaaggccattttcaactctccactggaggcttttatggcgttccctcacctgcagcggcccagctttctactggctaccctgaaagctgactctgtaaataagccctttgcacagtgatgccaagacttggttaaagtcattgaggattttccagcagaggagctgcacgccatctccccatggctggtagcattttcggcagcctggatggtgtccttgtgggctggaacctgcgctgcttacagaggcgcgtgaatcctgtgaagtacagcatggtgatggaatttctcgaccctggcggcccaatgatgaagttggtttataagcttcaagctgaagacttaagtttgactttcccatctcctacctgccgggtctcgtgaaggcatccatccaggagtgcgtccttgacagtcctctgtaacacaagatccagttccgcccaactaagggccttggcctgaacctggccttgaatccgttcgagtattacatatgcttctttgccttgagcctcaacacactaaagccactccctgtgtctctccatgtccatatttcagactgtacctatttcctcctggtggacaggtacctgtcatggttcctgcccaccaaaggcagcctgccaccaccctcactgtcctccagcccaggatgggccagtccctcacctgctcccaggacaccagccatgccctttgcttcctgtagcctccagcacactagccccctgaagcgacacttctctcatcagatgtctgtgaatgcagaccccgcctcccaggagatctggaggtcagaaactctgctccgggtttttgtcgaaatgtggcttcaacactattctctggagatgtaccaaaaaatgcagttcccctcatgccaagctggaggtgctgcactaccgactctgtgtctccagtgcccaccacagcccccggcagcccaacctccaggccctccacacctaccaagagtcgttcatgcccaccaaggggcacatgctggtggtgcgcctgccactgaagcacctgcacgcctttgccgacagcctgaagccagagcaggtctcacctttcgtccactcccacaccaccagcccgctgggggagttcaaacagtgggccgctgtcccgaggttagtccagcagaaactctacctcttcctgcggcattgctttggccactggcccttggacgcattgttcagagctaggagtgtcctggaggtgtggctgagctacctgcagccatggtggtatgcagctgacaagcaggctgccagcagcaactcccagccccagtgtgtctgagaaatggtgagccctggccccctctcctcacatgccactggctcccctgggcaaatgttgctccagtggaccagcccttcctaggctcaacttcgccaggccctagaatgggtttctcatggaagcagtgggtgacctgtcccctctcccttctggcccagacaaattttcatggtgacccccaaactgttccttaacccttccttaccagcacagagcagaccattcgagcagctgttcccggagccggagctcgtcatccccctaccgccagcaccgactcttcacagcctgcacattcgccagcagcatcctgtcatagtggccaccagtggtcactgatgcctccttcaatgtgaagagtcacatctatggcctggagggccaggactgcaagtacacccgatgttcgggcccgaggcttacaccctggtcctgcaccttactcagctcatcacgcaggccaagcacacggccaggtccatctcggaccagtgtgtggagactccagctggccactccttcctgttgtggctgggctttggccccacagacaccaacggctcctattcagccatgacctgggcgagatggggcaggacagcgtccagaagatggacgagtgcctggaggaggccctggcgtacctgcgccagatattccgatgaagtgcagctcacgcagagtctctcacacttgccttggacaccatccaggatgagaatggaaagaagcagctccggactgcatcgcgggtgaggacagactcatccccacgcccctgggccagtaccagatcatcaacaggctgcaaaggtttgaaattgagtaccagggggacccggagctgcagcccctctggagttatgagattaccagcttggtctgagcatccttccggctgtcatctgccatcaaacacagatttgcagaccagatggcggctctgtgttcctgagatgacttccttgccagcttctgttgctaccacctcacagagcccacgctggccagcggccacaggctcaacctgcacttcctaggcagctacctgacactgccctggctactgctggctttcttcatggcctctctgttctgcatcaggcccctcacctgtgcactgctgttcaccctgggctacgccctctactccttggccatgatgttgctgaccaggatgccctcaactttttgccactggaccacacttccctgctgtgaacaggccaaatctagatgcttctcagacctcatggcctggagcctctggcagcacagcttcaggctctccagacaccacccctgctccctgcacctccacatccccctccttgcaccaggcaacgctattcccctggaacccatttgtggcccactctcttccatgaccaacacatcctatctctag

SEQ ID NO: 1709 - DNA, 1608 bp, Homo sapiens
cggacctgcctctcacgcaatggatcccctggcggcaacccgagaccggttctcctacccgcattccgccaagtctctcgctctgcccaggacgcacagatgagagcgctccgaagactgattcagggcaggatcctgctcctgaccatctgcgctgccggcattggtgggacttttcagtttggctataacctctctatcatcaatgccccgaccttgcacattcaggaattcaccaatgagacatggcaggcgcgtactggagagccactgcccgatcacctagtcctgcttatgtggtccctcatcgtgtctctgtatcccctgggaggcctctttggagcactgcttgcaggtcccttggccatcacgctgggaaggaagaagtccctcctggtgaataacatctttgtggtgtcagcagcaatcctgtttggattcagccgcaaagcaggctcctttgagatgatcatgctgggaagactgctcgtgggagtcaatgcaggtgtgagcatgaacatccagcccatgtacctgggggagagcgcccctaaggagctccgaggagctgtggccatgagctcagccatctttacggctctggggatcgtgatgggacaggtggtcggactcagggagctcctaggtggccctcaggcctggcccctgctgctggccagctgcctggtgcccggggcgctccagctcgcctccctgcctctgctccctgaaagcccgcgctacctcctcattgactgtggagacaccgaggcctgcctggcagcactacggcggctccggggctccggggacttggcaggggagctggaggagctggaggaggagcgcgctgcctgccagggctgccgtgcccggcgcccatgggagctgttccagcatcgggccctgaggagacaggtgacaagcctcgtggttctgggcagtgccatggagctctgcgggaatgactcggtgtacgcctacgcctcctccgtgttccggaaggcaggagtgccggaagcgaagatccagtacgcgatcatcgggactgggagctgcgagctgctcacggcggttgttagttgtgtggtaatcgagagggtgggtcggcgcgtgctgctcatcggtgggtacagcctgatgacctgctgggggagcatcttcactgtggccctgtgcctgcagagctccttcccctggacactctacctggccatggcctgcatctttgccttcatcctcagctttggcattggccctgccggagtgacggggatcctggccacagagctgtttgaccagatggccaggcctgctgcctgcatggtctgcggggcgctcatgtggatcatgctcatcctggtcggcctgggatttccctttatcatggaggccttgtcccacttcctctatgtccctttccttggtgtctgtgtctgtggggccatctacactggcctgttccttcctgagaccaaaggcaagaccttccaagagatctccaaggaattacacagactcaacttccccaggcgggcccagggccccacgtggaggagcctggaggttatccagtcaacagaactctagtcccaaaggggtggccag

SEQ ID NO: 1710 - protein, 496 aa, Homo sapiens
MRALRRLIQGRILLLTICAAGIGGTFQFGYNLSIINAPTLHIQEFTNETWQARTGEPLPDHLVLLMWSLIVSLYPLGGLFGALLAGPLAITLGRKKSLLVNNIFVVSAAILFGFSRKAGSFEMIMLGRLLVGVNAGVSMNIQPMYLGESAPKELRGAVAMSSAIFTALGIVMGQVVGLRELLGGPQAWPLLLASCLVPGALQLASLPLLPESPRYLLIDCGDTEACLAALRRLRGSGDLAGELEELEEERAACQGCRARRPWELFQHRALRRQVTSLVVLGSAMELCGNDSVYAYASSVFRKAGVPEAKIQYAIIGTGSCELLTAVVSCVVIERVGRRVLLIGGYSLMTCWGSIFTVALCLQSSFPWTLYLAMACIFAFILSFGIGPAGVTGILATELFDQMARPAACMVCGALMWIMLILVGLGFPFIMEALSHFLYVPFLGVCVCGAIYTGLFLPETKGKTFQEISKELHRLNFPRRAQGPTWRSLEVIQSTEL

SEQ ID NO: 1711 - DNA, 1590 bp, Homo sapiens
tgggacagcaagacctccgctcaggccctctttcgaatgctccacgccctcctgcgatctagaatgattcagggcaggatcctgctcctgaccatctgcgctgccggcattggtgggacttttcagtttggctataacctctctatcatcaatgccccgaccttgcacattcaggaattcaccaatgagacatggcaggcgcgtactggagagccactgcccgatcacctagtcctgcttatgtggtccctcatcgtgtctctgtatcccctgggaggcctctttggagcactgcttgcaggtcccttggccatcacgctgggaaggaagaagtccctcctggtgaataacatctttgtggtgtcagcagcaatcctgtttggattcagccgcaaagcaggctcctttgagatgatcatgctgggaagactgctcgtgggagtcaatgcaggtgtgagcatgaacatccagcccatgtacctgggggagagcgcccctaaggagctccgaggagctgtggccatgagctcagccatctttacggctctggggatcgtgatgggacaggtggtcggactcagggagctcctaggtggccctcaggcctggcccctgctgctggccagctgcctggtgcccggggcgctccagctcgcctccctgcctctgctccctgaaagcccgcgctacctcctcattgactgtggagacaccgaggcctgcctggcagcactacggcggctccggggctccggggacttggcaggggagctggaggagctggaggaggagcgcgctgcctgccagggctgccgtgcccggcgcccatgggagctgttccagcatcgggccctgaggagacaggtgacaagcctcgtggttctgggcagtgccatggagctctgcgggaatgactcggtgtacgcctacgcctcctccgtgttccggaaggcaggagtgccggaagcgaagatccagtacgcgatcatcgggactgggagctgcgagctgctcacggcggttgttagttgtgtggtaatcgagagggtgggtcggcgcgtgctgctcatcggtgggtacagcctgatgacctgctgggggagcatcttcactgtggccctgtgcctgcagagctccttcccctggacactctacctggccatggcctgcatctttgccttcatcctcagctttggcattggccctgccggagtgacggggatcctggccacagagctgtttgaccagatggccaggcctgctgcctgcatggtctgcggggcgctcatgtggatcatgctcatcctggtcggcctgggatttccctttatcatggaggccttgtcccacttcctctatgtccctttccttggtgtctgtgtctgtggggccatctacactggcctgttccttcctgagaccaaaggcaagaccttccaagagatctccaaggaattacacagactcaacttccccaggcgggcccagggccccacgtggaggagcctggaggttatccagtcaacagaactctagtcccaaaggggtggccagagccaaagccagctactgtcctgtcctctgcttcct

SEQ ID NO: 1712 - protein, 499 aa, Homo sapiens
MLHALLRSRMIQGRILLLTICAAGIGGTFQFGYNLSIINAPTLHIQEFTNETWQARTGEPLPDHLVLLMWSLIVSLYPLGGLFGALLAGPLAITLGRKKSLLVNNIFVVSAAILFGFSRKAGSFEMIMLGRLLVGVNAGVSMNIQPMYLGESAPKELRGAVAMSSAIFTALGIVMGQVVGLRELLGGPQAWPLLLASCLVPGALQLASLPLLPESPRYLLIDCGDTEACLAALRRLRGSGDLAGELEELEEERAACQGCRARRPWELFQHRALRRQVTSLVVLGSAMELCGNDSVYAYASSVFRKAGVPEAKIQYAIIGTGSCELLTAVVSCVVIERVGRRVLLIGGYSLMTCWGSIFTVALCLQSSFPWTLYLAMACIFAFILSFGIGPAGVTGILATELFDQMARPAACMVCGALMWIMLILVGLGFPFIMEALSHFLYVPFLGVCVCGAIYTGLFLPETKGKTFQEISKELHRLNFPRRAQGPTWRSLEVIQSTEL

SEQ ID NO: 1713 - DNA, 2055 bp, Homo sapiens
cggacctgcctctcacgcaatggatcccctggcggcaacccgagaccggttctcctacccgcattccgccaagtctctcgctctgcccaggacgcacagatgagagcgctccgaagactgagatgagcttggggcttagccgagtaaggagtgagcggcttttcagcctcagtgctgcggcagaggcggatggaggatgaactggagccgtccttacggcctcggacgcagattcagggcaggatcctgctcctgaccatctgcgctgccggcattggtgggacttttcagtttggctataacctctctatcatcaatgccccgaccttgcacattcaggaattcaccaatgagacatggcaggcgcgtactggagagccactgcccgatcacctagtcctgcttatgtggtccctcatcgtgtctctgtatcccctgggaggcctctttggagcactgcttgcaggtcccttggccatcacgctgggaaggaagaagtccctcctggtgaataacatctttgtggtgtcagcagcaatcctgtttggattcagccgcaaagcaggctcctttgagatgatcatgctgggaagactgctcgtgggagtcaatgcaggtgtgagcatgaacatccagcccatgtacctgggggagagcgcccctaaggagctccgaggagctgtggccatgagctcagccatctttacggctctggggatcgtgatgggacaggtggtcggactcagggagctcctaggtggccctcaggcctggcccctgctgctggccagctgcctggtgcccggggcgctccagctcgcctccctgcctctgctccctgaaagcccgcgctacctcctcattgactgtggagacaccgaggcctgcctggcagaactccggcggctccggggctccggggacttggcaggggagctggaggagctggaggaggagcgcgctgcctgccagggctgccgtgcccggcgcccatgggagctgttccagcatcgggccctgaggagacaggtgacaagcctcgtggttctgggcagtgccatggagctctgcgggaatgactcggtgtacgcctacgcctcctccgtgttccggaaggcaggagtgccggaagcgaagatccagtacgcgatcatcgggactgggagctgcgagctgctcacggcggttgttagttgtgtggtaatcgagagggtgggtcggcgcgtgctgctcatcggtgggtacagcctgatgacctgctgggggagcatcttcactgtggccctgtgcctgcagagctccttcccctggacactctacctggccatggcctgcatctttgccttcatcctcagctttggcattggccctgccggagtgacggggatcctggccacagagctgtttgaccagatggccaggcctgctgcctgcatggtctgcggggcgctcatgtggatcatgctcatcctggtcggcctgggatttccctttatcatggaggccttgtcccacttcctctatgtccctttccttggtgtctgtgtctgtggggccatctacactggcctgttccttcctgagaccaaaggcaagaccttccaagagatctccaaggaattacacagactcaacttccccaggcgggcccagggccccacgtggaggagcctggaggttatccagtcaacagaactctagtcccaaaggggtggccagagccaaagccagctactgtcctgtcctctgcttcctgccagggccctggtcctcactccctcctgcattcctcatttaaggagtgtttattgagcaccctttgtgtgcagacatggctccaggtgcttagcaatcaatggtcagcgtggtattccaggctaaaggtaattaactgacagaaaatcagtaacaacataattacaggctggttgtggcagctcatgactgtaatcccagcactttgggaggccaaggtgggaggatcaattgaggccagagtttgaaaccagcctaggtaacatagtgagaccccctatctctacaaaaaattttaaa

SEQ ID NO: 1714 - protein, 503 aa, Homo sapiens
MEDELEPSLRPRTQIQGRILLLTICAAGIGGTFQFGYNLSIINAPTLHIQEFTNETWQARTGEPLPDHLVLLMWSLIVSLYPLGGLFGALLAGPLAITLGRKKSLLVNNIFVVSAAILFGFSRKAGSFEMIMLGRLLVGVNAGVSMNIQPMYLGESAPKELRGAVAMSSAIFTALGIVMGQVVGLRELLGGPQAWPLLLASCLVPGALQLASLPLLPESPRYLLIDCGDTEACLAELRRLRGSGDLAGELEELEEERAACQGCRARRPWELFQHRALRRQVTSLVVLGSAMELCGNDSVYAYASSVFRKAGVPEAKIQYAIIGTGSCELLTAVVSCVVIERVGRRVLLIGGYSLMTCWGSIFTVALCLQSSFPWTLYLAMACIFAFILSFGIGPAGVTGILATELFDQMARPAACMVCGALMWIMLILVGLGFPFIMEALSHFLYVPFLGVCVCGAIYTGLFLPETKGKTFQEISKELHRLNFPRRAQGPTWRSLEVIQSTEL

SEQ ID NO: 1715 - DNA, 11653 bp, Homo sapiens
atggagcagtcgccgccgccggcgcccgagccgacccaagggccgacccccgcaaggagccgaaggcggcgggagccagagtcgccgccggcgtcggcgccgattcctctctttggtgctgacactattggccagagaagtcctgatggaccggtactgagcaaagctgaatttgttgagaaagttcgtcagagtaatcaggcctgtcatgatggagatttccacacagctattgttctgtataatgaagccctggctgttgaccctcagaactgcatcttatacagcaatagatctgcagcctacatgaaaatccagcagtatgacaaggcactggatgatgcaatcaaagctcgacttctcaatcccaagtggccaaaggcatacttccgacagggtgttgccctccagtaccttggacgtcatgccgatgccctggcagcctttgcatctggactggctcaagaccccaagagtctccagcttctggtggggatggtggaagccgccatgaaatctcccatgagagactccctcgagcccacttatcagcagcttcagaaaatgaaactggacaagagtccctttgtggtcgtgtctgtggttgggcaggaactcctgacagctggccatcatggggcctctgtggttgtcttagaagccgcactgaagattggcacctgcagcctcaaactgagaggttctgttttctctgccctgagcagtgcttactggtctcttggaaatacagagaagagcaccggatatatgcagcaggacttggatgtagccaagaccttaggtgaccagacaggagaatgccgagctcatgggaatctgggctctgcattcttctccaaaggaaattaccgggaggctctcactaaccacaggcatcagttggtactcgccatgaaactcaaagatcgagaggcagcttcatcagccttgagcagtctgggccacgtgtacacagccattggagactaccccaatgcactggccagtcacaaacagtgtgttcttcttgccaagcaatccaaagatgaactttctgaagcccgagaacttggcaacatgggagctgtgtatattgccatgggtgactttgagaatgctgtgcagtgccatgagcagcatctgaagatagccaaggacctggggaacaagcgagaagaggcccgggcttatagcaacctgggcagtgcctatcactaccggaggaactttgacaaggccatgtcttaccataactatgtcctggagctggcacaggagttgatggagaaggctattgagatgcgggcctatgctggactaggccatgctgccaggtgcatgcaggatttggagagagctaaacaataccatgagcagcagctgggcattgctgaggatctcaaggaccgggctgcagaggggcgagcatcctccaatctaggaatcatacaccagatgaaaggtgattatgacactgcactgaaactccacaagacccacctgtgcattgcccaggagctgagtgattatgctgcccagggccgtgcctatgggaatatgggcaatgcctacaatgccctgggcatgtacgaccaggcggtcaaataccatcggcaggagctgcagatctccatggaagtgaatgaccgcgcctcacaggcctccacacatgggaaccttgccgtggcctaccaggccctgggtgcccatgaccgggccctgcaacactatcagaaccacttgaacatcgcccgggagctacgagacatccagagcgaggcccgggccctcagcaacctgggcaatttccactgctctcggggagagtatgtccaggctgccccctattatgaacagtacctccggcttgctcccgaccttcaagacatggaaggagaagggaaggtctgccacaatcttggctatgcccattactgccttggaaactatcaggaggcagtgaagtactacgaacaggatctggcactggctaaagaccttcacgacaagttgagccaagcaaaagcctactgcaacttgggcctagcattcaaggctctgctgaatttcagtaaagctgaagagtgtcagaagtacctactgtccctagcccagtctctgaataattcccaggctaaatttcgagccctaggaaacctgggcgatatattcatctgtaaaaaagatataaatggtgcaataaaattctatgagcagcaactgggcttagctcaccaggtaaaggacagaagattagaagccagtgcatatgcagccctgggcactgcataccgaatgatccagaagtatgacaaggccctgggttatcacacacaggaactggaggtatatcaggagctgagtgacttgccaggggagtgcagagctcatgggcacctggctgctgtctacatggcccttgggaaatacacaatggcattcaagtgttatgaagagcaactggatctagggcaaaagctgaaggatccgagtctggaagcccaggtctatggcaacatgggcatcacaaagatgaacatgaatgtgatggaagaagccattggctactttgagcagcaattggccatgctgcagcagctaagtggaaatgagtctgtgctcgacaggggccgggcctatggcaacctgggggattgctacgaagccctgggtgactatgaggaagctatcaaatactatgaacaatatttatctgtcgcgcagagtctgaatcgcatgcaagaccaagccaaggcttaccggggcctgggaaatggacacagggcaatggggagcttgcagcaagcccttgtgtgctttgaaaagaggctcgtggttgctcatgaacttggagaggccttcaataaagcccaggcctatggagagctgggaagtctgcacagccaattagggaattacgaacaagccatttcctgccttgaacgccagctgaacattgctagagatatgaaagaccgagccctggagagtgacgcagcctgtggcctggggggcgtttaccagcagatgggggagtatgacacagccctgcagtaccaccagcttgatctacagatagcagaggaaaccaacaaccccacgtgccagggccgagcctatgggaacctgggcctgacttatgaatccctgggcaccttcgagagggctgtggtctatcaagaacagcacttgagcattgctgcacagatgaatgacttggcggccaagacggtgtcatatagtagccttggaaggacccatcatgccttgcagaactattcccaagcagtcatgtacttacaggaaggtttaaggttagctgagcaactgggccgaagagaagatgaggcaaaaattcgccatggccttggcctctccctttgggctagtggaaacttggaggaggcccaacaccagctttatagggcatcagccttgtttgaaacaatccgacatgaggcacagctgagcacggactacaaactctccctctttgacctgcagacatcatcctaccaggccttgcagcgggtgctcgtcagcctaggccatcatgatgaagccctggctgtggcagaaaggggacggacaagggcatttgctgatcttctggtggaacgacaaacaggacaacaagactccgacccctactccccagtcactattgatcagatcttagagatggtaaatggccagaggggactagtgctttactattccctggctgcaggctatctgtatagctggctgctggctcctggggcaggaattgtgaagtttcatgaacactacctgggtgagaacacagtggaaaactcaagtgacttccaggccagcagcagtgtaacccttccaacagcaaccggctcagccctggagcagcacattgccagtgtccgggaggccctgggggtggagtctcactactcaagggcctgtgccagcagtgagacagagagtgaagcgggagacatcatggaccagcaatttgaagagatgaacaacaaactcaactcggtcactgaccccactggctttctgcggatggttcgccgcaataacctgtttaacaggagctgccagagcatgacgagcctgttcagtaacactgtgtcaccgacccaggacgggacctcctctcttcccaggaggcagagctcgtttgccaagcccccgctccgtgccctgtatgacctgctcatcgcgcccatggaagggggcctgatgcactccagcggccccgtgggccggcaccggcagctcatcctggttctggagggggagctctacctcattcctttcgccctcctgaagggaagctcctccaatgagtacctctacgagcgcttcggcctccttgctgtcccttccatccgctccctcagcgtgcagtccaagtctcacttacggaagaacccgcccacatactccagctccacatccatggcggctgtcatcggcaaccccaagctaccatcggccgtgatggacaggtggctgtgggggcccatgccatcggccgaggaagaggcctacatggtgtccgagctgctgggctgccagcccctagtgggcagtgtggccaccaaggagagggtcatgagtgccctgacccaggctgaatgcgtccactttgccacccacatctcctggaagctgtcggccttggtcctcacgcccagcatggacggcaaccctgccagcagcaagagctccttcggccacccctacacgatccctgagtccttgcgggtgcaggacgatgccagtgatggggagagcatctcggactgcccgcccctgcaggagctgctgcttactgccgccgacgtcctggacctgcagctgcctgtgaagctggtggtgcttggctcctcccaggagtccaacagcaaagtcacagccgacggggtcatcgcgctgacaagggccttcctggctgccggcgctcagtgtgtcctcgtgtctctgtggcctgtgccagtggctgcttctaagatgttcatccatgccttctactcatccctgctgaacggcctgaaagccagcgccgccctgggggaggccatgaaggtggtgcagagcagcaaggccttctcgcacccctccaactgggcagggttcatgctcatcgggagtgacgttaagctgaacagcccctcatcactcatcggccaggccctcacagagatcctgcagcacccggagcgtgcgcgggacgccctgcgagtgctgctgcacctggtggagaaatccctgcagcgcatccagaatgggcagcgcaatgccatgtacacatcccagcagagtgtggagaacaaagtgggcggcatccctggctggcaggccctcctcaccgctgtgggcttccggctggaccccccaaccagtggcctgccagcggctgtcttcttcccaacctccgacccgggcgaccggctccagcagtgcagcagcacactccagtccctgctgggtctgcccaatcctgccctccaagccctttgcaaactcatcactgcctccgagacgggcgagcagctcatcagccgggctgttaaaaatatggttggaatgctccaccaggtgctggttcagctccaggctggcgagaaggagcaggacttggcatcagctcccattcaggtctccatcagcgtccagctgtggcggctcccgggatgccacgagttcctggcagctctaggttttgatctctgtgaagttggtcaggaggaagtaatcctgaaaaccgggaagcaagctaatcgacggactgtgcacttcgcgctccagtccctgctgtctctgtttgattctactgagctacccaagcgcctcagccttgacagctcctcctccctcgagtctcttgcttctgctcagtctgtttccaacgccctgcccttgggttaccagcaaccccccttctctcccaccggtgcggacagcatcgcctcagatgccatctctgtgtacagtctgagctccattgcctcctcaatgagctttgtctccaaacccgagggtggatcagagggtggaggccccggaggacggcaggaccatgaccggtccaagaacgcttacctgcagagatccaccctgcctaggagccagctgcctccccagacccgccctgcaggcaacaaagatgaagaagaatatgaagggttttctatcatcagtaacgagcccttggcgacctaccaagaaaaccgaaacacatgcttctcaccagaccacaaacaaccccaacctgggacagccggaggcatgagagtctcggtgagctccaaagggagcatcagcactccaaattctccagtgaaaatgactctgattcccagccccaactcacccttccaaaaggtgggaaaactagcaagctcagatacaggagaatcagaccagtctagcacagaaacggacagtaccgtgaaatcccaagaagaaagcaacccaaaactggatccacaagagttagcccagaaaattctggaggagacacagagtcatctcattgcggtggagcgtcttcagaggagcggcggccaggtgagcaagagtaataaccctgaagacggcgttcaggcgcccagcagcactgctgtcttcagagcgtcagaaaccagtgcgttcagcaggcctgttctctcccatcagaagagtcagccatcaccagtcactgttaaaccaaagcccccagccaggagctcctccctgcccaaggtgagttccggatatagcagccccaccacctcagagatgtccatcaaagacagcccgagccagcacagtggccggccatcgcccggctgcgactcacagacttcccagctggaccagcctctctttaaactgaagtaccccagctctccttacagcgctcacatttccaaatcaccaaggaacatgtccccaagctccggccaccagtctcctgctggcagtgcaccctccccagctctctcctactcctcagctggatctgctcgctcaagtccagcagacgctcccgacatagacaaactgaaaatggcagccattgatgaaaaggtgcaggctgtccataacctgaagatgttctggcagagcacaccccagcattccacagggccaatgaagatcttccggggggctcctggcacgatgacttccaaaagggatgtcctcagtctgttgaatttgtcaccacggcacaataagaaggaggagggagtggataagcttgaactgaaggagctgtccctgcagcagcatgacggagctccaccgaaagcccctcccaacggacactggcgcaccgagaccacctcgctgggctcactgccgctgcccgccggccctcccgccacagcccccgcgcgccctttgaggcttccttctggaaatggctacaagttcctgtctccaggaagatttttcccttcttccaaatgctaaagcatcttttatacccactgactctgagcagcctgcagatgggggcctggcgtttgcttcagcccttccctgagtgcagtccccccacagccaccagcaccctcatgatgctgtgctctgcaggcgaggggcaccaccacgtccaaaggctgccacacacactggtggcttttctgggccacattcaccaaaagccaggacttctgtggggctggtacaggaggctcatggaatttcctacacacttcaccaaatgtttgtttacctttgaactccctgcttctcatctttgatatgattcttcaccaggattttgtacaaaaatgatcatggttctggggtggggagaggaaagggagcacatattttgctaagaggtatatatgcagtaccttttatacacagaaatacaaatagagctttttctaaggctttcggttgctggttgggggtgggatatatgaaatttcagttgaattctacaggaaagtgttatattagccaaaaacagaaaaatggtttttaaaatgccaatgatttgtaattaaattgtagcaattttggtctcatgatagtgtaatatctcagcaacaatgcaataattcacattgaaacagcgcttccattctgaactctgctctgcaaatgtcttttgggtcccgctgtcaaccaaacttgaattttcttaaaaaaaaaattatgtaactcttatccaggcattttagaactatgcaattgtgatttaaaatgcaactttgtgcttttaaaacattattgaccttttttgtatatggataaacaacttggttttattatcaatagtactttgcatttatagctattatttttaaaagctcaaaaagttttttaaaatgtcaaattttgaatagtcatcaataagtaattatcaagtttggaaggaaaggttgaaatgactccgtttccttataagcaaaaaaaaaaaaaaaaaaaaaaaaaaaaaaaaaaaaatttccatggctaactagatttaaccagaatcccgccttccaggctcctgttcccttttattagctgctgaattttattcccttttcccaactccaggtccctcagttgtcttatatctaaatcctttgccaggtccccacaatcccagcacctgcctctgtgagctgcccccaggccctcaccttggccctggccagcctcctgtgctcctgctgtctgaaggactggcccctcccccactgctgaagccacacgtacagatcctaagcaacagggccttttgctgggacgtatgcctggattatggccaaccgggaagagagagatgtatcttaaaaagtggaggtggacttctcctacagctctgacggtaacttaaattgttgccagcttgaggcaagacaagggaatcatctagttaggggtaaccattaatttattttataaagaaaggaaatgctgaaagtcgtattagtactgagtttagttggagaatttagataagtaagtatcttttaggtaattctaaaattaaaatcctacccacctcactacagggttcctcatgaaggtgggcggccacctggcctgggccaccagcagcacatggagcagacctgaggggcctggcagggggcactgacctcaggatccccaggtgggggttttaaccatgggtgggatctcagcttctgcgcatacactgacaatctcacctgttcctcagtgtactcctctgaaaagaagaaaggataatatttatccaatctgtgttctcctgagctccatcctaggggtttttaatttaaccaacagccatgttgacaaaagccaacaataagcatgtcttattctagccctgatcccaacactgaaagcgaagtactttataaagaagccagcaattatgagggtttctttatgttagtaggggaaaaaatggtaataaaagtaccagtgtagcaagtgaagaccaaatttatagcactgtgcattagatagcaaaatcaggttcttaacaatgaaaagtaaacctcaagtttctaaatccatatgcagatggttaggctgtccctctcttagcaaatctctcagcctccttctttcccaagtgccaaggatccctggagtaaagctctggggtctgtgctctctttctgtgaggggaaggctgcggccctatttgcccctctctagcaaacacccccaccaccctgccgcttcctgtggttattgagccagctaggagttactcatggactctaacctggttttagtcccatgtacatcgttgttttaggtttcatactgaagagccaatggtttatgtggttttattctgtcttaaatataagtttcaaggaagggaaaacaaaagtgataaaatgatagaacagtctagaggccactgtaaagtcaccgccactttacgtgtatgtcagtcttggtgttcttgtatgagtaaaatggatgtaaaatcataaaatcacagtgaatgtttcaggctacactggaaaaagtatgcacttagaattaaaggaaattgtataattcaccaagatttctttgtgtagatcaggggttggcaactatgacccacaggctaagactggtcagcggtctggtttttcacagccatgagctaagttacctttttaaagggttatataagtaattacatcatatttttgattttgcctttggcccacaccacataaaatattcaatacctggcctttttttttttttttgagacagagtctcgctctgtcacccaggatagagtgcactggtgcgattttggctcactgcaacctcttcctcctgggttcaagcaattctccctgcctcagcctctaagtagctgggactacaggcacccactaccatgccttgctaatttttgtatttttaatagagatggggtttcaccatgttggccaggctggtctcgaactcctgacctcaggggatccgcccgccttggcctcccaaactgctgggattacaggtgagccactgcgcccagccaatacctggccttttaagaagtttgctgactcctggtatggatgacagaaaatggaataacgttttgtttctccagtctaggaaaagcaagtcaggtagtggatagactgactggcgtccggggagcccagggtatgtgagggccacgtggatggaagcaaatgcctcctgcatagcccttggctctttgtcccacttgggaggagtccatggatgtaatatttacaaaacaattttttccttaccatttgcagaaagcattgcatatatttccttttagctcaggaaactggcatgccccaccctctgctactccatcagatgtaaatacaatgactataagccgtacaactcccctctcttagaaacctcagcaggaccacagagcaagggagtcaaagctttcttaattctctccagtaaatgactcaactaatttgatttttttaattaagtcaaaatatcaagagaaaaattgctactaaaacttacattttgatccacactgatgtgcaacacaaaatgaaagttttcacctccattccattttttaaaaattcacggtccacactgaaacttgctgggttttagcaggagacaaaggtgtcacccacgctgtcctcatcctgctctctctgtcccagtgacgctccagcatatgatcactgcagccggtccctggcccgtgccgattctgccacctcccagccacacacatttgcagacccacaagaagaactgtagccttgataatttcagttcaggctggaaaaatgccatgcaataatctggtttgctttcagtaagtaggcaacaagtgaaaactgtataattttcatcacctattctgctgttctatctaaaatgagtgtacctgtggtttgtgaactgggcccttgtttgtgccagatccttcaaagatgttccctgtcaggacacctgtggccctgcccctcctcagacaccttcccactggcattcacgttccttatatgcagtgttagccatctttggcctacgtggactttttttgtaaattacaccatttccagacattaaactttttatattatgaaatttaccatgtaaaaagaacttcatatttttattgagattgctaaggcacttggccttcctcctttgtgattttcagtgtctattaaagcatgagttccctcagttttaa

SEQ ID NO: 1716 - protein, 2481 aa, Homo sapiens
MEQSPPPAPEPTQGPTPARSRRRREPESPPASAPIPLFGADTIGQRSPDGPVLSKAEFVEKVRQSNQACHDGDFHTAIVLYNEALAVDPQNCILYSNRSAAYMKIQQYDKALDDAIKARLLNPKWPKAYFRQGVALQYLGRHADALAAFASGLAQDPKSLQLLVGMVEAAMKSPMRDSLEPTYQQLQKMKLDKSPFVVVSVVGQELLTAGHHGASVVVLEAALKIGTCSLKLRGSVFSALSSAYWSLGNTEKSTGYMQQDLDVAKTLGDQTGECRAHGNLGSAFFSKGNYREALTNHRHQLVLAMKLKDREAASSALSSLGHVYTAIGDYPNALASHKQCVLLAKQSKDELSEARELGNMGAVYIAMGDFENAVQCHEQHLKIAKDLGNKREEARAYSNLGSAYHYRRNFDKAMSYHNYVLELAQELMEKAIEMRAYAGLGHAARCMQDLERAKQYHEQQLGIAEDLKDRAAEGRASSNLGIIHQMKGDYDTALKLHKTHLCIAQELSDYAAQGRAYGNMGNAYNALGMYDQAVKYHRQELQISMEVNDRASQASTHGNLAVAYQALGAHDRALQHYQNHLNIARELRDIQSEARALSNLGNFHCSRGEYVQAAPYYEQYLRLAPDLQDMEGEGKVCHNLGYAHYCLGNYQEAVKYYEQDLALAKDLHDKLSQAKAYCNLGLAFKALLNFSKAEECQKYLLSLAQSLNNSQAKFRALGNLGDIFICKKDINGAIKFYEQQLGLAHQVKDRRLEASAYAALGTAYRMIQKYDKALGYHTQELEVYQELSDLPGECRAHGHLAAVYMALGKYTMAFKCYEEQLDLGQKLKDPSLEAQVYGNMGITKMNMNVMEEAIGYFEQQLAMLQQLSGNESVLDRGRAYGNLGDCYEALGDYEEAIKYYEQYLSVAQSLNRMQDQAKAYRGLGNGHRAMGSLQQALVCFEKRLVVAHELGEAFNKAQAYGELGSLHSQLGNYEQAISCLERQLNIARDMKDRALESDAACGLGGVYQQMGEYDTALQYHQLDLQIAEETNNPTCQGRAYGNLGLTYESLGTFERAVVYQEQHLSIAAQMNDLAAKTVSYSSLGRTHHALQNYSQAVMYLQEGLRLAEQLGRREDEAKIRHGLGLSLWASGNLEEAQHQLYRASALFETIRHEAQLSTDYKLSLFDLQTSSYQALQRVLVSLGHHDEALAVAERGRTRAFADLLVERQTGQQDSDPYSPVTIDQILEMVNGQRGLVLYYSLAAGYLYSWLLAPGAGIVKFHEHYLGENTVENSSDFQASSSVTLPTATGSALEQHIASVREALGVESHYSRACASSETESEAGDIMDQQFEEMNNKLNSVTDPTGFLRMVRRNNLFNRSCQSMTSLFSNTVSPTQDGTSSLPRRQSSFAKPPLRALYDLLIAPMEGGLMHSSGPVGRHRQLILVLEGELYLIPFALLKGSSSNEYLYERFGLLAVPSIRSLSVQSKSHLRKNPPTYSSSTSMAAVIGNPKLPSAVMDRWLWGPMPSAEEEAYMVSELLGCQPLVGSVATKERVMSALTQAECVHFATHISWKLSALVLTPSMDGNPASSKSSFGHPYTIPESLRVQDDASDGESISDCPPLQELLLTAADVLDLQLPVKLVVLGSSQESNSKVTADGVIALTRAFLAAGAQCVLVSLWPVPVAASKMFIHAFYSSLLNGLKASAALGEAMKVVQSSKAFSHPSNWAGFMLIGSDVKLNSPSSLIGQALTEILQHPERARDALRVLLHLVEKSLQRIQNGQRNAMYTSQQSVENKVGGIPGWQALLTAVGFRLDPPTSGLPAAVFFPTSDPGDRLQQCSSTLQSLLGLPNPALQALCKLITASETGEQLISRAVKNMVGMLHQVLVQLQAGEKEQDLASAPIQVSISVQLWRLPGCHEFLAALGFDLCEVGQEEVILKTGKQANRRTVHFALQSLLSLFDSTELPKRLSLDSSSSLESLASAQSVSNALPLGYQQPPFSPTGADSIASDAISVYSLSSIASSMSFVSKPEGGSEGGGPGGRQDHDRSKNAYLQRSTLPRSQLPPQTRPAGNKDEEEYEGFSIISNEPLATYQENRNTCFSPDHKQPQPGTAGGMRVSVSSKGSISTPNSPVKMTLIPSPNSPFQKVGKLASSDTGESDQSSTETDSTVKSQEESNPKLDPQELAQKILEETQSHLIAVERLQRSGGQVSKSNNPEDGVQAPSSTAVFRASETSAFSRPVLSHQKSQPSPVTVKPKPPARSSSLPKVSSGYSSPTTSEMSIKDSPSQHSGRPSPGCDSQTSQLDQPLFKLKYPSSPYSAHISKSPRNMSPSSGHQSPAGSAPSPALSYSSAGSARSSPADAPDIDKLKMAAIDEKVQAVHNLKMFWQSTPQHSTGPMKIFRGAPGTMTSKRDVLSLLNLSPRHNKKEEGVDKLELKELSLQQHDGAPPKAPPNGHWRTETTSLGSLPLPAGPPATAPARPLRLPSGNGYKFLSPGRFFPSSKC

SEQ ID NO: 1717 - DNA, 4194 bp, Homo sapiens
gcggccgcgctcgtctcgccgggctgttcgcgggcaggccctgccctgaagggacgaatcggcttggagcgcgggaggtggagtcggccccggcggtcgctccctggacccaacccgaggctgacccaggcccctgcccatgcggggcgcccctggctcggaagagtcccccgggccgggagcagctccaggcagcggccccggaggaagaggaagaagggacagtgctcagcttgggggacccggaccctcgccgcggcatttggagccgggggcagtcccgaactctgtgcttggcaccgccgctccgagtagggcagcgcctgccgggaccctgacccggaccccctgcgcctcgtaggcggcggcgccgccgcgccaccctgttcttccgtgtctccctctgcctggcggcagtcacggccaagaacctacattaagaaacgcattcagatgcatcagccgtttgtaaagcacctgtcgtgagccagagagtattatgagggaggccgaggacttcatgctccggacagagaaacggcgctgggattagggattgccacttctgagaggatgctgggaatctgcagggggagacggaaattcttggctgcctcgttgagtcttctctgcatcccagccatcacctggatttacctgttttctgggagcttcgaagatggaaagcccgtgtctctgtcaccgctggagtcccaggcacacagccccaggtacacggcctccagccagcgggagcgcgagagcctggaggtgcgcatgcgcgaggtggaggaggagaaccgcgccctccgcaggcagctcagcctggcccagggccgagccccatcccatcgccgaggcaaccactccaagacctactccatggaggagggcactggagacagcgagaaccttcgggctggcatcgtggcaggcaacagctccgagtgtgggcagcagccggtcgtggagaaatgcgagacaatccacgttgctattgtctgcgccggatacaatgccagccgggatgtcgtcaccctggtcaaatccgtcctgttccatagacggaaccctctgcacttccaccttattgctgactccattgcggagcagatcctggccacgctcttccagacctggatggtgcccgctgtgcgtgtggacttctacaatgcagacgagctcaagtctgaagtttcctggatccccaataaacattactctgggatttatggtctgatgaagcttgtcctgaccaagactcttcctgccaacctggagagagtcatcgtccttgacacggatatcacctttgccactgacattgcagagctgtgggctgtgttccacaagttcaaaggtcagcaagtcctgggcttggtggagaaccagagtgactggtaccttggaaacctgtggaaaaatcaccgcccatggccagcccttggaagaggctacaacacaggggtgatcctgttacttctggataagctgcggaagatgaaatgggagcagatgtggaggctgaccgcagagagggagctcatgggcatgctctctacatccttagctgaccaggatattttcaatgccgtcatcaaacaaaaccccttccttgtgtaccagctcccctgcttctggaatgtgcagctgtcagaccacacccgctccgagcagtgctacagagacgtgtctgatctaaaggtcattcactggaactcccccaagaagctccgggtgaagaacaagcatgtggagttttttcgcaacctctacctgaccttcctggagtatgacggcaatcttctgaggcgggaactgtttggctgccccagtgaggctgatgtcaacagtgaaaacctccagaagcagctgtctgagctggacgaggacgacctgtgctatgagttccggcgagagcgcttcactgtccaccgcacccacctgtacttcctgcactacgagtatgagcctgcagcagacagcacggacgtcaccctggtcgctcagctgtccatggacaggctccagatgctggaggccatctgcaagcactgggaggggcccatcagcctggccctctacctgtcagacgccgaggcccagcagttcctccgctacgcacagggctctgaggtgcttatgagccgccacaacgtgggctaccacatcgtgtacaaggagggccagttctaccccgtgaacctgctgcgcaacgtggccatgaagcacatcagcactccctacatgttcctgtctgacattgacttcctgcccatgtatgggctctatgagtacctcaggaagtctgtcatccagctcgatcttgccaacaccaagaaagcaatgattgtccccgcgttcgagacactgcgctaccggctgtccttccccaagtcaaaagcggagttgctgtcaatgctggacatggggaccctcttcacattcaggtaccacgtctggacgaaaggccacgcacccacaaacttcgccaagtggcggaccgccaccacgccttaccgggttgagtgggaggccgattttgagccgtatgttgttgtgagacgtgactgcccggagtacgaccggaggtttgtaggctttggctggaacaaagtggctcatatcatggagctggatgtgcaggagtatgagttcattgtgctgcccaacgcctacatgatccacatgcctcatgcccccagcttcgacattaccaagttccgttccaacaagcaataccgcatctgtctcaaaaccctcaaggaagagtttcagcaggacatgtcccgccgctacggctttgctgccctgaaatatctcacagccgagaacaacagctagcaccaagaagcccaccactagggggagacatgctgtaggggaagtgccactcgctgtttggggcccggccttcaaattcaaaattgagccatgctttttcggtttgtttttatttatctctttggcccagccaagctgccctcactacagagaccttggacaaggatccagccagtccctctctgccccacaaccctgcattcccagaggttagctatgcagcccacctagatgagtctcttcaagaatgggaaatcaaggggtgacagggagtaaaagggttatcatcttactgcaaagccacaagatcagggcagggctttaggatgttctggatgctttttaataattatgcttcccatcataactggggagaaagggaagtcagggttctaggggttattcgtcccaggaaatagaagtgaaattgtctttattaagtgaaaactttcccctttgccctgcaatgtagctgggcattcaaacggagggcaaaccgatgatctaaaccaaccacttggaaaaacccaatggggacattgtaaccagagggtcctggaggtggggttgatgggtttccttatccccaaagtcactcctgttttgttttgtttttctttgggggttttgtttatttttggggctggcaatccaaaatagaaaatctgatcctttgaggctctaaaggaaaatcagctgcctctaccaaccaccctctatcagcagtggcccaggaaggaggtcaagcatcttcggccgatatttaaacatgggcagcttccttcaggatgatcaccgaggctcccgtgactttgaactccctactctccagaatccaggggctatagcgatggggactgcggaattacgagggctggctgttttacaccggtcacattttctattggcagtgactgattcatgggaaagggctttgaaggaactacttcagtgcacacacaaggtacgaacctctcaggcctttcgaagaactttcataattcatgaaagcccagttctgaagattcacgtatccatctggagacctacaggaagaaagtgattgggttcctctggttcttgcctgcttcactgtggatgggaagaggtgacaacctcagtctccctttgggacctgtccaagggtaggcaaccaccttcaccttcacacagattgaggagacactggactttttacccattttctttaatcttcaatattaatattgtgtttacattgatgagaacaagagttaatgccctaccctctgctgggctgtttgtattgagttgcaatgtgaccagcgaaagctgcatttaataaatgaaagtacagactgtttcttcccc

SEQ ID NO: 1718 - protein, 756 aa, Homo sapiens
MLGICRGRRKFLAASLSLLCIPAITWIYLFSGSFEDGKPVSLSPLESQAHSPRYTASSQRERESLEVRMREVEEENRALRRQLSLAQGRAPSHRRGNHSKTYSMEEGTGDSENLRAGIVAGNSSECGQQPVVEKCETIHVAIVCAGYNASRDVVTLVKSVLFHRRNPLHFHLIADSIAEQILATLFQTWMVPAVRVDFYNADELKSEVSWIPNKHYSGIYGLMKLVLTKTLPANLERVIVLDTDITFATDIAELWAVFHKFKGQQVLGLVENQSDWYLGNLWKNHRPWPALGRGYNTGVILLLLDKLRKMKWEQMWRLTAERELMGMLSTSLADQDIFNAVIKQNPFLVYQLPCFWNVQLSDHTRSEQCYRDVSDLKVIHWNSPKKLRVKNKHVEFFRNLYLTFLEYDGNLLRRELFGCPSEADVNSENLQKQLSELDEDDLCYEFRRERFTVHRTHLYFLHYEYEPAADSTDVTLVAQLSMDRLQMLEAICKHWEGPISLALYLSDAEAQQFLRYAQGSEVLMSRHNVGYHIVYKEGQFYPVNLLRNVAMKHISTPYMFLSDIDFLPMYGLYEYLRKSVIQLDLANTKKAMIVPAFETLRYRLSFPKSKAELLSMLDMGTLFTFRYHVWTKGHAPTNFAKWRTATTPYRVEWEADFEPYVVVRRDCPEYDRRFVGFGWNKVAHIMELDVQEYEFIVLPNAYMIHMPHAPSFDITKFRSNKQYRICLKTLKEEFQQDMSRRYGFAALKYLTAENNS

SEQ ID NO: 1719 - DNA, 4131 bp, Homo sapiens
gcggccgcgctcgtctcgccgggctgttcgcgggcaggccctgccctgaagggacgaatcggcttggagcgcgggaggtggagtcggccccggcggtcgctccctggacccaacccgaggctgacccaggcccctgcccatgcggggcgcccctggctcggaagagtcccccgggccgggagcagctccaggcagcggccccggaggaagaggaagaagggacagtgctcagcttgggggacccggaccctcgccgcggcatttggagccgggggcagtcccgaactctgtgcttggcaccgccgctccgagtagggcagcgcctgccgggaccctgacccggaccccctgcgcctcgtaggcggcggcgccgccgcgccaccctgttcttccgtgtctccctctgcctggcggcagtcacggccaagagagtattatgagggaggccgaggacttcatgctccggacagagaaacggcgctgggattagggattgccacttctgagaggatgctgggaatctgcagggggagacggaaattcttggctgcctcgttgagtcttctctgcatcccagccatcacctggatttacctgttttctgggagcttcgaagatggaaagcccgtgtctctgtcaccgctggagtcccaggcacacagccccaggtacacggcctccagccagcgggagcgcgagagcctggaggtgcgcatgcgcgaggtggaggaggagaaccgcgccctccgcaggcagctcagcctggcccagggccgagccccatcccatcgccgaggcaaccactccaagacctactccatggaggagggcactggagacagcgagaaccttcgggctggcatcgtggcaggcaacagctccgagtgtgggcagcagccggtcgtggagaaatgcgagacaatccacgttgctattgtctgcgccggatacaatgccagccgggatgtcgtcaccctggtcaaatccgtcctgttccatagacggaaccctctgcacttccaccttattgctgactccattgcggagcagatcctggccacgctcttccagacctggatggtgcccgctgtgcgtgtggacttctacaatgcagacgagctcaagtctgaagtttcctggatccccaataaacattactctgggatttatggtctgatgaagcttgtcctgaccaagactcttcctgccaacctggagagagtcatcgtccttgacacggatatcacctttgccactgacattgcagagctgtgggctgtgttccacaagttcaaaggtcagcaagtcctgggcttggtggagaaccagagtgactggtaccttggaaacctgtggaaaaatcaccgcccatggccagcccttggaagaggctacaacacaggggtgatcctgttacttctggataagctgcggaagatgaaatgggagcagatgtggaggctgaccgcagagagggagctcatgggcatgctctctacatccttagctgaccaggatattttcaatgccgtcatcaaacaaaaccccttccttgtgtaccagctcccctgcttctggaatgtgcagctgtcagaccacacccgctccgagcagtgctacagagacgtgtctgatctaaaggtcattcactggaactcccccaagaagctccgggtgaagaacaagcatgtggagttttttcgcaacctctacctgaccttcctggagtatgacggcaatcttctgaggcgggaactgtttggctgccccagtgaggctgatgtcaacagtgaaaacctccagaagcagctgtctgagctggacgaggacgacctgtgctatgagttccggcgagagcgcttcactgtccaccgcacccacctgtacttcctgcactacgagtatgagcctgcagcagacagcacggacgtcaccctggtcgctcagctgtccatggacaggctccagatgctggaggccatctgcaagcactgggaggggcccatcagcctggccctctacctgtcagacgccgaggcccagcagttcctccgctacgcacagggctctgaggtgcttatgagccgccacaacgtgggctaccacatcgtgtacaaggagggccagttctaccccgtgaacctgctgcgcaacgtggccatgaagcacatcagcactccctacatgttcctgtctgacattgacttcctgcccatgtatgggctctatgagtacctcaggaagtctgtcatccagctcgatcttgccaacaccaagaaagcaatgattgtccccgcgttcgagacactgcgctaccggctgtccttccccaagtcaaaagcggagttgctgtcaatgctggacatggggaccctcttcacattcaggtaccacgtctggacgaaaggccacgcacccacaaacttcgccaagtggcggaccgccaccacgccttaccgggttgagtgggaggccgattttgagccgtatgttgttgtgagacgtgactgcccggagtacgaccggaggtttgtaggctttggctggaacaaagtggctcatatcatggagctggatgtgcaggagtatgagttcattgtgctgcccaacgcctacatgatccacatgcctcatgcccccagcttcgacattaccaagttccgttccaacaagcaataccgcatctgtctcaaaaccctcaaggaagagtttcagcaggacatgtcccgccgctacggctttgctgccctgaaatatctcacagccgagaacaacagctagcaccaagaagcccaccactagggggagacatgctgtaggggaagtgccactcgctgtttggggcccggccttcaaattcaaaattgagccatgctttttcggtttgtttttatttatctctttggcccagccaagctgccctcactacagagaccttggacaaggatccagccagtccctctctgccccacaaccctgcattcccagaggttagctatgcagcccacctagatgagtctcttcaagaatgggaaatcaaggggtgacagggagtaaaagggttatcatcttactgcaaagccacaagatcagggcagggctttaggatgttctggatgctttttaataattatgcttcccatcataactggggagaaagggaagtcagggttctaggggttattcgtcccaggaaatagaagtgaaattgtctttattaagtgaaaactttcccctttgccctgcaatgtagctgggcattcaaacggagggcaaaccgatgatctaaaccaaccacttggaaaaacccaatggggacattgtaaccagagggtcctggaggtggggttgatgggtttccttatccccaaagtcactcctgttttgttttgtttttctttgggggttttgtttatttttggggctggcaatccaaaatagaaaatctgatcctttgaggctctaaaggaaaatcagctgcctctaccaaccaccctctatcagcagtggcccaggaaggaggtcaagcatcttcggccgatatttaaacatgggcagcttccttcaggatgatcaccgaggctcccgtgactttgaactccctactctccagaatccaggggctatagcgatggggactgcggaattacgagggctggctgttttacaccggtcacattttctattggcagtgactgattcatgggaaagggctttgaaggaactacttcagtgcacacacaaggtacgaacctctcaggcctttcgaagaactttcataattcatgaaagcccagttctgaagattcacgtatccatctggagacctacaggaagaaagtgattgggttcctctggttcttgcctgcttcactgtggatgggaagaggtgacaacctcagtctccctttgggacctgtccaagggtaggcaaccaccttcaccttcacacagattgaggagacactggactttttacccattttctttaatcttcaatattaatattgtgtttacattgatgagaacaagagttaatgccctaccctctgctgggctgtttgtattgagttgcaatgtgaccagcgaaagctgcatttaataaatgaaagtacagactgtttcttcccc

SEQ ID NO: 1720 - protein, 756 aa, Homo sapiens; identical to SEQ ID NO: 1718

SEQ ID NO: 1721 - DNA, 2310 bp, Homo sapiens
ggtggcgctggcggttgctgtcagctgattcccggggttggtggcagcggcggtagcagcaatggactttctcctggggaacccgttcagctctccagtgggacagcgcatcgagaaagccacagatggctccctgcagagcgaggactgggccctcaacatggagatctgcgacatcatcaacgagacggaggaaggtcccaaagatgccctccgagcagtaaagaagagaatcgtggggaataagaacttccacgaggtgatgctggctctcacagtcttagaaacctgtgtcaagaactgcgggcaccgcttccacgtgctggtggccagccaggacttcgtggagagtgtgctggtgaggaccatcctgcccaagaacaacccacccaccatcgtgcatgacaaagtgctcaacctcatccagtcctgggctgacgcgttccgcagctcgcccgatctgacaggtgtggtcaccatctatgaggacctgcggaggaaaggcctggagttccccatgactgacctggacatgctgtcacccatccacacaccccagaggaccgtgttcaactcagagacacaatcaggacaggattctgtgggcactgactccagccagcaagaggactctggccagcatgctgcccctctgcccgccccgcccatactctccggtgacacgcccatagcaccaaccccggaacagattgggaagctgcgcagtgagctggagatggtgagtgggaacgtgagggtgatgtcggagatgctgacggagctggtgcccacccaggccgagcccgcagacctggagctgctgcaggagctcaaccgcacgtgccgagccatgcagcagcgggtcctggagctcatccctcagatcgccaatgagcagctgacagaggagctgctcatcgtcaatgacaatctcaacaatgtgttcctgcgccatgaacggtttgaacggttccgaacaggccagaccaccaaggccccaagtgaggccgagccggcagctgacctgatcgacatgggccctgacccagcagccaccggcaacctctcatcccagctggcaggaatgaacctgggctccagcagtgtgagagctggcctgcagtctctggaggcctctggtcgactggaagatgagtttgacatgtttgcgctgacacggggcagctcactggctgaccaacggaaagaggtaaaatacgaagccccccaagcaacagacggcctggctggagccctggacgcccggcagcagagcactggcgcgatcccagtcacccaggcctgcctcatggaggacatcgagcagtggctgtccactgacgtgggtaatgatgcggaagagcctaagggggtcaccagcgaagaatttgacaaattcctggaagaacgggccaaagccgcggaccgattgcccaacctctccagcccctcagctgaggggcccccgggtcccccatctggcccagcgccccggaagaagacccaggagaaagatgatgacatgctgtttgccttatgagtgtggggtctggcaccctgcagcccaggtccccactgctctcacacccttaggctgggacctccctccctcctctggtgttaaggctgctttgggggtggcttgttacccccttttcctcctctttgaagacggagctgccccagctgtggctgggggtgtggaggcagtgggatgaactgggggacaggtctgcgctgcagtgggatctggctgctctgcctcctttcccaccccagctgaccatgagactttgctgagaagtggaggccccaggacaggctggctggctggctggctgcttgacccagtgtgactctccttcactgagtgataccctgctccgggcccatgccccaaggagcccttcagagcccacactgccagtcgaggcctggctggaggctggccacagtggaaattctgccgagcctcttgtcccttccctgctctgctgcatggggccccatggctttggctggccactgagggtagggtgtggaggtgtggaggccccctgaggagctgcggcggcccaggtacgaagctgcaactctgcgcgcagtgggcgagatctcatcagccccaggctgcaggtgaggcttcaggggatgctgggccccactgcccctccgctgccttgccctccatccttcctctgttccttctggccgggcaccacagcactggggctcacctcttggttgatcctcttgtactgggagaggtgccttttgtatccccaattaaaggtagaaaaccaccctgct

SEQ ID NO: 1722 - protein, 492 aa, Homo sapiens
MDFLLGNPFSSPVGQRIEKATDGSLQSEDWALNMEICDIINETEEGPKDALRAVKKRIVGNKNFHEVMLALTVLETCVKNCGHRFHVLVASQDFVESVLVRTILPKNNPPTIVHDKVLNLIQSWADAFRSSPDLTGVVTIYEDLRRKGLEFPMTDLDMLSPIHTPQRTVFNSETQSGQDSVGTDSSQQEDSGQHAAPLPAPPILSGDTPIAPTPEQIGKLRSELEMVSGNVRVMSEMLTELVPTQAEPADLELLQELNRTCRAMQQRVLELIPQIANEQLTEELLIVNDNLNNVFLRHERFERFRTGQTTKAPSEAEPAADLIDMGPDPAATGNLSSQLAGMNLGSSSVRAGLQSLEASGRLEDEFDMFALTRGSSLADQRKEVKYEAPQATDGLAGALDARQQSTGAIPVTQACLMEDIEQWLSTDVGNDAEEPKGVTSEEFDKFLEERAKAADRLPNLSSPSAEGPPGPPSGPAPRKKTQEKDDDMLFAL

SEQ ID NO: 1723 - DNA, 1949 bp, Homo sapiens
gggagagcagtttacgacagcgccggtcgtgtttacggcggcgcccgctgcgcgcgcatgtttcctcttttcctggtttctcaagagtgctgctgctaacgcggtccccggcacgcaccatctgttgccatcccggccggccgaggccattgcagattttggaagatggcaaagttcatgacacccgtgatccaggacaacccctcaggctggggtccctgtgcggttcccgagcagtttcgggatatgccctaccagccgttcagcaaaggagatcggctaggaaaggttgcagactggacaggagccacataccaagataagaggtacacaaataagtactcctctcagtttggtggtggaagtcaatatgcttatttccatgaggaggatgaaagtagcttccagctggtggatacagcgcgcacacagaagacggcctaccagcggaatcgaatgagatttgcccagaggaacctccgcagagacaaagatcgtcggaacatgttgcagttcaacctgcagatcctgcctaagagtgccaaacagaaagagagagaacgcattcgactgcagaaaaagttccagaaacaatttggggttaggcagaaatgggatcagaaatcacagaaaccccgagactcttcagttgaagttcgtagtgattgggaagtgaaagaggaaatggattttcctcagttgatgaagatgcgctacttggaagtatcagagccacaggacattgagtgttgtggggccctagaatactacgacaaagcctttgaccgcatcaccacgaggagtgagaagccactgcggagcatcaagcgcatcttccacactgtcaccaccacagacgaccctgtcatccgcaagctggcaaaaactcaggggaatgtgtttgccactgatgccatcctggccacgctgatgagctgtacccgctcagtgtattcctgggatattgtcgtccagagagttgggtccaaactcttctttgacaagagagacaactctgactttgacctcctgacagtgagtgagactgccaatgagccccctcaagatgaaggtaattccttcaattcaccccgcaacctggccatggaggcaacctacatcaaccacaatttctcccagcagtgcttgagaatggggaaggaaagatacaacttccccaacccaaacccgtttgtggaggacgacatggataagaatgaaatcgcctctgttgcgtaccgttaccgcaggtggaagcttggagatgatattgaccttattgtccgttgtgagcacgatggcgtcatgactggagccaacggggaagtgtccttcatcaacatcaagacactcaatgagtgggattccaggcactgtaatggcgttgactggcgtcagaagctggactctcagcgaggggctgtcattgccacggagctgaagaacaacagctacaagttggcccggtggacctgctgtgctttgctggctggatctgagtacctcaagcttggttatgtgtctcggtaccacgtgaaagactcctcacgccacgtcatcctaggcacccagcagttcaagcctaatgagtttgccagccagatcaacctgagcgtggagaatgcctggggcattttacgctgcgtcattgacatctgcatgaagctggaggagggcaaatacctcatcctcaaggaccccaacaagcaggtcatccgtgtctacagcctccctgatggcaccttcagctctgatgaagatgaggaggaagaggaggaggaagaagaggaagaagaagaggaagaaacttaaaccagtgatgtggagctggagtttgtccttccaccgagactacgagggcctttgatgcttagtggaatgtgtgtctaacttgctctctgacatttagcagatgaaataaaatatatatctgtttagtctttccctca

SEQ ID NO: 1724 - protein, 548 aa, Homo sapiens
MAKFMTPVIQDNPSGWGPCAVPEQFRDMPYQPFSKGDRLGKVADWTGATYQDKRYTNKYSSQFGGGSQYAYFHEEDESSFQLVDTARTQKTAYQRNRMRFAQRNLRRDKDRRNMLQFNLQILPKSAKQKERERIRLQKKFQKQFGVRQKWDQKSQKPRDSSVEVRSDWEVKEEMDFPQLMKMRYLEVSEPQDIECCGALEYYDKAFDRITTRSEKPLRSIKRIFHTVTTTDDPVIRKLAKTQGNVFATDAILATLMSCTRSVYSWDIVVQRVGSKLFFDKRDNSDFDLLTVSETANEPPQDEGNSFNSPRNLAMEATYINHNFSQQCLRMGKERYNFPNPNPFVEDDMDKNEIASVAYRYRRWKLGDDIDLIVRCEHDGVMTGANGEVSFINIKTLNEWDSRHCNGVDWRQKLDSQRGAVIATELKNNSYKLARWTCCALLAGSEYLKLGYVSRYHVKDSSRHVILGTQQFKPNEFASQINLSVENAWGILRCVIDICMKLEEGKYLILKDPNKQVIRVYSLPDGTFSSDEDEEEEEEEEEEEEEEET

SEQ ID NO: 1725 - DNA, 1005 bp, Homo sapiens
atgaagtgcatcttggtggccattgagggcacagaggccctcttctactggacggatgaggagtttgaagagagtctccagctgaagttcgggcagtcagagaatgaggaagaagagctccctgccctacaggaccagctcagccccctcctagccccggtcatcatctcctccatgacgatgctggagaagctctcggacacctacacctgcttctccatggaaaacagcaactccctgtatgtccttcacctgtttggagaatgcctgttcattgccatcaatggcgaccacaccaagagcgagggggacctgcagcggaagctgtacatgctcgaggcatttctcaaatgcacaaacattaccagctttctcgtggtctctcccgccctctctggctctgccctcaggctgcggcccccagacctggggcagcgtgtccagctgtgggagcactttcagagcctgctgtggacctatagccgcctgcgggagcaggaacagtgcttcgccatggaggtgattactgggcgcaggagtccgcaggacttggagctgtcagaaatctttgaagacagttccttcaaccctcccctcctcctcccacaaaattatattgaggtggaacaggaggggaaagcagtggagaagaacacagcgctaaagtgccaatcacacctctcgcgtctcggcgcctcggaggctaatgaggacgcctggcgaaacgcagtaacggatttccgggtggaccttcgctttacggctcgtgagttcttccgcccaacccagaggaagcgggagagcagtttacgacagcgccggtcgtgtttacggcggcgcccgctgcgcgcgcatgtttcctcttttcctggtttctcaagagtgctgctgctaacgcggtccccggcacgcaccatctgttgccatcccggccggccgaggccattgcaggtgagcggcgtgtttcataggttcctgcggccctccggagccggttcggactag

SEQ ID NO: 1726 - protein, 334 aa, Homo sapiens
MKCILVAIEGTEALFYWTDEEFEESLQLKFGQSENEEEELPALQDQLSPLLAPVIISSMTMLEKLSDTYTCFSMENSNSLYVLHLFGECLFIAINGDHTKSEGDLQRKLYMLEAFLKCTNITSFLVVSPALSGSALRLRPPDLGQRVQLWEHFQSLLWTYSRLREQEQCFAMEVITGRRSPQDLELSEIFEDSSFNPPLLLPQNYIEVEQEGKAVEKNTALKCQSHLSRLGASEANEDAWRNAVTDFRVDLRFTAREFFRPTQRKRESSLRQRRSCLRRRPLRAHVSSFPGFSRVLLLTRSPARTICCHPGRPRPLQVSGVFHRFLRPSGAGSD

SEQ ID NO: 1727 - DNA, 1854 bp, Homo sapiens
agactgcgggcctgcggggaagggcgaagcggggcgggaccgggggcgggagcagcgcggggcgggaccctacccgcggcccacgcggagccaggaggcgcggactacagctcccggcctgccccgcgtgcggtccccgcccgcccccagcgcccgggaggaggatgcagacgccgcggccggcgatgaggatggaggccggggaggcagcgccgccggcgggggcgggcggccgcgccgcaggcggctggggcaagtgggtgcggctcaacgtggggggcacggtgttcctgaccacccggcagacgctgtgccgcgagcagaagtccttcctcagccgcctgtgccagggggaagagctgcagtcggaccgggatgagaccggggcctacctcattgaccgtgaccccacctacttcgggcccatcctgaacttcctccggcatggcaagctggtgctggacaaggacatggctgaggagggggtcctggaggaagccgagttctacaacatcggcccgctgatccgcatcatcaaagaccggatggaagagaaggactacacggtcacccaggtcccacccaagcacgtgtaccgcgtgctgcagtgccaggaggaggagctcacgcaaatggtctccaccatgtctgatggctggcgcttcgagcagctggtgaacatcggctcctcctacaactacggcagcgaggaccaggcagagttcctgtgtgtggtgtccaaggagctccacagcaccccaaacgggctgagctcagagtccagccgcaaaaccaagagcacggaggagcagctggaggagcagcagcagcaggaggaggaggtggaggaggtggaggtggaacaggtgcaggtggaggcagatgcacaggagaaaggttcccgtccgcaccctctcagacctgaggctgagcttgcagtgagggcttctcctcggcccctcgcccgcccccagagctgccatccctgctgttacaagccagaggcacccggatgtgaggccccagatcacctccagggacttggggttcccatctgaaatcctttatttttgtaccatggggtgggccccgggcctgagaaggaagaagcaccctctccccggcctcctctgtctgcacccgtggggctgtgacttactcctgcctccaggggcggggcggggcccccctgggacctcttaaggcccaaggtgggccccaggacctctgggcagagtggactgctcatggcagatgtgtggcaatgtctggctgtgtctctccggcacctgcgtcccctctcccgggctcccctgctgcatggtggatgtgctccttcctggcccggtcacattgcctccttgagccttagtccagggggtcactcctcccaccccacctacctcacagggttgttgtgagggtgcacagaggagcaaagtccctgaaggccctcaggcagtatataggggccgcccaccttcagctgccctgggatgggaaggacccagcccgacccctgggcataacactgtgtttgcaaatggagattcaggtattggggatgcaggttgtggggagctggcctggcagagtaggggtagttggcttggccttctctttggtgatcccacccccagccatttgcattgctggcccagcgcctggcctggggggcggggagaggcagcagaaggggctgggcaggggcggtggaggactcaggaactgcccggggagagtgggtatggcggctgagccaggggccctcctgtgtttgacttcccgggatgggtccttgcttctcagctgtgtccgaccccaccatgtaataaaacccaaaggaacagccca

SEQ ID NO: 1728 - protein, 290 aa, Homo sapiens
MRMEAGEAAPPAGAGGRAAGGWGKWVRLNVGGTVFLTTRQTLCREQKSFLSRLCQGEELQSDRDETGAYLIDRDPTYFGPILNFLRHGKLVLDKDMAEEGVLEEAEFYNIGPLIRIIKDRMEEKDYTVTQVPPKHVYRVLQCQEEELTQMVSTMSDGWRFEQLVNIGSSYNYGSEDQAEFLCVVSKELHSTPNGLSSESSRKTKSTEEQLEEQQQQEEEVEEVEVEQVQVEADAQEKGSRPHPLRPEAELAVRASPRPLARPQSCHPCCYKPEAPGCEAPDHLQGLGVPI

SEQ ID NO: 1729 - DNA, 3212 bp, Homo sapiens
cttgagccagacccagtccagctctggtgcctgccctctggtgcgagctgacctgagatgcacttccctcctctgtgagctgtctcggcacccacttgcagtcactgccgcctgatgttgttactcttccactccaaaaggatgcccgtggccgaggccccccaggtggctggcgggcagggggacggaggtgatggcgaggaagcggagccggaggggatgttcaaggcctgtgaggactccaagagaaaagcccggggctacctccgcctggtgcccctgtttgtgctgctggccctgctcgtgctggcttcggcgggggtgctactctggtatttcctagggtacaaggcggaggtgatggtcagccaggtgtactcaggcagtctgcgtgtactcaatcgccacttctcccaggatcttacccgccgggaatctagtgccttccgcagtgaaaccgccaaagcccagaagatgctcaaggagctcatcaccagcacccgcctgggaacttactacaactccagctccgtctattcctttggggagggacccctcacctgcttcttctggttcattctccaaatccccgagcaccgccggctgatgctgagccccgaggtggtgcaggcactgctggtggaggagctgctgtccacagtcaacagctcggctgccgtcccctacagggccgagtacgaagtggaccccgagggcctagtgatcctggaagccagtgtgaaagacatagctgcattgaattccacgctgggttgttaccgctacagctacgtgggccagggccaggtcctccggctgaaggggcctgaccacctggcctccagctgcctgtggcacctgcagggccccaaggacctcatgctcaaactccggctggagtggacgctggcagagtgccgggaccgactggccatgtatgacgtggccgggcccctggagaagaggctcatcacctcggtgtacggctgcagccgccaggagcccgtggtggaggttctggcgtcgggggccatcatggcggtcgtctggaagaagggcctgcacagctactacgaccccttcgtgctctccgtgcagccggtggtcttccaggcctgtgaagtgaacctgacgctggacaacaggctcgactcccagggcgtcctcagcaccccgtacttccccagctactactcgccccaaacccactgctcctggcacctcacggtgccctctctggactacggcttggccctctggtttgatgcctatgcactgaggaggcagaagtatgatttgccgtgcacccagggccagtggacgatccagaacaggaggctgtgtggcttgcgcatcctgcagccctacgccgagaggatccccgtggtggccacggccgggatcaccatcaacttcacctcccagatctccctcaccgggcccggtgtgcgggtgcactatggcttgtacaaccagtcggacccctgccctggagagttcctctgttctgtgaatggactctgtgtccctgcctgtgatggggtcaaggactgccccaacggcctggatgagagaaactgcgtttgcagagccacattccagtgcaaagaggacagcacatgcatctcactgcccaaggtctgtgatgggcagcctgattgtctcaacggcagcgacgaagagcagtgccaggaaggggtgccatgtgggacattcaccttccagtgtgaggaccggagctgcgtgaagaagcccaacccgcagtgtgatgggcggcccgactgcagggacggctcggatgaggagcactgtgactgtggcctccagggcccctccagccgcattgttggtggagctgtgtcctccgagggtgagtggccatggcaggccagcctccaggttcggggtcgacacatctgtgggggggccctcatcgctgaccgctgggtgataacagctgcccactgcttccaggaggacagcatggcctccacggtgctgtggaccgtgttcctgggcaaggtgtggcagaactcgcgctggcctggagaggtgtccttcaaggtgagccgcctgctcctgcacccgtaccacgaagaggacagccatgactacgacgtggcgctgctgcagctcgaccacccggtggtgcgctcggccgccgtgcgccccgtctgcctgcccgcgcgctcccacttcttcgagcccggcctgcactgctggattacgggctggggcgccttgcgcgagggcggccccatcagcaacgctctgcagaaagtggatgtgcagttgatcccacaggacctgtgcagcgaggtctatcgctaccaggtgacgccacgcatgctgtgtgccggctaccgcaagggcaagaaggatgcctgtcagggtgactcaggtggtccgctggtgtgcaaggcactcagtggccgctggttcctggcggggctggtcagctggggcctgggctgtggccggcctaactacttcggcgtctacacccgcatcacaggtgtgatcagctggatccagcaagtggtgacctgaggaactgcccccctgcaaagcagggcccacctcctggactcagagagcccagggcaactgccaagcagggggacaagtattctggcggggggtgggggagagagcaggccctgtggtggcaggaggtggcatcttgtctcgtccctgatgtctgctccagtgatggcaggaggatggagaagtgccagcagctgggggtcaagacgtcccctgaggacccaggcccacacccagcccttctgcctcccaattctctctcctccgtccccttcctccactgctgcctaatgcaaggcagtggctcagcagcaagaatgctggttctacatcccgaggagtgtctgaggtgcgccccactctgtacagaggctgtttgggcagccttgcctccagagagcagattccagcttcggaagcccctggtctaacttgggatctgggaatggaaggtgctcccatcggaggggaccctcagagccctggagactgccaggtgggcctgctgccactgtaagccaaaaggtggggaagtcctgactccagggtccttgccccacccctgcctgccacctgggccctcacagcccagaccctcactgggaggtgagctcagctgccctttggaataaagctgcctgatcaaaaaaaaaaaaaaaaaaaaa

SEQ ID NO: 1730 - protein, 811 aa, Homo sapiens
MLLLFHSKRMPVAEAPQVAGGQGDGGDGEEAEPEGMFKACEDSKRKARGYLRLVPLFVLLALLVLASAGVLLWYFLGYKAEVMVSQVYSGSLRVLNRHFSQDLTRRESSAFRSETAKAQKMLKELITSTRLGTYYNSSSVYSFGEGPLTCFFWFILQIPEHRRLMLSPEVVQALLVEELLSTVNSSAAVPYRAEYEVDPEGLVILEASVKDIAALNSTLGCYRYSYVGQGQVLRLKGPDHLASSCLWHLQGPKDLMLKLRLEWTLAECRDRLAMYDVAGPLEKRLITSVYGCSRQEPVVEVLASGAIMAVVWKKGLHSYYDPFVLSVQPVVFQACEVNLTLDNRLDSQGVLSTPYFPSYYSPQTHCSWHLTVPSLDYGLALWFDAYALRRQKYDLPCTQGQWTIQNRRLCGLRILQPYAERIPVVATAGITINFTSQISLTGPGVRVHYGLYNQSDPCPGEFLCSVNGLCVPACDGVKDCPNGLDERNCVCRATFQCKEDSTCISLPKVCDGQPDCLNGSDEEQCQEGVPCGTFTFQCEDRSCVKKPNPQCDGRPDCRDGSDEEHCDCGLQGPSSRIVGGAVSSEGEWPWQASLQVRGRHICGGALIADRWVITAAHCFQEDSMASTVLWTVFLGKVWQNSRWPGEVSFKVSRLLLHPYHEEDSHDYDVALLQLDHPVVRSAAVRPVCLPARSHFFEPGLHCWITGWGALREGGPISNALQKVDVQLIPQDLCSEVYRYQVTPRMLCAGYRKGKKDACQGDSGGPLVCKALSGRWFLAGLVSWGLGCGRPNYFGVYTRITGVISWIQQVVT

SEQ ID NO: 1731 - DNA, 953 bp, Homo sapiens
atggcaagagattcccaagctgctagagaatggcaaaatcctagggctgctgatgctcctccagttggtataactgagagggacaataaaagaggctttcaggtagagaaacccgggaccgggatcatggcagctgagacttggaacgtggccgaagcagaggccccgcagccccagaagcgctactaccggcaatgtgctcaatccaaccccatggcagaccacacgctgcgctatcctgtgaagccagaggaaatggactggtctgagctatacccagagttcttcgctccactcactcaaaatcagagccacgatgacccaaaggataagaaagaaaagagagctcaggcccaagcggagtctgcagacataggctgtggctatggtggcctgttagtggaactatcaccactgttcccagacacactgattctgggtctggagatccaggtgaaggtctcagactatgtacaagaccggatttgggccctacgcgcagctcctggaggtggcttccagaacattgcctgtctctgtagcaatgccatgaagcaccttcctaacttctacaaggccagctgacaaagatgttcttcctcttccccgacccacatttcaagcagataaagcacaagcggcaaatcatcagtcccactctgctagcaaaatatgcctacgtgctgagagttggggggttggtatatacgataacccatgtgctggagctacacgactggatgtgcactcattttgaagagcacccgctgtttgagcgtatgcctgtggaggacctgagtgaagactccattgtgggacatctaggtacctcaactgaggaggggaagaaagttctacgtaatggagggaagaatttcccagccatctttcgaagaatacaagatcccgtcctccaggcagtgaccccccaaaccagcctgcctggtcactga

SEQ ID NO: 1732 - DNA, 1048 bp, Homo sapiens
atggctagtcaaaaccattcaaatctggttgcagcttgtctaaaccagtgtaaactggctgtggccagtcacaaccggactaaaccagttgtggctaaacaggctgacaccataaaacgggggcaaaaacatctggtgggtgtagaattgagtcgtcattttgtgcagggcgatggcagttgtaagagagaagcaaaacgacagctacatggagggaaggagctacgagtagccgccgagaggccgcggagccagcgacgacggagccagcgaccaccgacccagctgagccgccgcccccgccgcgcccccatggcggccaccaaggacactcatgaggaccatgatacttccactgagaatacagacgagttgaaccatgaccctcagtttgagccaatagtttctcttcctgagcaagaaattaaaacgctggaagaagatgaagaggaactttttaaaatgcgggcaaaatggttgcgatttgcctccgagaacgatctcccagaatggaaggagcgaggcactggtgacgtcaagctcctgaagcacaaggagaaaggggccatccgcctcctcatgcagagggacaaaaccctgaagatctgtgccaaccactacaccacgccgatgatggagctgaagcccaacgcaggtagcgaccgtgcctgggtctggaacacccacgctgacttcgccgacgagtgccccaagccagagctgctggccatccgcttcctgaatgctgagaatgcacagaaattcaaaacaaagtttgaagaatgcaggaaagagatcgaagagagagaaaagaaagcaggatcaggcaaaaacgatcatgccgaaaaagtggcggaaaagctagaagctctctcggtgaaggaagacaccaaggaggatgctgaggagaagcaataaatcgtcttattttattttcttttcctctctttcctttcctttttttaaaaaaattttaccctgcccctctttttcggtttttattctttcatttttacaagggacgttatataaataactgaattcaaaa

SEQ ID NO: 1733 - protein, 305 aa, Homo sapiens
MASQNHSNLVAACLNQCKLAVASHNRTKPVVAKQADTIKRGQKHLVGVELSRHFVQGDGSCKREAKRQLHGGKELRVAAERPRSQRRRSQRPPTQLSRRPRRAPMAATKDTHEDHDTSTENTDELNHDPQFEPIVSLPEQEIKTLEEDEEELFKMRAKWLRFASENDLPEWKERGTGDVKLLKHKEKGAIRLLMQRDKTLKICANHYTTPMMELKPNAGSDRAWVWNTHADFADECPKPELLAIRFLNAENAQKFKTKFEECRKEIEEREKKAGSGKNDHAEKVAEKLEALSVKEDTKEDAEEKQ

SEQ ID NO: 1734 - DNA, 14069 bp, Homo sapiens
cgttaaatgcaaacgctgctctggctcatgtgtttgctccgaggtataggttttgttcgactgacgtatcagatagtcagagtggttaccacaccgacgttgtagcagctgcataataaatgactgaaagaatcatgttaggcatgcccacctaacctaacttgaatcatgcgaaaggggagctgttggaattcaaatagactttctggttcccagcagtcggcagtaatagaatgctttcaggaagatgacagaatcaggagaaagatgctgttttgcactatcttgatttgttacagcagccaacttattggcatgatggagtgacaggaaaaacagctggcatggaagatgaaagagaagatgttcaaaagaaaacattcacaaaatgggtaaatgcacaattttctaagtttgggaagcagcatattgagaacctcttcagtgacctacaggatgggaggcgcctcctagacctcctcgaaggcctgacagggcaaaaactgccaaaagaaaaaggatccacaagagttcatgccctgaacaatgtcaacaaggcactgcgggttttgcagaacaataatgttgatttagtgaatattggaagtactgacatcgtagatggaaatcataaactgactcttggtttgatttggaatataatcctccactggcaggtcaaaaatgtaatgaaaaatatcatggctggattgcaacaaaccaacagtgaaaagattctcctgagctgggtccgacaatcaactcgtaattatccacaggttaatgtaatcaacttcaccaccagctggtctgatggcctggctttgaatgctctcatccatagtcataggccagacctatttgactggaatagtgtggtttgccagcagtcagccacacaacgactggaacatgcattcaacatcgccagatatcaattaggcatagagaaactactcgatcctgaagatgttgataccacctatccagataagaagtccatcttaatgtacatcacatcactcttccaagttttgcctcaacaagtgagcattgaagccatccaggaagtggaaatgttgccaaggccacctaaagtgactaaagaagaacattttcagttacatcatcaaatgcactattctcaacagatcacggtcagtctagcacagggatatgagagaacttcttcccctaagcctcgattcaagagctatgcctacacacaggctgcttatgtcaccacctctgaccctacacggagcccatttccttcacagcatttggaagctcctgaagacaagtcatttggcagttcattgatggagagtgaagtaaacctggaccgttatcaaacagctttagaagaagtattatcgtggcttctttctgctgaggacacattgcaagcacaaggagagatttctaatgatgtggaagtggtgaaagaccagtttcatactcatgaggggtacatgatggatttgacagcccatcagggccgggttggtaatattctacaattgggaagtaagctgattggaacaggaaaattatcagaagatgaagaaactgaagtacaagagcagatgaatctcctaaattcaagatgggaatgcctcagggtagctagcatggaaaaacaaagcaatttacatagagttttaatggatctccagaatcagaaactgaaagagttgaatgactggctaacaaaaacagaagaaagaacaaggaaaatggaggaagagcctcttggacctgatcttgaagacctaaaacgccaagtacaacaacataaggtgcttcaagaagatctagaacaagaacaagtcagggtcaattctctcactcacatggtggtggtagttgatgaatctagtggagatcacgcaactgctgctttggaagaacaacttaaggtattgggagatcgatgggcaaacatctgtagatggacagaagaccgctgggttcttttacaagacatccttctcaaatggcaacgtcttactgaagaacagtgcctttttagtgcatggctttcagaaaaagaagatgcagtgaacaagattcacacaactggctttaaagatcaaaatgaaatgttatcaagtcttcaaaaactggccgttttaaaagcggatctagaaaagaaaaagcaatccatgggcaaactgtattcactcaaacaagatcttctttcaacactgaagaataagtcagtgacccagaagacggaagcatggctggataactttgcccggtgttgggataatttagtccaaaaacttgaaaagagtacagcacagatttcacaggctgtcaccaccactcagccatcactaacacagacaactgtaatggaaacagtaactacggtgaccacaagggaacagatcctggtaaagcatgctcaagaggaacttccaccaccacctccccaaaagaagaggcagattactgtggattctgaaattaggaaaaggttggatgttgatataactgaacttcacagctggattactcgctcagaagctgtgttgcagagtcctgaatttgcaatctttcggaaggaaggcaacttctcagacttaaaagaaaaagtcaatgccatagagcgagaaaaagctgagaagttcagaaaactgcaagatgccagcagatcagctcaggccctggtggaacagatggtgaatgagggtgttaatgcagatagcatcaaacaagcctcagaacaactgaacagccggtggatcgaattctgccagttgctaagtgagagacttaactggctggagtatcagaacaacatcatcgctttctataatcagctacaacaattggagcagatgacaactactgctgaaaactggttgaaaatccaacccaccaccccatcagagccaacagcaattaaaagtcagttaaaaatttgtaaggatgaagtcaaccggctatcaggtcttcaacctcaaattgaacgattaaaaattcaaagcatagccctgaaagagaaaggacaaggacccatgttcctggatgcagactttgtggcctttacaaatcattttaagcaagtcttttctgatgtgcaggccagagagaaagagctacagacaatttttgacactttgccaccaatgcgctatcaggagaccatgagtgccatcaggacatgggtccagcagtcagaaaccaaactctccatacctcaacttagtgtcaccgactatgaaatcatggagcagagactcggggaattgcaggctttacaaagttctctgcaagagcaacaaagtggcctatactatctcagcaccactgtgaaagagatgtcgaagaaagcgccctctgaaattagccggaaatatcaatcagaatttgaagaaattgagggacgctggaagaagctctcctcccagctggttgagcattgtcaaaagctagaggagcaaatgaataaactccgaaaaattcagaatcacatacaaaccctgaagaaatggatggctgaagttgatgtttttctgaaggaggaatggcctgcccttggggattcagaaattctaaaaaagcagctgaaacagtgcagacttttagtcagtgatattcagacaattcagcccagtctaaacagtgtcaatgaaggtgggcagaagataaagaatgaagcagagccagagtttgcttcgagacttgagacagaactcaaagaacttaacactcagtgggatcacatgtgccaacaggtctatgccagaaaggaggccttgaagggaggtttggagaaaactgtaagcctccagaaagatctatcagagatgcacgaatggatgacacaagctgaagaagagtatcttgagagagattttgaatataaaactccagatgaattacagaaagcagttgaagagatgaagagagctaaagaagaggcccaacaaaaagaagcgaaagtgaaactccttactgagtctgtaaatagtgtcatagctcaagctccacctgtagcacaagaggccttaaaaaaggaacttgaaactctaaccaccaactaccagtggctctgcactaggctgaatgggaaatgcaagactttggaagaagtttgggcatgttggcatgagttattgtcatacttggagaaagcaaacaagtggctaaatgaagtagaatttaaacttaaaaccactgaaaacattcctggcggagctgaggaaatctctgaggtgctagattcacttgaaaatttgatgcgacattcagaggataacccaaatcagattcgcatattggcacagaccctaacagatggcggagtcatggatgagctaatcaatgaggaacttgagacatttaattctcgttggagggaactacatgaagaggctgtaaggaggcaaaagttgcttgaacagagcatccagtctgcccaggagactgaaaaatccttacacttaatccaggagtccctcacattcattgacaagcagttggcagcttatattgcagacaaggtggacgcagctcaaatgcctcaggaagcccagaaaatccaatctgatttgacaagtcatgagatcagtttagaagaaatgaagaaacataatcaggggaaggaggctgcccaaagagtcctgtctcagattgatgttgcacagaaaaaattacaagatgtctccatgaagtttcgattattccagaaaccagccaattttgagcagcgtctacaagaaagtaagatgattttagatgaagtgaagatgcacttgcctgcattggaaacaaagagtgtggaacaggaagtagtacagtcacagctaaatcattgtgtgaacttgtataaaagtctgagtgaagtgaagtctgaagtggaaatggtgataaagactggacgtcagattgtacagaaaaagcagacggaaaatcccaaagaacttgatgaaagagtaacagctttgaaattgcattataatgagctgggagcaaaggtaacagaaagaaagcaacagttggagaaatgcttgaaattgtcccgtaagatgcgaaaggaaatgaatgtcttgacagaatggctggcagctacagatatggaattgacaaagagatcagcagttgaaggaatgcctagtaatttggattctgaagttgcctggggaaaggctactcaaaaagagattgagaaacagaaggtgcacctgaagagtatcacagaggtaggagaggccttgaaaacagttttgggcaagaaggagacgttggtggaagataaactcagtcttctgaatagtaactggatagctgtcacctcccgagcagaagagtggttaaatcttttgttggaataccagaaacacatggaaacttttgaccagaatgtggaccacatcacaaagtggatcattcaggctgacacacttttggatgaatcagagaaaaagaaaccccagcaaaaagaagacgtgcttaagcgtttaaaggcagaactgaatgacatacgcccaaaggtggactctacacgtgaccaagcagcaaacttgatggcaaaccgcggtgaccactgcaggaaattagtagagccccaaatctcagagctcaaccatcgatttgcagccatttcacacagaattaagactggaaaggcctccattcctttgaaggaattggagcagtttaactcagatatacaaaaattgcttgaaccactggaggctgaaattcagcagggggtgaatctgaaagaggaagacttcaataaagatatgaatgaagacaatgagggtactgtaaaagaattgttgcaaagaggagacaacttacaacaaagaatcacagatgagagaaagcgagaggaaataaagataaaacagcagctgttacagacaaaacataatgctctcaaggatttgaggtctcaaagaagaaaaaaggctctagaaatttctcatcagtggtatcagtacaagaggcaggctgatgatctcctgaaatgcttggatgacattgaaaaaaaattagccagcctacctgagcccagagatgaaaggaaaataaaggaaattgatcgggaattgcagaagaagaaagaggagctgaatgcagtgcgtaggcaagctgagggcttgtctgaggatggggccgcaatggcagtggagccaactcagatccagctcagcaagcgctggcgggaaattgagagcaaatttgctcagtttcgaagactcaactttgcacaaattcacactgtccgtgaagaaacgatgatggtgatgactgaagacatgcctttggaaatttcttatgtgccttctacttatttgactgaaatcactcatgtctcacaagccctattagaagtggaacaacttctcaatgctcctgacctctgtgctaaggactttgaagatctctttaagcaagaggagtctctgaagaatataaaagatagtctacaacaaagctcaggtcggattgacattattcatagcaagaagacagcagcattgcaaagtgcaacgcctgtggaaagggtgaagctacaggaagctctctcccagcttgatttccaatgggaaaaagttaacaaaatgtacaaggaccgacaagggcgatttgacagatctgttgagaaatggcggcgttttcattatgatataaagatatttaatcagtggctaacagaagctgaacagtttctcagaaagacacaaattcctgagaattgggaacatgctaaatacaaatggtatcttaaggaactccaggatggcattgggcagcggcaaactgttgtcagaacattgaatgcaactggggaagaaataattcagcaatcctcaaaaacagatgccagtattctacaggaaaaattgggaagcctgaatctgcggtggcaggaggtctgcaaacagctgtcagacagaaaaaagaggctagaagaacaaaagaatatcttgtcagaatttcaaagagatttaaatgaatttgttttatggttggaggaagcagataacattgctagtatcccacttgaacctggaaaagagcagcaactaaaagaaaagcttgagcaagtcaagttactggtggaagagttgcccctgcgccagggaattctcaaacaattaaatgaaactggaggacccgtgcttgtaagtgctcccataagcccagaagagcaagataaacttgaaaataagctcaagcagacaaatctccagtggataaaggtttccagagctttacctgagaaacaaggagaaattgaagctcaaataaaagaccttgggcagcttgaaaaaaagcttgaagaccttgaagagcagttaaatcatctgctgctgtggttatctcctattaggaatcagttggaaatttataaccaaccaaaccaagaaggaccatttgacgttcaggaaactgaaatagcagttcaagctaaacaaccggatgtggaagagattttgtctaaagggcagcatttgtacaaggaaaaaccagccactcagccagtgaagaggaagttagaagatctgagctctgagtggaaggcggtaaaccgtttacttcaagagctgagggcaaagcagcctgacctagctcctggactgaccactattggagcctctcctactcagactgttactctggtgacacaacctgtggttactaaggaaactgccatctccaaactagaaatgccatcttccttgatgttggaggtacctgctctggcagatttcaaccgggcttggacagaacttaccgactggctttctctgcttgatcaagttataaaatcacagagggtgatggtgggtgaccttgaggatatcaacgagatgatcatcaagcagaaggcaacaatgcaggatttggaacagaggcgtccccagttggaagaactcattaccgctgcccaaaatttgaaaaacaagaccagcaatcaagaggctagaacaatcattacggatcgaattgaaagaattcagaatcagtgggatgaagtacaagaacaccttcagaaccggaggcaacagttgaatgaaatgttaaaggattcaacacaatggctggaagctaaggaagaagctgagcaggtcttaggacaggccagagccaagcttgagtcatggaaggagggtccctatacagtagatgcaatccaaaagaaaatcacagaaaccaagcagttggccaaagacctccgccagtggcagacaaatgtagatgtggcaaatgacttggccctgaaacttctccgggattattctgcagatgataccagaaaagtccacatgataacagagaatatcaatgcctcttggagaagcattcataaaagggtgagtgagcgagaggctgctttggaagaaactcatagattactgcaacagttccccctggacctggaaaagtttcttgcctggcttacagaagctgaaacaactgccaatgtcctacaggatgctacccgtaaggaaaggctcctagaagactccaagggagtaaaagagctgatgaaacaatggcaagacctccaaggtgaaattgaagctcacacagatgtttatcacaacctggatgaaaacagccaaaaaatcctgagatccctggaaggttccgatgatgcagtcctgttacaaagacgtttggataacatgaacttcaagtggagtgaacttcggaaaaagtctctcaacattaggtcccatttggaagccagttctgaccagtggaagcgtctgcacctttctctgcaggaacttctggtgtggctacagctgaaagatgatgaattaagccggcaggcacctattggaggcgactttccagcagttcagaagcagaacgatgtacatagggccttcaagagggaattgaaaactaaagaacctgtaatcatgagtactcttgagactgtacgaatatttctgacagagcagcctttggaaggactagagaaactctaccaggagcccagagagctgcctcctgaggagagagcccagaatgtcactcggcttctacgaaagcaggctgaggaggtcaatactgagtgggaaaaattgaacctgcactccgctgactggcagagaaaaatagatgagacccttgaaagactccaggaacttcaagaggccacggatgagctggacctcaagctgcgccaagctgaggtgatcaagggatcctggcagcccgtgggcgatctcctcattgactctctccaagatcacctcgagaaagtcaaggcacttcgaggagaaattgcgcctctgaaagagaacgtgagccacgtcaatgaccttgctcgccagcttaccactttgggcattcagctctcaccgtataacctcagcactctggaagacctgaacaccagatggaagcttctgcaggtggccgtcgaggaccgagtcaggcagctgcatgaagcccacagggactttggtccagcatctcagcactttctttccacgtctgtccagggtccctgggagagagccatctcgccaaacaaagtgccctactatatcaaccacgagactcaaacaacttgctgggaccatcccaaaatgacagagctctaccagtctttagctgacctgaataatgtcagattctcagcttataggactgccatgaaactccgaagactgcagaaggccctttgcttggatctcttgagcctgtcagctgcatgtgatgccttggaccagcacaacctcaagcaaaatgaccagcccatggatatcctgcagattattaattgtttgaccactatttatgaccgcctggagcaagagcacaacaatttggtcaacgtccctctctgcgtggatatgtgtctgaactggctgctgaatgtttatgatacgggacgaacagggaggatccgtgtcctgtcttttaaaactggcatcatttccctgtgtaaagcacatttggaagacaagtacagataccttttcaagcaagtggcaagttcaacaggattttgtgaccagcgcaggctgggcctccttctgcatgattctatccaaattccaagacagttgggtgaagttgcatcctttgggggcagtaacattgagccaagtgtccggagctgcttccaatttgctaataataagccagagatcgaagcggccctcttcctagactggatgagactggaaccccagtccatggtgtggctgcccgtcctgcacagagtggctgctgcagaaactgccaagcatcaggccaaatgtaacatctgcaaagagtgtccaatcattggattcaggtacaggagtctaaagcactttaattatgacatctgccaaagctgctttttttctggtcgagttgcaaaaggccataaaatgcactatcccatggtggaatattgcactccgactacatcaggagaagatgttcgagactttgccaaggtactaaaaaacaaatttcgaaccaaaaggtattttgcgaagcatccccgaatgggctacctgccagtgcagactgtcttagagggggacaacatggaaactcccgttactctgatcaacttctggccagtagattctgcgcctgcctcgtcccctcagctttcacacgatgatactcattcacgcattgaacattatgctagcaggctagcagaaatggaaaacagcaatggatcttatctaaatgatagcatctctcctaatgagagcatagatgatgaacatttgttaatccagcattactgccaaagtttgaaccaggactcccccctgagccagcctcgtagtcctgcccagatcttgatttccttagagagtgaggaaagaggggagctagagagaatcctagcagatcttgaggaagaaaacaggaatctgcaagcagaatatgaccgtctaaagcagcagcacgaacataaaggcctgtccccactgccgtcccctcctgaaatgatgcccacctctccccagagtccccgggatgctgagctcattgctgaggccaagctactgcgtcaacacaaaggccgcctggaagccaggatgcaaatcctggaagaccacaataaacagctggagtcacagttacacaggctaaggcagctgctggagcaaccccaggcagaggccaaagtgaatggcacaacggtgtcctctccttctacctctctacagaggtccgacagcagtcagcctatgctgctccgagtggttggcagtcaaacttcggactccatgggtgaggaagatcttctcagtcctccccaggacacaagcacagggttagaggaggtgatggagcaactcaacaactccttccctagttcaagaggaagaaatacccctggaaagccaatgagagaggacacaatgtaggaagtcttttccacatggcagatgatttgggcagagcgatggagtccttagtatcagtcatgacagatgaagaaggagcagaataaatgttttacaactcctgattcccgcatggtttttataatattcatacaacaaagaggattagacagtaagagtttacaagaaataaatctatatttttgtgaagggtagtggtattatactgtagatttcagtagtttctaagtctgttattgttttgttaacaatggcaggttttacacgtctatgcaattgtacaaaaaagttataagaaaactacatgtaaaatcttgatagctaaataacttgccatttctttatatggaacgcattttgggttgtttaaaaatttataacagttataaagaaagattgtaaactaaagtgtgctttataaaaaaaagttgtttataaaaacccctaaaaacaaaacaaacacacacacacacacatacacacacacacacaaaactttgaggcagcgcattgttttgcatccttttggcgtgatatccatatgaaattcatggctttttctttttttgcatattaaagataagacttcctctaccaccacaccaaatgactactacacactgctcatttgagaactgtcagctgagtggggcaggcttgagttttcatttcatatatctatatgtctataagtatataaatactatagttatatagataaagagatacgaatttctatagactgactttttccattttttaaatgttcatgtcacatcctaatagaaagaaattacttctagtcagtcatccaggcttacctgcttggtctagaatggatttttcccggagccggaagccaggaggaaactacaccacactaaaacattgtctacagctccagatgtttctcattttaaacaactttccactgacaacgaaagtaaagtaaagtattggatttttttaaagggaacatgtgaatgaatacacaggacttattatatcagagtgagtaatcggttggttggttgattgattgattgattgatacattcagcttcctgctgctagcaatgccacgatttagatttaatgatgcttcagtggaaatcaatcagaaggtattctgaccttgtgaacatcagaaggtattttttaactcccaagcagtagcaggacgatgatagggctggagggctatggattcccagcccatccctgtgaaggagtaggccactctttaagtgaaggattggatgattgttcataatacataaagttctctgtaattacaactaaattattatgccctcttctcacagtcaaaaggaactgggtggtttggtttttgttgcttttttagatttattgtcccatgtgggatgagtttttaaatgccacaagacataatttaaaataaataaactttgggaaaaggtgtaagacagtagccccatcacatttgtgatactgacaggtatcaacccagaagcccatgaactgtgtttccatcctttgcatttctctgcgagtagttccacacaggtttgtaagtaagtaagaaagaaggcaaattgattcaaatgttacaaaaaaacccttcttggtggattagacaggttaaatatataaacaaacaaacaaaaattgctcaaaaaagaggagaaaagctcaagaggaaaagctaaggactggtaggaaaaagctttactctttcatgccattttatttctttttgatttttaaatcattcattcaatagataccaccgtgtgacctataattttgcaaatctgttacctctgacatcaagtgtaattagcttttggagagtgggctgacatcaagtgtaattagcttttggagagtgggttttgtccattattaataattaattaattaacatcaaacacggcttctcatgctatttctacctcactttggttttggggtgttcctgataattgtgcacacctgagttcacagcttcaccacttgtccattgcgttattttctttttcctttataattctttctttttccttcataattttcaaaagaaaacccaaagctctaaggtaacaaattaccaaattacatgaagatttggtttttgtcttgcatttttttcctttatgtgacgctggaccttttctttacccaaggatttttaaaactcagatttaaaacaaggggttactttacatcctactaagaagtttaagtaagtaagtttcattctaaaatcagaggtaaatagagtgcataaataattttgttttaatctttttgtttttcttttagacacattagctctggagtgagtctgtcataatatttgaacaaaaattgagagctttattgctgcattttaagcataattaatttggacattatttcgtgttgtgttctttataaccaccgagtattaaactgtaaatcataatgtaactgaagcataaacatcacatggcatgttttgtcattgttttcaggtactgagttcttacttgagtatcataatatattgtgttttaacaccaacactgtaacatttacgaattatttttttaaacttcagttttactgcattttcacaacatatcagacttcaccaaatatatgccttactattgtattatagtactgctttactgtgtatctcaataaagcacgcagttatgttac

SEQ ID NO: 1735 - protein, 3677 aa, Homo sapiens
MEDEREDVQKKTFTKWVNAQFSKFGKQHIENLFSDLQDGRRLLDLLEGLTGQKLPKEKGSTRVHALNNVNKALRVLQNNNVDLVNIGSTDIVDGNHKLTLGLIWNIILHWQVKNVMKNIMAGLQQTNSEKILLSWVRQSTRNYPQVNVINFTTSWSDGLALNALIHSHRPDLFDWNSVVCQQSATQRLEHAFNIARYQLGIEKLLDPEDVDTTYPDKKSILMYITSLFQVLPQQVSIEAIQEVEMLPRPPKVTKEEHFQLHHQMHYSQQITVSLAQGYERTSSPKPRFKSYAYTQAAYVTTSDPTRSPFPSQHLEAPEDKSFGSSLMESEVNLDRYQTALEEVLSWLLSAEDTLQAQGEISNDVEVVKDQFHTHEGYMMDLTAHQGRVGNILQLGSKLIGTGKLSEDEETEVQEQMNLLNSRWECLRVASMEKQSNLHRVLMDLQNQKLKELNDWLTKTEERTRKMEEEPLGPDLEDLKRQVQQHKVLQEDLEQEQVRVNSLTHMVVVVDESSGDHATAALEEQLKVLGDRWANICRWTEDRWVLLQDILLKWQRLTEEQCLFSAWLSEKEDAVNKIHTTGFKDQNEMLSSLQKLAVLKADLEKKKQSMGKLYSLKQDLLSTLKNKSVTQKTEAWLDNFARCWDNLVQKLEKSTAQISQAVTTTQPSLTQTTVMETVTTVTTREQILVKHAQEELPPPPPQKKRQITVDSEIRKRLDVDITELHSWITRSEAVLQSPEFAIFRKEGNFSDLKEKVNAIEREKAEKFRKLQDASRSAQALVEQMVNEGVNADSIKQASEQLNSRWIEFCQLLSERLNWLEYQNNIIAFYNQLQQLEQMTTTAENWLKIQPTTPSEPTAIKSQLKICKDEVNRLSGLQPQIERLKIQSIALKEKGQGPMFLDADFVAFTNHFKQVFSDVQAREKELQTIFDTLPPMRYQETMSAIRTWVQQSETKLSIPQLSVTDYEIMEQRLGELQALQSSLQEQQSGLYYLSTTVKEMSKKAPSEISRKYQSEFEEIEGRWKKLSSQLVEHCQKLEEQMNKLRKIQNHIQTLKKWMAEVDVFLKEEWPALGDSEILKKQLKQCRLLVSDIQTIQPSLNSVNEGGQKIKNEAEPEFASRLETELKELNTQWDHMCQQVYARKEALKGGLEKTVSLQKDLSEMHEWMTQAEEEYLERDFEYKTPDELQKAVEEMKRAKEEAQQKEAKVKLLTESVNSVIAQAPPVAQEALKKELETLTTNYQWLCTRLNGKCKTLEEVWACWHELLSYLEKANKWLNEVEFKLKTTENIPGGAEEISEVLDSLENLMRHSEDNPNQIRILAQTLTDGGVMDELINEELETFNSRWRELHEEAVRRQKLLEQSIQSAQETEKSLHLIQESLTFIDKQLAAYIADKVDAAQMPQEAQKIQSDLTSHEISLEEMKKHNQGKEAAQRVLSQIDVAQKKLQDVSMKFRLFQKPANFEQRLQESKMILDEVKMHLPALETKSVEQEVVQSQLNHCVNLYKSLSEVKSEVEMVIKTGRQIVQKKQTENPKELDERVTALKLHYNELGAKVTERKQQLEKCLKLSRKMRKEMNVLTEWLAATDMELTKRSAVEGMPSNLDSEVAWGKATQKEIEKQKVHLKSITEVGEALKTVLGKKETLVEDKLSLLNSNWIAVTSRAEEWLNLLLEYQKHMETFDQNVDHITKWIIQADTLLDESEKKKPQQKEDVLKRLKAELNDIRPKVDSTRDQAANLMANRGDHCRKLVEPQISELNHRFAAISHRIKTGKASIPLKELEQFNSDIQKLLEPLEAEIQQGVNLKEEDFNKDMNEDNEGTVKELLQRGDNLQQRITDERKREEIKIKQQLLQTKHNALKDLRSQRRKKALEISHQWYQYKRQADDLLKCLDDIEKKLASLPEPRDERKIKEIDRELQKKKEELNAVRRQAEGLSEDGAAMAVEPTQIQLSKRWREIESKFAQFRRLNFAQIHTVREETMMVMTEDMPLEISYVPSTYLTEITHVSQALLEVEQLLNAPDLCAKDFEDLFKQEESLKNIKDSLQQSSGRIDIIHSKKTAALQSATPVERVKLQEALSQLDFQWEKVNKMYKDRQGRFDRSVEKWRRFHYDIKIFNQWLTEAEQFLRKTQIPENWEHAKYKWYLKELQDGIGQRQTVVRTLNATGEEIIQQSSKTDASILQEKLGSLNLRWQEVCKQLSDRKKRLEEQKNILSEFQRDLNEFVLWLEEADNIASIPLEPGKEQQLKEKLEQVKLLVEELPLRQGILKQLNETGGPVLVSAPISPEEQDKLENKLKQTNLQWIKVSRALPEKQGEIEAQIKDLGQLEKKLEDLEEQLNHLLLWLSPIRNQLEIYNQPNQEGPFDVQETEIAVQAKQPDVEEILSKGQHLYKEKPATQPVKRKLEDLSSEWKAVNRLLQELRAKQPDLAPGLTTIGASPTQTVTLVTQPVVTKETAISKLEMPSSLMLEVPALADFNRAWTELTDWLSLLDQVIKSQRVMVGDLEDINEMIIKQKATMQDLEQRRPQLEELITAAQNLKNKTSNQEARTIITDRIERIQNQWDEVQEHLQNRRQQLNEMLKDSTQWLEAKEEAEQVLGQARAKLESWKEGPYTVDAIQKKITETKQLAKDLRQWQTNVDVANDLALKLLRDYSADDTRKVHMITENINASWRSIHKRVSEREAALEETHRLLQQFPLDLEKFLAWLTEAETTANVLQDATRKERLLEDSKGVKELMKQWQDLQGEIEAHTDVYHNLDENSQKILRSLEGSDDAVLLQRRLDNMNFKWSELRKKSLNIRSHLEASSDQWKRLHLSLQELLVWLQLKDDELSRQAPIGGDFPAVQKQNDVHRAFKRELKTKEPVIMSTLETVRIFLTEQPLEGLEKLYQEPRELPPEERAQNVTRLLRKQAEEVNTEWEKLNLHSADWQRKIDETLERLQELQEATDELDLKLRQAEVIKGSWQPVGDLLIDSLQDHLEKVKALRGEIAPLKENVSHVNDLARQLTTLGIQLSPYNLSTLEDLNTRWKLLQVAVEDRVRQLHEAHRDFGPASQHFLSTSVQGPWERAISPNKVPYYINHETQTTCWDHPKMTELYQSLADLNNVRFSAYRTAMKLRRLQKALCLDLLSLSAACDALDQHNLKQNDQPMDILQIINCLTTIYDRLEQEHNNLVNVPLCVDMCLNWLLNVYDTGRTGRIRVLSFKTGIISLCKAHLEDKYRYLFKQVASSTGFCDQRRLGLLLHDSIQIPRQLGEVASFGGSNIEPSVRSCFQFANNKPEIEAALFLDWMRLEPQSMVWLPVLHRVAAAETAKHQAKCNICKECPIIGFRYRSLKHFNYDICQSCFFSGRVAKGHKMHYPMVEYCTPTTSGEDVRDFAKVLKNKFRTKRYFAKHPRMGYLPVQTVLEGDNMETPVTLINFWPVDSAPASSPQLSHDDTHSRIEHYASRLAEMENSNGSYLNDSISPNESIDDEHLLIQHYCQSLNQDSPLSQPRSPAQILISLESEERGELERILADLEEENRNLQAEYDRLKQQHEHKGLSPLPSPPEMMPTSPQSPRDAELIAEAKLLRQHKGRLEARMQILEDHNKQLESQLHRLRQLLEQPQAEAKVNGTTVSSPSTSLQRSDSSQPMLLRVVGSQTSDSMGEEDLLSPPQDTSTGLEEVMEQLNNSFPSSRGRNTPGKPMREDTM

SEQ ID NO: 1736 - DNA, 13993 bp, Homo sapiens
tcctggcatcagttactgtgttgactcactcagtgttgggatcactcactttccccctacaggactcagatctgggaggcaattaccttcggagaaaaacgaataggaaaaactgaagtgttactttttttaaagctgctgaagtttgttggtttctcattgtttttaagcctactggagcaataaagtttgaagaacttttaccaggttttttttatcgctgccttgatatacacttttcaaaatgctttggtgggaagaagtagaggactgttatgaaagagaagatgttcaaaagaaaacattcacaaaatgggtaaatgcacaattttctaagtttgggaagcagcatattgagaacctcttcagtgacctacaggatgggaggcgcctcctagacctcctcgaaggcctgacagggcaaaaactgccaaaagaaaaaggatccacaagagttcatgccctgaacaatgtcaacaaggcactgcgggttttgcagaacaataatgttgatttagtgaatattggaagtactgacatcgtagatggaaatcataaactgactcttggtttgatttggaatataatcctccactggcaggtcaaaaatgtaatgaaaaatatcatggctggattgcaacaaaccaacagtgaaaagattctcctgagctgggtccgacaatcaactcgtaattatccacaggttaatgtaatcaacttcaccaccagctggtctgatggcctggctttgaatgctctcatccatagtcataggccagacctatttgactggaatagtgtggtttgccagcagtcagccacacaacgactggaacatgcattcaacatcgccagatatcaattaggcatagagaaactactcgatcctgaagatgttgataccacctatccagataagaagtccatcttaatgtacatcacatcactcttccaagttttgcctcaacaagtgagcattgaagccatccaggaagtggaaatgttgccaaggccacctaaagtgactaaagaagaacattttcagttacatcatcaaatgcactattctcaacagatcacggtcagtctagcacagggatatgagagaacttcttcccctaagcctcgattcaagagctatgcctacacacaggctgcttatgtcaccacctctgaccctacacggagcccatttccttcacagcatttggaagctcctgaagacaagtcatttggcagttcattgatggagagtgaagtaaacctggaccgttatcaaacagctttagaagaagtattatcgtggcttctttctgctgaggacacattgcaagcacaaggagagatttctaatgatgtggaagtggtgaaagaccagtttcatactcatgaggggtacatgatggatttgacagcccatcagggccgggttggtaatattctacaattgggaagtaagctgattggaacaggaaaattatcagaagatgaagaaactgaagtacaagagcagatgaatctcctaaattcaagatgggaatgcctcagggtagctagcatggaaaaacaaagcaatttacatagagttttaatggatctccagaatcagaaactgaaagagttgaatgactggctaacaaaaacagaagaaagaacaaggaaaatggaggaagagcctcttggacctgatcttgaagacctaaaacgccaagtacaacaacataaggtgcttcaagaagatctagaacaagaacaagtcagggtcaattctctcactcacatggtggtggtagttgatgaatctagtggagatcacgcaactgctgctttggaagaacaacttaaggtattgggagatcgatgggcaaacatctgtagatggacagaagaccgctgggttcttttacaagacatccttctcaaatggcaacgtcttactgaagaacagtgcctttttagtgcatggctttcagaaaaagaagatgcagtgaacaagattcacacaactggctttaaagatcaaaatgaaatgttatcaagtcttcaaaaactggccgttttaaaagcggatctagaaaagaaaaagcaatccatgggcaaactgtattcactcaaacaagatcttctttcaacactgaagaataagtcagtgacccagaagacggaagcatggctggataactttgcccggtgttgggataatttagtccaaaaacttgaaaagagtacagcacagatttcacaggctgtcaccaccactcagccatcactaacacagacaactgtaatggaaacagtaactacggtgaccacaagggaacagatcctggtaaagcatgctcaagaggaacttccaccaccacctccccaaaagaagaggcagattactgtggattctgaaattaggaaaaggttggatgttgatataactgaacttcacagctggattactcgctcagaagctgtgttgcagagtcctgaatttgcaatctttcggaaggaaggcaacttctcagacttaaaagaaaaagtcaatgccatagagcgagaaaaagctgagaagttcagaaaactgcaagatgccagcagatcagctcaggccctggtggaacagatggtgaatgagggtgttaatgcagatagcatcaaacaagcctcagaacaactgaacagccggtggatcgaattctgccagttgctaagtgagagacttaactggctggagtatcagaacaacatcatcgctttctataatcagctacaacaattggagcagatgacaactactgctgaaaactggttgaaaatccaacccaccaccccatcagagccaacagcaattaaaagtcagttaaaaatttgtaaggatgaagtcaaccggctatcaggtcttcaacctcaaattgaacgattaaaaattcaaagcatagccctgaaagagaaaggacaaggacccatgttcctggatgcagactttgtggcctttacaaatcattttaagcaagtcttttctgatgtgcaggccagagagaaagagctacagacaatttttgacactttgccaccaatgcgctatcaggagaccatgagtgccatcaggacatgggtccagcagtcagaaaccaaactctccatacctcaacttagtgtcaccgactatgaaatcatggagcagagactcggggaattgcaggctttacaaagttctctgcaagagcaacaaagtggcctatactatctcagcaccactgtgaaagagatgtcgaagaaagcgccctctgaaattagccggaaatatcaatcagaatttgaagaaattgagggacgctggaagaagctctcctcccagctggttgagcattgtcaaaagctagaggagcaaatgaataaactccgaaaaattcagaatcacatacaaaccctgaagaaatggatggctgaagttgatgtttttctgaaggaggaatggcctgcccttggggattcagaaattctaaaaaagcagctgaaacagtgcagacttttagtcagtgatattcagacaattcagcccagtctaaacagtgtcaatgaaggtgggcagaagataaagaatgaagcagagccagagtttgcttcgagacttgagacagaactcaaagaacttaacactcagtgggatcacatgtgccaacaggtctatgccagaaaggaggccttgaagggaggtttggagaaaactgtaagcctccagaaagatctatcagagatgcacgaatggatgacacaagctgaagaagagtatcttgagagagattttgaatataaaactccagatgaattacagaaagcagttgaagagatgaagagagctaaagaagaggcccaacaaaaagaagcgaaagtgaaactccttactgagtctgtaaatagtgtcatagctcaagctccacctgtagcacaagaggccttaaaaaaggaacttgaaactctaaccaccaactaccagtggctctgcactaggctgaatgggaaatgcaagactttggaagaagtttgggcatgttggcatgagttattgtcatacttggagaaagcaaacaagtggctaaatgaagtagaatttaaacttaaaaccactgaaaacattcctggcggagctgaggaaatctctgaggtgctagattcacttgaaaatttgatgcgacattcagaggataacccaaatcagattcgcatattggcacagaccctaacagatggcggagtcatggatgagctaatcaatgaggaacttgagacatttaattctcgttggagggaactacatgaagaggctgtaaggaggcaaaagttgcttgaacagagcatccagtctgcccaggagactgaaaaatccttacacttaatccaggagtccctcacattcattgacaagcagttggcagcttatattgcagacaaggtggacgcagctcaaatgcctcaggaagcccagaaaatccaatctgatttgacaagtcatgagatcagtttagaagaaatgaagaaacataatcaggggaaggaggctgcccaaagagtcctgtctcagattgatgttgcacagaaaaaattacaagatgtctccatgaagtttcgattattccagaaaccagccaattttgagcagcgtctacaagaaagtaagatgattttagatgaagtgaagatgcacttgcctgcattggaaacaaagagtgtggaacaggaagtagtacagtcacagctaaatcattgtgtgaacttgtataaaagtctgagtgaagtgaagtctgaagtggaaatggtgataaagactggacgtcagattgtacagaaaaagcagacggaaaatcccaaagaacttgatgaaagagtaacagctttgaaattgcattataatgagctgggagcaaaggtaacagaaagaaagcaacagttggagaaatgcttgaaattgtcccgtaagatgcgaaaggaaatgaatgtcttgacagaatggctggcagctacagatatggaattgacaaagagatcagcagttgaaggaatgcctagtaatttggattctgaagttgcctggggaaaggctactcaaaaagagattgagaaacagaaggtgcacctgaagagtatcacagaggtaggagaggccttgaaaacagttttgggcaagaaggagacgttggtggaagataaactcagtcttctgaatagtaactggatagctgtcacctcccgagcagaagagtggttaaatcttttgttggaataccagaaacacatggaaacttttgaccagaatgtggaccacatcacaaagtggatcattcaggctgacacacttttggatgaatcagagaaaaagaaaccccagcaaaaagaagacgtgcttaagcgtttaaaggcagaactgaatgacatacgcccaaaggtggactctacacgtgaccaagcagcaaacttgatggcaaaccgcggtgaccactgcaggaaattagtagagccccaaatctcagagctcaaccatcgatttgcagccatttcacacagaattaagactggaaaggcctccattcctttgaaggaattggagcagtttaactcagatatacaaaaattgcttgaaccactggaggctgaaattcagcagggggtgaatctgaaagaggaagacttcaataaagatatgaatgaagacaatgagggtactgtaaaagaattgttgcaaagaggagacaacttacaacaaagaatcacagatgagagaaagcgagaggaaataaagataaaacagcagctgttacagacaaaacataatgctctcaaggatttgaggtctcaaagaagaaaaaaggctctagaaatttctcatcagtggtatcagtacaagaggcaggctgatgatctcctgaaatgcttggatgacattgaaaaaaaattagccagcctacctgagcccagagatgaaaggaaaataaaggaaattgatcgggaattgcagaagaagaaagaggagctgaatgcagtgcgtaggcaagctgagggcttgtctgaggatggggccgcaatggcagtggagccaactcagatccagctcagcaagcgctggcgggaaattgagagcaaatttgctcagtttcgaagactcaactttgcacaaattcacactgtccgtgaagaaacgatgatggtgatgactgaagacatgcctttggaaatttcttatgtgccttctacttatttgactgaaatcactcatgtctcacaagccctattagaagtggaacaacttctcaatgctcctgacctctgtgctaaggactttgaagatctctttaagcaagaggagtctctgaagaatataaaagatagtctacaacaaagctcaggtcggattgacattattcatagcaagaagacagcagcattgcaaagtgcaacgcctgtggaaagggtgaagctacaggaagctctctcccagcttgatttccaatgggaaaaagttaacaaaatgtacaaggaccgacaagggcgatttgacagatctgttgagaaatggcggcgttttcattatgatataaagatatttaatcagtggctaacagaagctgaacagtttctcagaaagacacaaattcctgagaattgggaacatgctaaatacaaatggtatcttaaggaactccaggatggcattgggcagcggcaaactgttgtcagaacattgaatgcaactggggaagaaataattcagcaatcctcaaaaacagatgccagtattctacaggaaaaattgggaagcctgaatctgcggtggcaggaggtctgcaaacagctgtcagacagaaaaaagaggctagaagaacaaaagaatatcttgtcagaatttcaaagagatttaaatgaatttgttttatggttggaggaagcagataacattgctagtatcccacttgaacctggaaaagagcagcaactaaaagaaaagcttgagcaagtcaagttactggtggaagagttgcccctgcgccagggaattctcaaacaattaaatgaaactggaggacccgtgcttgtaagtgctcccataagcccagaagagcaagataaacttgaaaataagctcaagcagacaaatctccagtggataaaggtttccagagctttacctgagaaacaaggagaaattgaagctcaaataaaagaccttgggcagcttgaaaaaaagcttgaagaccttgaagagcagttaaatcatctgctgctgtggttatctcctattaggaatcagttggaaatttataaccaaccaaaccaagaaggaccatttgacgttcaggaaactgaaatagcagttcaagctaaacaaccggatgtggaagagattttgtctaaagggcagcatttgtacaaggaaaaaccagccactcagccagtgaagaggaagttagaagatctgagctctgagtggaaggcggtaaaccgtttacttcaagagctgagggcaaagcagcctgacctagctcctggactgaccactattggagcctctcctactcagactgttactctggtgacacaacctgtggttactaaggaaactgccatctccaaactagaaatgccatcttccttgatgttggaggtacctgctctggcagatttcaaccgggcttggacagaacttaccgactggctttctctgcttgatcaagttataaaatcacagagggtgatggtgggtgaccttgaggatatcaacgagatgatcatcaagcagaaggcaacaatgcaggatttggaacagaggcgtccccagttggaagaactcattaccgctgcccaaaatttgaaaaacaagaccagcaatcaagaggctagaacaatcattacggatcgaattgaaagaattcagaatcagtgggatgaagtacaagaacaccttcagaaccggaggcaacagttgaatgaaatgttaaaggattcaacacaatggctggaagctaaggaagaagctgagcaggtcttaggacaggccagagccaagcttgagtcatggaaggagggtccctatacagtagatgcaatccaaaagaaaatcacagaaaccaagcagttggccaaagacctccgccagtggcagacaaatgtagatgtggcaaatgacttggccctgaaacttctccgggattattctgcagatgataccagaaaagtccacatgataacagagaatatcaatgcctcttggagaagcattcataaaagggtgagtgagcgagaggctgctttggaagaaactcatagattactgcaacagttccccctggacctggaaaagtttcttgcctggcttacagaagctgaaacaactgccaatgtcctacaggatgctacccgtaaggaaaggctcctagaagactccaagggagtaaaagagctgatgaaacaatggcaagacctccaaggtgaaattgaagctcacacagatgtttatcacaacctggatgaaaacagccaaaaaatcctgagatccctggaaggttccgatgatgcagtcctgttacaaagacgtttggataacatgaacttcaagtggagtgaacttcggaaaaagtctctcaacattaggtcccatttggaagccagttctgaccagtggaagcgtctgcacctttctctgcaggaacttctggtgtggctacagctgaaagatgatgaattaagccggcaggcacctattggaggcgactttccagcagttcagaagcagaacgatgtacatagggccttcaagagggaattgaaaactaaagaacctgtaatcatgagtactcttgagactgtacgaatatttctgacagagcagcctttggaaggactagagaaactctaccaggagcccagagagctgcctcctgaggagagagcccagaatgtcactcggcttctacgaaagcaggctgaggaggtcaatactgagtgggaaaaattgaacctgcactccgctgactggcagagaaaaatagatgagacccttgaaagactccaggaacttcaagaggccacggatgagctggacctcaagctgcgccaagctgaggtgatcaagggatcctggcagcccgtgggcgatctcctcattgactctctccaagatcacctcgagaaagtcaaggcacttcgaggagaaattgcgcctctgaaagagaacgtgagccacgtcaatgaccttgctcgccagcttaccactttgggcattcagctctcaccgtataacctcagcactctggaagacctgaacaccagatggaagcttctgcaggtggccgtcgaggaccgagtcaggcagctgcatgaagcccacagggactttggtccagcatctcagcactttctttccacgtctgtccagggtccctgggagagagccatctcgccaaacaaagtgccctactatatcaaccacgagactcaaacaacttgctgggaccatcccaaaatgacagagctctaccagtctttagctgacctgaataatgtcagattctcagcttataggactgccatgaaactccgaagactgcagaaggccctttgcttggatctcttgagcctgtcagctgcatgtgatgccttggaccagcacaacctcaagcaaaatgaccagcccatggatatcctgcagattattaattgtttgaccactatttatgaccgcctggagcaagagcacaacaatttggtcaacgtccctctctgcgtggatatgtgtctgaactggctgctgaatgtttatgatacgggacgaacagggaggatccgtgtcctgtcttttaaaactggcatcatttccctgtgtaaagcacatttggaagacaagtacagataccttttcaagcaagtggcaagttcaacaggattttgtgaccagcgcaggctgggcctccttctgcatgattctatccaaattccaagacagttgggtgaagttgcatcctttgggggcagtaacattgagccaagtgtccggagctgcttccaatttgctaataataagccagagatcgaagcggccctcttcctagactggatgagactggaaccccagtccatggtgtggctgcccgtcctgcacagagtggctgctgcagaaactgccaagcatcaggccaaatgtaacatctgcaaagagtgtccaatcattggattcaggtacaggagtctaaagcactttaattatgacatctgccaaagctgctttttttctggtcgagttgcaaaaggccataaaatgcactatcccatggtggaatattgcactccgactacatcaggagaagatgttcgagactttgccaaggtactaaaaaacaaatttcgaaccaaaaggtattttgcgaagcatccccgaatgggctacctgccagtgcagactgtcttagagggggacaacatggaaactcccgttactctgatcaacttctggccagtagattctgcgcctgcctcgtcccctcagctttcacacgatgatactcattcacgcattgaacattatgctagcaggctagcagaaatggaaaacagcaatggatcttatctaaatgatagcatctctcctaatgagagcatagatgatgaacatttgttaatccagcattactgccaaagtttgaaccaggactcccccctgagccagcctcgtagtcctgcccagatcttgatttccttagagagtgaggaaagaggggagctagagagaatcctagcagatcttgaggaagaaaacaggaatctgcaagcagaatatgaccgtctaaagcagcagcacgaacataaaggcctgtccccactgccgtcccctcctgaaatgatgcccacctctccccagagtccccgggatgctgagctcattgctgaggccaagctactgcgtcaacacaaaggccgcctggaagccaggatgcaaatcctggaagaccacaataaacagctggagtcacagttacacaggctaaggcagctgctggagcaaccccaggcagaggccaaagtgaatggcacaacggtgtcctctccttctacctctctacagaggtccgacagcagtcagcctatgctgctccgagtggttggcagtcaaacttcggactccatgggtgaggaagatcttctcagtcctccccaggacacaagcacagggttagaggaggtgatggagcaactcaacaactccttccctagttcaagaggaagaaatacccctggaaagccaatgagagaggacacaatgtaggaagtcttttccacatggcagatgatttgggcagagcgatggagtccttagtatcagtcatgacagatgaagaaggagcagaataaatgttttacaactcctgattcccgcatggtttttataatattcatacaacaaagaggattagacagtaagagtttacaagaaataaatctatatttttgtgaagggtagtggtattatactgtagatttcagtagtttctaagtctgttattgttttgttaacaatggcaggttttacacgtctatgcaattgtacaaaaaagttataagaaaactacatgtaaaatcttgatagctaaataacttgccatttctttatatggaacgcattttgggttgtttaaaaatttataacagttataaagaaagattgtaaactaaagtgtgctttataaaaaaaagttgtttataaaaacccctaaaaacaaaacaaacacacacacacacacatacacacacacacacaaaactttgaggcagcgcattgttttgcatccttttggcgtgatatccatatgaaattcatggctttttctttttttgcatattaaagataagacttcctctaccaccacaccaaatgactactacacactgctcatttgagaactgtcagctgagtggggcaggcttgagttttcatttcatatatctatatgtctataagtatataaatactatagttatatagataaagagatacgaatttctatagactgactttttccattttttaaatgttcatgtcacatcctaatagaaagaaattacttctagtcagtcatccaggcttacctgcttggtctagaatggatttttcccggagccggaagccaggaggaaactacaccacactaaaacattgtctacagctccagatgtttctcattttaaacaactttccactgacaacgaaagtaaagtaaagtattggatttttttaaagggaacatgtgaatgaatacacaggacttattatatcagagtgagtaatcggttggttggttgattgattgattgattgatacattcagcttcctgctgctagcaatgccacgatttagatttaatgatgcttcagtggaaatcaatcagaaggtattctgaccttgtgaacatcagaaggtattttttaactcccaagcagtagcaggacgatgatagggctggagggctatggattcccagcccatccctgtgaaggagtaggccactctttaagtgaaggattggatgattgttcataatacataaagttctctgtaattacaactaaattattatgccctcttctcacagtcaaaaggaactgggtggtttggtttttgttgcttttttagatttattgtcccatgtgggatgagtttttaaatgccacaagacataatttaaaataaataaactttgggaaaaggtgtaagacagtagccccatcacatttgtgatactgacaggtatcaacccagaagcccatgaactgtgtttccatcctttgcatttctctgcgagtagttccacacaggtttgtaagtaagtaagaaagaaggcaaattgattcaaatgttacaaaaaaacccttcttggtggattagacaggttaaatatataaacaaacaaacaaaaattgctcaaaaaagaggagaaaagctcaagaggaaaagctaaggactggtaggaaaaagctttactctttcatgccattttatttctttttgatttttaaatcattcattcaatagataccaccgtgtgacctataattttgcaaatctgttacctctgacatcaagtgtaattagcttttggagagtgggctgacatcaagtgtaattagcttttggagagtgggttttgtccattattaataattaattaattaacatcaaacacggcttctcatgctatttctacctcactttggttttggggtgttcctgataattgtgcacacctgagttcacagcttcaccacttgtccattgcgttattttctttttcctttataattctttctttttccttcataattttcaaaagaaaacccaaagctctaaggtaacaaattaccaaattacatgaagatttggtttttgtcttgcatttttttcctttatgtgacgctggaccttttctttacccaaggatttttaaaactcagatttaaaacaaggggttactttacatcctactaagaagtttaagtaagtaagtttcattctaaaatcagaggtaaatagagtgcataaataattttgttttaatctttttgtttttcttttagacacattagctctggagtgagtctgtcataatatttgaacaaaaattgagagctttattgctgcattttaagcataattaatttggacattatttcgtgttgtgttctttataaccaccgagtattaaactgtaaatcataatgtaactgaagcataaacatcacatggcatgttttgtcattgttttcaggtactgagttcttacttgagtatcataatatattgtgttttaacaccaacactgtaacatttacgaattatttttttaaacttcagttttactgcattttcacaacatatcagacttcaccaaatatatgccttactattgtattatagtactgctttactgtgtatctcaataaagcacgcagttatgttac

SEQ ID NO: 1737 - protein, 3685 aa, Homo sapiens
MLWWEEVEDCYEREDVQKKTFTKWVNAQFSKFGKQHIENLFSDLQDGRRLLDLLEGLTGQKLPKEKGSTRVHALNNVNKALRVLQNNNVDLVNIGSTDIVDGNHKLTLGLIWNIILHWQVKNVMKNIMAGLQQTNSEKILLSWVRQSTRNYPQVNVINFTTSWSDGLALNALIHSHRPDLFDWNSVVCQQSATQRLEHAFNIARYQLGIEKLLDPEDVDTTYPDKKSILMYITSLFQVLPQQVSIEAIQEVEMLPRPPKVTKEEHFQLHHQMHYSQQITVSLAQGYERTSSPKPRFKSYAYTQAAYVTTSDPTRSPFPSQHLEAPEDKSFGSSLMESEVNLDRYQTALEEVLSWLLSAEDTLQAQGEISNDVEVVKDQFHTHEGYMMDLTAHQGRVGNILQLGSKLIGTGKLSEDEETEVQEQMNLLNSRWECLRVASMEKQSNLHRVLMDLQNQKLKELNDWLTKTEERTRKMEEEPLGPDLEDLKRQVQQHKVLQEDLEQEQVRVNSLTHMVVVVDESSGDHATAALEEQLKVLGDRWANICRWTEDRWVLLQDILLKWQRLTEEQCLFSAWLSEKEDAVNKIHTTGFKDQNEMLSSLQKLAVLKADLEKKKQSMGKLYSLKQDLLSTLKNKSVTQKTEAWLDNFARCWDNLVQKLEKSTAQISQAVTTTQPSLTQTTVMETVTTVTTREQILVKHAQEELPPPPPQKKRQITVDSEIRKRLDVDITELHSWITRSEAVLQSPEFAIFRKEGNFSDLKEKVNAIEREKAEKFRKLQDASRSAQALVEQMVNEGVNADSIKQASEQLNSRWIEFCQLLSERLNWLEYQNNIIAFYNQLQQLEQMTTTAENWLKIQPTTPSEPTAIKSQLKICKDEVNRLSGLQPQIERLKIQSIALKEKGQGPMFLDADFVAFTNHFKQVFSDVQAREKELQTIFDTLPPMRYQETMSAIRTWVQQSETKLSIPQLSVTDYEIMEQRLGELQALQSSLQEQQSGLYYLSTTVKEMSKKAPSEISRKYQSEFEEIEGRWKKLSSQLVEHCQKLEEQMNKLRKIQNHIQTLKKWMAEVDVFLKEEWPALGDSEILKKQLKQCRLLVSDIQTIQPSLNSVNEGGQKIKNEAEPEFASRLETELKELNTQWDHMCQQVYARKEALKGGLEKTVSLQKDLSEMHEWMTQAEEEYLERDFEYKTPDELQKAVEEMKRAKEEAQQKEAKVKLLTESVNSVIAQAPPVAQEALKKELETLTTNYQWLCTRLNGKCKTLEEVWACWHELLSYLEKANKWLNEVEFKLKTTENIPGGAEEISEVLDSLENLMRHSEDNPNQIRILAQTLTDGGVMDELINEELETFNSRWRELHEEAVRRQKLLEQSIQSAQETEKSLHLIQESLTFIDKQLAAYIADKVDAAQMPQEAQKIQSDLTSHEISLEEMKKHNQGKEAAQRVLSQIDVAQKKLQDVSMKFRLFQKPANFEQRLQESKMILDEVKMHLPALETKSVEQEVVQSQLNHCVNLYKSLSEVKSEVEMVIKTGRQIVQKKQTENPKELDERVTALKLHYNELGAKVTERKQQLEKCLKLSRKMRKEMNVLTEWLAATDMELTKRSAVEGMPSNLDSEVAWGKATQKEIEKQKVHLKSITEVGEALKTVLGKKETLVEDKLSLLNSNWIAVTSRAEEWLNLLLEYQKHMETFDQNVDHITKWIIQADTLLDESEKKKPQQKEDVLKRLKAELNDIRPKVDSTRDQAANLMANRGDHCRKLVEPQISELNHRFAAISHRIKTGKASIPLKELEQFNSDIQKLLEPLEAEIQQGVNLKEEDFNKDMNEDNEGTVKELLQRGDNLQQRITDERKREEIKIKQQLLQTKHNALKDLRSQRRKKALEISHQWYQYKRQADDLLKCLDDIEKKLASLPEPRDERKIKEIDRELQKKKEELNAVRRQAEGLSEDGAAMAVEPTQIQLSKRWREIESKFAQFRRLNFAQIHTVREETMMVMTEDMPLEISYVPSTYLTEITHVSQALLEVEQLLNAPDLCAKDFEDLFKQEESLKNIKDSLQQSSGRIDIIHSKKTAALQSATPVERVKLQEALSQLDFQWEKVNKMYKDRQGRFDRSVEKWRRFHYDIKIFNQWLTEAEQFLRKTQIPENWEHAKYKWYLKELQDGIGQRQTVVRTLNATGEEIIQQSSKTDASILQEKLGSLNLRWQEVCKQLSDRKKRLEEQKNILSEFQRDLNEFVLWLEEADNIASIPLEPGKEQQLKEKLEQVKLLVEELPLRQGILKQLNETGGPVLVSAPISPEEQDKLENKLKQTNLQWIKVSRALPEKQGEIEAQIKDLGQLEKKLEDLEEQLNHLLLWLSPIRNQLEIYNQPNQEGPFDVQETEIAVQAKQPDVEEILSKGQHLYKEKPATQPVKRKLEDLSSEWKAVNRLLQELRAKQPDLAPGLTTIGASPTQTVTLVTQPVVTKETAISKLEMPSSLMLEVPALADFNRAWTELTDWLSLLDQVIKSQRVMVGDLEDINEMIIKQKATMQDLEQRRPQLEELITAAQNLKNKTSNQEARTIITDRIERIQNQWDEVQEHLQNRRQQLNEMLKDSTQWLEAKEEAEQVLGQARAKLESWKEGPYTVDAIQKKITETKQLAKDLRQWQTNVDVANDLALKLLRDYSADDTRKVHMITENINASWRSIHKRVSEREAALEETHRLLQQFPLDLEKFLAWLTEAETTANVLQDATRKERLLEDSKGVKELMKQWQDLQGEIEAHTDVYHNLDENSQKILRSLEGSDDAVLLQRRLDNMNFKWSELRKKSLNIRSHLEASSDQWKRLHLSLQELLVWLQLKDDELSRQAPIGGDFPAVQKQNDVHRAFKRELKTKEPVIMSTLETVRIFLTEQPLEGLEKLYQEPRELPPEERAQNVTRLLRKQAEEVNTEWEKLNLHSADWQRKIDETLERLQELQEATDELDLKLRQAEVIKGSWQPVGDLLIDSLQDHLEKVKALRGEIAPLKENVSHVNDLARQLTTLGIQLSPYNLSTLEDLNTRWKLLQVAVEDRVRQLHEAHRDFGPASQHFLSTSVQGPWERAISPNKVPYYINHETQTTCWDHPKMTELYQSLADLNNVRFSAYRTAMKLRRLQKALCLDLLSLSAACDALDQHNLKQNDQPMDILQIINCLTTIYDRLEQEHNNLVNVPLCVDMCLNWLLNVYDTGRTGRIRVLSFKTGIISLCKAHLEDKYRYLFKQVASSTGFCDQRRLGLLLHDSIQIPRQLGEVASFGGSNIEPSVRSCFQFANNKPEIEAALFLDWMRLEPQSMVWLPVLHRVAAAETAKHQAKCNICKECPIIGFRYRSLKHFNYDICQSCFFSGRVAKGHKMHYPMVEYCTPTTSGEDVRDFAKVLKNKFRTKRYFAKHPRMGYLPVQTVLEGDNMETPVTLINFWPVDSAPASSPQLSHDDTHSRIEHYASRLAEMENSNGSYLNDSISPNESIDDEHLLIQHYCQSLNQDSPLSQPRSPAQILISLESEERGELERILADLEEENRNLQAEYDRLKQQHEHKGLSPLPSPPEMMPTSPQSPRDAELIAEAKLLRQHKGRLEARMQILEDHNKQLESQLHRLRQLLEQPQAEAKVNGTTVSSPSTSLQRSDSSQPMLLRVVGSQTSDSMGEEDLLSPPQDTSTGLEEVMEQLNNSFPSSRGRNTPGKPMREDTM

SEQ ID NO: 1738 - DNA, 13764 bp, Homo sapiens
tcactgacacatagagtaacttctagttctccaagctctactcatgatgaaagagaagatgttcaaaagaaaacattcacaaaatgggtaaatgcacaattttctaagtttgggaagcagcatattgagaacctcttcagtgacctacaggatgggaggcgcctcctagacctcctcgaaggcctgacagggcaaaaactgccaaaagaaaaaggatccacaagagttcatgccctgaacaatgtcaacaaggcactgcgggttttgcagaacaataatgttgatttagtgaatattggaagtactgacatcgtagatggaaatcataaactgactcttggtttgatttggaatataatcctccactggcaggtcaaaaatgtaatgaaaaatatcatggctggattgcaacaaaccaacagtgaaaagattctcctgagctgggtccgacaatcaactcgtaattatccacaggttaatgtaatcaacttcaccaccagctggtctgatggcctggctttgaatgctctcatccatagtcataggccagacctatttgactggaatagtgtggtttgccagcagtcagccacacaacgactggaacatgcattcaacatcgccagatatcaattaggcatagagaaactactcgatcctgaagatgttgataccacctatccagataagaagtccatcttaatgtacatcacatcactcttccaagttttgcctcaacaagtgagcattgaagccatccaggaagtggaaatgttgccaaggccacctaaagtgactaaagaagaacattttcagttacatcatcaaatgcactattctcaacagatcacggtcagtctagcacagggatatgagagaacttcttcccctaagcctcgattcaagagctatgcctacacacaggctgcttatgtcaccacctctgaccctacacggagcccatttccttcacagcatttggaagctcctgaagacaagtcatttggcagttcattgatggagagtgaagtaaacctggaccgttatcaaacagctttagaagaagtattatcgtggcttctttctgctgaggacacattgcaagcacaaggagagatttctaatgatgtggaagtggtgaaagaccagtttcatactcatgaggggtacatgatggatttgacagcccatcagggccgggttggtaatattctacaattgggaagtaagctgattggaacaggaaaattatcagaagatgaagaaactgaagtacaagagcagatgaatctcctaaattcaagatgggaatgcctcagggtagctagcatggaaaaacaaagcaatttacatagagttttaatggatctccagaatcagaaactgaaagagttgaatgactggctaacaaaaacagaagaaagaacaaggaaaatggaggaagagcctcttggacctgatcttgaagacctaaaacgccaagtacaacaacataaggtgcttcaagaagatctagaacaagaacaagtcagggtcaattctctcactcacatggtggtggtagttgatgaatctagtggagatcacgcaactgctgctttggaagaacaacttaaggtattgggagatcgatgggcaaacatctgtagatggacagaagaccgctgggttcttttacaagacatccttctcaaatggcaacgtcttactgaagaacagtgcctttttagtgcatggctttcagaaaaagaagatgcagtgaacaagattcacacaactggctttaaagatcaaaatgaaatgttatcaagtcttcaaaaactggccgttttaaaagcggatctagaaaagaaaaagcaatccatgggcaaactgtattcactcaaacaagatcttctttcaacactgaagaataagtcagtgacccagaagacggaagcatggctggataactttgcccggtgttgggataatttagtccaaaaacttgaaaagagtacagcacagatttcacaggctgtcaccaccactcagccatcactaacacagacaactgtaatggaaacagtaactacggtgaccacaagggaacagatcctggtaaagcatgctcaagaggaacttccaccaccacctccccaaaagaagaggcagattactgtggattctgaaattaggaaaaggttggatgttgatataactgaacttcacagctggattactcgctcagaagctgtgttgcagagtcctgaatttgcaatctttcggaaggaaggcaacttctcagacttaaaagaaaaagtcaatgccatagagcgagaaaaagctgagaagttcagaaaactgcaagatgccagcagatcagctcaggccctggtggaacagatggtgaatgagggtgttaatgcagatagcatcaaacaagcctcagaacaactgaacagccggtggatcgaattctgccagttgctaagtgagagacttaactggctggagtatcagaacaacatcatcgctttctataatcagctacaacaattggagcagatgacaactactgctgaaaactggttgaaaatccaacccaccaccccatcagagccaacagcaattaaaagtcagttaaaaatttgtaaggatgaagtcaaccggctatcaggtcttcaacctcaaattgaacgattaaaaattcaaagcatagccctgaaagagaaaggacaaggacccatgttcctggatgcagactttgtggcctttacaaatcattttaagcaagtcttttctgatgtgcaggccagagagaaagagctacagacaatttttgacactttgccaccaatgcgctatcaggagaccatgagtgccatcaggacatgggtccagcagtcagaaaccaaactctccatacctcaacttagtgtcaccgactatgaaatcatggagcagagactcggggaattgcaggctttacaaagttctctgcaagagcaacaaagtggcctatactatctcagcaccactgtgaaagagatgtcgaagaaagcgccctctgaaattagccggaaatatcaatcagaatttgaagaaattgagggacgctggaagaagctctcctcccagctggttgagcattgtcaaaagctagaggagcaaatgaataaactccgaaaaattcagaatcacatacaaaccctgaagaaatggatggctgaagttgatgtttttctgaaggaggaatggcctgcccttggggattcagaaattctaaaaaagcagctgaaacagtgcagacttttagtcagtgatattcagacaattcagcccagtctaaacagtgtcaatgaaggtgggcagaagataaagaatgaagcagagccagagtttgcttcgagacttgagacagaactcaaagaacttaacactcagtgggatcacatgtgccaacaggtctatgccagaaaggaggccttgaagggaggtttggagaaaactgtaagcctccagaaagatctatcagagatgcacgaatggatgacacaagctgaagaagagtatcttgagagagattttgaatataaaactccagatgaattacagaaagcagttgaagagatgaagagagctaaagaagaggcccaacaaaaagaagcgaaagtgaaactccttactgagtctgtaaatagtgtcatagctcaagctccacctgtagcacaagaggccttaaaaaaggaacttgaaactctaaccaccaactaccagtggctctgcactaggctgaatgggaaatgcaagactttggaagaagtttgggcatgttggcatgagttattgtcatacttggagaaagcaaacaagtggctaaatgaagtagaatttaaacttaaaaccactgaaaacattcctggcggagctgaggaaatctctgaggtgctagattcacttgaaaatttgatgcgacattcagaggataacccaaatcagattcgcatattggcacagaccctaacagatggcggagtcatggatgagctaatcaatgaggaacttgagacatttaattctcgttggagggaactacatgaagaggctgtaaggaggcaaaagttgcttgaacagagcatccagtctgcccaggagactgaaaaatccttacacttaatccaggagtccctcacattcattgacaagcagttggcagcttatattgcagacaaggtggacgcagctcaaatgcctcaggaagcccagaaaatccaatctgatttgacaagtcatgagatcagtttagaagaaatgaagaaacataatcaggggaaggaggctgcccaaagagtcctgtctcagattgatgttgcacagaaaaaattacaagatgtctccatgaagtttcgattattccagaaaccagccaattttgagcagcgtctacaagaaagtaagatgattttagatgaagtgaagatgcacttgcctgcattggaaacaaagagtgtggaacaggaagtagtacagtcacagctaaatcattgtgtgaacttgtataaaagtctgagtgaagtgaagtctgaagtggaaatggtgataaagactggacgtcagattgtacagaaaaagcagacggaaaatcccaaagaacttgatgaaagagtaacagctttgaaattgcattataatgagctgggagcaaaggtaacagaaagaaagcaacagttggagaaatgcttgaaattgtcccgtaagatgcgaaaggaaatgaatgtcttgacagaatggctggcagctacagatatggaattgacaaagagatcagcagttgaaggaatgcctagtaatttggattctgaagttgcctggggaaaggctactcaaaaagagattgagaaacagaaggtgcacctgaagagtatcacagaggtaggagaggccttgaaaacagttttgggcaagaaggagacgttggtggaagataaactcagtcttctgaatagtaactggatagctgtcacctcccgagcagaagagtggttaaatcttttgttggaataccagaaacacatggaaacttttgaccagaatgtggaccacatcacaaagtggatcattcaggctgacacacttttggatgaatcagagaaaaagaaaccccagcaaaaagaagacgtgcttaagcgtttaaaggcagaactgaatgacatacgcccaaaggtggactctacacgtgaccaagcagcaaacttgatggcaaaccgcggtgaccactgcaggaaattagtagagccccaaatctcagagctcaaccatcgatttgcagccatttcacacagaattaagactggaaaggcctccattcctttgaaggaattggagcagtttaactcagatatacaaaaattgcttgaaccactggaggctgaaattcagcagggggtgaatctgaaagaggaagacttcaataaagatatgaatgaagacaatgagggtactgtaaaagaattgttgcaaagaggagacaacttacaacaaagaatcacagatgagagaaagcgagaggaaataaagataaaacagcagctgttacagacaaaacataatgctctcaaggatttgaggtctcaaagaagaaaaaaggctctagaaatttctcatcagtggtatcagtacaagaggcaggctgatgatctcctgaaatgcttggatgacattgaaaaaaaattagccagcctacctgagcccagagatgaaaggaaaataaaggaaattgatcgggaattgcagaagaagaaagaggagctgaatgcagtgcgtaggcaagctgagggcttgtctgaggatggggccgcaatggcagtggagccaactcagatccagctcagcaagcgctggcgggaaattgagagcaaatttgctcagtttcgaagactcaactttgcacaaattcacactgtccgtgaagaaacgatgatggtgatgactgaagacatgcctttggaaatttcttatgtgccttctacttatttgactgaaatcactcatgtctcacaagccctattagaagtggaacaacttctcaatgctcctgacctctgtgctaaggactttgaagatctctttaagcaagaggagtctctgaagaatataaaagatagtctacaacaaagctcaggtcggattgacattattcatagcaagaagacagcagcattgcaaagtgcaacgcctgtggaaagggtgaagctacaggaagctctctcccagcttgatttccaatgggaaaaagttaacaaaatgtacaaggaccgacaagggcgatttgacagatctgttgagaaatggcggcgttttcattatgatataaagatatttaatcagtggctaacagaagctgaacagtttctcagaaagacacaaattcctgagaattgggaacatgctaaatacaaatggtatcttaaggaactccaggatggcattgggcagcggcaaactgttgtcagaacattgaatgcaactggggaagaaataattcagcaatcctcaaaaacagatgccagtattctacaggaaaaattgggaagcctgaatctgcggtggcaggaggtctgcaaacagctgtcagacagaaaaaagaggctagaagaacaaaagaatatcttgtcagaatttcaaagagatttaaatgaatttgttttatggttggaggaagcagataacattgctagtatcccacttgaacctggaaaagagcagcaactaaaagaaaagcttgagcaagtcaagttactggtggaagagttgcccctgcgccagggaattctcaaacaattaaatgaaactggaggacccgtgcttgtaagtgctcccataagcccagaagagcaagataaacttgaaaataagctcaagcagacaaatctccagtggataaaggtttccagagctttacctgagaaacaaggagaaattgaagctcaaataaaagaccttgggcagcttgaaaaaaagcttgaagaccttgaagagcagttaaatcatctgctgctgtggttatctcctattaggaatcagttggaaatttataaccaaccaaaccaagaaggaccatttgacgttcaggaaactgaaatagcagttcaagctaaacaaccggatgtggaagagattttgtctaaagggcagcatttgtacaaggaaaaaccagccactcagccagtgaagaggaagttagaagatctgagctctgagtggaaggcggtaaaccgtttacttcaagagctgagggcaaagcagcctgacctagctcctggactgaccactattggagcctctcctactcagactgttactctggtgacacaacctgtggttactaaggaaactgccatctccaaactagaaatgccatcttccttgatgttggaggtacctgctctggcagatttcaaccgggcttggacagaacttaccgactggctttctctgcttgatcaagttataaaatcacagagggtgatggtgggtgaccttgaggatatcaacgagatgatcatcaagcagaaggcaacaatgcaggatttggaacagaggcgtccccagttggaagaactcattaccgctgcccaaaatttgaaaaacaagaccagcaatcaagaggctagaacaatcattacggatcgaattgaaagaattcagaatcagtgggatgaagtacaagaacaccttcagaaccggaggcaacagttgaatgaaatgttaaaggattcaacacaatggctggaagctaaggaagaagctgagcaggtcttaggacaggccagagccaagcttgagtcatggaaggagggtccctatacagtagatgcaatccaaaagaaaatcacagaaaccaagcagttggccaaagacctccgccagtggcagacaaatgtagatgtggcaaatgacttggccctgaaacttctccgggattattctgcagatgataccagaaaagtccacatgataacagagaatatcaatgcctcttggagaagcattcataaaagggtgagtgagcgagaggctgctttggaagaaactcatagattactgcaacagttccccctggacctggaaaagtttcttgcctggcttacagaagctgaaacaactgccaatgtcctacaggatgctacccgtaaggaaaggctcctagaagactccaagggagtaaaagagctgatgaaacaatggcaagacctccaaggtgaaattgaagctcacacagatgtttatcacaacctggatgaaaacagccaaaaaatcctgagatccctggaaggttccgatgatgcagtcctgttacaaagacgtttggataacatgaacttcaagtggagtgaacttcggaaaaagtctctcaacattaggtcccatttggaagccagttctgaccagtggaagcgtctgcacctttctctgcaggaacttctggtgtggctacagctgaaagatgatgaattaagccggcaggcacctattggaggcgactttccagcagttcagaagcagaacgatgtacatagggccttcaagagggaattgaaaactaaagaacctgtaatcatgagtactcttgagactgtacgaatatttctgacagagcagcctttggaaggactagagaaactctaccaggagcccagagagctgcctcctgaggagagagcccagaatgtcactcggcttctacgaaagcaggctgaggaggtcaatactgagtgggaaaaattgaacctgcactccgctgactggcagagaaaaatagatgagacccttgaaagactccaggaacttcaagaggccacggatgagctggacctcaagctgcgccaagctgaggtgatcaagggatcctggcagcccgtgggcgatctcctcattgactctctccaagatcacctcgagaaagtcaaggcacttcgaggagaaattgcgcctctgaaagagaacgtgagccacgtcaatgaccttgctcgccagcttaccactttgggcattcagctctcaccgtataacctcagcactctggaagacctgaacaccagatggaagcttctgcaggtggccgtcgaggaccgagtcaggcagctgcatgaagcccacagggactttggtccagcatctcagcactttctttccacgtctgtccagggtccctgggagagagccatctcgccaaacaaagtgccctactatatcaaccacgagactcaaacaacttgctgggaccatcccaaaatgacagagctctaccagtctttagctgacctgaataatgtcagattctcagcttataggactgccatgaaactccgaagactgcagaaggccctttgcttggatctcttgagcctgtcagctgcatgtgatgccttggaccagcacaacctcaagcaaaatgaccagcccatggatatcctgcagattattaattgtttgaccactatttatgaccgcctggagcaagagcacaacaatttggtcaacgtccctctctgcgtggatatgtgtctgaactggctgctgaatgtttatgatacgggacgaacagggaggatccgtgtcctgtcttttaaaactggcatcatttccctgtgtaaagcacatttggaagacaagtacagataccttttcaagcaagtggcaagttcaacaggattttgtgaccagcgcaggctgggcctccttctgcatgattctatccaaattccaagacagttgggtgaagttgcatcctttgggggcagtaacattgagccaagtgtccggagctgcttccaatttgctaataataagccagagatcgaagcggccctcttcctagactggatgagactggaaccccagtccatggtgtggctgcccgtcctgcacagagtggctgctgcagaaactgccaagcatcaggccaaatgtaacatctgcaaagagtgtccaatcattggattcaggtacaggagtctaaagcactttaattatgacatctgccaaagctgctttttttctggtcgagttgcaaaaggccataaaatgcactatcccatggtggaatattgcactccgactacatcaggagaagatgttcgagactttgccaaggtactaaaaaacaaatttcgaaccaaaaggtattttgcgaagcatccccgaatgggctacctgccagtgcagactgtcttagagggggacaacatggaaactcccgttactctgatcaacttctggccagtagattctgcgcctgcctcgtcccctcagctttcacacgatgatactcattcacgcattgaacattatgctagcaggctagcagaaatggaaaacagcaatggatcttatctaaatgatagcatctctcctaatgagagcatagatgatgaacatttgttaatccagcattactgccaaagtttgaaccaggactcccccctgagccagcctcgtagtcctgcccagatcttgatttccttagagagtgaggaaagaggggagctagagagaatcctagcagatcttgaggaagaaaacaggaatctgcaagcagaatatgaccgtctaaagcagcagcacgaacataaaggcctgtccccactgccgtcccctcctgaaatgatgcccacctctccccagagtccccgggatgctgagctcattgctgaggccaagctactgcgtcaacacaaaggccgcctggaagccaggatgcaaatcctggaagaccacaataaacagctggagtcacagttacacaggctaaggcagctgctggagcaaccccaggcagaggccaaagtgaatggcacaacggtgtcctctccttctacctctctacagaggtccgacagcagtcagcctatgctgctccgagtggttggcagtcaaacttcggactccatgggtgaggaagatcttctcagtcctccccaggacacaagcacagggttagaggaggtgatggagcaactcaacaactccttccctagttcaagaggaagaaatacccctggaaagccaatgagagaggacacaatgtaggaagtcttttccacatggcagatgatttgggcagagcgatggagtccttagtatcagtcatgacagatgaagaaggagcagaataaatgttttacaactcctgattcccgcatggtttttataatattcatacaacaaagaggattagacagtaagagtttacaagaaataaatctatatttttgtgaagggtagtggtattatactgtagatttcagtagtttctaagtctgttattgttttgttaacaatggcaggttttacacgtctatgcaattgtacaaaaaagttataagaaaactacatgtaaaatcttgatagctaaataacttgccatttctttatatggaacgcattttgggttgtttaaaaatttataacagttataaagaaagattgtaaactaaagtgtgctttataaaaaaaagttgtttataaaaacccctaaaaacaaaacaaacacacacacacacacatacacacacacacacaaaactttgaggcagcgcattgttttgcatccttttggcgtgatatccatatgaaattcatggctttttctttttttgcatattaaagataagacttcctctaccaccacaccaaatgactactacacactgctcatttgagaactgtcagctgagtggggcaggcttgagttttcatttcatatatctatatgtctataagtatataaatactatagttatatagataaagagatacgaatttctatagactgactttttccattttttaaatgttcatgtcacatcctaatagaaagaaattacttctagtcagtcatccaggcttacctgcttggtctagaatggatttttcccggagccggaagccaggaggaaactacaccacactaaaacattgtctacagctccagatgtttctcattttaaacaactttccactgacaacgaaagtaaagtaaagtattggatttttttaaagggaacatgtgaatgaatacacaggacttattatatcagagtgagtaatcggttggttggttgattgattgattgattgatacattcagcttcctgctgctagcaatgccacgatttagatttaatgatgcttcagtggaaatcaatcagaaggtattctgaccttgtgaacatcagaaggtattttttaactcccaagcagtagcaggacgatgatagggctggagggctatggattcccagcccatccctgtgaaggagtaggccactctttaagtgaaggattggatgattgttcataatacataaagttctctgtaattacaactaaattattatgccctcttctcacagtcaaaaggaactgggtggtttggtttttgttgcttttttagatttattgtcccatgtgggatgagtttttaaatgccacaagacataatttaaaataaataaactttgggaaaaggtgtaagacagtagccccatcacatttgtgatactgacaggtatcaacccagaagcccatgaactgtgtttccatcctttgcatttctctgcgagtagttccacacaggtttgtaagtaagtaagaaagaaggcaaattgattcaaatgttacaaaaaaacccttcttggtggattagacaggttaaatatataaacaaacaaacaaaaattgctcaaaaaagaggagaaaagctcaagaggaaaagctaaggactggtaggaaaaagctttactctttcatgccattttatttctttttgatttttaaatcattcattcaatagataccaccgtgtgacctataattttgcaaatctgttacctctgacatcaagtgtaattagcttttggagagtgggctgacatcaagtgtaattagcttttggagagtgggttttgtccattattaataattaattaattaacatcaaacacggcttctcatgctatttctacctcactttggttttggggtgttcctgataattgtgcacacctgagttcacagcttcaccacttgtccattgcgttattttctttttcctttataattctttctttttccttcataattttcaaaagaaaacccaaagctctaaggtaacaaattaccaaattacatgaagatttggtttttgtcttgcatttttttcctttatgtgacgctggaccttttctttacccaaggatttttaaaactcagatttaaaacaaggggttactttacatcctactaagaagtttaagtaagtaagtttcattctaaaatcagaggtaaatagagtgcataaataattttgttttaatctttttgtttttcttttagacacattagctctggagtgagtctgtcataatatttgaacaaaaattgagagctttattgctgcattttaagcataattaatttggacattatttcgtgttgtgttctttataaccaccgagtattaaactgtaaatcataatgtaactgaagcataaacatcacatggcatgttttgtcattgttttcaggtactgagttcttacttgagtatcataatatattgtgttttaacaccaacactgtaacatttacgaattatttttttaaacttcagttttactgcattttcacaacatatcagacttcaccaaatatatgccttactattgtattatagtactgctttactgtgtatctcaataaagcacgcagttatgttac

SEQ ID NO: 1739 - protein, 3562 aa, Homo sapiens
MKNIMAGLQQTNSEKILLSWVRQSTRNYPQVNVINFTTSWSDGLALNALIHSHRPDLFDWNSVVCQQSATQRLEHAFNIARYQLGIEKLLDPEDVDTTYPDKKSILMYITSLFQVLPQQVSIEAIQEVEMLPRPPKVTKEEHFQLHHQMHYSQQITVSLAQGYERTSSPKPRFKSYAYTQAAYVTTSDPTRSPFPSQHLEAPEDKSFGSSLMESEVNLDRYQTALEEVLSWLLSAEDTLQAQGEISNDVEVVKDQFHTHEGYMMDLTAHQGRVGNILQLGSKLIGTGKLSEDEETEVQEQMNLLNSRWECLRVASMEKQSNLHRVLMDLQNQKLKELNDWLTKTEERTRKMEEEPLGPDLEDLKRQVQQHKVLQEDLEQEQVRVNSLTHMVVVVDESSGDHATAALEEQLKVLGDRWANICRWTEDRWVLLQDILLKWQRLTEEQCLFSAWLSEKEDAVNKIHTTGFKDQNEMLSSLQKLAVLKADLEKKKQSMGKLYSLKQDLLSTLKNKSVTQKTEAWLDNFARCWDNLVQKLEKSTAQISQAVTTTQPSLTQTTVMETVTTVTTREQILVKHAQEELPPPPPQKKRQITVDSEIRKRLDVDITELHSWITRSEAVLQSPEFAIFRKEGNFSDLKEKVNAIEREKAEKFRKLQDASRSAQALVEQMVNEGVNADSIKQASEQLNSRWIEFCQLLSERLNWLEYQNNIIAFYNQLQQLEQMTTTAENWLKIQPTTPSEPTAIKSQLKICKDEVNRLSGLQPQIERLKIQSIALKEKGQGPMFLDADFVAFTNHFKQVFSDVQAREKELQTIFDTLPPMRYQETMSAIRTWVQQSETKLSIPQLSVTDYEIMEQRLGELQALQSSLQEQQSGLYYLSTTVKEMSKKAPSEISRKYQSEFEEIEGRWKKLSSQLVEHCQKLEEQMNKLRKIQNHIQTLKKWMAEVDVFLKEEWPALGDSEILKKQLKQCRLLVSDIQTIQPSLNSVNEGGQKIKNEAEPEFASRLETELKELNTQWDHMCQQVYARKEALKGGLEKTVSLQKDLSEMHEWMTQAEEEYLERDFEYKTPDELQKAVEEMKRAKEEAQQKEAKVKLLTESVNSVIAQAPPVAQEALKKELETLTTNYQWLCTRLNGKCKTLEEVWACWHELLSYLEKANKWLNEVEFKLKTTENIPGGAEEISEVLDSLENLMRHSEDNPNQIRILAQTLTDGGVMDELINEELETFNSRWRELHEEAVRRQKLLEQSIQSAQETEKSLHLIQESLTFIDKQLAAYIADKVDAAQMPQEAQKIQSDLTSHEISLEEMKKHNQGKEAAQRVLSQIDVAQKKLQDVSMKFRLFQKPANFEQRLQESKMILDEVKMHLPALETKSVEQEVVQSQLNHCVNLYKSLSEVKSEVEMVIKTGRQIVQKKQTENPKELDERVTALKLHYNELGAKVTERKQQLEKCLKLSRKMRKEMNVLTEWLAATDMELTKRSAVEGMPSNLDSEVAWGKATQKEIEKQKVHLKSITEVGEALKTVLGKKETLVEDKLSLLNSNWIAVTSRAEEWLNLLLEYQKHMETFDQNVDHITKWIIQADTLLDESEKKKPQQKEDVLKRLKAELNDIRPKVDSTRDQAANLMANRGDHCRKLVEPQISELNHRFAAISHRIKTGKASIPLKELEQFNSDIQKLLEPLEAEIQQGVNLKEEDFNKDMNEDNEGTVKELLQRGDNLQQRITDERKREEIKIKQQLLQTKHNALKDLRSQRRKKALEISHQWYQYKRQADDLLKCLDDIEKKLASLPEPRDERKIKEIDRELQKKKEELNAVRRQAEGLSEDGAAMAVEPTQIQLSKRWREIESKFAQFRRLNFAQIHTVREETMMVMTEDMPLEISYVPSTYLTEITHVSQALLEVEQLLNAPDLCAKDFEDLFKQEESLKNIKDSLQQSSGRIDIIHSKKTAALQSATPVERVKLQEALSQLDFQWEKVNKMYKDRQGRFDRSVEKWRRFHYDIKIFNQWLTEAEQFLRKTQIPENWEHAKYKWYLKELQDGIGQRQTVVRTLNATGEEIIQQSSKTDASILQEKLGSLNLRWQEVCKQLSDRKKRLEEQKNILSEFQRDLNEFVLWLEEADNIASIPLEPGKEQQLKEKLEQVKLLVEELPLRQGILKQLNETGGPVLVSAPISPEEQDKLENKLKQTNLQWIKVSRALPEKQGEIEAQIKDLGQLEKKLEDLEEQLNHLLLWLSPIRNQLEIYNQPNQEGPFDVQETEIAVQAKQPDVEEILSKGQHLYKEKPATQPVKRKLEDLSSEWKAVNRLLQELRAKQPDLAPGLTTIGASPTQTVTLVTQPVVTKETAISKLEMPSSLMLEVPALADFNRAWTELTDWLSLLDQVIKSQRVMVGDLEDINEMIIKQKATMQDLEQRRPQLEELITAAQNLKNKTSNQEARTIITDRIERIQNQWDEVQEHLQNRRQQLNEMLKDSTQWLEAKEEAEQVLGQARAKLESWKEGPYTVDAIQKKITETKQLAKDLRQWQTNVDVANDLALKLLRDYSADDTRKVHMITENINASWRSIHKRVSEREAALEETHRLLQQFPLDLEKFLAWLTEAETTANVLQDATRKERLLEDSKGVKELMKQWQDLQGEIEAHTDVYHNLDENSQKILRSLEGSDDAVLLQRRLDNMNFKWSELRKKSLNIRSHLEASSDQWKRLHLSLQELLVWLQLKDDELSRQAPIGGDFPAVQKQNDVHRAFKRELKTKEPVIMSTLETVRIFLTEQPLEGLEKLYQEPRELPPEERAQNVTRLLRKQAEEVNTEWEKLNLHSADWQRKIDETLERLQELQEATDELDLKLRQAEVIKGSWQPVGDLLIDSLQDHLEKVKALRGEIAPLKENVSHVNDLARQLTTLGIQLSPYNLSTLEDLNTRWKLLQVAVEDRVRQLHEAHRDFGPASQHFLSTSVQGPWERAISPNKVPYYINHETQTTCWDHPKMTELYQSLADLNNVRFSAYRTAMKLRRLQKALCLDLLSLSAACDALDQHNLKQNDQPMDILQIINCLTTIYDRLEQEHNNLVNVPLCVDMCLNWLLNVYDTGRTGRIRVLSFKTGIISLCKAHLEDKYRYLFKQVASSTGFCDQRRLGLLLHDSIQIPRQLGEVASFGGSNIEPSVRSCFQFANNKPEIEAALFLDWMRLEPQSMVWLPVLHRVAAAETAKHQAKCNICKECPIIGFRYRSLKHFNYDICQSCFFSGRVAKGHKMHYPMVEYCTPTTSGEDVRDFAKVLKNKFRTKRYFAKHPRMGYLPVQTVLEGDNMETPVTLINFWPVDSAPASSPQLSHDDTHSRIEHYASRLAEMENSNGSYLNDSISPNESIDDEHLLIQHYCQSLNQDSPLSQPRSPAQILISLESEERGELERILADLEEENRNLQAEYDRLKQQHEHKGLSPLPSPPEMMPTSPQSPRDAELIAEAKLLRQHKGRLEARMQILEDHNKQLESQLHRLRQLLEQPQAEAKVNGTTVSSPSTSLQRSDSSQPMLLRVVGSQTSDSMGEEDLLSPPQDTSTGLEEVMEQLNNSFPSSRGRNTPGKPMREDTM

SEQ ID NO: 1740 - DNA, 14000 bp, Homo sapiens
atgctgtctgtgaagctgaatctgtgagaacacctcactattcacggcaaccggagtggaagaaacaggtgcaaaaagattgtgtgtttgtctgcttttgtgaggctggtcagagattctgtgcctgctttatctgtgcttggctatgactctacctccaggtttaccataccccatagaatgtgtaagagaaaagtaccaacagggaaatcagcaaaaagctttcctatgaaggtgtgtagccagcctccgcagaatttgaaatgtctgaggtctcatctgatgaaagagaagatgttcaaaagaaaacattcacaaaatgggtaaatgcacaattttctaagtttgggaagcagcatattgagaacctcttcagtgacctacaggatgggaggcgcctcctagacctcctcgaaggcctgacagggcaaaaactgccaaaagaaaaaggatccacaagagttcatgccctgaacaatgtcaacaaggcactgcgggttttgcagaacaataatgttgatttagtgaatattggaagtactgacatcgtagatggaaatcataaactgactcttggtttgatttggaatataatcctccactggcaggtcaaaaatgtaatgaaaaatatcatggctggattgcaacaaaccaacagtgaaaagattctcctgagctgggtccgacaatcaactcgtaattatccacaggttaatgtaatcaacttcaccaccagctggtctgatggcctggctttgaatgctctcatccatagtcataggccagacctatttgactggaatagtgtggtttgccagcagtcagccacacaacgactggaacatgcattcaacatcgccagatatcaattaggcatagagaaactactcgatcctgaagatgttgataccacctatccagataagaagtccatcttaatgtacatcacatcactcttccaagttttgcctcaacaagtgagcattgaagccatccaggaagtggaaatgttgccaaggccacctaaagtgactaaagaagaacattttcagttacatcatcaaatgcactattctcaacagatcacggtcagtctagcacagggatatgagagaacttcttcccctaagcctcgattcaagagctatgcctacacacaggctgcttatgtcaccacctctgaccctacacggagcccatttccttcacagcatttggaagctcctgaagacaagtcatttggcagttcattgatggagagtgaagtaaacctggaccgttatcaaacagctttagaagaagtattatcgtggcttctttctgctgaggacacattgcaagcacaaggagagatttctaatgatgtggaagtggtgaaagaccagtttcatactcatgaggggtacatgatggatttgacagcccatcagggccgggttggtaatattctacaattgggaagtaagctgattggaacaggaaaattatcagaagatgaagaaactgaagtacaagagcagatgaatctcctaaattcaagatgggaatgcctcagggtagctagcatggaaaaacaaagcaatttacatagagttttaatggatctccagaatcagaaactgaaagagttgaatgactggctaacaaaaacagaagaaagaacaaggaaaatggaggaagagcctcttggacctgatcttgaagacctaaaacgccaagtacaacaacataaggtgcttcaagaagatctagaacaagaacaagtcagggtcaattctctcactcacatggtggtggtagttgatgaatctagtggagatcacgcaactgctgctttggaagaacaacttaaggtattgggagatcgatgggcaaacatctgtagatggacagaagaccgctgggttcttttacaagacatccttctcaaatggcaacgtcttactgaagaacagtgcctttttagtgcatggctttcagaaaaagaagatgcagtgaacaagattcacacaactggctttaaagatcaaaatgaaatgttatcaagtcttcaaaaactggccgttttaaaagcggatctagaaaagaaaaagcaatccatgggcaaactgtattcactcaaacaagatcttctttcaacactgaagaataagtcagtgacccagaagacggaagcatggctggataactttgcccggtgttgggataatttagtccaaaaacttgaaaagagtacagcacagatttcacaggctgtcaccaccactcagccatcactaacacagacaactgtaatggaaacagtaactacggtgaccacaagggaacagatcctggtaaagcatgctcaagaggaacttccaccaccacctccccaaaagaagaggcagattactgtggattctgaaattaggaaaaggttggatgttgatataactgaacttcacagctggattactcgctcagaagctgtgttgcagagtcctgaatttgcaatctttcggaaggaaggcaacttctcagacttaaaagaaaaagtcaatgccatagagcgagaaaaagctgagaagttcagaaaactgcaagatgccagcagatcagctcaggccctggtggaacagatggtgaatgagggtgttaatgcagatagcatcaaacaagcctcagaacaactgaacagccggtggatcgaattctgccagttgctaagtgagagacttaactggctggagtatcagaacaacatcatcgctttctataatcagctacaacaattggagcagatgacaactactgctgaaaactggttgaaaatccaacccaccaccccatcagagccaacagcaattaaaagtcagttaaaaatttgtaaggatgaagtcaaccggctatcaggtcttcaacctcaaattgaacgattaaaaattcaaagcatagccctgaaagagaaaggacaaggacccatgttcctggatgcagactttgtggcctttacaaatcattttaagcaagtcttttctgatgtgcaggccagagagaaagagctacagacaatttttgacactttgccaccaatgcgctatcaggagaccatgagtgccatcaggacatgggtccagcagtcagaaaccaaactctccatacctcaacttagtgtcaccgactatgaaatcatggagcagagactcggggaattgcaggctttacaaagttctctgcaagagcaacaaagtggcctatactatctcagcaccactgtgaaagagatgtcgaagaaagcgccctctgaaattagccggaaatatcaatcagaatttgaagaaattgagggacgctggaagaagctctcctcccagctggttgagcattgtcaaaagctagaggagcaaatgaataaactccgaaaaattcagaatcacatacaaaccctgaagaaatggatggctgaagttgatgtttttctgaaggaggaatggcctgcccttggggattcagaaattctaaaaaagcagctgaaacagtgcagacttttagtcagtgatattcagacaattcagcccagtctaaacagtgtcaatgaaggtgggcagaagataaagaatgaagcagagccagagtttgcttcgagacttgagacagaactcaaagaacttaacactcagtgggatcacatgtgccaacaggtctatgccagaaaggaggccttgaagggaggtttggagaaaactgtaagcctccagaaagatctatcagagatgcacgaatggatgacacaagctgaagaagagtatcttgagagagattttgaatataaaactccagatgaattacagaaagcagttgaagagatgaagagagctaaagaagaggcccaacaaaaagaagcgaaagtgaaactccttactgagtctgtaaatagtgtcatagctcaagctccacctgtagcacaagaggccttaaaaaaggaacttgaaactctaaccaccaactaccagtggctctgcactaggctgaatgggaaatgcaagactttggaagaagtttgggcatgttggcatgagttattgtcatacttggagaaagcaaacaagtggctaaatgaagtagaatttaaacttaaaaccactgaaaacattcctggcggagctgaggaaatctctgaggtgctagattcacttgaaaatttgatgcgacattcagaggataacccaaatcagattcgcatattggcacagaccctaacagatggcggagtcatggatgagctaatcaatgaggaacttgagacatttaattctcgttggagggaactacatgaagaggctgtaaggaggcaaaagttgcttgaacagagcatccagtctgcccaggagactgaaaaatccttacacttaatccaggagtccctcacattcattgacaagcagttggcagcttatattgcagacaaggtggacgcagctcaaatgcctcaggaagcccagaaaatccaatctgatttgacaagtcatgagatcagtttagaagaaatgaagaaacataatcaggggaaggaggctgcccaaagagtcctgtctcagattgatgttgcacagaaaaaattacaagatgtctccatgaagtttcgattattccagaaaccagccaattttgagcagcgtctacaagaaagtaagatgattttagatgaagtgaagatgcacttgcctgcattggaaacaaagagtgtggaacaggaagtagtacagtcacagctaaatcattgtgtgaacttgtataaaagtctgagtgaagtgaagtctgaagtggaaatggtgataaagactggacgtcagattgtacagaaaaagcagacggaaaatcccaaagaacttgatgaaagagtaacagctttgaaattgcattataatgagctgggagcaaaggtaacagaaagaaagcaacagttggagaaatgcttgaaattgtcccgtaagatgcgaaaggaaatgaatgtcttgacagaatggctggcagctacagatatggaattgacaaagagatcagcagttgaaggaatgcctagtaatttggattctgaagttgcctggggaaaggctactcaaaaagagattgagaaacagaaggtgcacctgaagagtatcacagaggtaggagaggccttgaaaacagttttgggcaagaaggagacgttggtggaagataaactcagtcttctgaatagtaactggatagctgtcacctcccgagcagaagagtggttaaatcttttgttggaataccagaaacacatggaaacttttgaccagaatgtggaccacatcacaaagtggatcattcaggctgacacacttttggatgaatcagagaaaaagaaaccccagcaaaaagaagacgtgcttaagcgtttaaaggcagaactgaatgacatacgcccaaaggtggactctacacgtgaccaagcagcaaacttgatggcaaaccgcggtgaccactgcaggaaattagtagagccccaaatctcagagctcaaccatcgatttgcagccatttcacacagaattaagactggaaaggcctccattcctttgaaggaattggagcagtttaactcagatatacaaaaattgcttgaaccactggaggctgaaattcagcagggggtgaatctgaaagaggaagacttcaataaagatatgaatgaagacaatgagggtactgtaaaagaattgttgcaaagaggagacaacttacaacaaagaatcacagatgagagaaagcgagaggaaataaagataaaacagcagctgttacagacaaaacataatgctctcaaggatttgaggtctcaaagaagaaaaaaggctctagaaatttctcatcagtggtatcagtacaagaggcaggctgatgatctcctgaaatgcttggatgacattgaaaaaaaattagccagcctacctgagcccagagatgaaaggaaaataaaggaaattgatcgggaattgcagaagaagaaagaggagctgaatgcagtgcgtaggcaagctgagggcttgtctgaggatggggccgcaatggcagtggagccaactcagatccagctcagcaagcgctggcgggaaattgagagcaaatttgctcagtttcgaagactcaactttgcacaaattcacactgtccgtgaagaaacgatgatggtgatgactgaagacatgcctttggaaatttcttatgtgccttctacttatttgactgaaatcactcatgtctcacaagccctattagaagtggaacaacttctcaatgctcctgacctctgtgctaaggactttgaagatctctttaagcaagaggagtctctgaagaatataaaagatagtctacaacaaagctcaggtcggattgacattattcatagcaagaagacagcagcattgcaaagtgcaacgcctgtggaaagggtgaagctacaggaagctctctcccagcttgatttccaatgggaaaaagttaacaaaatgtacaaggaccgacaagggcgatttgacagatctgttgagaaatggcggcgttttcattatgatataaagatatttaatcagtggctaacagaagctgaacagtttctcagaaagacacaaattcctgagaattgggaacatgctaaatacaaatggtatcttaaggaactccaggatggcattgggcagcggcaaactgttgtcagaacattgaatgcaactggggaagaaataattcagcaatcctcaaaaacagatgccagtattctacaggaaaaattgggaagcctgaatctgcggtggcaggaggtctgcaaacagctgtcagacagaaaaaagaggctagaagaacaaaagaatatcttgtcagaatttcaaagagatttaaatgaatttgttttatggttggaggaagcagataacattgctagtatcccacttgaacctggaaaagagcagcaactaaaagaaaagcttgagcaagtcaagttactggtggaagagttgcccctgcgccagggaattctcaaacaattaaatgaaactggaggacccgtgcttgtaagtgctcccataagcccagaagagcaagataaacttgaaaataagctcaagcagacaaatctccagtggataaaggtttccagagctttacctgagaaacaaggagaaattgaagctcaaataaaagaccttgggcagcttgaaaaaaagcttgaagaccttgaagagcagttaaatcatctgctgctgtggttatctcctattaggaatcagttggaaatttataaccaaccaaaccaagaaggaccatttgacgttcaggaaactgaaatagcagttcaagctaaacaaccggatgtggaagagattttgtctaaagggcagcatttgtacaaggaaaaaccagccactcagccagtgaagaggaagttagaagatctgagctctgagtggaaggcggtaaaccgtttacttcaagagctgagggcaaagcagcctgacctagctcctggactgaccactattggagcctctcctactcagactgttactctggtgacacaacctgtggttactaaggaaactgccatctccaaactagaaatgccatcttccttgatgttggaggtacctgctctggcagatttcaaccgggcttggacagaacttaccgactggctttctctgcttgatcaagttataaaatcacagagggtgatggtgggtgaccttgaggatatcaacgagatgatcatcaagcagaaggcaacaatgcaggatttggaacagaggcgtccccagttggaagaactcattaccgctgcccaaaatttgaaaaacaagaccagcaatcaagaggctagaacaatcattacggatcgaattgaaagaattcagaatcagtgggatgaagtacaagaacaccttcagaaccggaggcaacagttgaatgaaatgttaaaggattcaacacaatggctggaagctaaggaagaagctgagcaggtcttaggacaggccagagccaagcttgagtcatggaaggagggtccctatacagtagatgcaatccaaaagaaaatcacagaaaccaagcagttggccaaagacctccgccagtggcagacaaatgtagatgtggcaaatgacttggccctgaaacttctccgggattattctgcagatgataccagaaaagtccacatgataacagagaatatcaatgcctcttggagaagcattcataaaagggtgagtgagcgagaggctgctttggaagaaactcatagattactgcaacagttccccctggacctggaaaagtttcttgcctggcttacagaagctgaaacaactgccaatgtcctacaggatgctacccgtaaggaaaggctcctagaagactccaagggagtaaaagagctgatgaaacaatggcaagacctccaaggtgaaattgaagctcacacagatgtttatcacaacctggatgaaaacagccaaaaaatcctgagatccctggaaggttccgatgatgcagtcctgttacaaagacgtttggataacatgaacttcaagtggagtgaacttcggaaaaagtctctcaacattaggtcccatttggaagccagttctgaccagtggaagcgtctgcacctttctctgcaggaacttctggtgtggctacagctgaaagatgatgaattaagccggcaggcacctattggaggcgactttccagcagttcagaagcagaacgatgtacatagggccttcaagagggaattgaaaactaaagaacctgtaatcatgagtactcttgagactgtacgaatatttctgacagagcagcctttggaaggactagagaaactctaccaggagcccagagagctgcctcctgaggagagagcccagaatgtcactcggcttctacgaaagcaggctgaggaggtcaatactgagtgggaaaaattgaacctgcactccgctgactggcagagaaaaatagatgagacccttgaaagactccaggaacttcaagaggccacggatgagctggacctcaagctgcgccaagctgaggtgatcaagggatcctggcagcccgtgggcgatctcctcattgactctctccaagatcacctcgagaaagtcaaggcacttcgaggagaaattgcgcctctgaaagagaacgtgagccacgtcaatgaccttgctcgccagcttaccactttgggcattcagctctcaccgtataacctcagcactctggaagacctgaacaccagatggaagcttctgcaggtggccgtcgaggaccgagtcaggcagctgcatgaagcccacagggactttggtccagcatctcagcactttctttccacgtctgtccagggtccctgggagagagccatctcgccaaacaaagtgccctactatatcaaccacgagactcaaacaacttgctgggaccatcccaaaatgacagagctctaccagtctttagctgacctgaataatgtcagattctcagcttataggactgccatgaaactccgaagactgcagaaggccctttgcttggatctcttgagcctgtcagctgcatgtgatgccttggaccagcacaacctcaagcaaaatgaccagcccatggatatcctgcagattattaattgtttgaccactatttatgaccgcctggagcaagagcacaacaatttggtcaacgtccctctctgcgtggatatgtgtctgaactggctgctgaatgtttatgatacgggacgaacagggaggatccgtgtcctgtcttttaaaactggcatcatttccctgtgtaaagcacatttggaagacaagtacagataccttttcaagcaagtggcaagttcaacaggattttgtgaccagcgcaggctgggcctccttctgcatgattctatccaaattccaagacagttgggtgaagttgcatcctttgggggcagtaacattgagccaagtgtccggagctgcttccaatttgctaataataagccagagatcgaagcggccctcttcctagactggatgagactggaaccccagtccatggtgtggctgcccgtcctgcacagagtggctgctgcagaaactgccaagcatcaggccaaatgtaacatctgcaaagagtgtccaatcattggattcaggtacaggagtctaaagcactttaattatgacatctgccaaagctgctttttttctggtcgagttgcaaaaggccataaaatgcactatcccatggtggaatattgcactccgactacatcaggagaagatgttcgagactttgccaaggtactaaaaaacaaatttcgaaccaaaaggtattttgcgaagcatccccgaatgggctacctgccagtgcagactgtcttagagggggacaacatggaaactcccgttactctgatcaacttctggccagtagattctgcgcctgcctcgtcccctcagctttcacacgatgatactcattcacgcattgaacattatgctagcaggctagcagaaatggaaaacagcaatggatcttatctaaatgatagcatctctcctaatgagagcatagatgatgaacatttgttaatccagcattactgccaaagtttgaaccaggactcccccctgagccagcctcgtagtcctgcccagatcttgatttccttagagagtgaggaaagaggggagctagagagaatcctagcagatcttgaggaagaaaacaggaatctgcaagcagaatatgaccgtctaaagcagcagcacgaacataaaggcctgtccccactgccgtcccctcctgaaatgatgcccacctctccccagagtccccgggatgctgagctcattgctgaggccaagctactgcgtcaacacaaaggccgcctggaagccaggatgcaaatcctggaagaccacaataaacagctggagtcacagttacacaggctaaggcagctgctggagcaaccccaggcagaggccaaagtgaatggcacaacggtgtcctctccttctacctctctacagaggtccgacagcagtcagcctatgctgctccgagtggttggcagtcaaacttcggactccatgggtgaggaagatcttctcagtcctccccaggacacaagcacagggttagaggaggtgatggagcaactcaacaactccttccctagttcaagaggaagaaatacccctggaaagccaatgagagaggacacaatgtaggaagtcttttccacatggcagatgatttgggcagagcgatggagtccttagtatcagtcatgacagatgaagaaggagcagaataaatgttttacaactcctgattcccgcatggtttttataatattcatacaacaaagaggattagacagtaagagtttacaagaaataaatctatatttttgtgaagggtagtggtattatactgtagatttcagtagtttctaagtctgttattgttttgttaacaatggcaggttttacacgtctatgcaattgtacaaaaaagttataagaaaactacatgtaaaatcttgatagctaaataacttgccatttctttatatggaacgcattttgggttgtttaaaaatttataacagttataaagaaagattgtaaactaaagtgtgctttataaaaaaaagttgtttataaaaacccctaaaaacaaaacaaacacacacacacacacatacacacacacacacaaaactttgaggcagcgcattgttttgcatccttttggcgtgatatccatatgaaattcatggctttttctttttttgcatattaaagataagacttcctctaccaccacaccaaatgactactacacactgctcatttgagaactgtcagctgagtggggcaggcttgagttttcatttcatatatctatatgtctataagtatataaatactatagttatatagataaagagatacgaatttctatagactgactttttccattttttaaatgttcatgtcacatcctaatagaaagaaattacttctagtcagtcatccaggcttacctgcttggtctagaatggatttttcccggagccggaagccaggaggaaactacaccacactaaaacattgtctacagctccagatgtttctcattttaaacaactttccactgacaacgaaagtaaagtaaagtattggatttttttaaagggaacatgtgaatgaatacacaggacttattatatcagagtgagtaatcggttggttggttgattgattgattgattgatacattcagcttcctgctgctagcaatgccacgatttagatttaatgatgcttcagtggaaatcaatcagaaggtattctgaccttgtgaacatcagaaggtattttttaactcccaagcagtagcaggacgatgatagggctggagggctatggattcccagcccatccctgtgaaggagtaggccactctttaagtgaaggattggatgattgttcataatacataaagttctctgtaattacaactaaattattatgccctcttctcacagtcaaaaggaactgggtggtttggtttttgttgcttttttagatttattgtcccatgtgggatgagtttttaaatgccacaagacataatttaaaataaataaactttgggaaaaggtgtaagacagtagccccatcacatttgtgatactgacaggtatcaacccagaagcccatgaactgtgtttccatcctttgcatttctctgcgagtagttccacacaggtttgtaagtaagtaagaaagaaggcaaattgattcaaatgttacaaaaaaacccttcttggtggattagacaggttaaatatataaacaaacaaacaaaaattgctcaaaaaagaggagaaaagctcaagaggaaaagctaaggactggtaggaaaaagctttactctttcatgccattttatttctttttgatttttaaatcattcattcaatagataccaccgtgtgacctataattttgcaaatctgttacctctgacatcaagtgtaattagcttttggagagtgggctgacatcaagtgtaattagcttttggagagtgggttttgtccattattaataattaattaattaacatcaaacacggcttctcatgctatttctacctcactttggttttggggtgttcctgataattgtgcacacctgagttcacagcttcaccacttgtccattgcgttattttctttttcctttataattctttctttttccttcataattttcaaaagaaaacccaaagctctaaggtaacaaattaccaaattacatgaagatttggtttttgtcttgcatttttttcctttatgtgacgctggaccttttctttacccaaggatttttaaaactcagatttaaaacaaggggttactttacatcctactaagaagtttaagtaagtaagtttcattctaaaatcagaggtaaatagagtgcataaataattttgttttaatctttttgtttttcttttagacacattagctctggagtgagtctgtcataatatttgaacaaaaattgagagctttattgctgcattttaagcataattaatttggacattatttcgtgttgtgttctttataaccaccgagtattaaactgtaaatcataatgtaactgaagcataaacatcacatggcatgttttgtcattgttttcaggtactgagttcttacttgagtatcataatatattgtgttttaacaccaacactgtaacatttacgaattatttttttaaacttcagttttactgcattttcacaacatatcagacttcaccaaatatatgccttactattgtattatagtactgctttactgtgtatctcaataaagcacgcagttatgttac

SEQ ID NO: 1741 - protein, 3681 aa, Homo sapiens
MSEVSSDEREDVQKKTFTKWVNAQFSKFGKQHIENLFSDLQDGRRLLDLLEGLTGQKLPKEKGSTRVHALNNVNKALRVLQNNNVDLVNIGSTDIVDGNHKLTLGLIWNIILHWQVKNVMKNIMAGLQQTNSEKILLSWVRQSTRNYPQVNVINFTTSWSDGLALNALIHSHRPDLFDWNSVVCQQSATQRLEHAFNIARYQLGIEKLLDPEDVDTTYPDKKSILMYITSLFQVLPQQVSIEAIQEVEMLPRPPKVTKEEHFQLHHQMHYSQQITVSLAQGYERTSSPKPRFKSYAYTQAAYVTTSDPTRSPFPSQHLEAPEDKSFGSSLMESEVNLDRYQTALEEVLSWLLSAEDTLQAQGEISNDVEVVKDQFHTHEGYMMDLTAHQGRVGNILQLGSKLIGTGKLSEDEETEVQEQMNLLNSRWECLRVASMEKQSNLHRVLMDLQNQKLKELNDWLTKTEERTRKMEEEPLGPDLEDLKRQVQQHKVLQEDLEQEQVRVNSLTHMVVVVDESSGDHATAALEEQLKVLGDRWANICRWTEDRWVLLQDILLKWQRLTEEQCLFSAWLSEKEDAVNKIHTTGFKDQNEMLSSLQKLAVLKADLEKKKQSMGKLYSLKQDLLSTLKNKSVTQKTEAWLDNFARCWDNLVQKLEKSTAQISQAVTTTQPSLTQTTVMETVTTVTTREQILVKHAQEELPPPPPQKKRQITVDSEIRKRLDVDITELHSWITRSEAVLQSPEFAIFRKEGNFSDLKEKVNAIEREKAEKFRKLQDASRSAQALVEQMVNEGVNADSIKQASEQLNSRWIEFCQLLSERLNWLEYQNNIIAFYNQLQQLEQMTTTAENWLKIQPTTPSEPTAIKSQLKICKDEVNRLSGLQPQIERLKIQSIALKEKGQGPMFLDADFVAFTNHFKQVFSDVQAREKELQTIFDTLPPMRYQETMSAIRTWVQQSETKLSIPQLSVTDYEIMEQRLGELQALQSSLQEQQSGLYYLSTTVKEMSKKAPSEISRKYQSEFEEIEGRWKKLSSQLVEHCQKLEEQMNKLRKIQNHIQTLKKWMAEVDVFLKEEWPALGDSEILKKQLKQCRLLVSDIQTIQPSLNSVNEGGQKIKNEAEPEFASRLETELKELNTQWDHMCQQVYARKEALKGGLEKTVSLQKDLSEMHEWMTQAEEEYLERDFEYKTPDELQKAVEEMKRAKEEAQQKEAKVKLLTESVNSVIAQAPPVAQEALKKELETLTTNYQWLCTRLNGKCKTLEEVWACWHELLSYLEKANKWLNEVEFKLKTTENIPGGAEEISEVLDSLENLMRHSEDNPNQIRILAQTLTDGGVMDELINEELETFNSRWRELHEEAVRRQKLLEQSIQSAQETEKSLHLIQESLTFIDKQLAAYIADKVDAAQMPQEAQKIQSDLTSHEISLEEMKKHNQGKEAAQRVLSQIDVAQKKLQDVSMKFRLFQKPANFEQRLQESKMILDEVKMHLPALETKSVEQEVVQSQLNHCVNLYKSLSEVKSEVEMVIKTGRQIVQKKQTENPKELDERVTALKLHYNELGAKVTERKQQLEKCLKLSRKMRKEMNVLTEWLAATDMELTKRSAVEGMPSNLDSEVAWGKATQKEIEKQKVHLKSITEVGEALKTVLGKKETLVEDKLSLLNSNWIAVTSRAEEWLNLLLEYQKHMETFDQNVDHITKWIIQADTLLDESEKKKPQQKEDVLKRLKAELNDIRPKVDSTRDQAANLMANRGDHCRKLVEPQISELNHRFAAISHRIKTGKASIPLKELEQFNSDIQKLLEPLEAEIQQGVNLKEEDFNKDMNEDNEGTVKELLQRGDNLQQRITDERKREEIKIKQQLLQTKHNALKDLRSQRRKKALEISHQWYQYKRQADDLLKCLDDIEKKLASLPEPRDERKIKEIDRELQKKKEELNAVRRQAEGLSEDGAAMAVEPTQIQLSKRWREIESKFAQFRRLNFAQIHTVREETMMVMTEDMPLEISYVPSTYLTEITHVSQALLEVEQLLNAPDLCAKDFEDLFKQEESLKNIKDSLQQSSGRIDIIHSKKTAALQSATPVERVKLQEALSQLDFQWEKVNKMYKDRQGRFDRSVEKWRRFHYDIKIFNQWLTEAEQFLRKTQIPENWEHAKYKWYLKELQDGIGQRQTVVRTLNATGEEIIQQSSKTDASILQEKLGSLNLRWQEVCKQLSDRKKRLEEQKNILSEFQRDLNEFVLWLEEADNIASIPLEPGKEQQLKEKLEQVKLLVEELPLRQGILKQLNETGGPVLVSAPISPEEQDKLENKLKQTNLQWIKVSRALPEKQGEIEAQIKDLGQLEKKLEDLEEQLNHLLLWLSPIRNQLEIYNQPNQEGPFDVQETEIAVQAKQPDVEEILSKGQHLYKEKPATQPVKRKLEDLSSEWKAVNRLLQELRAKQPDLAPGLTTIGASPTQTVTLVTQPVVTKETAISKLEMPSSLMLEVPALADFNRAWTELTDWLSLLDQVIKSQRVMVGDLEDINEMIIKQKATMQDLEQRRPQLEELITAAQNLKNKTSNQEARTIITDRIERIQNQWDEVQEHLQNRRQQLNEMLKDSTQWLEAKEEAEQVLGQARAKLESWKEGPYTVDAIQKKITETKQLAKDLRQWQTNVDVANDLALKLLRDYSADDTRKVHMITENINASWRSIHKRVSEREAALEETHRLLQQFPLDLEKFLAWLTEAETTANVLQDATRKERLLEDSKGVKELMKQWQDLQGEIEAHTDVYHNLDENSQKILRSLEGSDDAVLLQRRLDNMNFKWSELRKKSLNIRSHLEASSDQWKRLHLSLQELLVWLQLKDDELSRQAPIGGDFPAVQKQNDVHRAFKRELKTKEPVIMSTLETVRIFLTEQPLEGLEKLYQEPRELPPEERAQNVTRLLRKQAEEVNTEWEKLNLHSADWQRKIDETLERLQELQEATDELDLKLRQAEVIKGSWQPVGDLLIDSLQDHLEKVKALRGEIAPLKENVSHVNDLARQLTTLGIQLSPYNLSTLEDLNTRWKLLQVAVEDRVRQLHEAHRDFGPASQHFLSTSVQGPWERAISPNKVPYYINHETQTTCWDHPKMTELYQSLADLNNVRFSAYRTAMKLRRLQKALCLDLLSLSAACDALDQHNLKQNDQPMDILQIINCLTTIYDRLEQEHNNLVNVPLCVDMCLNWLLNVYDTGRTGRIRVLSFKTGIISLCKAHLEDKYRYLFKQVASSTGFCDQRRLGLLLHDSIQIPRQLGEVASFGGSNIEPSVRSCFQFANNKPEIEAALFLDWMRLEPQSMVWLPVLHRVAAAETAKHQAKCNICKECPIIGFRYRSLKHFNYDICQSCFFSGRVAKGHKMHYPMVEYCTPTTSGEDVRDFAKVLKNKFRTKRYFAKHPRMGYLPVQTVLEGDNMETPVTLINFWPVDSAPASSPQLSHDDTHSRIEHYASRLAEMENSNGSYLNDSISPNESIDDEHLLIQHYCQSLNQDSPLSQPRSPAQILISLESEERGELERILADLEEENRNLQAEYDRLKQQHEHKGLSPLPSPPEMMPTSPQSPRDAELIAEAKLLRQHKGRLEARMQILEDHNKQLESQLHRLRQLLEQPQAEAKVNGTTVSSPSTSLQRSDSSQPMLLRVVGSQTSDSMGEEDLLSPPQDTSTGLEEVMEQLNNSFPSSRGRNTPGKPMREDTM

SEQ ID NO: 1742 - DNA, 14083 bp, Homo sapiens
tgctgtctgtgaagctgaatctgtgagaacacctcactattcacggcaaccggagtggaagaaacaggtgcaaaaagattgtgtgtttgtctgcttttgtgaggctggtcagagattctgtgcctgctttatctgtgcttggctatgactctacctccaggtttaccataccccatagaatgtgtaagagaaaagtaccaacagggaaatcagcaaaaagctttcctatgaaggtgtgtagccagcctccgcagaatttgaaatgtctgaggtctcatctggtgagtaaaagctgcagataaatgcaacagccattcagaagaatgataaattccacaagcattcagaagcaggcttccctaaagatgaaagagaagatgttcaaaagaaaacattcacaaaatgggtaaatgcacaattttctaagtttgggaagcagcatattgagaacctcttcagtgacctacaggatgggaggcgcctcctagacctcctcgaaggcctgacagggcaaaaactgccaaaagaaaaaggatccacaagagttcatgccctgaacaatgtcaacaaggcactgcgggttttgcagaacaataatgttgatttagtgaatattggaagtactgacatcgtagatggaaatcataaactgactcttggtttgatttggaatataatcctccactggcaggtcaaaaatgtaatgaaaaatatcatggctggattgcaacaaaccaacagtgaaaagattctcctgagctgggtccgacaatcaactcgtaattatccacaggttaatgtaatcaacttcaccaccagctggtctgatggcctggctttgaatgctctcatccatagtcataggccagacctatttgactggaatagtgtggtttgccagcagtcagccacacaacgactggaacatgcattcaacatcgccagatatcaattaggcatagagaaactactcgatcctgaagatgttgataccacctatccagataagaagtccatcttaatgtacatcacatcactcttccaagttttgcctcaacaagtgagcattgaagccatccaggaagtggaaatgttgccaaggccacctaaagtgactaaagaagaacattttcagttacatcatcaaatgcactattctcaacagatcacggtcagtctagcacagggatatgagagaacttcttcccctaagcctcgattcaagagctatgcctacacacaggctgcttatgtcaccacctctgaccctacacggagcccatttccttcacagcatttggaagctcctgaagacaagtcatttggcagttcattgatggagagtgaagtaaacctggaccgttatcaaacagctttagaagaagtattatcgtggcttctttctgctgaggacacattgcaagcacaaggagagatttctaatgatgtggaagtggtgaaagaccagtttcatactcatgaggggtacatgatggatttgacagcccatcagggccgggttggtaatattctacaattgggaagtaagctgattggaacaggaaaattatcagaagatgaagaaactgaagtacaagagcagatgaatctcctaaattcaagatgggaatgcctcagggtagctagcatggaaaaacaaagcaatttacatagagttttaatggatctccagaatcagaaactgaaagagttgaatgactggctaacaaaaacagaagaaagaacaaggaaaatggaggaagagcctcttggacctgatcttgaagacctaaaacgccaagtacaacaacataaggtgcttcaagaagatctagaacaagaacaagtcagggtcaattctctcactcacatggtggtggtagttgatgaatctagtggagatcacgcaactgctgctttggaagaacaacttaaggtattgggagatcgatgggcaaacatctgtagatggacagaagaccgctgggttcttttacaagacatccttctcaaatggcaacgtcttactgaagaacagtgcctttttagtgcatggctttcagaaaaagaagatgcagtgaacaagattcacacaactggctttaaagatcaaaatgaaatgttatcaagtcttcaaaaactggccgttttaaaagcggatctagaaaagaaaaagcaatccatgggcaaactgtattcactcaaacaagatcttctttcaacactgaagaataagtcagtgacccagaagacggaagcatggctggataactttgcccggtgttgggataatttagtccaaaaacttgaaaagagtacagcacagatttcacaggctgtcaccaccactcagccatcactaacacagacaactgtaatggaaacagtaactacggtgaccacaagggaacagatcctggtaaagcatgctcaagaggaacttccaccaccacctccccaaaagaagaggcagattactgtggattctgaaattaggaaaaggttggatgttgatataactgaacttcacagctggattactcgctcagaagctgtgttgcagagtcctgaatttgcaatctttcggaaggaaggcaacttctcagacttaaaagaaaaagtcaatgccatagagcgagaaaaagctgagaagttcagaaaactgcaagatgccagcagatcagctcaggccctggtggaacagatggtgaatgagggtgttaatgcagatagcatcaaacaagcctcagaacaactgaacagccggtggatcgaattctgccagttgctaagtgagagacttaactggctggagtatcagaacaacatcatcgctttctataatcagctacaacaattggagcagatgacaactactgctgaaaactggttgaaaatccaacccaccaccccatcagagccaacagcaattaaaagtcagttaaaaatttgtaaggatgaagtcaaccggctatcaggtcttcaacctcaaattgaacgattaaaaattcaaagcatagccctgaaagagaaaggacaaggacccatgttcctggatgcagactttgtggcctttacaaatcattttaagcaagtcttttctgatgtgcaggccagagagaaagagctacagacaatttttgacactttgccaccaatgcgctatcaggagaccatgagtgccatcaggacatgggtccagcagtcagaaaccaaactctccatacctcaacttagtgtcaccgactatgaaatcatggagcagagactcggggaattgcaggctttacaaagttctctgcaagagcaacaaagtggcctatactatctcagcaccactgtgaaagagatgtcgaagaaagcgccctctgaaattagccggaaatatcaatcagaatttgaagaaattgagggacgctggaagaagctctcctcccagctggttgagcattgtcaaaagctagaggagcaaatgaataaactccgaaaaattcagaatcacatacaaaccctgaagaaatggatggctgaagttgatgtttttctgaaggaggaatggcctgcccttggggattcagaaattctaaaaaagcagctgaaacagtgcagacttttagtcagtgatattcagacaattcagcccagtctaaacagtgtcaatgaaggtgggcagaagataaagaatgaagcagagccagagtttgcttcgagacttgagacagaactcaaagaacttaacactcagtgggatcacatgtgccaacaggtctatgccagaaaggaggccttgaagggaggtttggagaaaactgtaagcctccagaaagatctatcagagatgcacgaatggatgacacaagctgaagaagagtatcttgagagagattttgaatataaaactccagatgaattacagaaagcagttgaagagatgaagagagctaaagaagaggcccaacaaaaagaagcgaaagtgaaactccttactgagtctgtaaatagtgtcatagctcaagctccacctgtagcacaagaggccttaaaaaaggaacttgaaactctaaccaccaactaccagtggctctgcactaggctgaatgggaaatgcaagactttggaagaagtttgggcatgttggcatgagttattgtcatacttggagaaagcaaacaagtggctaaatgaagtagaatttaaacttaaaaccactgaaaacattcctggcggagctgaggaaatctctgaggtgctagattcacttgaaaatttgatgcgacattcagaggataacccaaatcagattcgcatattggcacagaccctaacagatggcggagtcatggatgagctaatcaatgaggaacttgagacatttaattctcgttggagggaactacatgaagaggctgtaaggaggcaaaagttgcttgaacagagcatccagtctgcccaggagactgaaaaatccttacacttaatccaggagtccctcacattcattgacaagcagttggcagcttatattgcagacaaggtggacgcagctcaaatgcctcaggaagcccagaaaatccaatctgatttgacaagtcatgagatcagtttagaagaaatgaagaaacataatcaggggaaggaggctgcccaaagagtcctgtctcagattgatgttgcacagaaaaaattacaagatgtctccatgaagtttcgattattccagaaaccagccaattttgagcagcgtctacaagaaagtaagatgattttagatgaagtgaagatgcacttgcctgcattggaaacaaagagtgtggaacaggaagtagtacagtcacagctaaatcattgtgtgaacttgtataaaagtctgagtgaagtgaagtctgaagtggaaatggtgataaagactggacgtcagattgtacagaaaaagcagacggaaaatcccaaagaacttgatgaaagagtaacagctttgaaattgcattataatgagctgggagcaaaggtaacagaaagaaagcaacagttggagaaatgcttgaaattgtcccgtaagatgcgaaaggaaatgaatgtcttgacagaatggctggcagctacagatatggaattgacaaagagatcagcagttgaaggaatgcctagtaatttggattctgaagttgcctggggaaaggctactcaaaaagagattgagaaacagaaggtgcacctgaagagtatcacagaggtaggagaggccttgaaaacagttttgggcaagaaggagacgttggtggaagataaactcagtcttctgaatagtaactggatagctgtcacctcccgagcagaagagtggttaaatcttttgttggaataccagaaacacatggaaacttttgaccagaatgtggaccacatcacaaagtggatcattcaggctgacacacttttggatgaatcagagaaaaagaaaccccagcaaaaagaagacgtgcttaagcgtttaaaggcagaactgaatgacatacgcccaaaggtggactctacacgtgaccaagcagcaaacttgatggcaaaccgcggtgaccactgcaggaaattagtagagccccaaatctcagagctcaaccatcgatttgcagccatttcacacagaattaagactggaaaggcctccattcctttgaaggaattggagcagtttaactcagatatacaaaaattgcttgaaccactggaggctgaaattcagcagggggtgaatctgaaagaggaagacttcaataaagatatgaatgaagacaatgagggtactgtaaaagaattgttgcaaagaggagacaacttacaacaaagaatcacagatgagagaaagcgagaggaaataaagataaaacagcagctgttacagacaaaacataatgctctcaaggatttgaggtctcaaagaagaaaaaaggctctagaaatttctcatcagtggtatcagtacaagaggcaggctgatgatctcctgaaatgcttggatgacattgaaaaaaaattagccagcctacctgagcccagagatgaaaggaaaataaaggaaattgatcgggaattgcagaagaagaaagaggagctgaatgcagtgcgtaggcaagctgagggcttgtctgaggatggggccgcaatggcagtggagccaactcagatccagctcagcaagcgctggcgggaaattgagagcaaatttgctcagtttcgaagactcaactttgcacaaattcacactgtccgtgaagaaacgatgatggtgatgactgaagacatgcctttggaaatttcttatgtgccttctacttatttgactgaaatcactcatgtctcacaagccctattagaagtggaacaacttctcaatgctcctgacctctgtgctaaggactttgaagatctctttaagcaagaggagtctctgaagaatataaaagatagtctacaacaaagctcaggtcggattgacattattcatagcaagaagacagcagcattgcaaagtgcaacgcctgtggaaagggtgaagctacaggaagctctctcccagcttgatttccaatgggaaaaagttaacaaaatgtacaaggaccgacaagggcgatttgacagatctgttgagaaatggcggcgttttcattatgatataaagatatttaatcagtggctaacagaagctgaacagtttctcagaaagacacaaattcctgagaattgggaacatgctaaatacaaatggtatcttaaggaactccaggatggcattgggcagcggcaaactgttgtcagaacattgaatgcaactggggaagaaataattcagcaatcctcaaaaacagatgccagtattctacaggaaaaattgggaagcctgaatctgcggtggcaggaggtctgcaaacagctgtcagacagaaaaaagaggctagaagaacaaaagaatatcttgtcagaatttcaaagagatttaaatgaatttgttttatggttggaggaagcagataacattgctagtatcccacttgaacctggaaaagagcagcaactaaaagaaaagcttgagcaagtcaagttactggtggaagagttgcccctgcgccagggaattctcaaacaattaaatgaaactggaggacccgtgcttgtaagtgctcccataagcccagaagagcaagataaacttgaaaataagctcaagcagacaaatctccagtggataaaggtttccagagctttacctgagaaacaaggagaaattgaagctcaaataaaagaccttgggcagcttgaaaaaaagcttgaagaccttgaagagcagttaaatcatctgctgctgtggttatctcctattaggaatcagttggaaatttataaccaaccaaaccaagaaggaccatttgacgttcaggaaactgaaatagcagttcaagctaaacaaccggatgtggaagagattttgtctaaagggcagcatttgtacaaggaaaaaccagccactcagccagtgaagaggaagttagaagatctgagctctgagtggaaggcggtaaaccgtttacttcaagagctgagggcaaagcagcctgacctagctcctggactgaccactattggagcctctcctactcagactgttactctggtgacacaacctgtggttactaaggaaactgccatctccaaactagaaatgccatcttccttgatgttggaggtacctgctctggcagatttcaaccgggcttggacagaacttaccgactggctttctctgcttgatcaagttataaaatcacagagggtgatggtgggtgaccttgaggatatcaacgagatgatcatcaagcagaaggcaacaatgcaggatttggaacagaggcgtccccagttggaagaactcattaccgctgcccaaaatttgaaaaacaagaccagcaatcaagaggctagaacaatcattacggatcgaattgaaagaattcagaatcagtgggatgaagtacaagaacaccttcagaaccggaggcaacagttgaatgaaatgttaaaggattcaacacaatggctggaagctaaggaagaagctgagcaggtcttaggacaggccagagccaagcttgagtcatggaaggagggtccctatacagtagatgcaatccaaaagaaaatcacagaaaccaagcagttggccaaagacctccgccagtggcagacaaatgtagatgtggcaaatgacttggccctgaaacttctccgggattattctgcagatgataccagaaaagtccacatgataacagagaatatcaatgcctcttggagaagcattcataaaagggtgagtgagcgagaggctgctttggaagaaactcatagattactgcaacagttccccctggacctggaaaagtttcttgcctggcttacagaagctgaaacaactgccaatgtcctacaggatgctacccgtaaggaaaggctcctagaagactccaagggagtaaaagagctgatgaaacaatggcaagacctccaaggtgaaattgaagctcacacagatgtttatcacaacctggatgaaaacagccaaaaaatcctgagatccctggaaggttccgatgatgcagtcctgttacaaagacgtttggataacatgaacttcaagtggagtgaacttcggaaaaagtctctcaacattaggtcccatttggaagccagttctgaccagtggaagcgtctgcacctttctctgcaggaacttctggtgtggctacagctgaaagatgatgaattaagccggcaggcacctattggaggcgactttccagcagttcagaagcagaacgatgtacatagggccttcaagagggaattgaaaactaaagaacctgtaatcatgagtactcttgagactgtacgaatatttctgacagagcagcctttggaaggactagagaaactctaccaggagcccagagagctgcctcctgaggagagagcccagaatgtcactcggcttctacgaaagcaggctgaggaggtcaatactgagtgggaaaaattgaacctgcactccgctgactggcagagaaaaatagatgagacccttgaaagactccaggaacttcaagaggccacggatgagctggacctcaagctgcgccaagctgaggtgatcaagggatcctggcagcccgtgggcgatctcctcattgactctctccaagatcacctcgagaaagtcaaggcacttcgaggagaaattgcgcctctgaaagagaacgtgagccacgtcaatgaccttgctcgccagcttaccactttgggcattcagctctcaccgtataacctcagcactctggaagacctgaacaccagatggaagcttctgcaggtggccgtcgaggaccgagtcaggcagctgcatgaagcccacagggactttggtccagcatctcagcactttctttccacgtctgtccagggtccctgggagagagccatctcgccaaacaaagtgccctactatatcaaccacgagactcaaacaacttgctgggaccatcccaaaatgacagagctctaccagtctttagctgacctgaataatgtcagattctcagcttataggactgccatgaaactccgaagactgcagaaggccctttgcttggatctcttgagcctgtcagctgcatgtgatgccttggaccagcacaacctcaagcaaaatgaccagcccatggatatcctgcagattattaattgtttgaccactatttatgaccgcctggagcaagagcacaacaatttggtcaacgtccctctctgcgtggatatgtgtctgaactggctgctgaatgtttatgatacgggacgaacagggaggatccgtgtcctgtcttttaaaactggcatcatttccctgtgtaaagcacatttggaagacaagtacagataccttttcaagcaagtggcaagttcaacaggattttgtgaccagcgcaggctgggcctccttctgcatgattctatccaaattccaagacagttgggtgaagttgcatcctttgggggcagtaacattgagccaagtgtccggagctgcttccaatttgctaataataagccagagatcgaagcggccctcttcctagactggatgagactggaaccccagtccatggtgtggctgcccgtcctgcacagagtggctgctgcagaaactgccaagcatcaggccaaatgtaacatctgcaaagagtgtccaatcattggattcaggtacaggagtctaaagcactttaattatgacatctgccaaagctgctttttttctggtcgagttgcaaaaggccataaaatgcactatcccatggtggaatattgcactccgactacatcaggagaagatgttcgagactttgccaaggtactaaaaaacaaatttcgaaccaaaaggtattttgcgaagcatccccgaatgggctacctgccagtgcagactgtcttagagggggacaacatggaaactcccgttactctgatcaacttctggccagtagattctgcgcctgcctcgtcccctcagctttcacacgatgatactcattcacgcattgaacattatgctagcaggctagcagaaatggaaaacagcaatggatcttatctaaatgatagcatctctcctaatgagagcatagatgatgaacatttgttaatccagcattactgccaaagtttgaaccaggactcccccctgagccagcctcgtagtcctgcccagatcttgatttccttagagagtgaggaaagaggggagctagagagaatcctagcagatcttgaggaagaaaacaggaatctgcaagcagaatatgaccgtctaaagcagcagcacgaacataaaggcctgtccccactgccgtcccctcctgaaatgatgcccacctctccccagagtccccgggatgctgagctcattgctgaggccaagctactgcgtcaacacaaaggccgcctggaagccaggatgcaaatcctggaagaccacaataaacagctggagtcacagttacacaggctaaggcagctgctggagcaaccccaggcagaggccaaagtgaatggcacaacggtgtcctctccttctacctctctacagaggtccgacagcagtcagcctatgctgctccgagtggttggcagtcaaacttcggactccatgggtgaggaagatcttctcagtcctccccaggacacaagcacagggttagaggaggtgatggagcaactcaacaactccttccctagttcaagaggaagaaatacccctggaaagccaatgagagaggacacaatgtaggaagtcttttccacatggcagatgatttgggcagagcgatggagtccttagtatcagtcatgacagatgaagaaggagcagaataaatgttttacaactcctgattcccgcatggtttttataatattcatacaacaaagaggattagacagtaagagtttacaagaaataaatctatatttttgtgaagggtagtggtattatactgtagatttcagtagtttctaagtctgttattgttttgttaacaatggcaggttttacacgtctatgcaattgtacaaaaaagttataagaaaactacatgtaaaatcttgatagctaaataacttgccatttctttatatggaacgcattttgggttgtttaaaaatttataacagttataaagaaagattgtaaactaaagtgtgctttataaaaaaaagttgtttataaaaacccctaaaaacaaaacaaacacacacacacacacatacacacacacacacaaaactttgaggcagcgcattgttttgcatccttttggcgtgatatccatatgaaattcatggctttttctttttttgcatattaaagataagacttcctctaccaccacaccaaatgactactacacactgctcatttgagaactgtcagctgagtggggcaggcttgagttttcatttcatatatctatatgtctataagtatataaatactatagttatatagataaagagatacgaatttctatagactgactttttccattttttaaatgttcatgtcacatcctaatagaaagaaattacttctagtcagtcatccaggcttacctgcttggtctagaatggatttttcccggagccggaagccaggaggaaactacaccacactaaaacattgtctacagctccagatgtttctcattttaaacaactttccactgacaacgaaagtaaagtaaagtattggatttttttaaagggaacatgtgaatgaatacacaggacttattatatcagagtgagtaatcggttggttggttgattgattgattgattgatacattcagcttcctgctgctagcaatgccacgatttagatttaatgatgcttcagtggaaatcaatcagaaggtattctgaccttgtgaacatcagaaggtattttttaactcccaagcagtagcaggacgatgatagggctggagggctatggattcccagcccatccctgtgaaggagtaggccactctttaagtgaaggattggatgattgttcataatacataaagttctctgtaattacaactaaattattatgccctcttctcacagtcaaaaggaactgggtggtttggtttttgttgcttttttagatttattgtcccatgtgggatgagtttttaaatgccacaagacataatttaaaataaataaactttgggaaaaggtgtaagacagtagccccatcacatttgtgatactgacaggtatcaacccagaagcccatgaactgtgtttccatcctttgcatttctctgcgagtagttccacacaggtttgtaagtaagtaagaaagaaggcaaattgattcaaatgttacaaaaaaacccttcttggtggattagacaggttaaatatataaacaaacaaacaaaaattgctcaaaaaagaggagaaaagctcaagaggaaaagctaaggactggtaggaaaaagctttactctttcatgccattttatttctttttgatttttaaatcattcattcaatagataccaccgtgtgacctataattttgcaaatctgttacctctgacatcaagtgtaattagcttttggagagtgggctgacatcaagtgtaattagcttttggagagtgggttttgtccattattaataattaattaattaacatcaaacacggcttctcatgctatttctacctcactttggttttggggtgttcctgataattgtgcacacctgagttcacagcttcaccacttgtccattgcgttattttctttttcctttataattctttctttttccttcataattttcaaaagaaaacccaaagctctaaggtaacaaattaccaaattacatgaagatttggtttttgtcttgcatttttttcctttatgtgacgctggaccttttctttacccaaggatttttaaaactcagatttaaaacaaggggttactttacatcctactaagaagtttaagtaagtaagtttcattctaaaatcagaggtaaatagagtgcataaataattttgttttaatctttttgtttttcttttagacacattagctctggagtgagtctgtcataatatttgaacaaaaattgagagctttattgctgcattttaagcataattaatttggacattatttcgtgttgtgttctttataaccaccgagtattaaactgtaaatcataatgtaactgaagcataaacatcacatggcatgttttgtcattgttttcaggtactgagttcttacttgagtatcataatatattgtgttttaacaccaacactgtaacatttacgaattatttttttaaacttcagttttactgcattttcacaacatatcagacttcaccaaatatatgccttactattgtattatagtactgctttactgtgtatctcaataaagcacgcagttatgttac

SEQ ID NO: 1743 - protein, 3562 aa, Homo sapiens; identical to SEQ ID NO: 1739

SEQ ID NO: 1744 - DNA, 9771 bp, Homo sapiens
taatgagatcaggaggaacattcgacctgagaaagacagattgcaatgactgagatgattttgctaattttttttccagcctatttccttaatgctgtaaggaggcaaaagttgcttgaacagagcatccagtctgcccaggagactgaaaaatccttacacttaatccaggagtccctcacattcattgacaagcagttggcagcttatattgcagacaaggtggacgcagctcaaatgcctcaggaagcccagaaaatccaatctgatttgacaagtcatgagatcagtttagaagaaatgaagaaacataatcaggggaaggaggctgcccaaagagtcctgtctcagattgatgttgcacagaaaaaattacaagatgtctccatgaagtttcgattattccagaaaccagccaattttgagcagcgtctacaagaaagtaagatgattttagatgaagtgaagatgcacttgcctgcattggaaacaaagagtgtggaacaggaagtagtacagtcacagctaaatcattgtgtgaacttgtataaaagtctgagtgaagtgaagtctgaagtggaaatggtgataaagactggacgtcagattgtacagaaaaagcagacggaaaatcccaaagaacttgatgaaagagtaacagctttgaaattgcattataatgagctgggagcaaaggtaacagaaagaaagcaacagttggagaaatgcttgaaattgtcccgtaagatgcgaaaggaaatgaatgtcttgacagaatggctggcagctacagatatggaattgacaaagagatcagcagttgaaggaatgcctagtaatttggattctgaagttgcctggggaaaggctactcaaaaagagattgagaaacagaaggtgcacctgaagagtatcacagaggtaggagaggccttgaaaacagttttgggcaagaaggagacgttggtggaagataaactcagtcttctgaatagtaactggatagctgtcacctcccgagcagaagagtggttaaatcttttgttggaataccagaaacacatggaaacttttgaccagaatgtggaccacatcacaaagtggatcattcaggctgacacacttttggatgaatcagagaaaaagaaaccccagcaaaaagaagacgtgcttaagcgtttaaaggcagaactgaatgacatacgcccaaaggtggactctacacgtgaccaagcagcaaacttgatggcaaaccgcggtgaccactgcaggaaattagtagagccccaaatctcagagctcaaccatcgatttgcagccatttcacacagaattaagactggaaaggcctccattcctttgaaggaattggagcagtttaactcagatatacaaaaattgcttgaaccactggaggctgaaattcagcagggggtgaatctgaaagaggaagacttcaataaagatatgaatgaagacaatgagggtactgtaaaagaattgttgcaaagaggagacaacttacaacaaagaatcacagatgagagaaagcgagaggaaataaagataaaacagcagctgttacagacaaaacataatgctctcaaggatttgaggtctcaaagaagaaaaaaggctctagaaatttctcatcagtggtatcagtacaagaggcaggctgatgatctcctgaaatgcttggatgacattgaaaaaaaattagccagcctacctgagcccagagatgaaaggaaaataaaggaaattgatcgggaattgcagaagaagaaagaggagctgaatgcagtgcgtaggcaagctgagggcttgtctgaggatggggccgcaatggcagtggagccaactcagatccagctcagcaagcgctggcgggaaattgagagcaaatttgctcagtttcgaagactcaactttgcacaaattcacactgtccgtgaagaaacgatgatggtgatgactgaagacatgcctttggaaatttcttatgtgccttctacttatttgactgaaatcactcatgtctcacaagccctattagaagtggaacaacttctcaatgctcctgacctctgtgctaaggactttgaagatctctttaagcaagaggagtctctgaagaatataaaagatagtctacaacaaagctcaggtcggattgacattattcatagcaagaagacagcagcattgcaaagtgcaacgcctgtggaaagggtgaagctacaggaagctctctcccagcttgatttccaatgggaaaaagttaacaaaatgtacaaggaccgacaagggcgatttgacagatctgttgagaaatggcggcgttttcattatgatataaagatatttaatcagtggctaacagaagctgaacagtttctcagaaagacacaaattcctgagaattgggaacatgctaaatacaaatggtatcttaaggaactccaggatggcattgggcagcggcaaactgttgtcagaacattgaatgcaactggggaagaaataattcagcaatcctcaaaaacagatgccagtattctacaggaaaaattgggaagcctgaatctgcggtggcaggaggtctgcaaacagctgtcagacagaaaaaagaggctagaagaacaaaagaatatcttgtcagaatttcaaagagatttaaatgaatttgttttatggttggaggaagcagataacattgctagtatcccacttgaacctggaaaagagcagcaactaaaagaaaagcttgagcaagtcaagttactggtggaagagttgcccctgcgccagggaattctcaaacaattaaatgaaactggaggacccgtgcttgtaagtgctcccataagcccagaagagcaagataaacttgaaaataagctcaagcagacaaatctccagtggataaaggtttccagagctttacctgagaaacaaggagaaattgaagctcaaataaaagaccttgggcagcttgaaaaaaagcttgaagaccttgaagagcagttaaatcatctgctgctgtggttatctcctattaggaatcagttggaaatttataaccaaccaaaccaagaaggaccatttgacgttcaggaaactgaaatagcagttcaagctaaacaaccggatgtggaagagattttgtctaaagggcagcatttgtacaaggaaaaaccagccactcagccagtgaagaggaagttagaagatctgagctctgagtggaaggcggtaaaccgtttacttcaagagctgagggcaaagcagcctgacctagctcctggactgaccactattggagcctctcctactcagactgttactctggtgacacaacctgtggttactaaggaaactgccatctccaaactagaaatgccatcttccttgatgttggaggtacctgctctggcagatttcaaccgggcttggacagaacttaccgactggctttctctgcttgatcaagttataaaatcacagagggtgatggtgggtgaccttgaggatatcaacgagatgatcatcaagcagaaggcaacaatgcaggatttggaacagaggcgtccccagttggaagaactcattaccgctgcccaaaatttgaaaaacaagaccagcaatcaagaggctagaacaatcattacggatcgaattgaaagaattcagaatcagtgggatgaagtacaagaacaccttcagaaccggaggcaacagttgaatgaaatgttaaaggattcaacacaatggctggaagctaaggaagaagctgagcaggtcttaggacaggccagagccaagcttgagtcatggaaggagggtccctatacagtagatgcaatccaaaagaaaatcacagaaaccaagcagttggccaaagacctccgccagtggcagacaaatgtagatgtggcaaatgacttggccctgaaacttctccgggattattctgcagatgataccagaaaagtccacatgataacagagaatatcaatgcctcttggagaagcattcataaaagggtgagtgagcgagaggctgctttggaagaaactcatagattactgcaacagttccccctggacctggaaaagtttcttgcctggcttacagaagctgaaacaactgccaatgtcctacaggatgctacccgtaaggaaaggctcctagaagactccaagggagtaaaagagctgatgaaacaatggcaagacctccaaggtgaaattgaagctcacacagatgtttatcacaacctggatgaaaacagccaaaaaatcctgagatccctggaaggttccgatgatgcagtcctgttacaaagacgtttggataacatgaacttcaagtggagtgaacttcggaaaaagtctctcaacattaggtcccatttggaagccagttctgaccagtggaagcgtctgcacctttctctgcaggaacttctggtgtggctacagctgaaagatgatgaattaagccggcaggcacctattggaggcgactttccagcagttcagaagcagaacgatgtacatagggccttcaagagggaattgaaaactaaagaacctgtaatcatgagtactcttgagactgtacgaatatttctgacagagcagcctttggaaggactagagaaactctaccaggagcccagagagctgcctcctgaggagagagcccagaatgtcactcggcttctacgaaagcaggctgaggaggtcaatactgagtgggaaaaattgaacctgcactccgctgactggcagagaaaaatagatgagacccttgaaagactccaggaacttcaagaggccacggatgagctggacctcaagctgcgccaagctgaggtgatcaagggatcctggcagcccgtgggcgatctcctcattgactctctccaagatcacctcgagaaagtcaaggcacttcgaggagaaattgcgcctctgaaagagaacgtgagccacgtcaatgaccttgctcgccagcttaccactttgggcattcagctctcaccgtataacctcagcactctggaagacctgaacaccagatggaagcttctgcaggtggccgtcgaggaccgagtcaggcagctgcatgaagcccacagggactttggtccagcatctcagcactttctttccacgtctgtccagggtccctgggagagagccatctcgccaaacaaagtgccctactatatcaaccacgagactcaaacaacttgctgggaccatcccaaaatgacagagctctaccagtctttagctgacctgaataatgtcagattctcagcttataggactgccatgaaactccgaagactgcagaaggccctttgcttggatctcttgagcctgtcagctgcatgtgatgccttggaccagcacaacctcaagcaaaatgaccagcccatggatatcctgcagattattaattgtttgaccactatttatgaccgcctggagcaagagcacaacaatttggtcaacgtccctctctgcgtggatatgtgtctgaactggctgctgaatgtttatgatacgggacgaacagggaggatccgtgtcctgtcttttaaaactggcatcatttccctgtgtaaagcacatttggaagacaagtacagataccttttcaagcaagtggcaagttcaacaggattttgtgaccagcgcaggctgggcctccttctgcatgattctatccaaattccaagacagttgggtgaagttgcatcctttgggggcagtaacattgagccaagtgtccggagctgcttccaatttgctaataataagccagagatcgaagcggccctcttcctagactggatgagactggaaccccagtccatggtgtggctgcccgtcctgcacagagtggctgctgcagaaactgccaagcatcaggccaaatgtaacatctgcaaagagtgtccaatcattggattcaggtacaggagtctaaagcactttaattatgacatctgccaaagctgctttttttctggtcgagttgcaaaaggccataaaatgcactatcccatggtggaatattgcactccgactacatcaggagaagatgttcgagactttgccaaggtactaaaaaacaaatttcgaaccaaaaggtattttgcgaagcatccccgaatgggctacctgccagtgcagactgtcttagagggggacaacatggaaactcccgttactctgatcaacttctggccagtagattctgcgcctgcctcgtcccctcagctttcacacgatgatactcattcacgcattgaacattatgctagcaggctagcagaaatggaaaacagcaatggatcttatctaaatgatagcatctctcctaatgagagcatagatgatgaacatttgttaatccagcattactgccaaagtttgaaccaggactcccccctgagccagcctcgtagtcctgcccagatcttgatttccttagagagtgaggaaagaggggagctagagagaatcctagcagatcttgaggaagaaaacaggaatctgcaagcagaatatgaccgtctaaagcagcagcacgaacataaaggcctgtccccactgccgtcccctcctgaaatgatgcccacctctccccagagtccccgggatgctgagctcattgctgaggccaagctactgcgtcaacacaaaggccgcctggaagccaggatgcaaatcctggaagaccacaataaacagctggagtcacagttacacaggctaaggcagctgctggagcaaccccaggcagaggccaaagtgaatggcacaacggtgtcctctccttctacctctctacagaggtccgacagcagtcagcctatgctgctccgagtggttggcagtcaaacttcggactccatgggtgaggaagatcttctcagtcctccccaggacacaagcacagggttagaggaggtgatggagcaactcaacaactccttccctagttcaagaggaagaaatacccctggaaagccaatgagagaggacacaatgtaggaagtcttttccacatggcagatgatttgggcagagcgatggagtccttagtatcagtcatgacagatgaagaaggagcagaataaatgttttacaactcctgattcccgcatggtttttataatattcatacaacaaagaggattagacagtaagagtttacaagaaataaatctatatttttgtgaagggtagtggtattatactgtagatttcagtagtttctaagtctgttattgttttgttaacaatggcaggttttacacgtctatgcaattgtacaaaaaagttataagaaaactacatgtaaaatcttgatagctaaataacttgccatttctttatatggaacgcattttgggttgtttaaaaatttataacagttataaagaaagattgtaaactaaagtgtgctttataaaaaaaagttgtttataaaaacccctaaaaacaaaacaaacacacacacacacacatacacacacacacacaaaactttgaggcagcgcattgttttgcatccttttggcgtgatatccatatgaaattcatggctttttctttttttgcatattaaagataagacttcctctaccaccacaccaaatgactactacacactgctcatttgagaactgtcagctgagtggggcaggcttgagttttcatttcatatatctatatgtctataagtatataaatactatagttatatagataaagagatacgaatttctatagactgactttttccattttttaaatgttcatgtcacatcctaatagaaagaaattacttctagtcagtcatccaggcttacctgcttggtctagaatggatttttcccggagccggaagccaggaggaaactacaccacactaaaacattgtctacagctccagatgtttctcattttaaacaactttccactgacaacgaaagtaaagtaaagtattggatttttttaaagggaacatgtgaatgaatacacaggacttattatatcagagtgagtaatcggttggttggttgattgattgattgattgatacattcagcttcctgctgctagcaatgccacgatttagatttaatgatgcttcagtggaaatcaatcagaaggtattctgaccttgtgaacatcagaaggtattttttaactcccaagcagtagcaggacgatgatagggctggagggctatggattcccagcccatccctgtgaaggagtaggccactctttaagtgaaggattggatgattgttcataatacataaagttctctgtaattacaactaaattattatgccctcttctcacagtcaaaaggaactgggtggtttggtttttgttgcttttttagatttattgtcccatgtgggatgagtttttaaatgccacaagacataatttaaaataaataaactttgggaaaaggtgtaagacagtagccccatcacatttgtgatactgacaggtatcaacccagaagcccatgaactgtgtttccatcctttgcatttctctgcgagtagttccacacaggtttgtaagtaagtaagaaagaaggcaaattgattcaaatgttacaaaaaaacccttcttggtggattagacaggttaaatatataaacaaacaaacaaaaattgctcaaaaaagaggagaaaagctcaagaggaaaagctaaggactggtaggaaaaagctttactctttcatgccattttatttctttttgatttttaaatcattcattcaatagataccaccgtgtgacctataattttgcaaatctgttacctctgacatcaagtgtaattagcttttggagagtgggctgacatcaagtgtaattagcttttggagagtgggttttgtccattattaataattaattaattaacatcaaacacggcttctcatgctatttctacctcactttggttttggggtgttcctgataattgtgcacacctgagttcacagcttcaccacttgtccattgcgttattttctttttcctttataattctttctttttccttcataattttcaaaagaaaacccaaagctctaaggtaacaaattaccaaattacatgaagatttggtttttgtcttgcatttttttcctttatgtgacgctggaccttttctttacccaaggatttttaaaactcagatttaaaacaaggggttactttacatcctactaagaagtttaagtaagtaagtttcattctaaaatcagaggtaaatagagtgcataaataattttgttttaatctttttgtttttcttttagacacattagctctggagtgagtctgtcataatatttgaacaaaaattgagagctttattgctgcattttaagcataattaatttggacattatttcgtgttgtgttctttataaccaccgagtattaaactgtaaatcataatgtaactgaagcataaacatcacatggcatgttttgtcattgttttcaggtactgagttcttacttgagtatcataatatattgtgttttaacaccaacactgtaacatttacgaattatttttttaaacttcagttttactgcattttcacaacatatcagacttcaccaaatatatgccttactattgtattatagtactgctttactgtgtatctcaataaagcacgcagttatgttac

SEQ ID NO: 1745 - protein, 2344 aa, Homo sapiens
MTEMILLIFFPAYFLNAVRRQKLLEQSIQSAQETEKSLHLIQESLTFIDKQLAAYIADKVDAAQMPQEAQKIQSDLTSHEISLEEMKKHNQGKEAAQRVLSQIDVAQKKLQDVSMKFRLFQKPANFEQRLQESKMILDEVKMHLPALETKSVEQEVVQSQLNHCVNLYKSLSEVKSEVEMVIKTGRQIVQKKQTENPKELDERVTALKLHYNELGAKVTERKQQLEKCLKLSRKMRKEMNVLTEWLAATDMELTKRSAVEGMPSNLDSEVAWGKATQKEIEKQKVHLKSITEVGEALKTVLGKKETLVEDKLSLLNSNWIAVTSRAEEWLNLLLEYQKHMETFDQNVDHITKWIIQADTLLDESEKKKPQQKEDVLKRLKAELNDIRPKVDSTRDQAANLMANRGDHCRKLVEPQISELNHRFAAISHRIKTGKASIPLKELEQFNSDIQKLLEPLEAEIQQGVNLKEEDFNKDMNEDNEGTVKELLQRGDNLQQRITDERKREEIKIKQQLLQTKHNALKDLRSQRRKKALEISHQWYQYKRQADDLLKCLDDIEKKLASLPEPRDERKIKEIDRELQKKKEELNAVRRQAEGLSEDGAAMAVEPTQIQLSKRWREIESKFAQFRRLNFAQIHTVREETMMVMTEDMPLEISYVPSTYLTEITHVSQALLEVEQLLNAPDLCAKDFEDLFKQEESLKNIKDSLQQSSGRIDIIHSKKTAALQSATPVERVKLQEALSQLDFQWEKVNKMYKDRQGRFDRSVEKWRRFHYDIKIFNQWLTEAEQFLRKTQIPENWEHAKYKWYLKELQDGIGQRQTVVRTLNATGEEIIQQSSKTDASILQEKLGSLNLRWQEVCKQLSDRKKRLEEQKNILSEFQRDLNEFVLWLEEADNIASIPLEPGKEQQLKEKLEQVKLLVEELPLRQGILKQLNETGGPVLVSAPISPEEQDKLENKLKQTNLQWIKVSRALPEKQGEIEAQIKDLGQLEKKLEDLEEQLNHLLLWLSPIRNQLEIYNQPNQEGPFDVQETEIAVQAKQPDVEEILSKGQHLYKEKPATQPVKRKLEDLSSEWKAVNRLLQELRAKQPDLAPGLTTIGASPTQTVTLVTQPVVTKETAISKLEMPSSLMLEVPALADFNRAWTELTDWLSLLDQVIKSQRVMVGDLEDINEMIIKQKATMQDLEQRRPQLEELITAAQNLKNKTSNQEARTIITDRIERIQNQWDEVQEHLQNRRQQLNEMLKDSTQWLEAKEEAEQVLGQARAKLESWKEGPYTVDAIQKKITETKQLAKDLRQWQTNVDVANDLALKLLRDYSADDTRKVHMITENINASWRSIHKRVSEREAALEETHRLLQQFPLDLEKFLAWLTEAETTANVLQDATRKERLLEDSKGVKELMKQWQDLQGEIEAHTDVYHNLDENSQKILRSLEGSDDAVLLQRRLDNMNFKWSELRKKSLNIRSHLEASSDQWKRLHLSLQELLVWLQLKDDELSRQAPIGGDFPAVQKQNDVHRAFKRELKTKEPVIMSTLETVRIFLTEQPLEGLEKLYQEPRELPPEERAQNVTRLLRKQAEEVNTEWEKLNLHSADWQRKIDETLERLQELQEATDELDLKLRQAEVIKGSWQPVGDLLIDSLQDHLEKVKALRGEIAPLKENVSHVNDLARQLTTLGIQLSPYNLSTLEDLNTRWKLLQVAVEDRVRQLHEAHRDFGPASQHFLSTSVQGPWERAISPNKVPYYINHETQTTCWDHPKMTELYQSLADLNNVRFSAYRTAMKLRRLQKALCLDLLSLSAACDALDQHNLKQNDQPMDILQIINCLTTIYDRLEQEHNNLVNVPLCVDMCLNWLLNVYDTGRTGRIRVLSFKTGIISLCKAHLEDKYRYLFKQVASSTGFCDQRRLGLLLHDSIQIPRQLGEVASFGGSNIEPSVRSCFQFANNKPEIEAALFLDWMRLEPQSMVWLPVLHRVAAAETAKHQAKCNICKECPIIGFRYRSLKHFNYDICQSCFFSGRVAKGHKMHYPMVEYCTPTTSGEDVRDFAKVLKNKFRTKRYFAKHPRMGYLPVQTVLEGDNMETPVTLINFWPVDSAPASSPQLSHDDTHSRIEHYASRLAEMENSNGSYLNDSISPNESIDDEHLLIQHYCQSLNQDSPLSQPRSPAQILISLESEERGELERILADLEEENRNLQAEYDRLKQQHEHKGLSPLPSPPEMMPTSPQSPRDAELIAEAKLLRQHKGRLEARMQILEDHNKQLESQLHRLRQLLEQPQAEAKVNGTTVSSPSTSLQRSDSSQPMLLRVVGSQTSDSMGEEDLLSPPQDTSTGLEEVMEQLNNSFPSSRGRNTPGKPMREDTM

SEQ ID NO: 1746 - DNA, 9914 bp, Homo sapiens
taatgagatcaggaggaacattcgacctgagaaagacagattgcaatgactgagatgattttgctaattttttttccagcctatttccttaatgtacgtgatattgtgattgattttcatgcagagatccctgatcctatagttttgtttgctatttatttttctccttcacattttttttctatcaacagagctgaatgagtgccaggaagctgcgaaatctgtcttacaaaaaggctgtaaggaggcaaaagttgcttgaacagagcatccagtctgcccaggagactgaaaaatccttacacttaatccaggagtccctcacattcattgacaagcagttggcagcttatattgcagacaaggtggacgcagctcaaatgcctcaggaagcccagaaaatccaatctgatttgacaagtcatgagatcagtttagaagaaatgaagaaacataatcaggggaaggaggctgcccaaagagtcctgtctcagattgatgttgcacagaaaaaattacaagatgtctccatgaagtttcgattattccagaaaccagccaattttgagcagcgtctacaagaaagtaagatgattttagatgaagtgaagatgcacttgcctgcattggaaacaaagagtgtggaacaggaagtagtacagtcacagctaaatcattgtgtgaacttgtataaaagtctgagtgaagtgaagtctgaagtggaaatggtgataaagactggacgtcagattgtacagaaaaagcagacggaaaatcccaaagaacttgatgaaagagtaacagctttgaaattgcattataatgagctgggagcaaaggtaacagaaagaaagcaacagttggagaaatgcttgaaattgtcccgtaagatgcgaaaggaaatgaatgtcttgacagaatggctggcagctacagatatggaattgacaaagagatcagcagttgaaggaatgcctagtaatttggattctgaagttgcctggggaaaggctactcaaaaagagattgagaaacagaaggtgcacctgaagagtatcacagaggtaggagaggccttgaaaacagttttgggcaagaaggagacgttggtggaagataaactcagtcttctgaatagtaactggatagctgtcacctcccgagcagaagagtggttaaatcttttgttggaataccagaaacacatggaaacttttgaccagaatgtggaccacatcacaaagtggatcattcaggctgacacacttttggatgaatcagagaaaaagaaaccccagcaaaaagaagacgtgcttaagcgtttaaaggcagaactgaatgacatacgcccaaaggtggactctacacgtgaccaagcagcaaacttgatggcaaaccgcggtgaccactgcaggaaattagtagagccccaaatctcagagctcaaccatcgatttgcagccatttcacacagaattaagactggaaaggcctccattcctttgaaggaattggagcagtttaactcagatatacaaaaattgcttgaaccactggaggctgaaattcagcagggggtgaatctgaaagaggaagacttcaataaagatatgaatgaagacaatgagggtactgtaaaagaattgttgcaaagaggagacaacttacaacaaagaatcacagatgagagaaagcgagaggaaataaagataaaacagcagctgttacagacaaaacataatgctctcaaggatttgaggtctcaaagaagaaaaaaggctctagaaatttctcatcagtggtatcagtacaagaggcaggctgatgatctcctgaaatgcttggatgacattgaaaaaaaattagccagcctacctgagcccagagatgaaaggaaaataaaggaaattgatcgggaattgcagaagaagaaagaggagctgaatgcagtgcgtaggcaagctgagggcttgtctgaggatggggccgcaatggcagtggagccaactcagatccagctcagcaagcgctggcgggaaattgagagcaaatttgctcagtttcgaagactcaactttgcacaaattcacactgtccgtgaagaaacgatgatggtgatgactgaagacatgcctttggaaatttcttatgtgccttctacttatttgactgaaatcactcatgtctcacaagccctattagaagtggaacaacttctcaatgctcctgacctctgtgctaaggactttgaagatctctttaagcaagaggagtctctgaagaatataaaagatagtctacaacaaagctcaggtcggattgacattattcatagcaagaagacagcagcattgcaaagtgcaacgcctgtggaaagggtgaagctacaggaagctctctcccagcttgatttccaatgggaaaaagttaacaaaatgtacaaggaccgacaagggcgatttgacagatctgttgagaaatggcggcgttttcattatgatataaagatatttaatcagtggctaacagaagctgaacagtttctcagaaagacacaaattcctgagaattgggaacatgctaaatacaaatggtatcttaaggaactccaggatggcattgggcagcggcaaactgttgtcagaacattgaatgcaactggggaagaaataattcagcaatcctcaaaaacagatgccagtattctacaggaaaaattgggaagcctgaatctgcggtggcaggaggtctgcaaacagctgtcagacagaaaaaagaggctagaagaacaaaagaatatcttgtcagaatttcaaagagatttaaatgaatttgttttatggttggaggaagcagataacattgctagtatcccacttgaacctggaaaagagcagcaactaaaagaaaagcttgagcaagtcaagttactggtggaagagttgcccctgcgccagggaattctcaaacaattaaatgaaactggaggacccgtgcttgtaagtgctcccataagcccagaagagcaagataaacttgaaaataagctcaagcagacaaatctccagtggataaaggtttccagagctttacctgagaaacaaggagaaattgaagctcaaataaaagaccttgggcagcttgaaaaaaagcttgaagaccttgaagagcagttaaatcatctgctgctgtggttatctcctattaggaatcagttggaaatttataaccaaccaaaccaagaaggaccatttgacgttcaggaaactgaaatagcagttcaagctaaacaaccggatgtggaagagattttgtctaaagggcagcatttgtacaaggaaaaaccagccactcagccagtgaagaggaagttagaagatctgagctctgagtggaaggcggtaaaccgtttacttcaagagctgagggcaaagcagcctgacctagctcctggactgaccactattggagcctctcctactcagactgttactctggtgacacaacctgtggttactaaggaaactgccatctccaaactagaaatgccatcttccttgatgttggaggtacctgctctggcagatttcaaccgggcttggacagaacttaccgactggctttctctgcttgatcaagttataaaatcacagagggtgatggtgggtgaccttgaggatatcaacgagatgatcatcaagcagaaggcaacaatgcaggatttggaacagaggcgtccccagttggaagaactcattaccgctgcccaaaatttgaaaaacaagaccagcaatcaagaggctagaacaatcattacggatcgaattgaaagaattcagaatcagtgggatgaagtacaagaacaccttcagaaccggaggcaacagttgaatgaaatgttaaaggattcaacacaatggctggaagctaaggaagaagctgagcaggtcttaggacaggccagagccaagcttgagtcatggaaggagggtccctatacagtagatgcaatccaaaagaaaatcacagaaaccaagcagttggccaaagacctccgccagtggcagacaaatgtagatgtggcaaatgacttggccctgaaacttctccgggattattctgcagatgataccagaaaagtccacatgataacagagaatatcaatgcctcttggagaagcattcataaaagggtgagtgagcgagaggctgctttggaagaaactcatagattactgcaacagttccccctggacctggaaaagtttcttgcctggcttacagaagctgaaacaactgccaatgtcctacaggatgctacccgtaaggaaaggctcctagaagactccaagggagtaaaagagctgatgaaacaatggcaagacctccaaggtgaaattgaagctcacacagatgtttatcacaacctggatgaaaacagccaaaaaatcctgagatccctggaaggttccgatgatgcagtcctgttacaaagacgtttggataacatgaacttcaagtggagtgaacttcggaaaaagtctctcaacattaggtcccatttggaagccagttctgaccagtggaagcgtctgcacctttctctgcaggaacttctggtgtggctacagctgaaagatgatgaattaagccggcaggcacctattggaggcgactttccagcagttcagaagcagaacgatgtacatagggccttcaagagggaattgaaaactaaagaacctgtaatcatgagtactcttgagactgtacgaatatttctgacagagcagcctttggaaggactagagaaactctaccaggagcccagagagctgcctcctgaggagagagcccagaatgtcactcggcttctacgaaagcaggctgaggaggtcaatactgagtgggaaaaattgaacctgcactccgctgactggcagagaaaaatagatgagacccttgaaagactccaggaacttcaagaggccacggatgagctggacctcaagctgcgccaagctgaggtgatcaagggatcctggcagcccgtgggcgatctcctcattgactctctccaagatcacctcgagaaagtcaaggcacttcgaggagaaattgcgcctctgaaagagaacgtgagccacgtcaatgaccttgctcgccagcttaccactttgggcattcagctctcaccgtataacctcagcactctggaagacctgaacaccagatggaagcttctgcaggtggccgtcgaggaccgagtcaggcagctgcatgaagcccacagggactttggtccagcatctcagcactttctttccacgtctgtccagggtccctgggagagagccatctcgccaaacaaagtgccctactatatcaaccacgagactcaaacaacttgctgggaccatcccaaaatgacagagctctaccagtctttagctgacctgaataatgtcagattctcagcttataggactgccatgaaactccgaagactgcagaaggccctttgcttggatctcttgagcctgtcagctgcatgtgatgccttggaccagcacaacctcaagcaaaatgaccagcccatggatatcctgcagattattaattgtttgaccactatttatgaccgcctggagcaagagcacaacaatttggtcaacgtccctctctgcgtggatatgtgtctgaactggctgctgaatgtttatgatacgggacgaacagggaggatccgtgtcctgtcttttaaaactggcatcatttccctgtgtaaagcacatttggaagacaagtacagataccttttcaagcaagtggcaagttcaacaggattttgtgaccagcgcaggctgggcctccttctgcatgattctatccaaattccaagacagttgggtgaagttgcatcctttgggggcagtaacattgagccaagtgtccggagctgcttccaatttgctaataataagccagagatcgaagcggccctcttcctagactggatgagactggaaccccagtccatggtgtggctgcccgtcctgcacagagtggctgctgcagaaactgccaagcatcaggccaaatgtaacatctgcaaagagtgtccaatcattggattcaggtacaggagtctaaagcactttaattatgacatctgccaaagctgctttttttctggtcgagttgcaaaaggccataaaatgcactatcccatggtggaatattgcactccgactacatcaggagaagatgttcgagactttgccaaggtactaaaaaacaaatttcgaaccaaaaggtattttgcgaagcatccccgaatgggctacctgccagtgcagactgtcttagagggggacaacatggaaactcccgttactctgatcaacttctggccagtagattctgcgcctgcctcgtcccctcagctttcacacgatgatactcattcacgcattgaacattatgctagcaggctagcagaaatggaaaacagcaatggatcttatctaaatgatagcatctctcctaatgagagcatagatgatgaacatttgttaatccagcattactgccaaagtttgaaccaggactcccccctgagccagcctcgtagtcctgcccagatcttgatttccttagagagtgaggaaagaggggagctagagagaatcctagcagatcttgaggaagaaaacaggaatctgcaagcagaatatgaccgtctaaagcagcagcacgaacataaaggcctgtccccactgccgtcccctcctgaaatgatgcccacctctccccagagtccccgggatgctgagctcattgctgaggccaagctactgcgtcaacacaaaggccgcctggaagccaggatgcaaatcctggaagaccacaataaacagctggagtcacagttacacaggctaaggcagctgctggagcaaccccaggcagaggccaaagtgaatggcacaacggtgtcctctccttctacctctctacagaggtccgacagcagtcagcctatgctgctccgagtggttggcagtcaaacttcggactccatgggtgaggaagatcttctcagtcctccccaggacacaagcacagggttagaggaggtgatggagcaactcaacaactccttccctagttcaagaggaagaaatacccctggaaagccaatgagagaggacacaatgtaggaagtcttttccacatggcagatgatttgggcagagcgatggagtccttagtatcagtcatgacagatgaagaaggagcagaataaatgttttacaactcctgattcccgcatggtttttataatattcatacaacaaagaggattagacagtaagagtttacaagaaataaatctatatttttgtgaagggtagtggtattatactgtagatttcagtagtttctaagtctgttattgttttgttaacaatggcaggttttacacgtctatgcaattgtacaaaaaagttataagaaaactacatgtaaaatcttgatagctaaataacttgccatttctttatatggaacgcattttgggttgtttaaaaatttataacagttataaagaaagattgtaaactaaagtgtgctttataaaaaaaagttgtttataaaaacccctaaaaacaaaacaaacacacacacacacacatacacacacacacacaaaactttgaggcagcgcattgttttgcatccttttggcgtgatatccatatgaaattcatggctttttctttttttgcatattaaagataagacttcctctaccaccacaccaaatgactactacacactgctcatttgagaactgtcagctgagtggggcaggcttgagttttcatttcatatatctatatgtctataagtatataaatactatagttatatagataaagagatacgaatttctatagactgactttttccattttttaaatgttcatgtcacatcctaatagaaagaaattacttctagtcagtcatccaggcttacctgcttggtctagaatggatttttcccggagccggaagccaggaggaaactacaccacactaaaacattgtctacagctccagatgtttctcattttaaacaactttccactgacaacgaaagtaaagtaaagtattggatttttttaaagggaacatgtgaatgaatacacaggacttattatatcagagtgagtaatcggttggttggttgattgattgattgattgatacattcagcttcctgctgctagcaatgccacgatttagatttaatgatgcttcagtggaaatcaatcagaaggtattctgaccttgtgaacatcagaaggtattttttaactcccaagcagtagcaggacgatgatagggctggagggctatggattcccagcccatccctgtgaaggagtaggccactctttaagtgaaggattggatgattgttcataatacataaagttctctgtaattacaactaaattattatgccctcttctcacagtcaaaaggaactgggtggtttggtttttgttgcttttttagatttattgtcccatgtgggatgagtttttaaatgccacaagacataatttaaaataaataaactttgggaaaaggtgtaagacagtagccccatcacatttgtgatactgacaggtatcaacccagaagcccatgaactgtgtttccatcctttgcatttctctgcgagtagttccacacaggtttgtaagtaagtaagaaagaaggcaaattgattcaaatgttacaaaaaaacccttcttggtggattagacaggttaaatatataaacaaacaaacaaaaattgctcaaaaaagaggagaaaagctcaagaggaaaagctaaggactggtaggaaaaagctttactctttcatgccattttatttctttttgatttttaaatcattcattcaatagataccaccgtgtgacctataattttgcaaatctgttacctctgacatcaagtgtaattagcttttggagagtgggctgacatcaagtgtaattagcttttggagagtgggttttgtccattattaataattaattaattaacatcaaacacggcttctcatgctatttctacctcactttggttttggggtgttcctgataattgtgcacacctgagttcacagcttcaccacttgtccattgcgttattttctttttcctttataattctttctttttccttcataattttcaaaagaaaacccaaagctctaaggtaacaaattaccaaattacatgaagatttggtttttgtcttgcatttttttcctttatgtgacgctggaccttttctttacccaaggatttttaaaactcagatttaaaacaaggggttactttacatcctactaagaagtttaagtaagtaagtttcattctaaaatcagaggtaaatagagtgcataaataattttgttttaatctttttgtttttcttttagacacattagctctggagtgagtctgtcataatatttgaacaaaaattgagagctttattgctgcattttaagcataattaatttggacattatttcgtgttgtgttctttataaccaccgagtattaaactgtaaatcataatgtaactgaagcataaacatcacatggcatgttttgtcattgttttcaggtactgagttcttacttgagtatcataatatattgtgttttaacaccaacactgtaacatttacgaattatttttttaaacttcagttttactgcattttcacaacatatcagacttcaccaaatatatgccttactattgtattatagtactgctttactgtgtatctcaataaagcacgcagttatgttac

SEQ ID NO: 1747 - protein, 2341 aa, Homo sapiens
MSARKLRNLSYKKAVRRQKLLEQSIQSAQETEKSLHLIQESLTFIDKQLAAYIADKVDAAQMPQEAQKIQSDLTSHEISLEEMKKHNQGKEAAQRVLSQIDVAQKKLQDVSMKFRLFQKPANFEQRLQESKMILDEVKMHLPALETKSVEQEVVQSQLNHCVNLYKSLSEVKSEVEMVIKTGRQIVQKKQTENPKELDERVTALKLHYNELGAKVTERKQQLEKCLKLSRKMRKEMNVLTEWLAATDMELTKRSAVEGMPSNLDSEVAWGKATQKEIEKQKVHLKSITEVGEALKTVLGKKETLVEDKLSLLNSNWIAVTSRAEEWLNLLLEYQKHMETFDQNVDHITKWIIQADTLLDESEKKKPQQKEDVLKRLKAELNDIRPKVDSTRDQAANLMANRGDHCRKLVEPQISELNHRFAAISHRIKTGKASIPLKELEQFNSDIQKLLEPLEAEIQQGVNLKEEDFNKDMNEDNEGTVKELLQRGDNLQQRITDERKREEIKIKQQLLQTKHNALKDLRSQRRKKALEISHQWYQYKRQADDLLKCLDDIEKKLASLPEPRDERKIKEIDRELQKKKEELNAVRRQAEGLSEDGAAMAVEPTQIQLSKRWREIESKFAQFRRLNFAQIHTVREETMMVMTEDMPLEISYVPSTYLTEITHVSQALLEVEQLLNAPDLCAKDFEDLFKQEESLKNIKDSLQQSSGRIDIIHSKKTAALQSATPVERVKLQEALSQLDFQWEKVNKMYKDRQGRFDRSVEKWRRFHYDIKIFNQWLTEAEQFLRKTQIPENWEHAKYKWYLKELQDGIGQRQTVVRTLNATGEEIIQQSSKTDASILQEKLGSLNLRWQEVCKQLSDRKKRLEEQKNILSEFQRDLNEFVLWLEEADNIASIPLEPGKEQQLKEKLEQVKLLVEELPLRQGILKQLNETGGPVLVSAPISPEEQDKLENKLKQTNLQWIKVSRALPEKQGEIEAQIKDLGQLEKKLEDLEEQLNHLLLWLSPIRNQLEIYNQPNQEGPFDVQETEIAVQAKQPDVEEILSKGQHLYKEKPATQPVKRKLEDLSSEWKAVNRLLQELRAKQPDLAPGLTTIGASPTQTVTLVTQPVVTKETAISKLEMPSSLMLEVPALADFNRAWTELTDWLSLLDQVIKSQRVMVGDLEDINEMIIKQKATMQDLEQRRPQLEELITAAQNLKNKTSNQEARTIITDRIERIQNQWDEVQEHLQNRRQQLNEMLKDSTQWLEAKEEAEQVLGQARAKLESWKEGPYTVDAIQKKITETKQLAKDLRQWQTNVDVANDLALKLLRDYSADDTRKVHMITENINASWRSIHKRVSEREAALEETHRLLQQFPLDLEKFLAWLTEAETTANVLQDATRKERLLEDSKGVKELMKQWQDLQGEIEAHTDVYHNLDENSQKILRSLEGSDDAVLLQRRLDNMNFKWSELRKKSLNIRSHLEASSDQWKRLHLSLQELLVWLQLKDDELSRQAPIGGDFPAVQKQNDVHRAFKRELKTKEPVIMSTLETVRIFLTEQPLEGLEKLYQEPRELPPEERAQNVTRLLRKQAEEVNTEWEKLNLHSADWQRKIDETLERLQELQEATDELDLKLRQAEVIKGSWQPVGDLLIDSLQDHLEKVKALRGEIAPLKENVSHVNDLARQLTTLGIQLSPYNLSTLEDLNTRWKLLQVAVEDRVRQLHEAHRDFGPASQHFLSTSVQGPWERAISPNKVPYYINHETQTTCWDHPKMTELYQSLADLNNVRFSAYRTAMKLRRLQKALCLDLLSLSAACDALDQHNLKQNDQPMDILQIINCLTTIYDRLEQEHNNLVNVPLCVDMCLNWLLNVYDTGRTGRIRVLSFKTGIISLCKAHLEDKYRYLFKQVASSTGFCDQRRLGLLLHDSIQIPRQLGEVASFGGSNIEPSVRSCFQFANNKPEIEAALFLDWMRLEPQSMVWLPVLHRVAAAETAKHQAKCNICKECPIIGFRYRSLKHFNYDICQSCFFSGRVAKGHKMHYPMVEYCTPTTSGEDVRDFAKVLKNKFRTKRYFAKHPRMGYLPVQTVLEGDNMETPVTLINFWPVDSAPASSPQLSHDDTHSRIEHYASRLAEMENSNGSYLNDSISPNESIDDEHLLIQHYCQSLNQDSPLSQPRSPAQILISLESEERGELERILADLEEENRNLQAEYDRLKQQHEHKGLSPLPSPPEMMPTSPQSPRDAELIAEAKLLRQHKGRLEARMQILEDHNKQLESQLHRLRQLLEQPQAEAKVNGTTVSSPSTSLQRSDSSQPMLLRVVGSQTSDSMGEEDLLSPPQDTSTGLEEVMEQLNNSFPSSRGRNTPGKPMREDTM

SEQ ID NO: 1748 - DNA, 7410 bp, Homo sapiens
acactagcaatggcaaagctttgtgcggaggcattgctggctgctctgaactaaaagcatccgtggggaccgaaagaggtttttgcacaccttattaaggaactccaggatggcattgggcagcggcaaactgttgtcagaacattgaatgcaactggggaagaaataattcagcaatcctcaaaaacagatgccagtattctacaggaaaaattgggaagcctgaatctgcggtggcaggaggtctgcaaacagctgtcagacagaaaaaagaggctagaagaacaaaagaatatcttgtcagaatttcaaagagatttaaatgaatttgttttatggttggaggaagcagataacattgctagtatcccacttgaacctggaaaagagcagcaactaaaagaaaagcttgagcaagtcaagttactggtggaagagttgcccctgcgccagggaattctcaaacaattaaatgaaactggaggacccgtgcttgtaagtgctcccataagcccagaagagcaagataaacttgaaaataagctcaagcagacaaatctccagtggataaaggtttccagagctttacctgagaaacaaggagaaattgaagctcaaataaaagaccttgggcagcttgaaaaaaagcttgaagaccttgaagagcagttaaatcatctgctgctgtggttatctcctattaggaatcagttggaaatttataaccaaccaaaccaagaaggaccatttgacgttcaggaaactgaaatagcagttcaagctaaacaaccggatgtggaagagattttgtctaaagggcagcatttgtacaaggaaaaaccagccactcagccagtgaagaggaagttagaagatctgagctctgagtggaaggcggtaaaccgtttacttcaagagctgagggcaaagcagcctgacctagctcctggactgaccactattggagcctctcctactcagactgttactctggtgacacaacctgtggttactaaggaaactgccatctccaaactagaaatgccatcttccttgatgttggaggtacctgctctggcagatttcaaccgggcttggacagaacttaccgactggctttctctgcttgatcaagttataaaatcacagagggtgatggtgggtgaccttgaggatatcaacgagatgatcatcaagcagaaggcaacaatgcaggatttggaacagaggcgtccccagttggaagaactcattaccgctgcccaaaatttgaaaaacaagaccagcaatcaagaggctagaacaatcattacggatcgaattgaaagaattcagaatcagtgggatgaagtacaagaacaccttcagaaccggaggcaacagttgaatgaaatgttaaaggattcaacacaatggctggaagctaaggaagaagctgagcaggtcttaggacaggccagagccaagcttgagtcatggaaggagggtccctatacagtagatgcaatccaaaagaaaatcacagaaaccaagcagttggccaaagacctccgccagtggcagacaaatgtagatgtggcaaatgacttggccctgaaacttctccgggattattctgcagatgataccagaaaagtccacatgataacagagaatatcaatgcctcttggagaagcattcataaaagggtgagtgagcgagaggctgctttggaagaaactcatagattactgcaacagttccccctggacctggaaaagtttcttgcctggcttacagaagctgaaacaactgccaatgtcctacaggatgctacccgtaaggaaaggctcctagaagactccaagggagtaaaagagctgatgaaacaatggcaagacctccaaggtgaaattgaagctcacacagatgtttatcacaacctggatgaaaacagccaaaaaatcctgagatccctggaaggttccgatgatgcagtcctgttacaaagacgtttggataacatgaacttcaagtggagtgaacttcggaaaaagtctctcaacattaggtcccatttggaagccagttctgaccagtggaagcgtctgcacctttctctgcaggaacttctggtgtggctacagctgaaagatgatgaattaagccggcaggcacctattggaggcgactttccagcagttcagaagcagaacgatgtacatagggccttcaagagggaattgaaaactaaagaacctgtaatcatgagtactcttgagactgtacgaatatttctgacagagcagcctttggaaggactagagaaactctaccaggagcccagagagctgcctcctgaggagagagcccagaatgtcactcggcttctacgaaagcaggctgaggaggtcaatactgagtgggaaaaattgaacctgcactccgctgactggcagagaaaaatagatgagacccttgaaagactccaggaacttcaagaggccacggatgagctggacctcaagctgcgccaagctgaggtgatcaagggatcctggcagcccgtgggcgatctcctcattgactctctccaagatcacctcgagaaagtcaaggcacttcgaggagaaattgcgcctctgaaagagaacgtgagccacgtcaatgaccttgctcgccagcttaccactttgggcattcagctctcaccgtataacctcagcactctggaagacctgaacaccagatggaagcttctgcaggtggccgtcgaggaccgagtcaggcagctgcatgaagcccacagggactttggtccagcatctcagcactttctttccacgtctgtccagggtccctgggagagagccatctcgccaaacaaagtgccctactatatcaaccacgagactcaaacaacttgctgggaccatcccaaaatgacagagctctaccagtctttagctgacctgaataatgtcagattctcagcttataggactgccatgaaactccgaagactgcagaaggccctttgcttggatctcttgagcctgtcagctgcatgtgatgccttggaccagcacaacctcaagcaaaatgaccagcccatggatatcctgcagattattaattgtttgaccactatttatgaccgcctggagcaagagcacaacaatttggtcaacgtccctctctgcgtggatatgtgtctgaactggctgctgaatgtttatgatacgggacgaacagggaggatccgtgtcctgtcttttaaaactggcatcatttccctgtgtaaagcacatttggaagacaagtacagataccttttcaagcaagtggcaagttcaacaggattttgtgaccagcgcaggctgggcctccttctgcatgattctatccaaattccaagacagttgggtgaagttgcatcctttgggggcagtaacattgagccaagtgtccggagctgcttccaatttgctaataataagccagagatcgaagcggccctcttcctagactggatgagactggaaccccagtccatggtgtggctgcccgtcctgcacagagtggctgctgcagaaactgccaagcatcaggccaaatgtaacatctgcaaagagtgtccaatcattggattcaggtacaggagtctaaagcactttaattatgacatctgccaaagctgctttttttctggtcgagttgcaaaaggccataaaatgcactatcccatggtggaatattgcactccgactacatcaggagaagatgttcgagactttgccaaggtactaaaaaacaaatttcgaaccaaaaggtattttgcgaagcatccccgaatgggctacctgccagtgcagactgtcttagagggggacaacatggaaactcccgttactctgatcaacttctggccagtagattctgcgcctgcctcgtcccctcagctttcacacgatgatactcattcacgcattgaacattatgctagcaggctagcagaaatggaaaacagcaatggatcttatctaaatgatagcatctctcctaatgagagcatagatgatgaacatttgttaatccagcattactgccaaagtttgaaccaggactcccccctgagccagcctcgtagtcctgcccagatcttgatttccttagagagtgaggaaagaggggagctagagagaatcctagcagatcttgaggaagaaaacaggaatctgcaagcagaatatgaccgtctaaagcagcagcacgaacataaaggcctgtccccactgccgtcccctcctgaaatgatgcccacctctccccagagtccccgggatgctgagctcattgctgaggccaagctactgcgtcaacacaaaggccgcctggaagccaggatgcaaatcctggaagaccacaataaacagctggagtcacagttacacaggctaaggcagctgctggagcaaccccaggcagaggccaaagtgaatggcacaacggtgtcctctccttctacctctctacagaggtccgacagcagtcagcctatgctgctccgagtggttggcagtcaaacttcggactccatgggtgaggaagatcttctcagtcctccccaggacacaagcacagggttagaggaggtgatggagcaactcaacaactccttccctagttcaagaggaagaaatacccctggaaagccaatgagagaggacacaatgtaggaagtcttttccacatggcagatgatttgggcagagcgatggagtccttagtatcagtcatgacagatgaagaaggagcagaataaatgttttacaactcctgattcccgcatggtttttataatattcatacaacaaagaggattagacagtaagagtttacaagaaataaatctatatttttgtgaagggtagtggtattatactgtagatttcagtagtttctaagtctgttattgttttgttaacaatggcaggttttacacgtctatgcaattgtacaaaaaagttataagaaaactacatgtaaaatcttgatagctaaataacttgccatttctttatatggaacgcattttgggttgtttaaaaatttataacagttataaagaaagattgtaaactaaagtgtgctttataaaaaaaagttgtttataaaaacccctaaaaacaaaacaaacacacacacacacacatacacacacacacacaaaactttgaggcagcgcattgttttgcatccttttggcgtgatatccatatgaaattcatggctttttctttttttgcatattaaagataagacttcctctaccaccacaccaaatgactactacacactgctcatttgagaactgtcagctgagtggggcaggcttgagttttcatttcatatatctatatgtctataagtatataaatactatagttatatagataaagagatacgaatttctatagactgactttttccattttttaaatgttcatgtcacatcctaatagaaagaaattacttctagtcagtcatccaggcttacctgcttggtctagaatggatttttcccggagccggaagccaggaggaaactacaccacactaaaacattgtctacagctccagatgtttctcattttaaacaactttccactgacaacgaaagtaaagtaaagtattggatttttttaaagggaacatgtgaatgaatacacaggacttattatatcagagtgagtaatcggttggttggttgattgattgattgattgatacattcagcttcctgctgctagcaatgccacgatttagatttaatgatgcttcagtggaaatcaatcagaaggtattctgaccttgtgaacatcagaaggtattttttaactcccaagcagtagcaggacgatgatagggctggagggctatggattcccagcccatccctgtgaaggagtaggccactctttaagtgaaggattggatgattgttcataatacataaagttctctgtaattacaactaaattattatgccctcttctcacagtcaaaaggaactgggtggtttggtttttgttgcttttttagatttattgtcccatgtgggatgagtttttaaatgccacaagacataatttaaaataaataaactttgggaaaaggtgtaagacagtagccccatcacatttgtgatactgacaggtatcaacccagaagcccatgaactgtgtttccatcctttgcatttctctgcgagtagttccacacaggtttgtaagtaagtaagaaagaaggcaaattgattcaaatgttacaaaaaaacccttcttggtggattagacaggttaaatatataaacaaacaaacaaaaattgctcaaaaaagaggagaaaagctcaagaggaaaagctaaggactggtaggaaaaagctttactctttcatgccattttatttctttttgatttttaaatcattcattcaatagataccaccgtgtgacctataattttgcaaatctgttacctctgacatcaagtgtaattagcttttggagagtgggctgacatcaagtgtaattagcttttggagagtgggttttgtccattattaataattaattaattaacatcaaacacggcttctcatgctatttctacctcactttggttttggggtgttcctgataattgtgcacacctgagttcacagcttcaccacttgtccattgcgttattttctttttcctttataattctttctttttccttcataattttcaaaagaaaacccaaagctctaaggtaacaaattaccaaattacatgaagatttggtttttgtcttgcatttttttcctttatgtgacgctggaccttttctttacccaaggatttttaaaactcagatttaaaacaaggggttactttacatcctactaagaagtttaagtaagtaagtttcattctaaaatcagaggtaaatagagtgcataaataattttgttttaatctttttgtttttcttttagacacattagctctggagtgagtctgtcataatatttgaacaaaaattgagagctttattgctgcattttaagcataattaatttggacattatttcgtgttgtgttctttataaccaccgagtattaaactgtaaatcataatgtaactgaagcataaacatcacatggcatgttttgtcattgttttcaggtactgagttcttacttgagtatcataatatattgtgttttaacaccaacactgtaacatttacgaattatttttttaaacttcagttttactgcattttcacaacatatcagacttcaccaaatatatgccttactattgtattatagtactgctttactgtgtatctcaataaagcacgcagttatgttac

SEQ ID NO: 1749 - protein, 1225 aa, Homo sapiens
MPSSLMLEVPALADFNRAWTELTDWLSLLDQVIKSQRVMVGDLEDINEMIIKQKATMQDLEQRRPQLEELITAAQNLKNKTSNQEARTIITDRIERIQNQWDEVQEHLQNRRQQLNEMLKDSTQWLEAKEEAEQVLGQARAKLESWKEGPYTVDAIQKKITETKQLAKDLRQWQTNVDVANDLALKLLRDYSADDTRKVHMITENINASWRSIHKRVSEREAALEETHRLLQQFPLDLEKFLAWLTEAETTANVLQDATRKERLLEDSKGVKELMKQWQDLQGEIEAHTDVYHNLDENSQKILRSLEGSDDAVLLQRRLDNMNFKWSELRKKSLNIRSHLEASSDQWKRLHLSLQELLVWLQLKDDELSRQAPIGGDFPAVQKQNDVHRAFKRELKTKEPVIMSTLETVRIFLTEQPLEGLEKLYQEPRELPPEERAQNVTRLLRKQAEEVNTEWEKLNLHSADWQRKIDETLERLQELQEATDELDLKLRQAEVIKGSWQPVGDLLIDSLQDHLEKVKALRGEIAPLKENVSHVNDLARQLTTLGIQLSPYNLSTLEDLNTRWKLLQVAVEDRVRQLHEAHRDFGPASQHFLSTSVQGPWERAISPNKVPYYINHETQTTCWDHPKMTELYQSLADLNNVRFSAYRTAMKLRRLQKALCLDLLSLSAACDALDQHNLKQNDQPMDILQIINCLTTIYDRLEQEHNNLVNVPLCVDMCLNWLLNVYDTGRTGRIRVLSFKTGIISLCKAHLEDKYRYLFKQVASSTGFCDQRRLGLLLHDSIQIPRQLGEVASFGGSNIEPSVRSCFQFANNKPEIEAALFLDWMRLEPQSMVWLPVLHRVAAAETAKHQAKCNICKECPIIGFRYRSLKHFNYDICQSCFFSGRVAKGHKMHYPMVEYCTPTTSGEDVRDFAKVLKNKFRTKRYFAKHPRMGYLPVQTVLEGDNMETPVTLINFWPVDSAPASSPQLSHDDTHSRIEHYASRLAEMENSNGSYLNDSISPNESIDDEHLLIQHYCQSLNQDSPLSQPRSPAQILISLESEERGELERILADLEEENRNLQAEYDRLKQQHEHKGLSPLPSPPEMMPTSPQSPRDAELIAEAKLLRQHKGRLEARMQILEDHNKQLESQLHRLRQLLEQPQAEAKVNGTTVSSPSTSLQRSDSSQPMLLRVVGSQTSDSMGEEDLLSPPQDTSTGLEEVMEQLNNSFPSSRGRNTPGKPMREDTM

SEQ ID NO: 1750 - DNA, 5623 bp, Homo sapiens
gggttttctcaggattgctatgcaacaggatcagtgctgtagtgcccggttcaagctgaaaatgttacacaggaagacataccatgtaaaggacctccaaggtgaaattgaagctcacacagatgtttatcacaacctggatgaaaacagccaaaaaatcctgagatccctggaaggttccgatgatgcagtcctgttacaaagacgtttggataacatgaacttcaagtggagtgaacttcggaaaaagtctctcaacattaggtcccatttggaagccagttctgaccagtggaagcgtctgcacctttctctgcaggaacttctggtgtggctacagctgaaagatgatgaattaagccggcaggcacctattggaggcgactttccagcagttcagaagcagaacgatgtacatagggccttcaagagggaattgaaaactaaagaacctgtaatcatgagtactcttgagactgtacgaatatttctgacagagcagcctttggaaggactagagaaactctaccaggagcccagagagctgcctcctgaggagagagcccagaatgtcactcggcttctacgaaagcaggctgaggaggtcaatactgagtgggaaaaattgaacctgcactccgctgactggcagagaaaaatagatgagacccttgaaagactccaggaacttcaagaggccacggatgagctggacctcaagctgcgccaagctgaggtgatcaagggatcctggcagcccgtgggcgatctcctcattgactctctccaagatcacctcgagaaagtcaaggcacttcgaggagaaattgcgcctctgaaagagaacgtgagccacgtcaatgaccttgctcgccagcttaccactttgggcattcagctctcaccgtataacctcagcactctggaagacctgaacaccagatggaagcttctgcaggtggccgtcgaggaccgagtcaggcagctgcatgaagcccacagggactttggtccagcatctcagcactttctttccacgtctgtccagggtccctgggagagagccatctcgccaaacaaagtgccctactatatcaaccacgagactcaaacaacttgctgggaccatcccaaaatgacagagctctaccagtctttagctgacctgaataatgtcagattctcagcttataggactgccatgaaactccgaagactgcagaaggccctttgcttggatctcttgagcctgtcagctgcatgtgatgccttggaccagcacaacctcaagcaaaatgaccagcccatggatatcctgcagattattaattgtttgaccactatttatgaccgcctggagcaagagcacaacaatttggtcaacgtccctctctgcgtggatatgtgtctgaactggctgctgaatgtttatgatacgggacgaacagggaggatccgtgtcctgtcttttaaaactggcatcatttccctgtgtaaagcacatttggaagacaagtacagataccttttcaagcaagtggcaagttcaacaggattttgtgaccagcgcaggctgggcctccttctgcatgattctatccaaattccaagacagttgggtgaagttgcatcctttgggggcagtaacattgagccaagtgtccggagctgcttccaatttgctaataataagccagagatcgaagcggccctcttcctagactggatgagactggaaccccagtccatggtgtggctgcccgtcctgcacagagtggctgctgcagaaactgccaagcatcaggccaaatgtaacatctgcaaagagtgtccaatcattggattcaggtacaggagtctaaagcactttaattatgacatctgccaaagctgctttttttctggtcgagttgcaaaaggccataaaatgcactatcccatggtggaatattgcactccgactacatcaggagaagatgttcgagactttgccaaggtactaaaaaacaaatttcgaaccaaaaggtattttgcgaagcatccccgaatgggctacctgccagtgcagactgtcttagagggggacaacatggaaactcccgttactctgatcaacttctggccagtagattctgcgcctgcctcgtcccctcagctttcacacgatgatactcattcacgcattgaacattatgctagcaggctagcagaaatggaaaacagcaatggatcttatctaaatgatagcatctctcctaatgagagcatagatgatgaacatttgttaatccagcattactgccaaagtttgaaccaggactcccccctgagccagcctcgtagtcctgcccagatcttgatttccttagagagtgaggaaagaggggagctagagagaatcctagcagatcttgaggaagaaaacaggaatctgcaagcagaatatgaccgtctaaagcagcagcacgaacataaaggcctgtccccactgccgtcccctcctgaaatgatgcccacctctccccagagtccccgggatgctgagctcattgctgaggccaagctactgcgtcaacacaaaggccgcctggaagccaggatgcaaatcctggaagaccacaataaacagctggagtcacagttacacaggctaaggcagctgctggagcaaccccaggcagaggccaaagtgaatggcacaacggtgtcctctccttctacctctctacagaggtccgacagcagtcagcctatgctgctccgagtggttggcagtcaaacttcggactccatgggtgaggaagatcttctcagtcctccccaggacacaagcacagggttagaggaggtgatggagcaactcaacaactccttccctagttcaagaggaagaaatacccctggaaagccaatgagagaggacacaatgtaggaagtcttttccacatggcagatgatttgggcagagcgatggagtccttagtatcagtcatgacagatgaagaaggagcagaataaatgttttacaactcctgattcccgcatggtttttataatattcatacaacaaagaggattagacagtaagagtttacaagaaataaatctatatttttgtgaagggtagtggtattatactgtagatttcagtagtttctaagtctgttattgttttgttaacaatggcaggttttacacgtctatgcaattgtacaaaaaagttataagaaaactacatgtaaaatcttgatagctaaataacttgccatttctttatatggaacgcattttgggttgtttaaaaatttataacagttataaagaaagattgtaaactaaagtgtgctttataaaaaaaagttgtttataaaaacccctaaaaacaaaacaaacacacacacacacacatacacacacacacacaaaactttgaggcagcgcattgttttgcatccttttggcgtgatatccatatgaaattcatggctttttctttttttgcatattaaagataagacttcctctaccaccacaccaaatgactactacacactgctcatttgagaactgtcagctgagtggggcaggcttgagttttcatttcatatatctatatgtctataagtatataaatactatagttatatagataaagagatacgaatttctatagactgactttttccattttttaaatgttcatgtcacatcctaatagaaagaaattacttctagtcagtcatccaggcttacctgcttggtctagaatggatttttcccggagccggaagccaggaggaaactacaccacactaaaacattgtctacagctccagatgtttctcattttaaacaactttccactgacaacgaaagtaaagtaaagtattggatttttttaaagggaacatgtgaatgaatacacaggacttattatatcagagtgagtaatcggttggttggttgattgattgattgattgatacattcagcttcctgctgctagcaatgccacgatttagatttaatgatgcttcagtggaaatcaatcagaaggtattctgaccttgtgaacatcagaaggtattttttaactcccaagcagtagcaggacgatgatagggctggagggctatggattcccagcccatccctgtgaaggagtaggccactctttaagtgaaggattggatgattgttcataatacataaagttctctgtaattacaactaaattattatgccctcttctcacagtcaaaaggaactgggtggtttggtttttgttgcttttttagatttattgtcccatgtgggatgagtttttaaatgccacaagacataatttaaaataaataaactttgggaaaaggtgtaagacagtagccccatcacatttgtgatactgacaggtatcaacccagaagcccatgaactgtgtttccatcctttgcatttctctgcgagtagttccacacaggtttgtaagtaagtaagaaagaaggcaaattgattcaaatgttacaaaaaaacccttcttggtggattagacaggttaaatatataaacaaacaaacaaaaattgctcaaaaaagaggagaaaagctcaagaggaaaagctaaggactggtaggaaaaagctttactctttcatgccattttatttctttttgatttttaaatcattcattcaatagataccaccgtgtgacctataattttgcaaatctgttacctctgacatcaagtgtaattagcttttggagagtgggctgacatcaagtgtaattagcttttggagagtgggttttgtccattattaataattaattaattaacatcaaacacggcttctcatgctatttctacctcactttggttttggggtgttcctgataattgtgcacacctgagttcacagcttcaccacttgtccattgcgttattttctttttcctttataattctttctttttccttcataattttcaaaagaaaacccaaagctctaaggtaacaaattaccaaattacatgaagatttggtttttgtcttgcatttttttcctttatgtgacgctggaccttttctttacccaaggatttttaaaactcagatttaaaacaaggggttactttacatcctactaagaagtttaagtaagtaagtttcattctaaaatcagaggtaaatagagtgcataaataattttgttttaatctttttgtttttcttttagacacattagctctggagtgagtctgtcataatatttgaacaaaaattgagagctttattgctgcattttaagcataattaatttggacattatttcgtgttgtgttctttataaccaccgagtattaaactgtaaatcataatgtaactgaagcataaacatcacatggcatgttttgtcattgttttcaggtactgagttcttacttgagtatcataatatattgtgttttaacaccaacactgtaacatttacgaattatttttttaaacttcagttttactgcattttcacaacatatcagacttcaccaaatatatgccttactattgtattatagtactgctttactgtgtatctcaataaagcacgcagttatgttac

SEQ ID NO: 1751 - protein, 956 aa, Homo sapiens
MLHRKTYHVKDLQGEIEAHTDVYHNLDENSQKILRSLEGSDDAVLLQRRLDNMNFKWSELRKKSLNIRSHLEASSDQWKRLHLSLQELLVWLQLKDDELSRQAPIGGDFPAVQKQNDVHRAFKRELKTKEPVIMSTLETVRIFLTEQPLEGLEKLYQEPRELPPEERAQNVTRLLRKQAEEVNTEWEKLNLHSADWQRKIDETLERLQELQEATDELDLKLRQAEVIKGSWQPVGDLLIDSLQDHLEKVKALRGEIAPLKENVSHVNDLARQLTTLGIQLSPYNLSTLEDLNTRWKLLQVAVEDRVRQLHEAHRDFGPASQHFLSTSVQGPWERAISPNKVPYYINHETQTTCWDHPKMTELYQSLADLNNVRFSAYRTAMKLRRLQKALCLDLLSLSAACDALDQHNLKQNDQPMDILQIINCLTTIYDRLEQEHNNLVNVPLCVDMCLNWLLNVYDTGRTGRIRVLSFKTGIISLCKAHLEDKYRYLFKQVASSTGFCDQRRLGLLLHDSIQIPRQLGEVASFGGSNIEPSVRSCFQFANNKPEIEAALFLDWMRLEPQSMVWLPVLHRVAAAETAKHQAKCNICKECPIIGFRYRSLKHFNYDICQSCFFSGRVAKGHKMHYPMVEYCTPTTSGEDVRDFAKVLKNKFRTKRYFAKHPRMGYLPVQTVLEGDNMETPVTLINFWPVDSAPASSPQLSHDDTHSRIEHYASRLAEMENSNGSYLNDSISPNESIDDEHLLIQHYCQSLNQDSPLSQPRSPAQILISLESEERGELERILADLEEENRNLQAEYDRLKQQHEHKGLSPLPSPPEMMPTSPQSPRDAELIAEAKLLRQHKGRLEARMQILEDHNKQLESQLHRLRQLLEQPQAEAKVNGTTVSSPSTSLQRSDSSQPMLLRVVGSQTSDSMGEEDLLSPPQDTSTGLEEVMEQLNNSFPSSRGRNTPGKPMREDTM

SEQ ID NO: 1752 - DNA, 4623 bp, Homo sapiens
actttcggggagcccggcggctctgggaagctcactcctccactcgtacccacactcgaccgcggagcccttgcagccatgagggaacagctcaaaggccacgagactcaaacaacttgctgggaccatcccaaaatgacagagctctaccagtctttagctgacctgaataatgtcagattctcagcttataggactgccatgaaactccgaagactgcagaaggccctttgcttggatctcttgagcctgtcagctgcatgtgatgccttggaccagcacaacctcaagcaaaatgaccagcccatggatatcctgcagattattaattgtttgaccactatttatgaccgcctggagcaagagcacaacaatttggtcaacgtccctctctgcgtggatatgtgtctgaactggctgctgaatgtttatgatacgggacgaacagggaggatccgtgtcctgtcttttaaaactggcatcatttccctgtgtaaagcacatttggaagacaagtacagataccttttcaagcaagtggcaagttcaacaggattttgtgaccagcgcaggctgggcctccttctgcatgattctatccaaattccaagacagttgggtgaagttgcatcctttgggggcagtaacattgagccaagtgtccggagctgcttccaatttgctaataataagccagagatcgaagcggccctcttcctagactggatgagactggaaccccagtccatggtgtggctgcccgtcctgcacagagtggctgctgcagaaactgccaagcatcaggccaaatgtaacatctgcaaagagtgtccaatcattggattcaggtacaggagtctaaagcactttaattatgacatctgccaaagctgctttttttctggtcgagttgcaaaaggccataaaatgcactatcccatggtggaatattgcactccgactacatcaggagaagatgttcgagactttgccaaggtactaaaaaacaaatttcgaaccaaaaggtattttgcgaagcatccccgaatgggctacctgccagtgcagactgtcttagagggggacaacatggaaactcccgttactctgatcaacttctggccagtagattctgcgcctgcctcgtcccctcagctttcacacgatgatactcattcacgcattgaacattatgctagcaggctagcagaaatggaaaacagcaatggatcttatctaaatgatagcatctctcctaatgagagcatagatgatgaacatttgttaatccagcattactgccaaagtttgaaccaggactcccccctgagccagcctcgtagtcctgcccagatcttgatttccttagagagtgaggaaagaggggagctagagagaatcctagcagatcttgaggaagaaaacaggaatctgcaagcagaatatgaccgtctaaagcagcagcacgaacataaaggcctgtccccactgccgtcccctcctgaaatgatgcccacctctccccagagtccccgggatgctgagctcattgctgaggccaagctactgcgtcaacacaaaggccgcctggaagccaggatgcaaatcctggaagaccacaataaacagctggagtcacagttacacaggctaaggcagctgctggagcaaccccaggcagaggccaaagtgaatggcacaacggtgtcctctccttctacctctctacagaggtccgacagcagtcagcctatgctgctccgagtggttggcagtcaaacttcggactccatgggtgaggaagatcttctcagtcctccccaggacacaagcacagggttagaggaggtgatggagcaactcaacaactccttccctagttcaagaggaagaaatacccctggaaagccaatgagagaggacacaatgtaggaagtcttttccacatggcagatgatttgggcagagcgatggagtccttagtatcagtcatgacagatgaagaaggagcagaataaatgttttacaactcctgattcccgcatggtttttataatattcatacaacaaagaggattagacagtaagagtttacaagaaataaatctatatttttgtgaagggtagtggtattatactgtagatttcagtagtttctaagtctgttattgttttgttaacaatggcaggttttacacgtctatgcaattgtacaaaaaagttataagaaaactacatgtaaaatcttgatagctaaataacttgccatttctttatatggaacgcattttgggttgtttaaaaatttataacagttataaagaaagattgtaaactaaagtgtgctttataaaaaaaagttgtttataaaaacccctaaaaacaaaacaaacacacacacacacacatacacacacacacacaaaactttgaggcagcgcattgttttgcatccttttggcgtgatatccatatgaaattcatggctttttctttttttgcatattaaagataagacttcctctaccaccacaccaaatgactactacacactgctcatttgagaactgtcagctgagtggggcaggcttgagttttcatttcatatatctatatgtctataagtatataaatactatagttatatagataaagagatacgaatttctatagactgactttttccattttttaaatgttcatgtcacatcctaatagaaagaaattacttctagtcagtcatccaggcttacctgcttggtctagaatggatttttcccggagccggaagccaggaggaaactacaccacactaaaacattgtctacagctccagatgtttctcattttaaacaactttccactgacaacgaaagtaaagtaaagtattggatttttttaaagggaacatgtgaatgaatacacaggacttattatatcagagtgagtaatcggttggttggttgattgattgattgattgatacattcagcttcctgctgctagcaatgccacgatttagatttaatgatgcttcagtggaaatcaatcagaaggtattctgaccttgtgaacatcagaaggtattttttaactcccaagcagtagcaggacgatgatagggctggagggctatggattcccagcccatccctgtgaaggagtaggccactctttaagtgaaggattggatgattgttcataatacataaagttctctgtaattacaactaaattattatgccctcttctcacagtcaaaaggaactgggtggtttggtttttgttgcttttttagatttattgtcccatgtgggatgagtttttaaatgccacaagacataatttaaaataaataaactttgggaaaaggtgtaagacagtagccccatcacatttgtgatactgacaggtatcaacccagaagcccatgaactgtgtttccatcctttgcatttctctgcgagtagttccacacaggtttgtaagtaagtaagaaagaaggcaaattgattcaaatgttacaaaaaaacccttcttggtggattagacaggttaaatatataaacaaacaaacaaaaattgctcaaaaaagaggagaaaagctcaagaggaaaagctaaggactggtaggaaaaagctttactctttcatgccattttatttctttttgatttttaaatcattcattcaatagataccaccgtgtgacctataattttgcaaatctgttacctctgacatcaagtgtaattagcttttggagagtgggctgacatcaagtgtaattagcttttggagagtgggttttgtccattattaataattaattaattaacatcaaacacggcttctcatgctatttctacctcactttggttttggggtgttcctgataattgtgcacacctgagttcacagcttcaccacttgtccattgcgttattttctttttcctttataattctttctttttccttcataattttcaaaagaaaacccaaagctctaaggtaacaaattaccaaattacatgaagatttggtttttgtcttgcatttttttcctttatgtgacgctggaccttttctttacccaaggatttttaaaactcagatttaaaacaaggggttactttacatcctactaagaagtttaagtaagtaagtttcattctaaaatcagaggtaaatagagtgcataaataattttgttttaatctttttgtttttcttttagacacattagctctggagtgagtctgtcataatatttgaacaaaaattgagagctttattgctgcattttaagcataattaatttggacattatttcgtgttgtgttctttataaccaccgagtattaaactgtaaatcataatgtaactgaagcataaacatcacatggcatgttttgtcattgttttcaggtactgagttcttacttgagtatcataatatattgtgttttaacaccaacactgtaacatttacgaattatttttttaaacttcagttttactgcattttcacaacatatcagacttcaccaaatatatgccttactattgtattatagtactgctttactgtgtatctcaataaagcacgcagttatgttac

SEQ ID NO: 1753 - protein, 617 aa, Homo sapiens
MREQLKGHETQTTCWDHPKMTELYQSLADLNNVRFSAYRTAMKLRRLQKALCLDLLSLSAACDALDQHNLKQNDQPMDILQIINCLTTIYDRLEQEHNNLVNVPLCVDMCLNWLLNVYDTGRTGRIRVLSFKTGIISLCKAHLEDKYRYLFKQVASSTGFCDQRRLGLLLHDSIQIPRQLGEVASFGGSNIEPSVRSCFQFANNKPEIEAALFLDWMRLEPQSMVWLPVLHRVAAAETAKHQAKCNICKECPIIGFRYRSLKHFNYDICQSCFFSGRVAKGHKMHYPMVEYCTPTTSGEDVRDFAKVLKNKFRTKRYFAKHPRMGYLPVQTVLEGDNMETPVTLINFWPVDSAPASSPQLSHDDTHSRIEHYASRLAEMENSNGSYLNDSISPNESIDDEHLLIQHYCQSLNQDSPLSQPRSPAQILISLESEERGELERILADLEEENRNLQAEYDRLKQQHEHKGLSPLPSPPEMMPTSPQSPRDAELIAEAKLLRQHKGRLEARMQILEDHNKQLESQLHRLRQLLEQPQAEAKVNGTTVSSPSTSLQRSDSSQPMLLRVVGSQTSDSMGEEDLLSPPQDTSTGLEEVMEQLNNSFPSSRGRNTPGKPMREDTM

SEQ ID NO: 1754 - DNA, 4591 bp, Homo sapiens
actttcggggagcccggcggctctgggaagctcactcctccactcgtacccacactcgaccgcggagcccttgcagccatgagggaacagctcaaaggccacgagactcaaacaacttgctgggaccatcccaaaatgacagagctctaccagtctttagctgacctgaataatgtcagattctcagcttataggactgccatgaaactccgaagactgcagaaggccctttgcttggatctcttgagcctgtcagctgcatgtgatgccttggaccagcacaacctcaagcaaaatgaccagcccatggatatcctgcagattattaattgtttgaccactatttatgaccgcctggagcaagagcacaacaatttggtcaacgtccctctctgcgtggatatgtgtctgaactggctgctgaatgtttatgatacgggacgaacagggaggatccgtgtcctgtcttttaaaactggcatcatttccctgtgtaaagcacatttggaagacaagtacagataccttttcaagcaagtggcaagttcaacaggattttgtgaccagcgcaggctgggcctccttctgcatgattctatccaaattccaagacagttgggtgaagttgcatcctttgggggcagtaacattgagccaagtgtccggagctgcttccaatttgctaataataagccagagatcgaagcggccctcttcctagactggatgagactggaaccccagtccatggtgtggctgcccgtcctgcacagagtggctgctgcagaaactgccaagcatcaggccaaatgtaacatctgcaaagagtgtccaatcattggattcaggtacaggagtctaaagcactttaattatgacatctgccaaagctgctttttttctggtcgagttgcaaaaggccataaaatgcactatcccatggtggaatattgcactccgactacatcaggagaagatgttcgagactttgccaaggtactaaaaaacaaatttcgaaccaaaaggtattttgcgaagcatccccgaatgggctacctgccagtgcagactgtcttagagggggacaacatggaaactcccgttactctgatcaacttctggccagtagattctgcgcctgcctcgtcccctcagctttcacacgatgatactcattcacgcattgaacattatgctagcaggctagcagaaatggaaaacagcaatggatcttatctaaatgatagcatctctcctaatgagagcatagatgatgaacatttgttaatccagcattactgccaaagtttgaaccaggactcccccctgagccagcctcgtagtcctgcccagatcttgatttccttagagagtgaggaaagaggggagctagagagaatcctagcagatcttgaggaagaaaacaggaatctgcaagcagaatatgaccgtctaaagcagcagcacgaacataaaggcctgtccccactgccgtcccctcctgaaatgatgcccacctctccccagagtccccgggatgctgagctcattgctgaggccaagctactgcgtcaacacaaaggccgcctggaagccaggatgcaaatcctggaagaccacaataaacagctggagtcacagttacacaggctaaggcagctgctggagcaaccccaggcagaggccaaagtgaatggcacaacggtgtcctctccttctacctctctacagaggtccgacagcagtcagcctatgctgctccgagtggttggcagtcaaacttcggactccatgggtgaggaagatcttctcagtcctccccaggacacaagcacagggttagaggaggtgatggagcaactcaacaactccttccctagttcaagaggacacaatgtaggaagtcttttccacatggcagatgatttgggcagagcgatggagtccttagtatcagtcatgacagatgaagaaggagcagaataaatgttttacaactcctgattcccgcatggtttttataatattcatacaacaaagaggattagacagtaagagtttacaagaaataaatctatatttttgtgaagggtagtggtattatactgtagatttcagtagtttctaagtctgttattgttttgttaacaatggcaggttttacacgtctatgcaattgtacaaaaaagttataagaaaactacatgtaaaatcttgatagctaaataacttgccatttctttatatggaacgcattttgggttgtttaaaaatttataacagttataaagaaagattgtaaactaaagtgtgctttataaaaaaaagttgtttataaaaacccctaaaaacaaaacaaacacacacacacacacatacacacacacacacaaaactttgaggcagcgcattgttttgcatccttttggcgtgatatccatatgaaattcatggctttttctttttttgcatattaaagataagacttcctctaccaccacaccaaatgactactacacactgctcatttgagaactgtcagctgagtggggcaggcttgagttttcatttcatatatctatatgtctataagtatataaatactatagttatatagataaagagatacgaatttctatagactgactttttccattttttaaatgttcatgtcacatcctaatagaaagaaattacttctagtcagtcatccaggcttacctgcttggtctagaatggatttttcccggagccggaagccaggaggaaactacaccacactaaaacattgtctacagctccagatgtttctcattttaaacaactttccactgacaacgaaagtaaagtaaagtattggatttttttaaagggaacatgtgaatgaatacacaggacttattatatcagagtgagtaatcggttggttggttgattgattgattgattgatacattcagcttcctgctgctagcaatgccacgatttagatttaatgatgcttcagtggaaatcaatcagaaggtattctgaccttgtgaacatcagaaggtattttttaactcccaagcagtagcaggacgatgatagggctggagggctatggattcccagcccatccctgtgaaggagtaggccactctttaagtgaaggattggatgattgttcataatacataaagttctctgtaattacaactaaattattatgccctcttctcacagtcaaaaggaactgggtggtttggtttttgttgcttttttagatttattgtcccatgtgggatgagtttttaaatgccacaagacataatttaaaataaataaactttgggaaaaggtgtaagacagtagccccatcacatttgtgatactgacaggtatcaacccagaagcccatgaactgtgtttccatcctttgcatttctctgcgagtagttccacacaggtttgtaagtaagtaagaaagaaggcaaattgattcaaatgttacaaaaaaacccttcttggtggattagacaggttaaatatataaacaaacaaacaaaaattgctcaaaaaagaggagaaaagctcaagaggaaaagctaaggactggtaggaaaaagctttactctttcatgccattttatttctttttgatttttaaatcattcattcaatagataccaccgtgtgacctataattttgcaaatctgttacctctgacatcaagtgtaattagcttttggagagtgggctgacatcaagtgtaattagcttttggagagtgggttttgtccattattaataattaattaattaacatcaaacacggcttctcatgctatttctacctcactttggttttggggtgttcctgataattgtgcacacctgagttcacagcttcaccacttgtccattgcgttattttctttttcctttataattctttctttttccttcataattttcaaaagaaaacccaaagctctaaggtaacaaattaccaaattacatgaagatttggtttttgtcttgcatttttttcctttatgtgacgctggaccttttctttacccaaggatttttaaaactcagatttaaaacaaggggttactttacatcctactaagaagtttaagtaagtaagtttcattctaaaatcagaggtaaatagagtgcataaataattttgttttaatctttttgtttttcttttagacacattagctctggagtgagtctgtcataatatttgaacaaaaattgagagctttattgctgcattttaagcataattaatttggacattatttcgtgttgtgttctttataaccaccgagtattaaactgtaaatcataatgtaactgaagcataaacatcacatggcatgttttgtcattgttttcaggtactgagttcttacttgagtatcataatatattgtgttttaacaccaacactgtaacatttacgaattatttttttaaacttcagttttactgcattttcacaacatatcagacttcaccaaatatatgccttactattgtattatagtactgctttactgtgtatctcaataaagcacgcagttatgttac

SEQ ID NO: 1755 - protein, 635 aa, Homo sapiens
MREQLKGHETQTTCWDHPKMTELYQSLADLNNVRFSAYRTAMKLRRLQKALCLDLLSLSAACDALDQHNLKQNDQPMDILQIINCLTTIYDRLEQEHNNLVNVPLCVDMCLNWLLNVYDTGRTGRIRVLSFKTGIISLCKAHLEDKYRYLFKQVASSTGFCDQRRLGLLLHDSIQIPRQLGEVASFGGSNIEPSVRSCFQFANNKPEIEAALFLDWMRLEPQSMVWLPVLHRVAAAETAKHQAKCNICKECPIIGFRYRSLKHFNYDICQSCFFSGRVAKGHKMHYPMVEYCTPTTSGEDVRDFAKVLKNKFRTKRYFAKHPRMGYLPVQTVLEGDNMETPVTLINFWPVDSAPASSPQLSHDDTHSRIEHYASRLAEMENSNGSYLNDSISPNESIDDEHLLIQHYCQSLNQDSPLSQPRSPAQILISLESEERGELERILADLEEENRNLQAEYDRLKQQHEHKGLSPLPSPPEMMPTSPQSPRDAELIAEAKLLRQHKGRLEARMQILEDHNKQLESQLHRLRQLLEQPQAEAKVNGTTVSSPSTSLQRSDSSQPMLLRVVGSQTSDSMGEEDLLSPPQDTSTGLEEVMEQLNNSFPSSRGHNVGSLFHMADDLGRAMESLVSVMTDEEGAE

SEQ ID NO: 1756 - DNA, 4584 bp, Homo sapiens
actttcggggagcccggcggctctgggaagctcactcctccactcgtacccacactcgaccgcggagcccttgcagccatgagggaacagctcaaaggccacgagactcaaacaacttgctgggaccatcccaaaatgacagagctctaccagtctttagctgacctgaataatgtcagattctcagcttataggactgccatgaaactccgaagactgcagaaggccctttgcttggatctcttgagcctgtcagctgcatgtgatgccttggaccagcacaacctcaagcaaaatgaccagcccatggatatcctgcagattattaattgtttgaccactatttatgaccgcctggagcaagagcacaacaatttggtcaacgtccctctctgcgtggatatgtgtctgaactggctgctgaatgtttatgatacgggacgaacagggaggatccgtgtcctgtcttttaaaactggcatcatttccctgtgtaaagcacatttggaagacaagtacagataccttttcaagcaagtggcaagttcaacaggattttgtgaccagcgcaggctgggcctccttctgcatgattctatccaaattccaagacagttgggtgaagttgcatcctttgggggcagtaacattgagccaagtgtccggagctgcttccaatttgctaataataagccagagatcgaagcggccctcttcctagactggatgagactggaaccccagtccatggtgtggctgcccgtcctgcacagagtggctgctgcagaaactgccaagcatcaggccaaatgtaacatctgcaaagagtgtccaatcattggattcaggtacaggagtctaaagcactttaattatgacatctgccaaagctgctttttttctggtcgagttgcaaaaggccataaaatgcactatcccatggtggaatattgcactccgactacatcaggagaagatgttcgagactttgccaaggtactaaaaaacaaatttcgaaccaaaaggtattttgcgaagcatccccgaatgggctacctgccagtgcagactgtcttagagggggacaacatggaaacgcctgcctcgtcccctcagctttcacacgatgatactcattcacgcattgaacattatgctagcaggctagcagaaatggaaaacagcaatggatcttatctaaatgatagcatctctcctaatgagagcatagatgatgaacatttgttaatccagcattactgccaaagtttgaaccaggactcccccctgagccagcctcgtagtcctgcccagatcttgatttccttagagagtgaggaaagaggggagctagagagaatcctagcagatcttgaggaagaaaacaggaatctgcaagcagaatatgaccgtctaaagcagcagcacgaacataaaggcctgtccccactgccgtcccctcctgaaatgatgcccacctctccccagagtccccgggatgctgagctcattgctgaggccaagctactgcgtcaacacaaaggccgcctggaagccaggatgcaaatcctggaagaccacaataaacagctggagtcacagttacacaggctaaggcagctgctggagcaaccccaggcagaggccaaagtgaatggcacaacggtgtcctctccttctacctctctacagaggtccgacagcagtcagcctatgctgctccgagtggttggcagtcaaacttcggactccatgggtgaggaagatcttctcagtcctccccaggacacaagcacagggttagaggaggtgatggagcaactcaacaactccttccctagttcaagaggaagaaatacccctggaaagccaatgagagaggacacaatgtaggaagtcttttccacatggcagatgatttgggcagagcgatggagtccttagtatcagtcatgacagatgaagaaggagcagaataaatgttttacaactcctgattcccgcatggtttttataatattcatacaacaaagaggattagacagtaagagtttacaagaaataaatctatatttttgtgaagggtagtggtattatactgtagatttcagtagtttctaagtctgttattgttttgttaacaatggcaggttttacacgtctatgcaattgtacaaaaaagttataagaaaactacatgtaaaatcttgatagctaaataacttgccatttctttatatggaacgcattttgggttgtttaaaaatttataacagttataaagaaagattgtaaactaaagtgtgctttataaaaaaaagttgtttataaaaacccctaaaaacaaaacaaacacacacacacacacatacacacacacacacaaaactttgaggcagcgcattgttttgcatccttttggcgtgatatccatatgaaattcatggctttttctttttttgcatattaaagataagacttcctctaccaccacaccaaatgactactacacactgctcatttgagaactgtcagctgagtggggcaggcttgagttttcatttcatatatctatatgtctataagtatataaatactatagttatatagataaagagatacgaatttctatagactgactttttccattttttaaatgttcatgtcacatcctaatagaaagaaattacttctagtcagtcatccaggcttacctgcttggtctagaatggatttttcccggagccggaagccaggaggaaactacaccacactaaaacattgtctacagctccagatgtttctcattttaaacaactttccactgacaacgaaagtaaagtaaagtattggatttttttaaagggaacatgtgaatgaatacacaggacttattatatcagagtgagtaatcggttggttggttgattgattgattgattgatacattcagcttcctgctgctagcaatgccacgatttagatttaatgatgcttcagtggaaatcaatcagaaggtattctgaccttgtgaacatcagaaggtattttttaactcccaagcagtagcaggacgatgatagggctggagggctatggattcccagcccatccctgtgaaggagtaggccactctttaagtgaaggattggatgattgttcataatacataaagttctctgtaattacaactaaattattatgccctcttctcacagtcaaaaggaactgggtggtttggtttttgttgcttttttagatttattgtcccatgtgggatgagtttttaaatgccacaagacataatttaaaataaataaactttgggaaaaggtgtaagacagtagccccatcacatttgtgatactgacaggtatcaacccagaagcccatgaactgtgtttccatcctttgcatttctctgcgagtagttccacacaggtttgtaagtaagtaagaaagaaggcaaattgattcaaatgttacaaaaaaacccttcttggtggattagacaggttaaatatataaacaaacaaacaaaaattgctcaaaaaagaggagaaaagctcaagaggaaaagctaaggactggtaggaaaaagctttactctttcatgccattttatttctttttgatttttaaatcattcattcaatagataccaccgtgtgacctataattttgcaaatctgttacctctgacatcaagtgtaattagcttttggagagtgggctgacatcaagtgtaattagcttttggagagtgggttttgtccattattaataattaattaattaacatcaaacacggcttctcatgctatttctacctcactttggttttggggtgttcctgataattgtgcacacctgagttcacagcttcaccacttgtccattgcgttattttctttttcctttataattctttctttttccttcataattttcaaaagaaaacccaaagctctaaggtaacaaattaccaaattacatgaagatttggtttttgtcttgcatttttttcctttatgtgacgctggaccttttctttacccaaggatttttaaaactcagatttaaaacaaggggttactttacatcctactaagaagtttaagtaagtaagtttcattctaaaatcagaggtaaatagagtgcataaataattttgttttaatctttttgtttttcttttagacacattagctctggagtgagtctgtcataatatttgaacaaaaattgagagctttattgctgcattttaagcataattaatttggacattatttcgtgttgtgttctttataaccaccgagtattaaactgtaaatcataatgtaactgaagcataaacatcacatggcatgttttgtcattgttttcaggtactgagttcttacttgagtatcataatatattgtgttttaacaccaacactgtaacatttacgaattatttttttaaacttcagttttactgcattttcacaacatatcagacttcaccaaatatatgccttactattgtattatagtactgctttactgtgtatctcaataaagcacgcagttatgttac

SEQ ID NO: 1757 - protein, 604 aa, Homo sapiens
MREQLKGHETQTTCWDHPKMTELYQSLADLNNVRFSAYRTAMKLRRLQKALCLDLLSLSAACDALDQHNLKQNDQPMDILQIINCLTTIYDRLEQEHNNLVNVPLCVDMCLNWLLNVYDTGRTGRIRVLSFKTGIISLCKAHLEDKYRYLFKQVASSTGFCDQRRLGLLLHDSIQIPRQLGEVASFGGSNIEPSVRSCFQFANNKPEIEAALFLDWMRLEPQSMVWLPVLHRVAAAETAKHQAKCNICKECPIIGFRYRSLKHFNYDICQSCFFSGRVAKGHKMHYPMVEYCTPTTSGEDVRDFAKVLKNKFRTKRYFAKHPRMGYLPVQTVLEGDNMETPASSPQLSHDDTHSRIEHYASRLAEMENSNGSYLNDSISPNESIDDEHLLIQHYCQSLNQDSPLSQPRSPAQILISLESEERGELERILADLEEENRNLQAEYDRLKQQHEHKGLSPLPSPPEMMPTSPQSPRDAELIAEAKLLRQHKGRLEARMQILEDHNKQLESQLHRLRQLLEQPQAEAKVNGTTVSSPSTSLQRSDSSQPMLLRVVGSQTSDSMGEEDLLSPPQDTSTGLEEVMEQLNNSFPSSRGRNTPGKPMREDTM

SEQ ID NO: 1758 - DNA, 4552 bp, Homo sapiens
actttcggggagcccggcggctctgggaagctcactcctccactcgtacccacactcgaccgcggagcccttgcagccatgagggaacagctcaaaggccacgagactcaaacaacttgctgggaccatcccaaaatgacagagctctaccagtctttagctgacctgaataatgtcagattctcagcttataggactgccatgaaactccgaagactgcagaaggccctttgcttggatctcttgagcctgtcagctgcatgtgatgccttggaccagcacaacctcaagcaaaatgaccagcccatggatatcctgcagattattaattgtttgaccactatttatgaccgcctggagcaagagcacaacaatttggtcaacgtccctctctgcgtggatatgtgtctgaactggctgctgaatgtttatgatacgggacgaacagggaggatccgtgtcctgtcttttaaaactggcatcatttccctgtgtaaagcacatttggaagacaagtacagataccttttcaagcaagtggcaagttcaacaggattttgtgaccagcgcaggctgggcctccttctgcatgattctatccaaattccaagacagttgggtgaagttgcatcctttgggggcagtaacattgagccaagtgtccggagctgcttccaatttgctaataataagccagagatcgaagcggccctcttcctagactggatgagactggaaccccagtccatggtgtggctgcccgtcctgcacagagtggctgctgcagaaactgccaagcatcaggccaaatgtaacatctgcaaagagtgtccaatcattggattcaggtacaggagtctaaagcactttaattatgacatctgccaaagctgctttttttctggtcgagttgcaaaaggccataaaatgcactatcccatggtggaatattgcactccgactacatcaggagaagatgttcgagactttgccaaggtactaaaaaacaaatttcgaaccaaaaggtattttgcgaagcatccccgaatgggctacctgccagtgcagactgtcttagagggggacaacatggaaacgcctgcctcgtcccctcagctttcacacgatgatactcattcacgcattgaacattatgctagcaggctagcagaaatggaaaacagcaatggatcttatctaaatgatagcatctctcctaatgagagcatagatgatgaacatttgttaatccagcattactgccaaagtttgaaccaggactcccccctgagccagcctcgtagtcctgcccagatcttgatttccttagagagtgaggaaagaggggagctagagagaatcctagcagatcttgaggaagaaaacaggaatctgcaagcagaatatgaccgtctaaagcagcagcacgaacataaaggcctgtccccactgccgtcccctcctgaaatgatgcccacctctccccagagtccccgggatgctgagctcattgctgaggccaagctactgcgtcaacacaaaggccgcctggaagccaggatgcaaatcctggaagaccacaataaacagctggagtcacagttacacaggctaaggcagctgctggagcaaccccaggcagaggccaaagtgaatggcacaacggtgtcctctccttctacctctctacagaggtccgacagcagtcagcctatgctgctccgagtggttggcagtcaaacttcggactccatgggtgaggaagatcttctcagtcctccccaggacacaagcacagggttagaggaggtgatggagcaactcaacaactccttccctagttcaagaggacacaatgtaggaagtcttttccacatggcagatgatttgggcagagcgatggagtccttagtatcagtcatgacagatgaagaaggagcagaataaatgttttacaactcctgattcccgcatggtttttataatattcatacaacaaagaggattagacagtaagagtttacaagaaataaatctatatttttgtgaagggtagtggtattatactgtagatttcagtagtttctaagtctgttattgttttgttaacaatggcaggttttacacgtctatgcaattgtacaaaaaagttataagaaaactacatgtaaaatcttgatagctaaataacttgccatttctttatatggaacgcattttgggttgtttaaaaatttataacagttataaagaaagattgtaaactaaagtgtgctttataaaaaaaagttgtttataaaaacccctaaaaacaaaacaaacacacacacacacacatacacacacacacacaaaactttgaggcagcgcattgttttgcatccttttggcgtgatatccatatgaaattcatggctttttctttttttgcatattaaagataagacttcctctaccaccacaccaaatgactactacacactgctcatttgagaactgtcagctgagtggggcaggcttgagttttcatttcatatatctatatgtctataagtatataaatactatagttatatagataaagagatacgaatttctatagactgactttttccattttttaaatgttcatgtcacatcctaatagaaagaaattacttctagtcagtcatccaggcttacctgcttggtctagaatggatttttcccggagccggaagccaggaggaaactacaccacactaaaacattgtctacagctccagatgtttctcattttaaacaactttccactgacaacgaaagtaaagtaaagtattggatttttttaaagggaacatgtgaatgaatacacaggacttattatatcagagtgagtaatcggttggttggttgattgattgattgattgatacattcagcttcctgctgctagcaatgccacgatttagatttaatgatgcttcagtggaaatcaatcagaaggtattctgaccttgtgaacatcagaaggtattttttaactcccaagcagtagcaggacgatgatagggctggagggctatggattcccagcccatccctgtgaaggagtaggccactctttaagtgaaggattggatgattgttcataatacataaagttctctgtaattacaactaaattattatgccctcttctcacagtcaaaaggaactgggtggtttggtttttgttgcttttttagatttattgtcccatgtgggatgagtttttaaatgccacaagacataatttaaaataaataaactttgggaaaaggtgtaagacagtagccccatcacatttgtgatactgacaggtatcaacccagaagcccatgaactgtgtttccatcctttgcatttctctgcgagtagttccacacaggtttgtaagtaagtaagaaagaaggcaaattgattcaaatgttacaaaaaaacccttcttggtggattagacaggttaaatatataaacaaacaaacaaaaattgctcaaaaaagaggagaaaagctcaagaggaaaagctaaggactggtaggaaaaagctttactctttcatgccattttatttctttttgatttttaaatcattcattcaatagataccaccgtgtgacctataattttgcaaatctgttacctctgacatcaagtgtaattagcttttggagagtgggctgacatcaagtgtaattagcttttggagagtgggttttgtccattattaataattaattaattaacatcaaacacggcttctcatgctatttctacctcactttggttttggggtgttcctgataattgtgcacacctgagttcacagcttcaccacttgtccattgcgttattttctttttcctttataattctttctttttccttcataattttcaaaagaaaacccaaagctctaaggtaacaaattaccaaattacatgaagatttggtttttgtcttgcatttttttcctttatgtgacgctggaccttttctttacccaaggatttttaaaactcagatttaaaacaaggggttactttacatcctactaagaagtttaagtaagtaagtttcattctaaaatcagaggtaaatagagtgcataaataattttgttttaatctttttgtttttcttttagacacattagctctggagtgagtctgtcataatatttgaacaaaaattgagagctttattgctgcattttaagcataattaatttggacattatttcgtgttgtgttctttataaccaccgagtattaaactgtaaatcataatgtaactgaagcataaacatcacatggcatgttttgtcattgttttcaggtactgagttcttacttgagtatcataatatattgtgttttaacaccaacactgtaacatttacgaattatttttttaaacttcagttttactgcattttcacaacatatcagacttcaccaaatatatgccttactattgtattatagtactgctttactgtgtatctcaataaagcacgcagttatgttac

SEQ ID NO: 1759 - protein, 622 aa, Homo sapiens
MREQLKGHETQTTCWDHPKMTELYQSLADLNNVRFSAYRTAMKLRRLQKALCLDLLSLSAACDALDQHNLKQNDQPMDILQIINCLTTIYDRLEQEHNNLVNVPLCVDMCLNWLLNVYDTGRTGRIRVLSFKTGIISLCKAHLEDKYRYLFKQVASSTGFCDQRRLGLLLHDSIQIPRQLGEVASFGGSNIEPSVRSCFQFANNKPEIEAALFLDWMRLEPQSMVWLPVLHRVAAAETAKHQAKCNICKECPIIGFRYRSLKHFNYDICQSCFFSGRVAKGHKMHYPMVEYCTPTTSGEDVRDFAKVLKNKFRTKRYFAKHPRMGYLPVQTVLEGDNMETPASSPQLSHDDTHSRIEHYASRLAEMENSNGSYLNDSISPNESIDDEHLLIQHYCQSLNQDSPLSQPRSPAQILISLESEERGELERILADLEEENRNLQAEYDRLKQQHEHKGLSPLPSPPEMMPTSPQSPRDAELIAEAKLLRQHKGRLEARMQILEDHNKQLESQLHRLRQLLEQPQAEAKVNGTTVSSPSTSLQRSDSSQPMLLRVVGSQTSDSMGEEDLLSPPQDTSTGLEEVMEQLNNSFPSSRGHNVGSLFHMADDLGRAMESLVSVMTDEEGAE

SEQ ID NO: 1760 - DNA, 1571 bp, Homo sapiens
actttcggggagcccggcggctctgggaagctcactcctccactcgtacccacactcgaccgcggagcccttgcagccatgagggaacagctcaaaggccacgagactcaaacaacttgctgggaccatcccaaaatgacagagctctaccagtctttagctgacctgaataatgtcagattctcagcttataggactgccatgaaactccgaagactgcagaaggccctttgcttggatctcttgagcctgtcagctgcatgtgatgccttggaccagcacaacctcaagcaaaatgaccagcccatggatatcctgcagattattaattgtttgaccactatttatgaccgcctggagcaagagcacaacaatttggtcaacgtccctctctgcgtggatatgtgtctgaactggctgctgaatgtttatgatacgggacgaacagggaggatccgtgtcctgtcttttaaaactggcatcatttccctgtgtaaagcacatttggaagacaagtacagataccttttcaagcaagtggcaagttcaacaggattttgtgaccagcgcaggctgggcctccttctgcatgattctatccaaattccaagacagttgggtgaagttgcatcctttgggggcagtaacattgagccaagtgtccggagctgcttccaatttgctaataataagccagagatcgaagcggccctcttcctagactggatgagactggaaccccagtccatggtgtggctgcccgtcctgcacagagtggctgctgcagaaactgccaagcatcaggccaaatgtaacatctgcaaagagtgtccaatcattggattcaggtacaggagtctaaagcactttaattatgacatctgccaaagctgctttttttctggtcgagttgcaaaaggccataaaatgcactatcccatggtggaatattgcactccgactacatcaggagaagatgttcgagactttgccaaggtactaaaaaacaaatttcgaaccaaaaggtattttgcgaagcatccccgaatgggctacctgccagtgcagactgtcttagagggggacaacatggaaacgtgagtagtagcaaaagcagaacacactcttgtttgatgtatatttgaactcctctcagctgaacaccctccttcactcccaaatgcaaacagtctcttctatttctttctttttatttacattagctgaaaagagaaaaataagctgatgtccagttgccactttcccacgtcacttgacaatttctttttccaaaagttaaactttatctcacagggggaaaaaaaaaaaaaaaccacaacacaatacagccactaattgccttacaagccttataagaaatatgggactgtttacaaatgagtgattccagtatttcattttgattttcctctctcacaaatcagtaaatgtgtgtctttttgtatctcattgtgtggtcatatctagtcacttgtttctactcaaaagaaaatatagtcacaggaaactacttcacagtaagtagtaatgattctcaagatcaaagggga

SEQ ID NO: 1761 - protein, 340 aa, Homo sapiens
MREQLKGHETQTTCWDHPKMTELYQSLADLNNVRFSAYRTAMKLRRLQKALCLDLLSLSAACDALDQHNLKQNDQPMDILQIINCLTTIYDRLEQEHNNLVNVPLCVDMCLNWLLNVYDTGRTGRIRVLSFKTGIISLCKAHLEDKYRYLFKQVASSTGFCDQRRLGLLLHDSIQIPRQLGEVASFGGSNIEPSVRSCFQFANNKPEIEAALFLDWMRLEPQSMVWLPVLHRVAAAETAKHQAKCNICKECPIIGFRYRSLKHFNYDICQSCFFSGRVAKGHKMHYPMVEYCTPTTSGEDVRDFAKVLKNKFRTKRYFAKHPRMGYLPVQTVLEGDNMET

SEQ ID NO: 1762 - DNA, 7050 bp, Homo sapiens
acactagcaatggcaaagctttgtgcggaggcattgctggctgctctgaactaaaagcatccgtggggaccgaaagaggtttttgcacaccttattaaggaactccaggatggcattgggcagcggcaaactgttgtcagaacattgaatgcaactggggaagaaataattcagcaatcctcaaaaacagatgccagtattctacaggaaaaattgggaagcctgaatctgcggtggcaggaggtctgcaaacagctgtcagacagaaaaaagaggctagaagaacaaaagaatatcttgtcagaatttcaaagagatttaaatgaatttgttttatggttggaggaagcagataacattgctagtatcccacttgaacctggaaaagagcagcaactaaaagaaaagcttgagcaagtcaagttactggtggaagagttgcccctgcgccagggaattctcaaacaattaaatgaaactggaggacccgtgcttgtaagtgctcccataagcccagaagagcaagataaacttgaaaataagctcaagcagacaaatctccagtggataaaggtttccagagctttacctgagaaacaaggagaaattgaagctcaaataaaagaccttgggcagcttgaaaaaaagcttgaagaccttgaagagcagttaaatcatctgctgctgtggttatctcctattaggaatcagttggaaatttataaccaaccaaaccaagaaggaccatttgacgttcaggaaactgaaatagcagttcaagctaaacaaccggatgtggaagagattttgtctaaagggcagcatttgtacaaggaaaaaccagccactcagccagtgaagaggaagttagaagatctgagctctgagtggaaggcggtaaaccgtttacttcaagagctgagggcaaagcagcctgacctagctcctggactgaccactattggagcctctcctactcagactgttactctggtgacacaacctgtggttactaaggaaactgccatctccaaactagaaatgccatcttccttgatgttggaggtacctgctctggcagatttcaaccgggcttggacagaacttaccgactggctttctctgcttgatcaagttataaaatcacagagggtgatggtgggtgaccttgaggatatcaacgagatgatcatcaagcagaaggcaacaatgcaggatttggaacagaggcgtccccagttggaagaactcattaccgctgcccaaaatttgaaaaacaagaccagcaatcaagaggctagaacaatcattacggatcgaattgaaagaattcagaatcagtgggatgaagtacaagaacaccttcagaaccggaggcaacagttgaatgaaatgttaaaggattcaacacaatggctggaagctaaggaagaagctgagcaggtcttaggacaggccagagccaagcttgagtcatggaaggagggtccctatacagtagatgcaatccaaaagaaaatcacagaaaccaagcagttggccaaagacctccgccagtggcagacaaatgtagatgtggcaaatgacttggccctgaaacttctccgggattattctgcagatgataccagaaaagtccacatgataacagagaatatcaatgcctcttggagaagcattcataaaagggtgagtgagcgagaggctgctttggaagaaactcatagattactgcaacagttccccctggacctggaaaagtttcttgcctggcttacagaagctgaaacaactgccaatgtcctacaggatgctacccgtaaggaaaggctcctagaagactccaagggagtaaaagagctgatgaaacaatggcaagacctccaaggtgaaattgaagctcacacagatgtttatcacaacctggatgaaaacagccaaaaaatcctgagatccctggaaggttccgatgatgcagtcctgttacaaagacgtttggataacatgaacttcaagtggagtgaacttcggaaaaagtctctcaacattaggtcccatttggaagccagttctgaccagtggaagcgtctgcacctttctctgcaggaacttctggtgtggctacagctgaaagatgatgaattaagccggcaggcacctattggaggcgactttccagcagttcagaagcagaacgatgtacatagggccttcaagagggaattgaaaactaaagaacctgtaatcatgagtactcttgagactgtacgaatatttctgacagagcagcctttggaaggactagagaaactctaccaggagcccagagagctgcctcctgaggagagagcccagaatgtcactcggcttctacgaaagcaggctgaggaggtcaatactgagtgggaaaaattgaacctgcactccgctgactggcagagaaaaatagatgagacccttgaaagactccaggaacttcaagaggccacggatgagctggacctcaagctgcgccaagctgaggtgatcaagggatcctggcagcccgtgggcgatctcctcattgactctctccaagatcacctcgagaaagtcaaggcacttcgaggagaaattgcgcctctgaaagagaacgtgagccacgtcaatgaccttgctcgccagcttaccactttgggcattcagctctcaccgtataacctcagcactctggaagacctgaacaccagatggaagcttctgcaggtggccgtcgaggaccgagtcaggcagctgcatgaagcccacagggactttggtccagcatctcagcactttctttccacgtctgtccagggtccctgggagagagccatctcgccaaacaaagtgccctactatatcaaccacgagactcaaacaacttgctgggaccatcccaaaatgacagagctctaccagtctttagctgacctgaataatgtcagattctcagcttataggactgccatgaaactccgaagactgcagaaggccctttgcttggatctcttgagcctgtcagctgcatgtgatgccttggaccagcacaacctcaagcaaaatgaccagcccatggatatcctgcagattattaattgtttgaccactatttatgaccgcctggagcaagagcacaacaatttggtcaacgtccctctctgcgtggatatgtgtctgaactggctgctgaatgtttatgatacgggacgaacagggaggatccgtgtcctgtcttttaaaactggcatcatttccctgtgtaaagcacatttggaagacaagtacagataccttttcaagcaagtggcaagttcaacaggattttgtgaccagcgcaggctgggcctccttctgcatgattctatccaaattccaagacagttgggtgaagttgcatcctttgggggcagtaacattgagccaagtgtccggagctgcttccaatttgctaataataagccagagatcgaagcggccctcttcctagactggatgagactggaaccccagtccatggtgtggctgcccgtcctgcacagagtggctgctgcagaaactgccaagcatcaggccaaatgtaacatctgcaaagagtgtccaatcattggattcaggtacaggagtctaaagcactttaattatgacatctgccaaagctgctttttttctggtcgagttgcaaaaggccataaaatgcactatcccatggtggaatattgcactccgactacatcaggagaagatgttcgagactttgccaaggtactaaaaaacaaatttcgaaccaaaaggtattttgcgaagcatccccgaatgggctacctgccagtgcagaatctgcaagcagaatatgaccgtctaaagcagcagcacgaacataaaggcctgtccccactgccgtcccctcctgaaatgatgcccacctctccccagagtccccgggatgctgagctcattgctgaggccaagctactgcgtcaacacaaaggccgcctggaagccaggatgcaaatcctggaagaccacaataaacagctggagtcacagttacacaggctaaggcagctgctggagcaaccccaggcagaggccaaagtgaatggcacaacggtgtcctctccttctacctctctacagaggtccgacagcagtcagcctatgctgctccgagtggttggcagtcaaacttcggactccatgggtgaggaagatcttctcagtcctccccaggacacaagcacagggttagaggaggtgatggagcaactcaacaactccttccctagttcaagaggaagaaatacccctggaaagccaatgagagaggacacaatgtaggaagtcttttccacatggcagatgatttgggcagagcgatggagtccttagtatcagtcatgacagatgaagaaggagcagaataaatgttttacaactcctgattcccgcatggtttttataatattcatacaacaaagaggattagacagtaagagtttacaagaaataaatctatatttttgtgaagggtagtggtattatactgtagatttcagtagtttctaagtctgttattgttttgttaacaatggcaggttttacacgtctatgcaattgtacaaaaaagttataagaaaactacatgtaaaatcttgatagctaaataacttgccatttctttatatggaacgcattttgggttgtttaaaaatttataacagttataaagaaagattgtaaactaaagtgtgctttataaaaaaaagttgtttataaaaacccctaaaaacaaaacaaacacacacacacacacatacacacacacacacaaaactttgaggcagcgcattgttttgcatccttttggcgtgatatccatatgaaattcatggctttttctttttttgcatattaaagataagacttcctctaccaccacaccaaatgactactacacactgctcatttgagaactgtcagctgagtggggcaggcttgagttttcatttcatatatctatatgtctataagtatataaatactatagttatatagataaagagatacgaatttctatagactgactttttccattttttaaatgttcatgtcacatcctaatagaaagaaattacttctagtcagtcatccaggcttacctgcttggtctagaatggatttttcccggagccggaagccaggaggaaactacaccacactaaaacattgtctacagctccagatgtttctcattttaaacaactttccactgacaacgaaagtaaagtaaagtattggatttttttaaagggaacatgtgaatgaatacacaggacttattatatcagagtgagtaatcggttggttggttgattgattgattgattgatacattcagcttcctgctgctagcaatgccacgatttagatttaatgatgcttcagtggaaatcaatcagaaggtattctgaccttgtgaacatcagaaggtattttttaactcccaagcagtagcaggacgatgatagggctggagggctatggattcccagcccatccctgtgaaggagtaggccactctttaagtgaaggattggatgattgttcataatacataaagttctctgtaattacaactaaattattatgccctcttctcacagtcaaaaggaactgggtggtttggtttttgttgcttttttagatttattgtcccatgtgggatgagtttttaaatgccacaagacataatttaaaataaataaactttgggaaaaggtgtaagacagtagccccatcacatttgtgatactgacaggtatcaacccagaagcccatgaactgtgtttccatcctttgcatttctctgcgagtagttccacacaggtttgtaagtaagtaagaaagaaggcaaattgattcaaatgttacaaaaaaacccttcttggtggattagacaggttaaatatataaacaaacaaacaaaaattgctcaaaaaagaggagaaaagctcaagaggaaaagctaaggactggtaggaaaaagctttactctttcatgccattttatttctttttgatttttaaatcattcattcaatagataccaccgtgtgacctataattttgcaaatctgttacctctgacatcaagtgtaattagcttttggagagtgggctgacatcaagtgtaattagcttttggagagtgggttttgtccattattaataattaattaattaacatcaaacacggcttctcatgctatttctacctcactttggttttggggtgttcctgataattgtgcacacctgagttcacagcttcaccacttgtccattgcgttattttctttttcctttataattctttctttttccttcataattttcaaaagaaaacccaaagctctaaggtaacaaattaccaaattacatgaagatttggtttttgtcttgcatttttttcctttatgtgacgctggaccttttctttacccaaggatttttaaaactcagatttaaaacaaggggttactttacatcctactaagaagtttaagtaagtaagtttcattctaaaatcagaggtaaatagagtgcataaataattttgttttaatctttttgtttttcttttagacacattagctctggagtgagtctgtcataatatttgaacaaaaattgagagctttattgctgcattttaagcataattaatttggacattatttcgtgttgtgttctttataaccaccgagtattaaactgtaaatcataatgtaactgaagcataaacatcacatggcatgttttgtcattgttttcaggtactgagttcttacttgagtatcataatatattgtgttttaacaccaacactgtaacatttacgaattatttttttaaacttcagttttactgcattttcacaacatatcagacttcaccaaatatatgccttactattgtattatagtactgctttactgtgtatctcaataaagcacgcagttatgttac

SEQ ID NO: 1763 - protein, 1105 aa, Homo sapiens
MPSSLMLEVPALADFNRAWTELTDWLSLLDQVIKSQRVMVGDLEDINEMIIKQKATMQDLEQRRPQLEELITAAQNLKNKTSNQEARTIITDRIERIQNQWDEVQEHLQNRRQQLNEMLKDSTQWLEAKEEAEQVLGQARAKLESWKEGPYTVDAIQKKITETKQLAKDLRQWQTNVDVANDLALKLLRDYSADDTRKVHMITENINASWRSIHKRVSEREAALEETHRLLQQFPLDLEKFLAWLTEAETTANVLQDATRKERLLEDSKGVKELMKQWQDLQGEIEAHTDVYHNLDENSQKILRSLEGSDDAVLLQRRLDNMNFKWSELRKKSLNIRSHLEASSDQWKRLHLSLQELLVWLQLKDDELSRQAPIGGDFPAVQKQNDVHRAFKRELKTKEPVIMSTLETVRIFLTEQPLEGLEKLYQEPRELPPEERAQNVTRLLRKQAEEVNTEWEKLNLHSADWQRKIDETLERLQELQEATDELDLKLRQAEVIKGSWQPVGDLLIDSLQDHLEKVKALRGEIAPLKENVSHVNDLARQLTTLGIQLSPYNLSTLEDLNTRWKLLQVAVEDRVRQLHEAHRDFGPASQHFLSTSVQGPWERAISPNKVPYYINHETQTTCWDHPKMTELYQSLADLNNVRFSAYRTAMKLRRLQKALCLDLLSLSAACDALDQHNLKQNDQPMDILQIINCLTTIYDRLEQEHNNLVNVPLCVDMCLNWLLNVYDTGRTGRIRVLSFKTGIISLCKAHLEDKYRYLFKQVASSTGFCDQRRLGLLLHDSIQIPRQLGEVASFGGSNIEPSVRSCFQFANNKPEIEAALFLDWMRLEPQSMVWLPVLHRVAAAETAKHQAKCNICKECPIIGFRYRSLKHFNYDICQSCFFSGRVAKGHKMHYPMVEYCTPTTSGEDVRDFAKVLKNKFRTKRYFAKHPRMGYLPVQNLQAEYDRLKQQHEHKGLSPLPSPPEMMPTSPQSPRDAELIAEAKLLRQHKGRLEARMQILEDHNKQLESQLHRLRQLLEQPQAEAKVNGTTVSSPSTSLQRSDSSQPMLLRVVGSQTSDSMGEEDLLSPPQDTSTGLEEVMEQLNNSFPSSRGRNTPGKPMREDTM

SEQ ID NO: 1764 - DNA, 7378 bp, Homo sapiens
acactagcaatggcaaagctttgtgcggaggcattgctggctgctctgaactaaaagcatccgtggggaccgaaagaggtttttgcacaccttattaaggaactccaggatggcattgggcagcggcaaactgttgtcagaacattgaatgcaactggggaagaaataattcagcaatcctcaaaaacagatgccagtattctacaggaaaaattgggaagcctgaatctgcggtggcaggaggtctgcaaacagctgtcagacagaaaaaagaggctagaagaacaaaagaatatcttgtcagaatttcaaagagatttaaatgaatttgttttatggttggaggaagcagataacattgctagtatcccacttgaacctggaaaagagcagcaactaaaagaaaagcttgagcaagtcaagttactggtggaagagttgcccctgcgccagggaattctcaaacaattaaatgaaactggaggacccgtgcttgtaagtgctcccataagcccagaagagcaagataaacttgaaaataagctcaagcagacaaatctccagtggataaaggtttccagagctttacctgagaaacaaggagaaattgaagctcaaataaaagaccttgggcagcttgaaaaaaagcttgaagaccttgaagagcagttaaatcatctgctgctgtggttatctcctattaggaatcagttggaaatttataaccaaccaaaccaagaaggaccatttgacgttcaggaaactgaaatagcagttcaagctaaacaaccggatgtggaagagattttgtctaaagggcagcatttgtacaaggaaaaaccagccactcagccagtgaagaggaagttagaagatctgagctctgagtggaaggcggtaaaccgtttacttcaagagctgagggcaaagcagcctgacctagctcctggactgaccactattggagcctctcctactcagactgttactctggtgacacaacctgtggttactaaggaaactgccatctccaaactagaaatgccatcttccttgatgttggaggtacctgctctggcagatttcaaccgggcttggacagaacttaccgactggctttctctgcttgatcaagttataaaatcacagagggtgatggtgggtgaccttgaggatatcaacgagatgatcatcaagcagaaggcaacaatgcaggatttggaacagaggcgtccccagttggaagaactcattaccgctgcccaaaatttgaaaaacaagaccagcaatcaagaggctagaacaatcattacggatcgaattgaaagaattcagaatcagtgggatgaagtacaagaacaccttcagaaccggaggcaacagttgaatgaaatgttaaaggattcaacacaatggctggaagctaaggaagaagctgagcaggtcttaggacaggccagagccaagcttgagtcatggaaggagggtccctatacagtagatgcaatccaaaagaaaatcacagaaaccaagcagttggccaaagacctccgccagtggcagacaaatgtagatgtggcaaatgacttggccctgaaacttctccgggattattctgcagatgataccagaaaagtccacatgataacagagaatatcaatgcctcttggagaagcattcataaaagggtgagtgagcgagaggctgctttggaagaaactcatagattactgcaacagttccccctggacctggaaaagtttcttgcctggcttacagaagctgaaacaactgccaatgtcctacaggatgctacccgtaaggaaaggctcctagaagactccaagggagtaaaagagctgatgaaacaatggcaagacctccaaggtgaaattgaagctcacacagatgtttatcacaacctggatgaaaacagccaaaaaatcctgagatccctggaaggttccgatgatgcagtcctgttacaaagacgtttggataacatgaacttcaagtggagtgaacttcggaaaaagtctctcaacattaggtcccatttggaagccagttctgaccagtggaagcgtctgcacctttctctgcaggaacttctggtgtggctacagctgaaagatgatgaattaagccggcaggcacctattggaggcgactttccagcagttcagaagcagaacgatgtacatagggccttcaagagggaattgaaaactaaagaacctgtaatcatgagtactcttgagactgtacgaatatttctgacagagcagcctttggaaggactagagaaactctaccaggagcccagagagctgcctcctgaggagagagcccagaatgtcactcggcttctacgaaagcaggctgaggaggtcaatactgagtgggaaaaattgaacctgcactccgctgactggcagagaaaaatagatgagacccttgaaagactccaggaacttcaagaggccacggatgagctggacctcaagctgcgccaagctgaggtgatcaagggatcctggcagcccgtgggcgatctcctcattgactctctccaagatcacctcgagaaagtcaaggcacttcgaggagaaattgcgcctctgaaagagaacgtgagccacgtcaatgaccttgctcgccagcttaccactttgggcattcagctctcaccgtataacctcagcactctggaagacctgaacaccagatggaagcttctgcaggtggccgtcgaggaccgagtcaggcagctgcatgaagcccacagggactttggtccagcatctcagcactttctttccacgtctgtccagggtccctgggagagagccatctcgccaaacaaagtgccctactatatcaaccacgagactcaaacaacttgctgggaccatcccaaaatgacagagctctaccagtctttagctgacctgaataatgtcagattctcagcttataggactgccatgaaactccgaagactgcagaaggccctttgcttggatctcttgagcctgtcagctgcatgtgatgccttggaccagcacaacctcaagcaaaatgaccagcccatggatatcctgcagattattaattgtttgaccactatttatgaccgcctggagcaagagcacaacaatttggtcaacgtccctctctgcgtggatatgtgtctgaactggctgctgaatgtttatgatacgggacgaacagggaggatccgtgtcctgtcttttaaaactggcatcatttccctgtgtaaagcacatttggaagacaagtacagataccttttcaagcaagtggcaagttcaacaggattttgtgaccagcgcaggctgggcctccttctgcatgattctatccaaattccaagacagttgggtgaagttgcatcctttgggggcagtaacattgagccaagtgtccggagctgcttccaatttgctaataataagccagagatcgaagcggccctcttcctagactggatgagactggaaccccagtccatggtgtggctgcccgtcctgcacagagtggctgctgcagaaactgccaagcatcaggccaaatgtaacatctgcaaagagtgtccaatcattggattcaggtacaggagtctaaagcactttaattatgacatctgccaaagctgctttttttctggtcgagttgcaaaaggccataaaatgcactatcccatggtggaatattgcactccgactacatcaggagaagatgttcgagactttgccaaggtactaaaaaacaaatttcgaaccaaaaggtattttgcgaagcatccccgaatgggctacctgccagtgcagactgtcttagagggggacaacatggaaactcccgttactctgatcaacttctggccagtagattctgcgcctgcctcgtcccctcagctttcacacgatgatactcattcacgcattgaacattatgctagcaggctagcagaaatggaaaacagcaatggatcttatctaaatgatagcatctctcctaatgagagcatagatgatgaacatttgttaatccagcattactgccaaagtttgaaccaggactcccccctgagccagcctcgtagtcctgcccagatcttgatttccttagagagtgaggaaagaggggagctagagagaatcctagcagatcttgaggaagaaaacaggaatctgcaagcagaatatgaccgtctaaagcagcagcacgaacataaaggcctgtccccactgccgtcccctcctgaaatgatgcccacctctccccagagtccccgggatgctgagctcattgctgaggccaagctactgcgtcaacacaaaggccgcctggaagccaggatgcaaatcctggaagaccacaataaacagctggagtcacagttacacaggctaaggcagctgctggagcaaccccaggcagaggccaaagtgaatggcacaacggtgtcctctccttctacctctctacagaggtccgacagcagtcagcctatgctgctccgagtggttggcagtcaaacttcggactccatgggtgaggaagatcttctcagtcctccccaggacacaagcacagggttagaggaggtgatggagcaactcaacaactccttccctagttcaagaggacacaatgtaggaagtcttttccacatggcagatgatttgggcagagcgatggagtccttagtatcagtcatgacagatgaagaaggagcagaataaatgttttacaactcctgattcccgcatggtttttataatattcatacaacaaagaggattagacagtaagagtttacaagaaataaatctatatttttgtgaagggtagtggtattatactgtagatttcagtagtttctaagtctgttattgttttgttaacaatggcaggttttacacgtctatgcaattgtacaaaaaagttataagaaaactacatgtaaaatcttgatagctaaataacttgccatttctttatatggaacgcattttgggttgtttaaaaatttataacagttataaagaaagattgtaaactaaagtgtgctttataaaaaaaagttgtttataaaaacccctaaaaacaaaacaaacacacacacacacacatacacacacacacacaaaactttgaggcagcgcattgttttgcatccttttggcgtgatatccatatgaaattcatggctttttctttttttgcatattaaagataagacttcctctaccaccacaccaaatgactactacacactgctcatttgagaactgtcagctgagtggggcaggcttgagttttcatttcatatatctatatgtctataagtatataaatactatagttatatagataaagagatacgaatttctatagactgactttttccattttttaaatgttcatgtcacatcctaatagaaagaaattacttctagtcagtcatccaggcttacctgcttggtctagaatggatttttcccggagccggaagccaggaggaaactacaccacactaaaacattgtctacagctccagatgtttctcattttaaacaactttccactgacaacgaaagtaaagtaaagtattggatttttttaaagggaacatgtgaatgaatacacaggacttattatatcagagtgagtaatcggttggttggttgattgattgattgattgatacattcagcttcctgctgctagcaatgccacgatttagatttaatgatgcttcagtggaaatcaatcagaaggtattctgaccttgtgaacatcagaaggtattttttaactcccaagcagtagcaggacgatgatagggctggagggctatggattcccagcccatccctgtgaaggagtaggccactctttaagtgaaggattggatgattgttcataatacataaagttctctgtaattacaactaaattattatgccctcttctcacagtcaaaaggaactgggtggtttggtttttgttgcttttttagatttattgtcccatgtgggatgagtttttaaatgccacaagacataatttaaaataaataaactttgggaaaaggtgtaagacagtagccccatcacatttgtgatactgacaggtatcaacccagaagcccatgaactgtgtttccatcctttgcatttctctgcgagtagttccacacaggtttgtaagtaagtaagaaagaaggcaaattgattcaaatgttacaaaaaaacccttcttggtggattagacaggttaaatatataaacaaacaaacaaaaattgctcaaaaaagaggagaaaagctcaagaggaaaagctaaggactggtaggaaaaagctttactctttcatgccattttatttctttttgatttttaaatcattcattcaatagataccaccgtgtgacctataattttgcaaatctgttacctctgacatcaagtgtaattagcttttggagagtgggctgacatcaagtgtaattagcttttggagagtgggttttgtccattattaataattaattaattaacatcaaacacggcttctcatgctatttctacctcactttggttttggggtgttcctgataattgtgcacacctgagttcacagcttcaccacttgtccattgcgttattttctttttcctttataattctttctttttccttcataattttcaaaagaaaacccaaagctctaaggtaacaaattaccaaattacatgaagatttggtttttgtcttgcatttttttcctttatgtgacgctggaccttttctttacccaaggatttttaaaactcagatttaaaacaaggggttactttacatcctactaagaagtttaagtaagtaagtttcattctaaaatcagaggtaaatagagtgcataaataattttgttttaatctttttgtttttcttttagacacattagctctggagtgagtctgtcataatatttgaacaaaaattgagagctttattgctgcattttaagcataattaatttggacattatttcgtgttgtgttctttataaccaccgagtattaaactgtaaatcataatgtaactgaagcataaacatcacatggcatgttttgtcattgttttcaggtactgagttcttacttgagtatcataatatattgtgttttaacaccaacactgtaacatttacgaattatttttttaaacttcagttttactgcattttcacaacatatcagacttcaccaaatatatgccttactattgtattatagtactgctttactgtgtatctcaataaagcacgcagttatgttac

SEQ ID NO: 1765 - protein, 1243 aa, Homo sapiens
MPSSLMLEVPALADFNRAWTELTDWLSLLDQVIKSQRVMVGDLEDINEMIIKQKATMQDLEQRRPQLEELITAAQNLKNKTSNQEARTIITDRIERIQNQWDEVQEHLQNRRQQLNEMLKDSTQWLEAKEEAEQVLGQARAKLESWKEGPYTVDAIQKKITETKQLAKDLRQWQTNVDVANDLALKLLRDYSADDTRKVHMITENINASWRSIHKRVSEREAALEETHRLLQQFPLDLEKFLAWLTEAETTANVLQDATRKERLLEDSKGVKELMKQWQDLQGEIEAHTDVYHNLDENSQKILRSLEGSDDAVLLQRRLDNMNFKWSELRKKSLNIRSHLEASSDQWKRLHLSLQELLVWLQLKDDELSRQAPIGGDFPAVQKQNDVHRAFKRELKTKEPVIMSTLETVRIFLTEQPLEGLEKLYQEPRELPPEERAQNVTRLLRKQAEEVNTEWEKLNLHSADWQRKIDETLERLQELQEATDELDLKLRQAEVIKGSWQPVGDLLIDSLQDHLEKVKALRGEIAPLKENVSHVNDLARQLTTLGIQLSPYNLSTLEDLNTRWKLLQVAVEDRVRQLHEAHRDFGPASQHFLSTSVQGPWERAISPNKVPYYINHETQTTCWDHPKMTELYQSLADLNNVRFSAYRTAMKLRRLQKALCLDLLSLSAACDALDQHNLKQNDQPMDILQIINCLTTIYDRLEQEHNNLVNVPLCVDMCLNWLLNVYDTGRTGRIRVLSFKTGIISLCKAHLEDKYRYLFKQVASSTGFCDQRRLGLLLHDSIQIPRQLGEVASFGGSNIEPSVRSCFQFANNKPEIEAALFLDWMRLEPQSMVWLPVLHRVAAAETAKHQAKCNICKECPIIGFRYRSLKHFNYDICQSCFFSGRVAKGHKMHYPMVEYCTPTTSGEDVRDFAKVLKNKFRTKRYFAKHPRMGYLPVQTVLEGDNMETPVTLINFWPVDSAPASSPQLSHDDTHSRIEHYASRLAEMENSNGSYLNDSISPNESIDDEHLLIQHYCQSLNQDSPLSQPRSPAQILISLESEERGELERILADLEEENRNLQAEYDRLKQQHEHKGLSPLPSPPEMMPTSPQSPRDAELIAEAKLLRQHKGRLEARMQILEDHNKQLESQLHRLRQLLEQPQAEAKVNGTTVSSPSTSLQRSDSSQPMLLRVVGSQTSDSMGEEDLLSPPQDTSTGLEEVMEQLNNSFPSSRGHNVGSLFHMADDLGRAMESLVSVMTDEEGAE

SEQ ID NO: 1766 - DNA, 7339 bp, Homo sapiens
acactagcaatggcaaagctttgtgcggaggcattgctggctgctctgaactaaaagcatccgtggggaccgaaagaggtttttgcacaccttattaaggaactccaggatggcattgggcagcggcaaactgttgtcagaacattgaatgcaactggggaagaaataattcagcaatcctcaaaaacagatgccagtattctacaggaaaaattgggaagcctgaatctgcggtggcaggaggtctgcaaacagctgtcagacagaaaaaagaggctagaagaacaaaagaatatcttgtcagaatttcaaagagatttaaatgaatttgttttatggttggaggaagcagataacattgctagtatcccacttgaacctggaaaagagcagcaactaaaagaaaagcttgagcaagtcaagttactggtggaagagttgcccctgcgccagggaattctcaaacaattaaatgaaactggaggacccgtgcttgtaagtgctcccataagcccagaagagcaagataaacttgaaaataagctcaagcagacaaatctccagtggataaaggtttccagagctttacctgagaaacaaggagaaattgaagctcaaataaaagaccttgggcagcttgaaaaaaagcttgaagaccttgaagagcagttaaatcatctgctgctgtggttatctcctattaggaatcagttggaaatttataaccaaccaaaccaagaaggaccatttgacgttcaggaaactgaaatagcagttcaagctaaacaaccggatgtggaagagattttgtctaaagggcagcatttgtacaaggaaaaaccagccactcagccagtgaagaggaagttagaagatctgagctctgagtggaaggcggtaaaccgtttacttcaagagctgagggcaaagcagcctgacctagctcctggactgaccactattggagcctctcctactcagactgttactctggtgacacaacctgtggttactaaggaaactgccatctccaaactagaaatgccatcttccttgatgttggaggtacctgctctggcagatttcaaccgggcttggacagaacttaccgactggctttctctgcttgatcaagttataaaatcacagagggtgatggtgggtgaccttgaggatatcaacgagatgatcatcaagcagaaggcaacaatgcaggatttggaacagaggcgtccccagttggaagaactcattaccgctgcccaaaatttgaaaaacaagaccagcaatcaagaggctagaacaatcattacggatcgaattgaaagaattcagaatcagtgggatgaagtacaagaacaccttcagaaccggaggcaacagttgaatgaaatgttaaaggattcaacacaatggctggaagctaaggaagaagctgagcaggtcttaggacaggccagagccaagcttgagtcatggaaggagggtccctatacagtagatgcaatccaaaagaaaatcacagaaaccaagcagttggccaaagacctccgccagtggcagacaaatgtagatgtggcaaatgacttggccctgaaacttctccgggattattctgcagatgataccagaaaagtccacatgataacagagaatatcaatgcctcttggagaagcattcataaaagggtgagtgagcgagaggctgctttggaagaaactcatagattactgcaacagttccccctggacctggaaaagtttcttgcctggcttacagaagctgaaacaactgccaatgtcctacaggatgctacccgtaaggaaaggctcctagaagactccaagggagtaaaagagctgatgaaacaatggcaagacctccaaggtgaaattgaagctcacacagatgtttatcacaacctggatgaaaacagccaaaaaatcctgagatccctggaaggttccgatgatgcagtcctgttacaaagacgtttggataacatgaacttcaagtggagtgaacttcggaaaaagtctctcaacattaggtcccatttggaagccagttctgaccagtggaagcgtctgcacctttctctgcaggaacttctggtgtggctacagctgaaagatgatgaattaagccggcaggcacctattggaggcgactttccagcagttcagaagcagaacgatgtacatagggccttcaagagggaattgaaaactaaagaacctgtaatcatgagtactcttgagactgtacgaatatttctgacagagcagcctttggaaggactagagaaactctaccaggagcccagagagctgcctcctgaggagagagcccagaatgtcactcggcttctacgaaagcaggctgaggaggtcaatactgagtgggaaaaattgaacctgcactccgctgactggcagagaaaaatagatgagacccttgaaagactccaggaacttcaagaggccacggatgagctggacctcaagctgcgccaagctgaggtgatcaagggatcctggcagcccgtgggcgatctcctcattgactctctccaagatcacctcgagaaagtcaaggcacttcgaggagaaattgcgcctctgaaagagaacgtgagccacgtcaatgaccttgctcgccagcttaccactttgggcattcagctctcaccgtataacctcagcactctggaagacctgaacaccagatggaagcttctgcaggtggccgtcgaggaccgagtcaggcagctgcatgaagcccacagggactttggtccagcatctcagcactttctttccacgtctgtccagggtccctgggagagagccatctcgccaaacaaagtgccctactatatcaaccacgagactcaaacaacttgctgggaccatcccaaaatgacagagctctaccagtctttagctgacctgaataatgtcagattctcagcttataggactgccatgaaactccgaagactgcagaaggccctttgcttggatctcttgagcctgtcagctgcatgtgatgccttggaccagcacaacctcaagcaaaatgaccagcccatggatatcctgcagattattaattgtttgaccactatttatgaccgcctggagcaagagcacaacaatttggtcaacgtccctctctgcgtggatatgtgtctgaactggctgctgaatgtttatgatacgggacgaacagggaggatccgtgtcctgtcttttaaaactggcatcatttccctgtgtaaagcacatttggaagacaagtacagataccttttcaagcaagtggcaagttcaacaggattttgtgaccagcgcaggctgggcctccttctgcatgattctatccaaattccaagacagttgggtgaagttgcatcctttgggggcagtaacattgagccaagtgtccggagctgcttccaatttgctaataataagccagagatcgaagcggccctcttcctagactggatgagactggaaccccagtccatggtgtggctgcccgtcctgcacagagtggctgctgcagaaactgccaagcatcaggccaaatgtaacatctgcaaagagtgtccaatcattggattcaggtacaggagtctaaagcactttaattatgacatctgccaaagctgctttttttctggtcgagttgcaaaaggccataaaatgcactatcccatggtggaatattgcactccgactacatcaggagaagatgttcgagactttgccaaggtactaaaaaacaaatttcgaaccaaaaggtattttgcgaagcatccccgaatgggctacctgccagtgcagactgtcttagagggggacaacatggaaacgcctgcctcgtcccctcagctttcacacgatgatactcattcacgcattgaacattatgctagcaggctagcagaaatggaaaacagcaatggatcttatctaaatgatagcatctctcctaatgagagcatagatgatgaacatttgttaatccagcattactgccaaagtttgaaccaggactcccccctgagccagcctcgtagtcctgcccagatcttgatttccttagagagtgaggaaagaggggagctagagagaatcctagcagatcttgaggaagaaaacaggaatctgcaagcagaatatgaccgtctaaagcagcagcacgaacataaaggcctgtccccactgccgtcccctcctgaaatgatgcccacctctccccagagtccccgggatgctgagctcattgctgaggccaagctactgcgtcaacacaaaggccgcctggaagccaggatgcaaatcctggaagaccacaataaacagctggagtcacagttacacaggctaaggcagctgctggagcaaccccaggcagaggccaaagtgaatggcacaacggtgtcctctccttctacctctctacagaggtccgacagcagtcagcctatgctgctccgagtggttggcagtcaaacttcggactccatgggtgaggaagatcttctcagtcctccccaggacacaagcacagggttagaggaggtgatggagcaactcaacaactccttccctagttcaagaggacacaatgtaggaagtcttttccacatggcagatgatttgggcagagcgatggagtccttagtatcagtcatgacagatgaagaaggagcagaataaatgttttacaactcctgattcccgcatggtttttataatattcatacaacaaagaggattagacagtaagagtttacaagaaataaatctatatttttgtgaagggtagtggtattatactgtagatttcagtagtttctaagtctgttattgttttgttaacaatggcaggttttacacgtctatgcaattgtacaaaaaagttataagaaaactacatgtaaaatcttgatagctaaataacttgccatttctttatatggaacgcattttgggttgtttaaaaatttataacagttataaagaaagattgtaaactaaagtgtgctttataaaaaaaagttgtttataaaaacccctaaaaacaaaacaaacacacacacacacacatacacacacacacacaaaactttgaggcagcgcattgttttgcatccttttggcgtgatatccatatgaaattcatggctttttctttttttgcatattaaagataagacttcctctaccaccacaccaaatgactactacacactgctcatttgagaactgtcagctgagtggggcaggcttgagttttcatttcatatatctatatgtctataagtatataaatactatagttatatagataaagagatacgaatttctatagactgactttttccattttttaaatgttcatgtcacatcctaatagaaagaaattacttctagtcagtcatccaggcttacctgcttggtctagaatggatttttcccggagccggaagccaggaggaaactacaccacactaaaacattgtctacagctccagatgtttctcattttaaacaactttccactgacaacgaaagtaaagtaaagtattggatttttttaaagggaacatgtgaatgaatacacaggacttattatatcagagtgagtaatcggttggttggttgattgattgattgattgatacattcagcttcctgctgctagcaatgccacgatttagatttaatgatgcttcagtggaaatcaatcagaaggtattctgaccttgtgaacatcagaaggtattttttaactcccaagcagtagcaggacgatgatagggctggagggctatggattcccagcccatccctgtgaaggagtaggccactctttaagtgaaggattggatgattgttcataatacataaagttctctgtaattacaactaaattattatgccctcttctcacagtcaaaaggaactgggtggtttggtttttgttgcttttttagatttattgtcccatgtgggatgagtttttaaatgccacaagacataatttaaaataaataaactttgggaaaaggtgtaagacagtagccccatcacatttgtgatactgacaggtatcaacccagaagcccatgaactgtgtttccatcctttgcatttctctgcgagtagttccacacaggtttgtaagtaagtaagaaagaaggcaaattgattcaaatgttacaaaaaaacccttcttggtggattagacaggttaaatatataaacaaacaaacaaaaattgctcaaaaaagaggagaaaagctcaagaggaaaagctaaggactggtaggaaaaagctttactctttcatgccattttatttctttttgatttttaaatcattcattcaatagataccaccgtgtgacctataattttgcaaatctgttacctctgacatcaagtgtaattagcttttggagagtgggctgacatcaagtgtaattagcttttggagagtgggttttgtccattattaataattaattaattaacatcaaacacggcttctcatgctatttctacctcactttggttttggggtgttcctgataattgtgcacacctgagttcacagcttcaccacttgtccattgcgttattttctttttcctttataattctttctttttccttcataattttcaaaagaaaacccaaagctctaaggtaacaaattaccaaattacatgaagatttggtttttgtcttgcatttttttcctttatgtgacgctggaccttttctttacccaaggatttttaaaactcagatttaaaacaaggggttactttacatcctactaagaagtttaagtaagtaagtttcattctaaaatcagaggtaaatagagtgcataaataattttgttttaatctttttgtttttcttttagacacattagctctggagtgagtctgtcataatatttgaacaaaaattgagagctttattgctgcattttaagcataattaatttggacattatttcgtgttgtgttctttataaccaccgagtattaaactgtaaatcataatgtaactgaagcataaacatcacatggcatgttttgtcattgttttcaggtactgagttcttacttgagtatcataatatattgtgttttaacaccaacactgtaacatttacgaattatttttttaaacttcagttttactgcattttcacaacatatcagacttcaccaaatatatgccttactattgtattatagtactgctttactgtgtatctcaataaagcacgcagttatgttac

SEQ ID NO: 1767 - protein, 1230 aa, Homo sapiens
MPSSLMLEVPALADFNRAWTELTDWLSLLDQVIKSQRVMVGDLEDINEMIIKQKATMQDLEQRRPQLEELITAAQNLKNKTSNQEARTIITDRIERIQNQWDEVQEHLQNRRQQLNEMLKDSTQWLEAKEEAEQVLGQARAKLESWKEGPYTVDAIQKKITETKQLAKDLRQWQTNVDVANDLALKLLRDYSADDTRKVHMITENINASWRSIHKRVSEREAALEETHRLLQQFPLDLEKFLAWLTEAETTANVLQDATRKERLLEDSKGVKELMKQWQDLQGEIEAHTDVYHNLDENSQKILRSLEGSDDAVLLQRRLDNMNFKWSELRKKSLNIRSHLEASSDQWKRLHLSLQELLVWLQLKDDELSRQAPIGGDFPAVQKQNDVHRAFKRELKTKEPVIMSTLETVRIFLTEQPLEGLEKLYQEPRELPPEERAQNVTRLLRKQAEEVNTEWEKLNLHSADWQRKIDETLERLQELQEATDELDLKLRQAEVIKGSWQPVGDLLIDSLQDHLEKVKALRGEIAPLKENVSHVNDLARQLTTLGIQLSPYNLSTLEDLNTRWKLLQVAVEDRVRQLHEAHRDFGPASQHFLSTSVQGPWERAISPNKVPYYINHETQTTCWDHPKMTELYQSLADLNNVRFSAYRTAMKLRRLQKALCLDLLSLSAACDALDQHNLKQNDQPMDILQIINCLTTIYDRLEQEHNNLVNVPLCVDMCLNWLLNVYDTGRTGRIRVLSFKTGIISLCKAHLEDKYRYLFKQVASSTGFCDQRRLGLLLHDSIQIPRQLGEVASFGGSNIEPSVRSCFQFANNKPEIEAALFLDWMRLEPQSMVWLPVLHRVAAAETAKHQAKCNICKECPIIGFRYRSLKHFNYDICQSCFFSGRVAKGHKMHYPMVEYCTPTTSGEDVRDFAKVLKNKFRTKRYFAKHPRMGYLPVQTVLEGDNMETPASSPQLSHDDTHSRIEHYASRLAEMENSNGSYLNDSISPNESIDDEHLLIQHYCQSLNQDSPLSQPRSPAQILISLESEERGELERILADLEEENRNLQAEYDRLKQQHEHKGLSPLPSPPEMMPTSPQSPRDAELIAEAKLLRQHKGRLEARMQILEDHNKQLESQLHRLRQLLEQPQAEAKVNGTTVSSPSTSLQRSDSSQPMLLRVVGSQTSDSMGEEDLLSPPQDTSTGLEEVMEQLNNSFPSSRGHNVGSLFHMADDLGRAMESLVSVMTDEEGAE

SEQ ID NO: 1768 - DNA, 7048 bp, Homo sapiens
acactagcaatggcaaagctttgtgcggaggcattgctggctgctctgaactaaaagcatccgtggggaccgaaagaggtttttgcacaccttattaaggaactccaggatggcattgggcagcggcaaactgttgtcagaacattgaatgcaactggggaagaaataattcagcaatcctcaaaaacagatgccagtattctacaggaaaaattgggaagcctgaatctgcggtggcaggaggtctgcaaacagctgtcagacagaaaaaagaggctagaagaacaaaagaatatcttgtcagaatttcaaagagatttaaatgaatttgttttatggttggaggaagcagataacattgctagtatcccacttgaacctggaaaagagcagcaactaaaagaaaagcttgagcaagtcaagttactggtggaagagttgcccctgcgccagggaattctcaaacaattaaatgaaactggaggacccgtgcttgtaagtgctcccataagcccagaagagcaagataaacttgaaaataagctcaagcagacaaatctccagtggataaaggtttccagagctttacctgagaaacaaggagaaattgaagctcaaataaaagaccttgggcagcttgaaaaaaagcttgaagaccttgaagagcagttaaatcatctgctgctgtggttatctcctattaggaatcagttggaaatttataaccaaccaaaccaagaaggaccatttgacgttcaggaaactgaaatagcagttcaagctaaacaaccggatgtggaagagattttgtctaaagggcagcatttgtacaaggaaaaaccagccactcagccagtgaagaggaagttagaagatctgagctctgagtggaaggcggtaaaccgtttacttcaagagctgagggcaaagcagcctgacctagctcctggactgaccactattggagcctctcctactcagactgttactctggtgacacaacctgtggttactaaggaaactgccatctccaaactagaaatgccatcttccttgatgttggaggtacctgctctggcagatttcaaccgggcttggacagaacttaccgactggctttctctgcttgatcaagttataaaatcacagagggtgatggtgggtgaccttgaggatatcaacgagatgatcatcaagcagaaggcaacaatgcaggatttggaacagaggcgtccccagttggaagaactcattaccgctgcccaaaatttgaaaaacaagaccagcaatcaagaggctagaacaatcattacggatcgaattgaaagaattcagaatcagtgggatgaagtacaagaacaccttcagaaccggaggcaacagttgaatgaaatgttaaaggattcaacacaatggctggaagctaaggaagaagctgagcaggtcttaggacaggccagagccaagcttgagtcatggaaggagggtccctatacagtagatgcaatccaaaagaaaatcacagaaaccaagcagttggccaaagacctccgccagtggcagacaaatgtagatgtggcaaatgacttggccctgaaacttctccgggattattctgcagatgataccagaaaagtccacatgataacagagaatatcaatgcctcttggagaagcattcataaaagggtgagtgagcgagaggctgctttggaagaaactcatagattactgcaacagttccccctggacctggaaaagtttcttgcctggcttacagaagctgaaacaactgccaatgtcctacaggatgctacccgtaaggaaaggctcctagaagactccaagggagtaaaagagctgatgaaacaatggcaagacctccaaggtgaaattgaagctcacacagatgtttatcacaacctggatgaaaacagccaaaaaatcctgagatccctggaaggttccgatgatgcagtcctgttacaaagacgtttggataacatgaacttcaagtggagtgaacttcggaaaaagtctctcaacattaggtcccatttggaagccagttctgaccagtggaagcgtctgcacctttctctgcaggaacttctggtgtggctacagctgaaagatgatgaattaagccggcaggcacctattggaggcgactttccagcagttcagaagcagaacgatgtacatagggccttcaagagggaattgaaaactaaagaacctgtaatcatgagtactcttgagactgtacgaatatttctgacagagcagcctttggaaggactagagaaactctaccaggagcccagagagctgcctcctgaggagagagcccagaatgtcactcggcttctacgaaagcaggctgaggaggtcaatactgagtgggaaaaattgaacctgcactccgctgactggcagagaaaaatagatgagacccttgaaagactccaggaacttcaagaggccacggatgagctggacctcaagctgcgccaagctgaggtgatcaagggatcctggcagcccgtgggcgatctcctcattgactctctccaagatcacctcgagaaagtcaaggcacttcgaggagaaattgcgcctctgaaagagaacgtgagccacgtcaatgaccttgctcgccagcttaccactttgggcattcagctctcaccgtataacctcagcactctggaagacctgaacaccagatggaagcttctgcaggtggccgtcgaggaccgagtcaggcagctgcatgaagcccacagggactttggtccagcatctcagcactttctttccacgtctgtccagggtccctgggagagagccatctcgccaaacaaagtgccctactatatcaaccacgagactcaaacaacttgctgggaccatcccaaaatgacagagctctaccagtctttagctgacctgaataatgtcagattctcagcttataggactgccatgaaactccgaagactgcagaaggccctttgcttggatctcttgagcctgtcagctgcatgtgatgccttggaccagcacaacctcaagcaaaatgaccagcccatggatatcctgcagattattaattgtttgaccactatttatgaccgcctggagcaagagcacaacaatttggtcaacgtccctctctgcgtggatatgtgtctgaactggctgctgaatgtttatgatacgggacgaacagggaggatccgtgtcctgtcttttaaaactggcatcatttccctgtgtaaagcacatttggaagacaagtacagataccttttcaagcaagtggcaagttcaacaggattttgtgaccagcgcaggctgggcctccttctgcatgattctatccaaattccaagacagttgggtgaagttgcatcctttgggggcagtaacattgagccaagtgtccggagctgcttccaatttgctaataataagccagagatcgaagcggccctcttcctagactggatgagactggaaccccagtccatggtgtggctgcccgtcctgcacagagtggctgctgcagaaactgccaagcatcaggccaaatgtaacatctgcaaagagtgtccaatcattggattcaggtacaggagtctaaagcactttaattatgacatctgccaaagctgctttttttctggtcgagttgcaaaaggccataaaatgcactatcccatggtggaatattgcactccgactacatcaggagaagatgttcgagactttgccaaggtactaaaaaacaaatttcgaaccaaaaggtattttgcgaagcatccccgaatgggctacctgccagtgcagactgtcttagagggggacaacatggaaacgaatctgcaagcagaatatgaccgtctaaagcagcagcacgaacataaaggcctgtccccactgccgtcccctcctgaaatgatgcccacctctccccagagtccccgggatgctgagctcattgctgaggccaagctactgcgtcaacacaaaggccgcctggaagccaggatgcaaatcctggaagaccacaataaacagctggagtcacagttacacaggctaaggcagctgctggagcaaccccaggcagaggccaaagtgaatggcacaacggtgtcctctccttctacctctctacagaggtccgacagcagtcagcctatgctgctccgagtggttggcagtcaaacttcggactccatgggtgaggaagatcttctcagtcctccccaggacacaagcacagggttagaggaggtgatggagcaactcaacaactccttccctagttcaagaggacacaatgtaggaagtcttttccacatggcagatgatttgggcagagcgatggagtccttagtatcagtcatgacagatgaagaaggagcagaataaatgttttacaactcctgattcccgcatggtttttataatattcatacaacaaagaggattagacagtaagagtttacaagaaataaatctatatttttgtgaagggtagtggtattatactgtagatttcagtagtttctaagtctgttattgttttgttaacaatggcaggttttacacgtctatgcaattgtacaaaaaagttataagaaaactacatgtaaaatcttgatagctaaataacttgccatttctttatatggaacgcattttgggttgtttaaaaatttataacagttataaagaaagattgtaaactaaagtgtgctttataaaaaaaagttgtttataaaaacccctaaaaacaaaacaaacacacacacacacacatacacacacacacacaaaactttgaggcagcgcattgttttgcatccttttggcgtgatatccatatgaaattcatggctttttctttttttgcatattaaagataagacttcctctaccaccacaccaaatgactactacacactgctcatttgagaactgtcagctgagtggggcaggcttgagttttcatttcatatatctatatgtctataagtatataaatactatagttatatagataaagagatacgaatttctatagactgactttttccattttttaaatgttcatgtcacatcctaatagaaagaaattacttctagtcagtcatccaggcttacctgcttggtctagaatggatttttcccggagccggaagccaggaggaaactacaccacactaaaacattgtctacagctccagatgtttctcattttaaacaactttccactgacaacgaaagtaaagtaaagtattggatttttttaaagggaacatgtgaatgaatacacaggacttattatatcagagtgagtaatcggttggttggttgattgattgattgattgatacattcagcttcctgctgctagcaatgccacgatttagatttaatgatgcttcagtggaaatcaatcagaaggtattctgaccttgtgaacatcagaaggtattttttaactcccaagcagtagcaggacgatgatagggctggagggctatggattcccagcccatccctgtgaaggagtaggccactctttaagtgaaggattggatgattgttcataatacataaagttctctgtaattacaactaaattattatgccctcttctcacagtcaaaaggaactgggtggtttggtttttgttgcttttttagatttattgtcccatgtgggatgagtttttaaatgccacaagacataatttaaaataaataaactttgggaaaaggtgtaagacagtagccccatcacatttgtgatactgacaggtatcaacccagaagcccatgaactgtgtttccatcctttgcatttctctgcgagtagttccacacaggtttgtaagtaagtaagaaagaaggcaaattgattcaaatgttacaaaaaaacccttcttggtggattagacaggttaaatatataaacaaacaaacaaaaattgctcaaaaaagaggagaaaagctcaagaggaaaagctaaggactggtaggaaaaagctttactctttcatgccattttatttctttttgatttttaaatcattcattcaatagataccaccgtgtgacctataattttgcaaatctgttacctctgacatcaagtgtaattagcttttggagagtgggctgacatcaagtgtaattagcttttggagagtgggttttgtccattattaataattaattaattaacatcaaacacggcttctcatgctatttctacctcactttggttttggggtgttcctgataattgtgcacacctgagttcacagcttcaccacttgtccattgcgttattttctttttcctttataattctttctttttccttcataattttcaaaagaaaacccaaagctctaaggtaacaaattaccaaattacatgaagatttggtttttgtcttgcatttttttcctttatgtgacgctggaccttttctttacccaaggatttttaaaactcagatttaaaacaaggggttactttacatcctactaagaagtttaagtaagtaagtttcattctaaaatcagaggtaaatagagtgcataaataattttgttttaatctttttgtttttcttttagacacattagctctggagtgagtctgtcataatatttgaacaaaaattgagagctttattgctgcattttaagcataattaatttggacattatttcgtgttgtgttctttataaccaccgagtattaaactgtaaatcataatgtaactgaagcataaacatcacatggcatgttttgtcattgttttcaggtactgagttcttacttgagtatcataatatattgtgttttaacaccaacactgtaacatttacgaattatttttttaaacttcagttttactgcattttcacaacatatcagacttcaccaaatatatgccttactattgtattatagtactgctttactgtgtatctcaataaagcacgcagttatgttac

SEQ ID NO: 1769 - protein, 1133 aa, Homo sapiens
MPSSLMLEVPALADFNRAWTELTDWLSLLDQVIKSQRVMVGDLEDINEMIIKQKATMQDLEQRRPQLEELITAAQNLKNKTSNQEARTIITDRIERIQNQWDEVQEHLQNRRQQLNEMLKDSTQWLEAKEEAEQVLGQARAKLESWKEGPYTVDAIQKKITETKQLAKDLRQWQTNVDVANDLALKLLRDYSADDTRKVHMITENINASWRSIHKRVSEREAALEETHRLLQQFPLDLEKFLAWLTEAETTANVLQDATRKERLLEDSKGVKELMKQWQDLQGEIEAHTDVYHNLDENSQKILRSLEGSDDAVLLQRRLDNMNFKWSELRKKSLNIRSHLEASSDQWKRLHLSLQELLVWLQLKDDELSRQAPIGGDFPAVQKQNDVHRAFKRELKTKEPVIMSTLETVRIFLTEQPLEGLEKLYQEPRELPPEERAQNVTRLLRKQAEEVNTEWEKLNLHSADWQRKIDETLERLQELQEATDELDLKLRQAEVIKGSWQPVGDLLIDSLQDHLEKVKALRGEIAPLKENVSHVNDLARQLTTLGIQLSPYNLSTLEDLNTRWKLLQVAVEDRVRQLHEAHRDFGPASQHFLSTSVQGPWERAISPNKVPYYINHETQTTCWDHPKMTELYQSLADLNNVRFSAYRTAMKLRRLQKALCLDLLSLSAACDALDQHNLKQNDQPMDILQIINCLTTIYDRLEQEHNNLVNVPLCVDMCLNWLLNVYDTGRTGRIRVLSFKTGIISLCKAHLEDKYRYLFKQVASSTGFCDQRRLGLLLHDSIQIPRQLGEVASFGGSNIEPSVRSCFQFANNKPEIEAALFLDWMRLEPQSMVWLPVLHRVAAAETAKHQAKCNICKECPIIGFRYRSLKHFNYDICQSCFFSGRVAKGHKMHYPMVEYCTPTTSGEDVRDFAKVLKNKFRTKRYFAKHPRMGYLPVQTVLEGDNMETNLQAEYDRLKQQHEHKGLSPLPSPPEMMPTSPQSPRDAELIAEAKLLRQHKGRLEARMQILEDHNKQLESQLHRLRQLLEQPQAEAKVNGTTVSSPSTSLQRSDSSQPMLLRVVGSQTSDSMGEEDLLSPPQDTSTGLEEVMEQLNNSFPSSRGHNVGSLFHMADDLGRAMESLVSVMTDEEGAE

SEQ ID NO: 1770 - DNA, 6182 bp, Homo sapiens
ggtccccggctgcccgcagcccgctcgcggcgcttctccggcccggctccttctccgctcgttaacgtcgccaaccccccccacccctcatatctctctccacccacccaaccgccccccgctccttctcgccgcctcgagtccgcttgggggaaaacttcaaagagccggatcgcaggctccctgcctactcccccaccggggatttcagactagacgcttgaagcaaagctgccatcccagaagacgacatgctctcagcaacccccctgtatgggaacgttcacagctggatgaacagcgagagggtccgcatgtgtggggcgagcgaagacaggaaaatccttgtaaatgatggtgacgcttcaaaagccagactggaactgagggaagagaatcccttgaaccacaacgtggtggatgcgagcacggcccataggatcgatggcctggcagcactgagcatggaccgcactggcctgatccgggaagggctgcgggtcccgggaaacatcgtctattctagcttgtgtggactgggctcagagaaaggtcgggaggctgccacaagcactctaggtggccttgggttttcttcggaaagaaatccagagatgcagttcaaaccgaatacacccgagacagtggaggcttctgccgtctctggaaaacccccaaatggcttcagtgctatatacaaaacaccgcctggaatacaaaaaagtgctgtagccacagcagaagcgctgggcttggacaggcctgccagcgacaaacagagccctctcaacatcaatggtgctagttatctgcggctgccctgggtcaatccttacatggagggtgccacgccagccatctaccctttcctcgactcgccaaataagtattcactgaacatgtacaaggccttgctacctcagcagtcctacagcttggcccagccgctgtattctccagtctgcaccaatggggagcgctttctctacctgccgccacctcactacgtcggtccccacatcccatcgtccttggcatcacccatgaggctctcgacaccttcggcctccccagccatcccgcctctcgtccattgcgcagacaaaagcctcccgtggaagatgggcgtcagccctgggaatcctgttgattcccacgcctatcctcacatccagaacagtaagcagcccagggttccctctgccaaggcggtcaccagtggcctgccgggggacacagctctcctgttgcccccctcgcctcggccgtcaccccgagtccaccttcccacccagcctgctgcagacacctactcggagttccacaagcactatgccaggatctccacctctccttcagttgccctgtcaaagccatacatgacagttagcagcgagttccccgcggccaggctctccaatggcaagtatcccaaggctccggaagggggcgaaggtgcccagccagtgcccgggcatgcccggaagacagcggttcaagacagaaaagacggcagctcacctcctctgttggagaagcagaccgttaccaaagacgtcacagataagccactagacttgtcttctaaagtggtggatgtagatgcttccaaagctgaccacatgaaaaagatggctcccacggtcctggttcacagcagggctggaagtggcttagtgctctccggaagtgagattccgaaagaaacactatctcctccaggaaatggttgtgctatctatagatctgaaatcatcagcactgctccctcatcctgggtggtgcccgggccaagtcctaacgaagagaacaatggcaaaagcatgtcgctgaaaaacaaggcattggactgggcgataccacagcagcggagttcatcatgcccgcgcatgggcggcaccgatgctgtcatcactaacgtttcagggtcagtgtcgagtgcaggccgcccagcctccgcatcacccgcccccaatgccaatgcagatggcaccaaaaccagcaggagctctgtagaaaccacaccatccgttattcagcacgtgggccagcccccggccactcctgccaagcacagtagcagcaccagcagcaagggcgccaaagccagcaacccagaaccgagtttcaaagcaaacgagaacggccttccaccaagctctatatttctgtctccaaatgaggcattcaggtccccaccaattccctaccccaggagttacctcccttacccagcccctgagggcattgctgtaagtcccctctccttacatggcaaaggacctgtctaccctcacccagttttgttacccaatggcagtctgtttcctgggcaccttgccccaaagcctgggctgccctatgggcttcccaccggccgtccagagtttgtgacctaccaagatgccctggggttgggcatggtgcatcccatgttgataccacacacgcccatagagattactaaagaggagaaaccagagaggagatcccggtcccatgagagagcccgttacgaggacccaaccctccggaatcggttttccgagattttggaaactagcagcaccaagttacatccagatgtccccaccgacaagaacctaaagccgaaccccaactggaatcaagggaagactgttgtcaaaagcgacaagcttgtctacgtagaccttctccgagaagaaccagatgctaaaactgacacaaacgtgtccaaacccagctttgcagcagagagtgttggccagagcgctgagccccccaagccctcagttgagccggccctgcagcagcaccgtgatttcatcgccctgagagaggagttggggcgcatcagtgacttccacgaaacttatactttcaaacagccagtcttcaccgtaagcaaggacagtgttctggcaggtaccaacaaagagaacctagggttgccagtctcgactccattcctggagccacctctggggagcgatggccctgctgtaacttttggtaaaacccaagaggatcccaaaccattttgtgtgggcagtgccccaccaagtgtggatgtgacccccacctataccaaagatggagctgatgaggctgaatcaaatgatggcaaagttctgaaaccgaagccatctaagctggcaaagagaatcgccaactcagcgggttacgtgggtgaccgattcaaatgtgtcactaccgaactgtatgcagattccagtcagctcagccgggagcaacgggcattgcagatggaaggattacaagaggacagtattttatgtctacccgctgcttactgtgagcgtgcaatgatgcgcttctcagagttggagatgaaagaaagagaaggtggccacccagcaaccaaagactccgagatgtgcaaattcagcccagccgactgggaaaggttgaaaggaaatcaggacaaaaagccaaagtcggtcaccctggaggaggccattgcagaacagaacgaaagtgagagatgcgagtatagtgttggaaacaagcaccgtgatccctttgaagccccagaggacaaagatcttcctgtggagaagtactttgtggagaggcagcctgtgagcgagcctcccgcagaccaggtggcctcggacatgcctcacagccccaccctccgggtggacaggaaacgcaaagtctcaggtgacagcagccacactgagaccactgcggaggaggtgccagaggaccctctgctgaaagccaaacgccgacgagtctctaaagggctccatcctaaaaaacaacgccacttgctgcaccttagagaacgatgggagcagcaggtgtcggcagcagatggcaaacctggccggcaaagcaggaaggaagtgacccaggccactcagcctgaggccattcctcaggggactaacatcactgaagagaaacctggcaggaaaagggcagaggccaaaggcaacagaagctggtcggaagagtctcttaaacccagtgacaatgaacaaggcttgcctgtgttctccggctctccgcccatgaagagtctttcatccaccagtgcaggcggcaaaaagcaggctcagccaagctgcgcaccagcctccaggccgcctgccaaacagcagaaaattaaagaaaaccagaagacagatgtgctgtgtgcagacgaagaagaggattgccaggctgcctccctgctgcagaaatacaccgacaacagcgagaagccatccgggaagagactgtgcaaaaccaaacacttgatccctcaggagtccaggcggggattgccactgacaggggaatactacgtggagaatgccgatggcaaggtgactgtccggagattcagaaagcggccggagcccagttcggactatgatctgtcaccagccaagcaggagccaaagcccttcgaccgcttgcagcaactgctaccagcctcccagtccacacagctgccatgctcaagttcccctcaggagaccacccagtctcgccctatgccgccggaagcacggagacttattgtcaataagaacgctggcgagacccttctgcagcgggcagccaggcttggctatgaggaagtggtcctgtactgcttagagaacaagatttgtgatgtaaatcatcgggacaacgcaggttactgcgccctgcatgaagcttgtgctaggggctggctcaacattgtgcgacacctccttgaatatggcgctgatgtcaactgtagtgcccaggatggaaccaggcctctgcacgatgctgttgagaacgatcacttggaaattgtccgactacttctctcttatggtgctgaccccaccttggctacgtactcaggtagaaccatcatgaaaatgacccacagtgaacttatggaaaagttcttaacagattatttaaatgacctccagggtcgcaatgatgatgacgccagtggcacttgggacttctatggcagctctgtttgtgaaccagatgatgaaagtggctatgatgttttagccaaccccccaggaccagaagaccaggatgatgatgacgatgcctatagcgatgtgtttgaatttgaattttcagagacccccctcttaccgtgttataacatccaagtatctgtggctcaggggccacgaaactggctactgctttcggatgtccttaagaaattgaaaatgtcctcccgcatatttcgctgcaattttccaaacgtggaaattgtcaccattgcagaggcagaattttatcggcaggtttctgcaagtctcttgttctcttgctccaaagacctggaagccttcaaccctgaaagtaaggagctgttagatctggtggaattcacgaacgaaattcagactctgctgggctcctctgtagagtggctccaccccagtgatctggcctcagacaactactggtgagcaagctggacccaccatgtacagtgtgttatagtgttaatccttgtgcatatgtgtcataatacaactatttctgtaaagaaaggacactattacatatgaaaatatctcttctttatataagagaaattactccagtcagaaggacttagaaacatgtttttttccttttaaacttttaagtcagtttttatgaagttgttataatgtttctttacttttcaatgcacacatgctttgggatacgtttgtttttacttggaacatttgtttcttttcttttttaaggagaaaaaaaaatgagtaaaaggagctccacactttgacttaatttcatacaaagctctgatgacaggccatgactgtagagtggtcagaactgtgtggttggtttgagggagcgaattcggggaaggcacttggtgatataactttgttttgtttacagagtacctgctcgggccaggtaaatgctattggatgtaatccagtagtgtgtaatataaattcaaaccatatccacacacaacaactaattgtatgaaacttttatatcctaatttaaaagctgtgaaattagttttcacgcatcaaaccggattgtttatatgtttaaacattttatgctcttatttaaagaagactttgagctatttttttctgtaccctgtaaaatattgaaaactaacataatatgttgaggttgcttggaaatgtacataaaactaaaattttctgaatcgtgaaaaaaaaaaaaaaaaaaaa

SEQ ID NO: 1771 - protein, 1721 aa, Homo sapiens
MLSATPLYGNVHSWMNSERVRMCGASEDRKILVNDGDASKARLELREENPLNHNVVDASTAHRIDGLAALSMDRTGLIREGLRVPGNIVYSSLCGLGSEKGREAATSTLGGLGFSSERNPEMQFKPNTPETVEASAVSGKPPNGFSAIYKTPPGIQKSAVATAEALGLDRPASDKQSPLNINGASYLRLPWVNPYMEGATPAIYPFLDSPNKYSLNMYKALLPQQSYSLAQPLYSPVCTNGERFLYLPPPHYVGPHIPSSLASPMRLSTPSASPAIPPLVHCADKSLPWKMGVSPGNPVDSHAYPHIQNSKQPRVPSAKAVTSGLPGDTALLLPPSPRPSPRVHLPTQPAADTYSEFHKHYARISTSPSVALSKPYMTVSSEFPAARLSNGKYPKAPEGGEGAQPVPGHARKTAVQDRKDGSSPPLLEKQTVTKDVTDKPLDLSSKVVDVDASKADHMKKMAPTVLVHSRAGSGLVLSGSEIPKETLSPPGNGCAIYRSEIISTAPSSWVVPGPSPNEENNGKSMSLKNKALDWAIPQQRSSSCPRMGGTDAVITNVSGSVSSAGRPASASPAPNANADGTKTSRSSVETTPSVIQHVGQPPATPAKHSSSTSSKGAKASNPEPSFKANENGLPPSSIFLSPNEAFRSPPIPYPRSYLPYPAPEGIAVSPLSLHGKGPVYPHPVLLPNGSLFPGHLAPKPGLPYGLPTGRPEFVTYQDALGLGMVHPMLIPHTPIEITKEEKPERRSRSHERARYEDPTLRNRFSEILETSSTKLHPDVPTDKNLKPNPNWNQGKTVVKSDKLVYVDLLREEPDAKTDTNVSKPSFAAESVGQSAEPPKPSVEPALQQHRDFIALREELGRISDFHETYTFKQPVFTVSKDSVLAGTNKENLGLPVSTPFLEPPLGSDGPAVTFGKTQEDPKPFCVGSAPPSVDVTPTYTKDGADEAESNDGKVLKPKPSKLAKRIANSAGYVGDRFKCVTTELYADSSQLSREQRALQMEGLQEDSILCLPAAYCERAMMRFSELEMKEREGGHPATKDSEMCKFSPADWERLKGNQDKKPKSVTLEEAIAEQNESERCEYSVGNKHRDPFEAPEDKDLPVEKYFVERQPVSEPPADQVASDMPHSPTLRVDRKRKVSGDSSHTETTAEEVPEDPLLKAKRRRVSKGLHPKKQRHLLHLRERWEQQVSAADGKPGRQSRKEVTQATQPEAIPQGTNITEEKPGRKRAEAKGNRSWSEESLKPSDNEQGLPVFSGSPPMKSLSSTSAGGKKQAQPSCAPASRPPAKQQKIKENQKTDVLCADEEEDCQAASLLQKYTDNSEKPSGKRLCKTKHLIPQESRRGLPLTGEYYVENADGKVTVRRFRKRPEPSSDYDLSPAKQEPKPFDRLQQLLPASQSTQLPCSSSPQETTQSRPMPPEARRLIVNKNAGETLLQRAARLGYEEVVLYCLENKICDVNHRDNAGYCALHEACARGWLNIVRHLLEYGADVNCSAQDGTRPLHDAVENDHLEIVRLLLSYGADPTLATYSGRTIMKMTHSELMEKFLTDYLNDLQGRNDDDASGTWDFYGSSVCEPDDESGYDVLANPPGPEDQDDDDDAYSDVFEFEFSETPLLPCYNIQVSVAQGPRNWLLLSDVLKKLKMSSRIFRCNFPNVEIVTIAEAEFYRQVSASLLFSCSKDLEAFNPESKELLDLVEFTNEIQTLLGSSVEWLHPSDLASDNYW

SEQ ID NO: 1772 - DNA, 3676 bp, Homo sapiens
ggtccccggctgcccgcagcccgctcgcggcgcttctccggcccggctccttctccgctcgttaacgtcgccaaccccccccacccctcatatctctctccacccacccaaccgccccccgctccttctcgccgcctcgagtccgcttgggggaaaacttcaaagagccggatcgcaggctccctgcctactcccccaccggggatttcagactagacgcttgaagcaaagctgccatcccagaagacgacatgctctcagcaacccccctgtatgggaacgttcacagctggatgaacagcgagagggtccgcatgtgtggggcgagcgaagacaggaaaatccttgtaaatgatggtgacgcttcaaaagccagactggaactgagggaagagaatcccttgaaccacaacgtggtggatgcgagcacggcccataggatcgatggcctggcagcactgagcatggaccgcactggcctgatccgggaagggctgcgggtcccgggaaacatcgtctattctagcttgtgtggactgggctcagagaaaggtcgggaggctgccacaagcactctaggtggccttgggttttcttcggaaagaaatccagagatgcagttcaaaccgaatacacccgagacagtggaggcttctgccgtctctggaaaacccccaaatggcttcagtgctatatacaaaacaccgcctggaatacaaaaaagtgctgtagccacagcagaagcgctgggcttggacaggcctgccagcgacaaacagagccctctcaacatcaatggtgctagttatctgcggctgccctgggtcaatccttacatggagggtgccacgccagccatctaccctttcctcgactcgccaaataagtattcactgaacatgtacaaggccttgctacctcagcagtcctacagcttggcccagccgctgtattctccagtctgcaccaatggggagcgctttctctacctgccgccacctcactacgtcggtccccacatcccatcgtccttggcatcacccatgaggctctcgacaccttcggcctccccagccatcccgcctctcgtccattgcgcagacaaaagcctcccgtggaagatgggcgtcagccctgggaatcctgttgattcccacgcctatcctcacatccagaacagtaagcagcccagggttccctctgccaaggcggtcaccagtggcctgccgggggacacagctctcctgttgcccccctcgcctcggccgtcaccccgagtccaccttcccacccagcctgctgcagacacctactcggagttccacaagcactatgccaggatctccacctctccttcagttgccctgtcaaagccatacatgacagttagcagcgagttccccgcggccaggctctccaatggcaagtatcccaaggctccggaagggggcgaaggtgcccagccagtgcccgggcatgcccggaagacagcggttcaagacagaaaagacggcagctcacctcctctgttggagaagcagaccgttaccaaagacgtcacagataagccactagacttgtcttctaaagtggtggatgtagatgcttccaaagctgaccacatgaaaaagatggctcccacggtcctggttcacagcagggctggaagtggcttagtgctctccggaagtgagattccgaaagaaacactatctcctccaggaaatggttgtgctatctatagatctgaaatcatcagcactgctccctcatcctgggtggtgcccgggccaagtcctaacgaagagaacaatggcaaaagcatgtcgctgaaaaacaaggcattggactgggcgataccacagcagcggagttcatcatgcccgcgcatgggcggcaccgatgctgtcatcactaacgtttcagggtcagtgtcgagtgcaggccgcccagcctccgcatcacccgcccccaatgccaatgcagatggcaccaaaaccagcaggagctctgtagaaaccacaccatccgttattcagcacgtgggccagcccccggccactcctgccaagcacagtagcagcaccagcagcaagggcgccaaagccagcaacccagaaccgagtttcaaagcaaacgagaacggccttccaccaagctctatatttctgtctccaaatgaggcattcaggtccccaccaattccctaccccaggagttacctcccttacccagcccctgagggcattgctgtaagtcccctctccttacatggcaaaggacctgtctaccctcacccagttttgttacccaatggcagtctgtttcctgggcaccttgccccaaagcctgggctgccctatgggcttcccaccggccgtccagagtttgtgacctaccaagatgccctggggttgggcatggtgcatcccatgttgataccacacacgcccatagagattactaaagaggagaaaccagagaggagatcccggtcccatgagagagcccgttacgaggacccaaccctccggaatcggttttccgagattttggaaactagcagcaccaagttacatccagatgtccccaccgacaagaacctaaagccgaaccccaactggaatcaagggaagactgttgtcaaaagcgacaagcttgtctacgtagaccttctccgagaagaaccagatgctaaaactgacacaaacgtgtccaaacccagctttgcagcagagagtgttggccagagcgctgagccccccaagccctcagttgagccggccctgcagcagcaccgtgatttcatcgccctgagagaggagttggggcgcatcagtgacttccacgaaacttatactttcaaacagccagtcttcaccgtaagcaaggacagtgttctggcaggtaccaacaaagagaacctagggttgccagtctcgactccattcctggagccacctctggggagcgatggccctgctgtaacttttggtaaaacccaagaggatcccaaaccattttgtgtgggcagtgccccaccaagtgtggatgtgacccccacctataccaaagatggagctgatgaggctgaatcaaatgatggcaaagttctgaaaccgaagccatctaagctggcaaagagaatcgccaactcagcgggttacgtgggtgaccgattcaaatgtgtcactaccgaactgtatgcagattccagtcagctcagccgggagcaacgggcattgcaggtgagcccccccacctgaatttcagttactttaccagttgtcagttttttaatgtgtaaacaggattgggggagtatggtagggcagggcaccaggcagatttggtgaatgaagcttgtggtaatttgaatatatgcaatgtggccagtaagagaacgtgagtggtagcactgaggcgtgtctggatgctttaagttattctgtagattataagggaactccactcaattgctgataaccgatgttttaattattgtgaagggtatctaaagactgcatgacgtttacctatcaattgctttgatttctctgcctgtaagatagcaaatatacctagaagtgctgcttagaatgccttacttgatacctggtagagatgtgtagcagccgcatgtctgtgggattcatgcaaatttttcaccaaaaaa

SEQ ID NO: 1773 - protein, 1004 aa, Homo sapiens
MLSATPLYGNVHSWMNSERVRMCGASEDRKILVNDGDASKARLELREENPLNHNVVDASTAHRIDGLAALSMDRTGLIREGLRVPGNIVYSSLCGLGSEKGREAATSTLGGLGFSSERNPEMQFKPNTPETVEASAVSGKPPNGFSAIYKTPPGIQKSAVATAEALGLDRPASDKQSPLNINGASYLRLPWVNPYMEGATPAIYPFLDSPNKYSLNMYKALLPQQSYSLAQPLYSPVCTNGERFLYLPPPHYVGPHIPSSLASPMRLSTPSASPAIPPLVHCADKSLPWKMGVSPGNPVDSHAYPHIQNSKQPRVPSAKAVTSGLPGDTALLLPPSPRPSPRVHLPTQPAADTYSEFHKHYARISTSPSVALSKPYMTVSSEFPAARLSNGKYPKAPEGGEGAQPVPGHARKTAVQDRKDGSSPPLLEKQTVTKDVTDKPLDLSSKVVDVDASKADHMKKMAPTVLVHSRAGSGLVLSGSEIPKETLSPPGNGCAIYRSEIISTAPSSWVVPGPSPNEENNGKSMSLKNKALDWAIPQQRSSSCPRMGGTDAVITNVSGSVSSAGRPASASPAPNANADGTKTSRSSVETTPSVIQHVGQPPATPAKHSSSTSSKGAKASNPEPSFKANENGLPPSSIFLSPNEAFRSPPIPYPRSYLPYPAPEGIAVSPLSLHGKGPVYPHPVLLPNGSLFPGHLAPKPGLPYGLPTGRPEFVTYQDALGLGMVHPMLIPHTPIEITKEEKPERRSRSHERARYEDPTLRNRFSEILETSSTKLHPDVPTDKNLKPNPNWNQGKTVVKSDKLVYVDLLREEPDAKTDTNVSKPSFAAESVGQSAEPPKPSVEPALQQHRDFIALREELGRISDFHETYTFKQPVFTVSKDSVLAGTNKENLGLPVSTPFLEPPLGSDGPAVTFGKTQEDPKPFCVGSAPPSVDVTPTYTKDGADEAESNDGKVLKPKPSKLAKRIANSAGYVGDRFKCVTTELYADSSQLSREQRALQVSPPT

SEQ ID NO: 1774 - DNA, 1215 bp, Homo sapiens
atgtacttgatgattaaaatccgctccagcgtttcgaggaggggcgacactacaggccacgctttcaccagggacggccgccccatcgtccccgacctgggtcagcgtggcccgcagcggggaggggggcctcgggagggagcgccccccggcagcccgggaacgcccgcgcggcagccccggcccagcctgcggctccgcggtcctaccgccgggggcagcgccgcctgcgcagccgggccaagatggcggccggtgcgcagccgcccgcgtccgggggagaagcggcgacagccccgtgtcagccggggcgcgcgctgtcccagggcgcgaagccgctcctcctttacccacggggaccccgagggccagtcctgccacttcgtcctgacaggccccctgcccggagccctacctggacgggccccggctgggatcgggacggccaggaggatggccgcctggctagacatggtggacaggggaccagcggggaccactgggtgccagccccacacccaagccatttcttccagccctgggacacctctggtgcgcaattcgacattagtaaccgcagtaaaggcagtaaaggctacagaatatgtgcggttcctcacatttgctgtgacatcggtatgcgcgcagtcgttagctcgggtggccagggagcctcagctgcacccacctcctgcccggtccagtcccgatgcccctcgcgggaagcgcggtaaccttaaacggcacgacaggcggctggccgagctggttcggcggtgcgccctcgaggccacctggtcagtaaaggcgcttctgtgctgtacaagcaagacagcagttgtagcacccgaccctcgggctccagtggcccacggtgcaggcgggcaggggaagagtggctctgcgcgcagccccgggtgccctaaggtcacctcctcatcccctgccgctgctgtgccgccccagccctacccccgccccgaaaaaacccggccgcgcgggccagagcctaagctgcacgggctcctgaccccggctcgccaggctcagcccagtccgaccccgcctcggcttcacaaaggccacgtgcggccagggccgacaaggaacgaccacgactctcagatctttaattacgctaggagtccctacccttccccccaacccatcgccggcttccagccctttaatcaatttcacgatattaaatattaa

SEQ ID NO: 1775 - protein, 404 aa, Homo sapiens [sequence omitted]

SEQ ID NO: 1776 - DNA, 3122 bp, Homo sapiens
cgctgcggccgctatcccctccggaccatggccgacgacgacgtgctgttcgaggatgtgtacgagctgtgcgaggtgatcggaaagggtcccttcagtgttgtacgacgatgtatcaacagagaaactgggcaacaatttgctgtaaaaattgttgatgtagccaagttcacatcaagtccagggttaagtacagaagatctaaagcgggaagccagtatctgtcatatgctgaaacatccacacattgtagagttattggagacatatagctcagatggaatgctttacatggttttcgaatttatggatggagcagatctgtgttttgaaatcgtaaagcgagctgacgctggttttgtgtacagtgaagctgtagccagccattatatgagacagatactggaagctctacgctactgccatgataataacataattcacagggatgtgaagccccactgtgttctccttgcctcaaaagaaaactcggcacctgttaaacttggaggctttggggtagctattcaattaggggagtctggacttgtagctggaggacgtgttggaacacctcattttatggcaccagaagtggtcaaaagagagccttacggaaagcctgtagacgtctgggggtgcggtgtgatcctttttatcctgctcagtggttgtttgcctttttacggaaccaaggaaagattgtttgaaggcattattaaaggaaaatataagatgaatccaaggcagtggagccatatctctgaaagtgccaaagacctagtacgtcgcatgctgatgctggatccagctgaaaggatcactgtttatgaagcactgaatcacccatggcttaaggagcgggatcgttacgcctacaagattcatcttccagaaacagtagagcagctgaggaaattcaatgcaaggaggaaactaaagggtgcagtactagccgctgtgtcaagtcacaaattcaactcattctatggggatccccctgaagagttaccagatttctccgaagaccctacctcctcagggcttctagcagcagaaagagcagtctcacaggtgctggacagcctggaagagattcatgcgcttacagactgcagtgaaaaggacctagattttctacacagtgttttccaggatcagcatcttcacacactactagatctgtatgacaaaattaacacaaagtcttcaccacaaatcaggaatcctccaagcgatgcagtacagagagccaaagaggtattggaagaaatttcatgttaccctgagaataacgacgcaaaggaactaaagcgtattttaacacaacctcatttcatggccttacttcagactcacgacgtagtggcacatgaagtttacagtgatgaagcattgagggtcacacctcctcccacctctccctatttaaacggcgattctccagaaagtgctaacggaggcatggatatggagaatgtgaccagagttcggctggtacagtttcaaaagaacacagatgaaccaatgggaatcactttaaaaatgaatgaactaaatcattgtattgttgcaagaattatgcatgggggcatgattcacaggcaaggtacacttcatgttggtgatgaaattcgagaaatcaatggcatcagtgtggctaaccaaacagtggaacaactgcaaaaaatgcttagggaaatgcgggggagtattaccttcaagattgtgccaagttaccgcactcagtcttcgtcctgtgagagagattccccttccacttccagacagtccccagctaatggtcatagcagcactaacaattctgtttcggacttgccatcaactacccaaccaaaaggacgacagatctatgtaagagcacaatttgaatatgatccagccaaggatgacctcatcccctgtaaagaagctggcattcgattcagagttggtgacatcatccagattattagtaaggatgatcataattggtggcagggtaaactggaaaactccaaaaatggaactgcaggtctcattccttcttctgaacttcaggaatggcgagtagcttgcattgccatggagaagaccaaacaggagcagcaggccagctgtacttggtttggcaagaaaaagaagcagtacaaagataaatatttggcaaagcacaatgcagatcttgtcacatatgaagaagtagtaaaactgccagcattcaagaggaaaacactagtcttattaggcgcacatggtgttgggagaagacacataaaaaacactctcatcacaaagcacccagaccggtttgcgtaccctattccacatacaaccagacctccaaagagagacgaagaaaatggaaagaattattactttgtatctcatgaccaaatgatgcaagacatctctaataacgagtacttggagtacggcagccacgaggatgcgatgtatgggacaaaactggagaccatccggaagatccacgagcaggggctgattgcaatactggacgtggagcctcaggcactgaaggtcctgagaactgcagagtttgctccttttgttgttttcattgctgcaccaactattactccaggtttaaatgaggatgaatctcttcagcgtctgcagaaggagtctgacatcttacagagaacatatgcacactacttcgatctcacaattatcaacaatgaaattgatgagacaatcagacatctggaggaagctgttgagctcgtgtgcacagccccacagtgggtccctgtctcctgggtctattaggcctctccccagatatctgagcataactgggagcacctcatttgtggaaaagcctctttgttatcggccttgtgtcagcaggtcatggtccctagagactacctagttgtagtgtgacctacatttataattattgtcatgtccgaatagataggaggagaaaaacaattacacactaatttaaagagacagtatcttttttaatcagttctcctaaactttaataaaatgtatctttaaatgtatgtattattcaatcctttggaatgttatatttttggaaatcatagctttttatttccaaggcccctaaaactgcacaaaataga

SEQ ID NO: 1777 - protein, 921 aa, Homo sapiens
MADDDVLFEDVYELCEVIGKGPFSVVRRCINRETGQQFAVKIVDVAKFTSSPGLSTEDLKREASICHMLKHPHIVELLETYSSDGMLYMVFEFMDGADLCFEIVKRADAGFVYSEAVASHYMRQILEALRYCHDNNIIHRDVKPHCVLLASKENSAPVKLGGFGVAIQLGESGLVAGGRVGTPHFMAPEVVKREPYGKPVDVWGCGVILFILLSGCLPFYGTKERLFEGIIKGKYKMNPRQWSHISESAKDLVRRMLMLDPAERITVYEALNHPWLKERDRYAYKIHLPETVEQLRKFNARRKLKGAVLAAVSSHKFNSFYGDPPEELPDFSEDPTSSGLLAAERAVSQVLDSLEEIHALTDCSEKDLDFLHSVFQDQHLHTLLDLYDKINTKSSPQIRNPPSDAVQRAKEVLEEISCYPENNDAKELKRILTQPHFMALLQTHDVVAHEVYSDEALRVTPPPTSPYLNGDSPESANGGMDMENVTRVRLVQFQKNTDEPMGITLKMNELNHCIVARIMHGGMIHRQGTLHVGDEIREINGISVANQTVEQLQKMLREMRGSITFKIVPSYRTQSSSCERDSPSTSRQSPANGHSSTNNSVSDLPSTTQPKGRQIYVRAQFEYDPAKDDLIPCKEAGIRFRVGDIIQIISKDDHNWWQGKLENSKNGTAGLIPSSELQEWRVACIAMEKTKQEQQASCTWFGKKKKQYKDKYLAKHNADLVTYEEVVKLPAFKRKTLVLLGAHGVGRRHIKNTLITKHPDRFAYPIPHTTRPPKRDEENGKNYYFVSHDQMMQDISNNEYLEYGSHEDAMYGTKLETIRKIHEQGLIAILDVEPQALKVLRTAEFAPFVVFIAAPTITPGLNEDESLQRLQKESDILQRTYAHYFDLTIINNEIDETIRHLEEAVELVCTAPQWVPVSWVY

SEQ ID NO: 1778 - DNA, 1862 bp, Homo sapiens
aaccaattgcaccacgaccggatggaagagcccagctgacacaaccaagacgagtctcagtgtctagggaagcttggggttctgctccttttacttcaggcgaacctgaactttaatgcaattttgaagcatgccctgaatagattcagtcattatcaagtcaaactaaaaacggtgaaaggttgcgactattaccaaatagaagacaatgagaagtcataccataacaatgacgacaacttcagtcagcagctggccttactcctcccacagaatgcgctttataaccaatcatagcgaccaaccgccacaaaacttctcagcaacaccaaatgttactacctgtcccatggatgaaaaattgctatctactgtgttaaccacatcctactctgttattttcatcgtgggactggttgggaacataatcgccctctatgtatttctgggtattcaccgtaaaagaaattccattcaaatttatctacttaacgtagccattgcagacctcctactcatcttctgcctccctttccgaataatgtatcatattaaccaaaacaagtggacactaggtgtgattctgtgcaaggttgtgggaacactgttttatatgaacatgtacattagcattattttgcttggattcatcagtttggatcgctatataaaaattaatcggtctatacagcaacggaaggcaataacaaccaaacaaagtatttatgtctgttgtatagtatggatgcttgctcttggtggattcctaactatgattattttaacacttaagaaaggagggcataattccacaatgtgtttccattacagagataagcataacgcaaaaggagaagccatttttaacttcattcttgtggtaatgttctggctaattttcttactaataatcctttcatatattaagattgggaagaatctattgaggatttctaaaaggaggtcaaaatttcctaattctggtaaatatgccactacagctcgtaactcctttattgtacttatcatttttactatatgttttgttccctatcatgcctttcgattcatctacatttcttcacagctaaatgtatcatcttgctactggaaagaaattgttcacaaaaccaatgagatcatgctggttctctcatctttcaatagttgcttagatccagtcatgtatttcctgatgtccagtaacattcgcaaaataatgtgccaacttctttttagacgatttcaaggtgaaccaagtaggagtgaaagcacttcagaatttaaaccaggatactccctgcatgatacatctgtggcagtgaaaatacagtctagttctaaaagtacttgaggtaaacatactaaaatgaattatataatgcagcctcttaattctttgaagaactaaaaaattaggaaacaaagttctagcatttacaaaactcagatctcaaagctctgcttgtatttgtgatatttcatttgcttaactgtaaaccatttcaaggtactaacttttaaatctgtatgtaaaatcttttcaaaatacatttttaagctaatactcttaacatagattatgaagttaagtgaaatttatggctctaacagcaaaataattaaagtgccatagtttctcaagtgactaaagtagttattaaaatcaagcacttgatactaatttgaagtgtgtttaaaagtaaatgatttgggaactgacaatgtgtcagaaaatatatgttcatttatcattttaaaatcttgtataatttgccactgtattcatttatgcctaaatctctataacagatgaaaagataattaataaaatcctaattaaaaaatgagaaaaaaaaaaa

SEQ ID NO: 1779 - protein, 381 aa, Homo sapiens
MRSHTITMTTTSVSSWPYSSHRMRFITNHSDQPPQNFSATPNVTTCPMDEKLLSTVLTTSYSVIFIVGLVGNIIALYVFLGIHRKRNSIQIYLLNVAIADLLLIFCLPFRIMYHINQNKWTLGVILCKVVGTLFYMNMYISIILLGFISLDRYIKINRSIQQRKAITTKQSIYVCCIVWMLALGGFLTMIILTLKKGGHNSTMCFHYRDKHNAKGEAIFNFILVVMFWLIFLLIILSYIKIGKNLLRISKRRSKFPNSGKYATTARNSFIVLIIFTICFVPYHAFRFIYISSQLNVSSCYWKEIVHKTNEIMLVLSSFNSCLDPVMYFLMSSNIRKIMCQLLFRRFQGEPSRSESTSEFKPGYSLHDTSVAVKIQSSSKST

SEQ ID NO: 1780 - DNA, 1440 bp, Homo sapiens
agttggtgtcatgcaagaatctattcacactgactaaagatattggaagagtgaagatcagagaattttaagtctgaaatttggcatcactgccctgaacaatataaccttagttggcataaactactcatacagacaaaggcattatccatcacaataagtaactttttgtctttatttcaaccggacaatcgtgattagaaaagctcctgtgacaaaattcaagaaaacctgacataaatgaacaacaatacaacatgtattcaaccatctatgatctcttccatggctttaccaatcatttacatcctcctttgtattgttggtgtttttggaaacactctctctcaatggatatttttaacaaaaataggtaaaaaaacatcaacgcacatctacctgtcacaccttgtgactgcaaacttacttgtgtgcagtgccatgcctttcatgagtatctatttcctgaaaggtttccaatgggaatatcaatctgctcaatgcagagtggtcaattttctgggaactctatccatgcatgcaagtatgtttgtcagtctcttaattttaagttggattgccataagccgctatgctaccttaatgcaaaaggattcctcgcaagagactacttcatgctatgagaaaatattttatggccatttactgaaaaaatttcgccagcccaactttgctagaaaactatgcatttacatatggggagttgtactgggcataatcattccagttaccgtatactactcagtcatagaggctacagaaggagaagagagcctatgctacaatcggcagatggaactaggagccatgatctctcagattgcaggtctcattggaaccacatttattggattttcctttttagtagtactaacatcatactactcttttgtaagccatctgagaaaaataagaacctgtacgtccattatggagaaagatttgacttacagttctgtgaaaagacatcttttggtcatccagattctactaatagtttgcttccttccttatagtatttttaaacccattttttatgttctacaccaaagagataactgtcagcaattgaattatttaatagaaacaaaaaacattctcacctgtcttgcttcggccagaagtagcacagaccccattatatttcttttattagacaaaacattcaagaagacactatataatctctttacaaagtctaattcagcacatatgcaatcatatggttgacttttgaatggaaaaccccacaatattaagaaaagcattcatgtgactttattagggacactaaactacatcattaacatgtcacagcttggttgacaataatcaccaagaaaatctctttggtttttaaaaataaataaacatatattcataaaactcgaaaaaaaaaaaaaaaaaaaaaaaaaaaaa

SEQ ID NO: 1781 - protein, 336 aa, Homo sapiens
MNNNTTCIQPSMISSMALPIIYILLCIVGVFGNTLSQWIFLTKIGKKTSTHIYLSHLVTANLLVCSAMPFMSIYFLKGFQWEYQSAQCRVVNFLGTLSMHASMFVSLLILSWIAISRYATLMQKDSSQETTSCYEKIFYGHLLKKFRQPNFARKLCIYIWGVVLGIIIPVTVYYSVIEATEGEESLCYNRQMELGAMISQIAGLIGTTFIGFSFLVVLTSYYSFVSHLRKIRTCTSIMEKDLTYSSVKRHLLVIQILLIVCFLPYSIFKPIFYVLHQRDNCQQLNYLIETKNILTCLASARSSTDPIIFLLLDKTFKKTLYNLFTKSNSAHMQSYG

SEQ ID NO: 1782 - DNA, 1163 bp, Homo sapiens
atgagtcatcagcaaagcctgagtcctgtcctctcactctcctccctggctagcatgagcttcaccacttgctccgccttcaccaactactggtccccgggttctgtccaggtgcccagctatggcacccagcctgtcagccacgcagccagcgtctatgcaggcctggggggctctggttcccggatctccgtgtcccacttcaccagcttctggggtggcatggggtccgggggcctggccacggggatggccgggggtctggcaggaatgggaggcatccagaacgagaaggagaccatgcaaagcctgagagaccgcctggcctcctacctggacagggtgaggggcctggagaccgagaattggaagctggagagcaaaatccaggagcacctggagaagaagggaccccaggtcagagactggagccattacttcaagaccatggaggacctgagggctcagatctttgcaaatactgtggacaacggccgcatcgtttgacagatcgacaatgcccgtcttgctgctgatgactttagagttaagtatgagacagagctggccatgcaccagtctgtggagagcgacatccatgggctctgcaagataattgatggcacaaatgtcactcggctgtagctggagacagagatcgaggctctcaagaaggagctgctcttcatgaagaagaacaacgaagaggaagcaaaaggcctacaagcccagattgccagctctgggttgaccgtggaggtagatgcccccaaatctcagaccttgccaagaacatggcagactcccgggcccaatatgacaagcttgctcggaagaaccgagaggagctggacaagtactggtctcagcaaatcgaggagagcaccagagtggttaccacacagtccgccaaggttggagctgctgagatgacgctcacagagctgagacatagagtccagtccttagagatcgacctggactccacgagaaatctgaaggccagcttggagaacagcctgagggaggtggaggcccgctatgccctgcagatggagccatcattgttattttcaaagattatctttgggagagtttgggagatatcatacttacatgtctttgagggcaagcaagttgttgtatgctggtttgcttattaa

SEQ ID NO: 1783 - DNA, 783 bp, Homo sapiens
atgttcgaggtgcccctggtccagggctccatcctgaagaaggtgttggaggcactcaaggacctcatcaacgaggcctgctgggacatcagctcgagcggcgtgaacctgcagagcatggattcgtccacgtctccttgctgcagttcaccctgccgtctgagggctttgacacttaccgctgtgactgcaacctggccatgggcgtgaacctcactattatgtccaaaatactaaaatgtgctggcaatgaagatatcgttacactaaggattgaagataatgtgaataccttggtgctagtatttgaagcttcaaatcaggagaaggtttcagactatgaaattaagttgatggatttggatgttgaacaacttggaattgcagaacaagagtaccactatgtagtaaagatgctttctggtgaatttgcaagtatatgctgagatctcagccatattggagatgctgttgtaatttccggtgtaaaagatggaattatattttctgcaagtggagaccttggaaatagaaaacaaattgtcacagacaagtactgtcgataaagaggaggaagctgttaccatggagatgaatgaaccagttcaactaacttttgcactgaggtacctgaacttccttacaaaagccactccactctcttcaatggtgacactcaatatgtctgcagacatacaccttgttgtagactataaaattgctgatgtgggacacttaaagtactacttggctcccaagatggaggatgaagaaggaccttag

SEQ ID NO: 1784 - DNA, 4314 bp, Homo sapiens
cgagatcccggggagccagcttgctgggagagcgggacggtccggagcaagcccagaggcagaggaggcgacagagggaaaaagggccgagctagccgctccagtgctgtacaggagccgaagggacgcaccacgccagccccagcccggctccagcgacagccaacgcctcttgcagcgcggcggcttcgaagccgccgcccggagctgccctttcctcttcggtgaagtttttaaaagctgctaaagactcggaggaagcaaggaaagtgcctggtaggactgacggctgcctttgtcctcctcctctccaccccgcctccccccaccctgccttccccccctcccccgtcttctctcccgcagctgcctcagtcggctactctcagccaacccccctcaccacccttctccccacccgcccccccgcccccgtcggcccagcgctgccagcccgagtttgcagagaggtaactccctttggctgcgagcgggcgagctagctgcacattgcaaagaaggctcttaggagccaggcgactggggagcggcttcagcactgcagccacgacccgcctggttaggctgcacgcggagagaaccctctgttttcccccactctctctccacctcctcctgccttccccaccccgagtgcggagccagagatcaaaagatgaaaaggcagtcaggtcttcagtagccaaaaaacaaaacaaacaaaaacaaaaaagccgaaataaaagaaaaagataataactcagttcttatttgcacctacttcagtggacactgaatttggaaggtggaggattttgtttttttcttttaagatctgggcatcttttgaatctacccttcaagtattaagagacagactgtgagcctagcagggcagatcttgtccaccgtgtgtcttcttctgcacgagactttgaggctgtcagagcgctttttgcgtggttgctcccgcaagtttccttctctggagcttcccgcaggtgggcagctagctgcagcgactaccgcatcatcacagcctgttgaactcttctgagcaagagaaggggaggcggggtaagggaagtaggtggaagattcagccaagctcaaggatggaagtgcagttagggctgggaagggtctaccctcggccgccgtccaagacctaccgaggagctttccagaatctgttccagagcgtgcgcgaagtgatccagaacccgggccccaggcacccagaggccgcgagcgcagcacctcccggcgccagtttgctgctgctgcagcagcagcagcagcagcagcagcagcagcagcagcagcagcagcagcagcagcagcagcagcagcaagagactagccccaggcagcagcagcagcagcagggtgaggatggttctccccaagcccatcgtagaggccccacaggctacctggtcctggatgaggaacagcaaccttcacagccgcagtcggccctggagtgccaccccgagagaggttgcgtcccagagcctggagccgccgtggccgccagcaaggggctgccgcagcagctgccagcacctccggacgaggatgactcagctgccccatccacgttgtccctgctgggccccactttccccggcttaagcagctgctccgctgaccttaaagacatcctgagcgaggccagcaccatgcaactccttcagcaacagcagcaggaagcagtatccgaaggcagcagcagcgggagagcgagggaggcctcgggggctcccacttcctccaaggacaattacttagggggcacttcgaccatttctgacaacgccaaggagttgtgtaaggcagtgtcggtgtccatgggcctgggtgtggaggcgttggagcatctgagtccaggggaacagcttcggggggattgcatgtacgccccacttttgggagttccacccgctgtgcgtcccactccttgtgccccattggccgaatgcaaaggttctctgctagacgacagcgcaggcaagagcactgaagatactgctgagtattcccctttcaagggaggttacaccaaagggctagaaggcgagagcctaggctgctctggcagcgctgcagcagggagctccgggacacttgaactgccgtctaccctgtctctctacaagtccggagcactggacgaggcagctgcgtaccagagtcgcgactactacaactttccactggctctggccggaccgccgccccctccgccgcctccccatccccacgctcgcatcaagctggagaacccgctggactacggcagcgcctgggcggctgcggcggcgcagtgccgctatggggacctggcgagcctgcatggcgcgggtgcagcgggacccggttctgggtcaccctcagccgccgcttcctcatcctggcacactctcttcacagccgaagaaggccagttgtatggaccgtgtggtggtggtgggggtggtggcggcggcggcggcggcggcggcggcggcggcggcggcggcggcggcggcgaggcgggagctgtagccccctacggctacactcggccccctcaggggctggcgggccaggaaagcgacttcaccgcacctgatgtgtggtaccctggcggcatggtgagcagagtgccctatcccagtcccacttgtgtcaaaagcgaaatgggcccctggatggatagctactccggaccttacggggacatgcgtttggagactgccagggaccatgttttgcccattgactattactttccaccccagaagacctgcctgatctgtggagatgaagcttctgggtgtcactatggagctctcacatgtggaagctgcaaggtcttcttcaaaagagccgctgaagggaaacagaagtacctgtgcgccagcagaaatgattgcactattgataaattccgaaggaaaaattgtccatcttgtcgtcttcggaaatgttatgaagcagggatgactctgggagcccggaagctgaagaaacttggtaatctgaaactacaggaggaaggagaggcttccagcaccaccagccccactgaggagacaacccagaagctgacagtgtcacacattgaaggctatgaatgtcagcccatctttctgaatgtcctggaagccattgagccaggtgtagtgtgtgctggacacgacaacaaccagcccgactcctttgcagccttgctctctagcctcaatgaactgggagagagacagcttgtacacgtggtcaagtgggccaaggccttgcctggcttccgcaacttacacgtggacgaccagatggctgtcattcagtactcctggatggggctcatggtgtttgccatgggctggcgatccttcaccaatgtcaactccaggatgctctacttcgcccctgatctggttttcaatgagtaccgcatgcacaagtcccggatgtacagccagtgtgtccgaatgaggcacctctctcaagagtttggatggctccaaatcaccccccaggaattcctgtgcatgaaagcactgctactcttcagcattattccagtggatgggctgaaaaatcaaaaattctttgatgaacttcgaatgaactacatcaaggaactcgatcgtatcattgcatgcaaaagaaaaaatcccacatcctgctcaagacgcttctaccagctcaccaagctcctggactccgtgcagcctattgcgagagagctgcatcagttcacttttgacctgctaatcaagtcacacatggtgagcgtggactttccggaaatgatggcagagatcatctctgtgcaagtgcccaagatcctttctgggaaagtcaagcccatctatttccacacccagtgaagcattggaaaccctatttccccaccccagctcatgccccctttcagatgtcttctgcctgttataactctgcactactcctctgcagtgccttggggaatttcctctattgatgtacagtctgtcatgaacatgttcctgaattctatttgctgggctttttttttctctttctctcctttctttttcttcttccctccctatctaaccctcccatggcaccttcagactttgcttcccattgtggctcctatctgtgttttgaatggtgttgtatgcctttaaatctgtgatgatcctcatatggcccagtgtcaagttgtgcttgtttacagcactactctgtgccagccacacaaacgtttacttatcttatgccacgggaagtttagagagctaagattatctggggaaatcaaaacaaaaacaagcaaac

SEQ ID NO: 1785 - protein, 920 aa, Homo sapiens
MEVQLGLGRVYPRPPSKTYRGAFQNLFQSVREVIQNPGPRHPEAASAAPPGASLLLLQQQQQQQQQQQQQQQQQQQQQQQETSPRQQQQQQGEDGSPQAHRRGPTGYLVLDEEQQPSQPQSALECHPERGCVPEPGAAVAASKGLPQQLPAPPDEDDSAAPSTLSLLGPTFPGLSSCSADLKDILSEASTMQLLQQQQQEAVSEGSSSGRAREASGAPTSSKDNYLGGTSTISDNAKELCKAVSVSMGLGVEALEHLSPGEQLRGDCMYAPLLGVPPAVRPTPCAPLAECKGSLLDDSAGKSTEDTAEYSPFKGGYTKGLEGESLGCSGSAAAGSSGTLELPSTLSLYKSGALDEAAAYQSRDYYNFPLALAGPPPPPPPPHPHARIKLENPLDYGSAWAAAAAQCRYGDLASLHGAGAAGPGSGSPSAAASSSWHTLFTAEEGQLYGPCGGGGGGGGGGGGGGGGGGGGGGGEAGAVAPYGYTRPPQGLAGQESDFTAPDVWYPGGMVSRVPYPSPTCVKSEMGPWMDSYSGPYGDMRLETARDHVLPIDYYFPPQKTCLICGDEASGCHYGALTCGSCKVFFKRAAEGKQKYLCASRNDCTIDKFRRKNCPSCRLRKCYEAGMTLGARKLKKLGNLKLQEEGEASSTTSPTEETTQKLTVSHIEGYECQPIFLNVLEAIEPGVVCAGHDNNQPDSFAALLSSLNELGERQLVHVVKWAKALPGFRNLHVDDQMAVIQYSWMGLMVFAMGWRSFTNVNSRMLYFAPDLVFNEYRMHKSRMYSQCVRMRHLSQEFGWLQITPQEFLCMKALLLFSIIPVDGLKNQKFFDELRMNYIKELDRIIACKRKNPTSCSRRFYQLTKLLDSVQPIARELHQFTFDLLIKSHMVSVDFPEMMAEIISVQVPKILSGKVKPIYFHTQ

SEQ ID NO: 1786 - DNA, 1765 bp, Homo sapiens
gctgcgagcagagagggattcctcggaggtcatctgttccatcttcttgcctatgcaaatgcctgcctgaagctgctggaggctggctttgtaccggactttgtacagggaaccagggaaacgaatgcagagtgctcctgacattgcctgtcactttttcccatgatactctggcttcacagtttggagactgccagggaccatgttttgcccattgactattactttccaccccagaagacctgcctgatctgtggagatgaagcttctgggtgtcactatggagctctcacatgtggaagctgcaaggtcttcttcaaaagagccgctgaagggaaacagaagtacctgtgcgccagcagaaatgattgcactattgataaattccgaaggaaaaattgtccatcttgtcgtcttcggaaatgttatgaagcagggatgactctgggagcccggaagctgaagaaacttggtaatctgaaactacaggaggaaggagaggcttccagcaccaccagccccactgaggagacaacccagaagctgacagtgtcacacattgaaggctatgaatgtcagcccatctttctgaatgtcctggaagccattgagccaggtgtagtgtgtgctggacacgacaacaaccagcccgactcctttgcagccttgctctctagcctcaatgaactgggagagagacagcttgtacacgtggtcaagtgggccaaggccttgcctggcttccgcaacttacacgtggacgaccagatggctgtcattcagtactcctggatggggctcatggtgtttgccatgggctggcgatccttcaccaatgtcaactccaggatgctctacttcgcccctgatctggttttcaatgagtaccgcatgcacaagtcccggatgtacagccagtgtgtccgaatgaggcacctctctcaagagtttggatggctccaaatcaccccccaggaattcctgtgcatgaaagcactgctactcttcagcattattccagtggatgggctgaaaaatcaaaaattctttgatgaacttcgaatgaactacatcaaggaactcgatcgtatcattgcatgcaaaagaaaaaatcccacatcctgctcaagacgcttctaccagctcaccaagctcctggactccgtgcagcctattgcgagagagctgcatcagttcacttttgacctgctaatcaagtcacacatggtgagcgtggactttccggaaatgatggcagagatcatctctgtgcaagtgcccaagatcctttctgggaaagtcaagcccatctatttccacacccagtgaagcattggaaaccctatttccccaccccagctcatgccccctttcagatgtcttctgcctgttataactctgcactactcctctgcagtgccttggggaatttcctctattgatgtacagtctgtcatgaacatgttcctgaattctatttgctgggctttttttttctctttctctcctttctttttcttcttccctccctatctaaccctcccatggcaccttcagactttgcttcccattgtggctcctatctgtgttttgaatggtgttgtatgcctttaaatctgtgatgatcctcatatggcccagtgtcaagttgtgcttgtttacagcactactctgtgccagccacacaaacgtttacttatcttatgccacgggaagtttagagagctaagattatctggggaaatcaaaacaaaaacaagcaaac

SEQ ID NO: 1787 - protein, 388 aa, Homo sapiens
MILWLHSLETARDHVLPIDYYFPPQKTCLICGDEASGCHYGALTCGSCKVFFKRAAEGKQKYLCASRNDCTIDKFRRKNCPSCRLRKCYEAGMTLGARKLKKLGNLKLQEEGEASSTTSPTEETTQKLTVSHIEGYECQPIFLNVLEAIEPGVVCAGHDNNQPDSFAALLSSLNELGERQLVHVVKWAKALPGFRNLHVDDQMAVIQYSWMGLMVFAMGWRSFTNVNSRMLYFAPDLVFNEYRMHKSRMYSQCVRMRHLSQEFGWLQITPQEFLCMKALLLFSIIPVDGLKNQKFFDELRMNYIKELDRIIACKRKNPTSCSRRFYQLTKLLDSVQPIARELHQFTFDLLIKSHMVSVDFPEMMAEIISVQVPKILSGKVKPIYFHTQ

SEQ ID NO: 1788 - DNA, 7350 bp, Homo sapiens
tgtgcgtcgcgctctcgccctcctcttcccgctgcagtgtctatggagcgaggctacgtttcattgccgccctggcttaacccttccggcgcctaaaaggacggccggccggccggtcccttgcaccaggaagaagtcttagcagccagcgggccctggtcaggaaactctaaggtacaaggaaaacagttgaggaaggagccagagcgctccggtttggtcctcgggcttcgctggggcggggcgcaggcgttggctttaagaaaggggaggggacagtgcaatccgggttgcccgcggattcggccaaggaatcttccgctcgctccggagcgaggagcctgtaaagaggctgttcccagctccagctctaacctcgcctacaccttgggcgggcccaatgtcacgtttgcaattgctcaggaaggatccggcccgtctccggaggcaagtcgggctgcggtttttgctgcttatctgggaaggcgatgcctaagggacatgctgcttgctaggcagcaccctgccgggatccgactgcgatagttagctctccctggccctgaagccatcgccggggcgcctgttctctgtccggaccagccagcgctcctcaggagtctcactgaaacagaaccatgggtcatcccccgctggagttcagcgactgctacctggacagccccgatttccgcgagaggctcaagtgttatgagcaggaactggagaggaccaacaaattcatcaaagacgtaatcaaagacggcaacgcgcttatcagcgctatgagaaattattcttctgctgttcagaaattttcccagacgctgcagtcatttcagtttgatttcattggagacactctgactgatgatgaaattaacatcgctgaatccttcaaggaatttgctgaattgctcaacgaggtagaaaatgagaggatgatgatggtacacaatgctagtgatttgctgattaaacccttggaaaatttccggaaggaacaaataggcttcaccaaggagcggaaaaagaaatttgaaaaggatggtgagaggttttattctttactggatcggcacttacacctgtcttcaaaaaagaaagaatctcagttacaagaggcagacctacaggtggacaaggagaggcacaattttttcgagtcctctcttgattatgtttatcaaatccaggaagttcaggagtccaagaagttcaatattgtggagcctgtcttggcctttcttcatagtctgttcatttctaacagcctgactgtggagctcacacaggatttcctcccatacaaacaacagctccaactcagtttacagaatacaagaaatcatttctccagtacccgggaagagatggaagaacttaagaaaaggatgaaagaagctccccagacatgcaaacttccaggacagccaactattgaaggctatctctatacacaagagaaatgggctttaggaatatcctgggtgaaatactattgccagtatgagaaagagaccaaaacactgaccatgacgcctatggagcagaagccaggtgctaagcaggggcccttggacttaacactgaagtactgtgtgagaaggaagacggagtctatcgacaagaggttctgttttgacatagaaactaatgaaaggccaggaaccatcactctgcaggccctttcagaagctaacagaaggctatggatggaagccatggatgggaaagaacctatctaccacagccctataacaaaacagcaagaaatggagctaaatgaagtgggcttcaagtttgtcaggaagtgcatcaatattattgagaccaaagggatcaagacagaagggttgtaccgcactgtgggcagcaatattcaggttcagaagctgctgaatgccttttttgatcctaaatgcccaggagatgttgattttcataatagtgactgggacattaagacaatcaccagctccttgaaattctacctcaggaatctttctgaacctgtcatgacctatagacttcacaaagagctggtctctgctgccaagtctgacaacctggattaccgcctaggagctattcactccctggtatataagctaccagaaaagaaccgagagatgctggaacttctgataagacacttggtcaatgtgtgtgagcacagcaaagagaatcttatgaccccctccaacatgggagtaatctttgggcccaccctgatgagagctcaggaggacactgtggccgccatgatgaacatcaaattccagaacatagtggtggaaatactaatcgagcactttggcaagatctatttaggtccacctgaggaaagcgctgcaccgccagtgcctccgcctcgggtgacagcaagaaggcacaaaccaatcacgatttcaaagcgcttgctgcgagaaaggacggttttctatacttcttccctggatgaaagcgaagatgaaatccaacatcaaacaccgaatggtactatcaccagcagcatagaaccccccaagccaccacaacaccccaaactacctattcagaggagtggggaaactgatcctgggaggaagtccccaagcaggcctattttggatggcaagttggagccctgcccagaggtggacgtggggaagttggtgtctaggctgcaggatggagggaccaagatcaccccaaaggccaccaatggacccatgccaggctctgggcccaccaagaccccctctttccacataaagagaccagctccccggcccctggcccaccacaaggagggggatgctgacagtttcagcaaagtgcggcctccaggagaaaagccaaccatcatccgccccccagtgaggcccccagatcctccctgccgggcagctactccccaaaagccagaaccaaagccagatattgtggctggcaatgcgggggaaatcacatcatctgtggtggcttccaggaccaggttttttgaaacagcttcccggaaaacaggaagttctcaaggcagacttcctggagatgaaagttgaggctacaggttttaaaagccttggcctcagaggaccctttccaggttctgaaagagtctttcttcttcaaacctttgtgtgcggagtcattttgtgttgaagagcagctccttcctagccttgcactttcagactctctctgggaggccataaaataaggagcatatgtcctagacaggtgtttatatctcctttgtattctgtcttcatcccctcagaaggtctgttttgagttcctataacactgtgaagagctggactccctcaagccagactctgccaaaaccaagatatccacttacctgagttgaagaggggagctcagttttcaactcttccctgaacttcctgcttcctcagagggccattgaactctgagagatttggggctaaagactgatctcaggggtcttaccttgaactgaaggccacttgagttggggccattgcttaccttggttggaagggaatagaaatgtttgctgaacattggagaatctcaacatgtctcctactgaggatatggacactggtgccatgtcagcgctctggtgctgcagtatgttgccaagagcccgtctgctcctgcgaggctatgagtgggatgagtgatgcccccacagcacctccatgtggacttaggaaggtggccttcctgctgttacatgcagccacttaggacaaatctgcaaagcatgttttgcatgtaaaagcctaggtctatttggattattctttctccttttttttgacagcttcctgtcaagcaatcaagaaacaaacaaaagctgaacacatttccttttaaaaaaaggagactgtgtttggtcctgtaggagttctattttggggtcaaatgctagaaaaattgttaaggtggattgaggccaggcagctgtcactgctgcttcatgtttgccttctgcacataaactcttttatctcctgaaaaaagcagttcttaacccagtgtccatggactcagaaactccatgatgcccctgagatggtatgcacaattccatgacaatatgccctttctggggagatagtccataatgttctgctaaatttcaaatgggctcgtgacccaaaaaagtcaagaaccacagcacttgagttaaaatactctttttacaatccatataagcccttgattggaagggcttttcaaaatcatttagtctaacaactgcccagtttccagtcgggggaactgaggcagagcaaggtagtgatcacaccagtacaagatttcaggtcccaggctcctatgcaagttttttttccccattatatcacacttatttagcaagggaccttgtggtttgtggctttagtggccatcatttctgggggttggcttttaccctttttcttgaatatttgccaccaagtgaaaaatgttaggacataaacccttgccaggtccctttcatttgctatctctattattggaaaggacctaaaaattggtgtaatggggcagaaatctgaggaatggacatttctaattcctgtttgttgaagggaagttgctggaaagagcatcagtacttgtttctatgcagatgcctgggccgtagcttgtctgtagcgtctgtataattataatgttgcccagtgtgagggaaagagctttcctacttgcactcttctaccaaggccctgttagtgcactgattatagtactgacagataaagcctagatgagagagatagagagtgagtacatgcacactcatgtgcaaacccactcagagatgcatttggaacagtgctactgaaaggcagtagtcattttcaagactgaattccaaacatggtttattggtgagttaggaacatgtaaggccaagtacactgagagcctttttgaaagtaattgagtggaaacttgatgccattctaaatcaaggcatatccaggtggcccggtttgaactcactccactgtacccagtctcaaaggccaggttgctaagaaaccaggagtaaaagagtcaagtgaccatcatttcacctgctgcttgcccccaatagtagtctctgtgaggccttactgacctcacctaggaagtgatttttgagcccttgtttcagggctgtggcctccctgctctatcctgaataaagcagacaggtgtgcagattttggccatgaaagcatggctaatagggccacagtccctttaaagaaacatggtttgactctggttttcttgggggaaaataccacaatcaccgatgcaaacattggaagattattgagagccctagaaagctgctgtgatcccagtagaaaatatgtcccagaaatgtcatgagattgctgtgtgttgcctgggacacagatcaagggcctatcttggagagctggggaccagcagtctgcctggaggccagggagcagtggctgagtagctctgcctttgctctggtctataccttaagaatgccaaagaatgaatttcaacgcctgcctttggcactctgacttaaagtgcaaaaagcttctgtggcgaggcatgctatcatggaatgagactggcttgccctaggcttaatggatgggcagtcattttgcagaggctatgggaagagggtgataatagaagagtggcagctataggaaattatcaacataccttggccagcaagttagagaatctggcaatggatgaactgaaagtgatgaactggcagggataacaaagaacctaacatttattaagcacgtatttattaactgctcagtgtttcatattcatgcaagtattctcattttacagagaaagaaattatggcccagggggctaaagtaaacaactcaagggcacatagaaagtaaataaaaggactgtgatttgaatccaggccactcttagcccatgctgttttccctttgccacactgtggtaggtgtttgaacagaggccacattactagagttggcatgactcttgactcttgcctgcctaacaaaatattgaaaggcaaacatttgaaggagggagggggtgcaggttcagtttatatggaaatgcaaactgggctggaagatattcctgagttaggctttctcttcatattcagcttgcacatttggtaatgtttttaaaatgatcatctaattttattttgtgaagtgaaggatttgtgttttagttggcagttgttaagtccttggcttgccatttttcaaaaagtaaaaaggtcctcacaggtgtctccatacttcgccaaggttgtagcatgggcagtttcagtttcagcctaagagactggtgacatccacaaatgcagttttagaagcagaaaaggtcttggtgcctctgcagtacttgatgtattggggtcaaatctctacaaatttttctgtggtgatagcaaaatcaagagatggcttacaaaaagaaatattgaatttttatttttgaagtttttgttttttaaaaggttgggggtgttcagccactgagggacaaaacttagcatctaatttcaattatagtgtcatgcagagtatttctaaagtaattggttatcatgggaaagtattctcttttcaagaagttctttgattctgtaataactagaacaaataaagtagtaaaagaagaaatagttctgtgactaggaaaaaattgcttttgagagaacatagatcaattatactacttctaaggtagctgcagataagtggccttgacacattacaagcctggaaaaaaacatcagaaataataaaaaatttcagagagaatcaagatacctttttttttcttttttttttcttttttttattatactctaagttttagggtacatgtgcacattgtgcaggttagttacatatgtatacatgtgccatgctggtgcgctgcacccactaatgtgtcatctagcattaggtatatctcccagtgctatccctcccccctcccccgaccccaccacagtccccagagtgtgatattccccttcctgtgtccatgtgatctcattgttcaattcccacctatgagtgagaatatgcggtgtttggttttttgttcttgcgatagtttactgagaatgatggtttccaatttcatccatgtccctacaaaggatatgaactcatcattttttatggctgcatagtattccatggtgtatatgtgccacattttcttaatccagtctatcattgttggacatttgggttggttccaagtctttgctattgtgaatagtgccgcaataaacatacgtgtgcatgtgtctttatagcagcatgatttatactcatttgggtatat

SEQ ID NO: 1789 - protein, 802 aa, Homo sapiens
MGHPPLEFSDCYLDSPDFRERLKCYEQELERTNKFIKDVIKDGNALISAMRNYSSAVQKFSQTLQSFQFDFIGDTLTDDEINIAESFKEFAELLNEVENERMMMVHNASDLLIKPLENFRKEQIGFTKERKKKFEKDGERFYSLLDRHLHLSSKKKESQLQEADLQVDKERHNFFESSLDYVYQIQEVQESKKFNIVEPVLAFLHSLFISNSLTVELTQDFLPYKQQLQLSLQNTRNHFSSTREEMEELKKRMKEAPQTCKLPGQPTIEGYLYTQEKWALGISWVKYYCQYEKETKTLTMTPMEQKPGAKQGPLDLTLKYCVRRKTESIDKRFCFDIETNERPGTITLQALSEANRRLWMEAMDGKEPIYHSPITKQQEMELNEVGFKFVRKCINIIETKGIKTEGLYRTVGSNIQVQKLLNAFFDPKCPGDVDFHNSDWDIKTITSSLKFYLRNLSEPVMTYRLHKELVSAAKSDNLDYRLGAIHSLVYKLPEKNREMLELLIRHLVNVCEHSKENLMTPSNMGVIFGPTLMRAQEDTVAAMMNIKFQNIVVEILIEHFGKIYLGPPEESAAPPVPPPRVTARRHKPITISKRLLRERTVFYTSSLDESEDEIQHQTPNGTITSSIEPPKPPQHPKLPIQRSGETDPGRKSPSRPILDGKLEPCPEVDVGKLVSRLQDGGTKITPKATNGPMPGSGPTKTPSFHIKRPAPRPLAHHKEGDADSFSKVRPPGEKPTIIRPPVRPPDPPCRAATPQKPEPKPDIVAGNAGEITSSVVASRTRFFETASRKTGSSQGRLPGDES

SEQ ID NO: 1790 - DNA, 9335 bp, Homo sapiens
gcgggcactttgaagaatcacgtgtgttgaggccctcttaaagagataggcacctacttttccctccaccctaaacaccgccctgagggcggcggcgaccgtggtaattgcaactgctcaggggcagggcttgccccagcgccgagtagtggcaacggcgtggttgcgtcgggggtgcctgggagcctggagtcccgggggcctgaaatcggcagcttcccgggcagacactctctccctcaggaagaggtgccgccgagtcagcgcggggcagtgtgagcgccccgaggtgctttctcagttgaggagaggtggggttacagggcacaggtgacagggccggagaaagatggagcagcccggggcggcggcgtcgggagcgggaggcggcagcgaggaacccggtgggggccggagcaacaagcggagcgcggggaaccgggccgccaatgaagaggaaacgaaaaacaaacccaaattgaacattcaaataaaaactttggcagatgatgtgcgtgaccgaattacaagttttagaaaatctactgtcaaaaaagaaaaacctcttattcaacatcctattgattctcaagtcgcgatgagtgagtttcctgcagctcagccattatatgatgaacgatctttgaatttgtcagaaaaggaagtattggatctctttgaaaaaatgatggaggacatgaaccttaacgaagagaaaaaagctcctttacgaaacaaagactttaccaccaaacgtgagatggttgtccagtatatttctgccactgccaaatctggtgggctgaaaaacagcaaacatgaatgcaccctgtcttcacaagaatatgttcatgaattacgatcgggtatatcagatgagaaacttcttaattgcctagaatccctcagggtttctttaaccagcaatccggtcagctgggttaacaactttggccatgaaggtcttggactcttattggatgagctggaaaagcttctggacaaaaaacagcaagaaaatattgacaagaagaatcagtataaacttattcaatgcctcaaagcatttatgaataataagtttggattacaaaggattctaggagatgaaagaagtcttttactattggcaagagcaattgaccccaaacaacccaacatgatgactgaaatagtaaaaatactttctgctatttgcattgttggagaagagaacattctagataaacttttaggggctataacaacagcagcagaaagaaataacagggaacgattttcaccaattgtggaaggtttagaaaatcaggaagccttgcaattacaggtggcctgcatgcagtttataaatgcccttgtcacttctccttatgagcttgattttcgaatacatttaaggaatgaattcctccgttcaggactaaaaacaatgttaccagatctaaaagaaaaagagaatgatgagcttgatattcagttgaaagtatttgatgaaaacaaagaagatgacctaactgaattatcacaccgtctcaatgacattcgagcagaaatggatgatatgaatgaagtctaccatcttctatataatatgctgaaggacactgctgctgaaaattacttcttatctattctacaacattttttgcttatcagaaatgattattatatcaggccacaatattataaaataattgaggaatgtgtttcacagatagtgctacactgcagtggtatggatccagacttcaaatacaggcaaagattagacatcgatttaactcatctgatagattcttgtgtgaacaaggcgaaagttgaagaaagtgaacaaaaagctgcagagttttcaaagaagttcgatgaagaattcacagctcgacaggaagctcaagcagagcttcaaaaaagagatgagaaaatcaaagaacttgaagcagaaatccagcaacttcgaacccaggcacaagtactctcaagttcatcaggaattccaggtcctcctgcagcacctccattgccaggtgtagggccgcctccaccaccacccgcgccacctctacccggaggagctcctcttcctcctccaccacctcctttacctggaatgatggggataccaccaccacccccaccaccacttttatttgggggacctcctccaccaccaccccttggaggagttcctcctcccccaggaatatcacttaatctaccttatggaatgaagcagaaaaaaatgtataaacctgaagtgtccatgaagagaatcaattggtcaaagattgaacccacagaattatctgagaactgtttctggttaagagtcaaagaagacaagtttgagaatccagatctctttgccaaattggcattgaattttgctactcagataaaagttcaaaagaacgcagaagcattagaagaaaagaagactgggcctacaaagaagaaagtgaaagaactgagaattttggatcccaaaacagctcagaatctgtccatctttctgggatcatatcgcatgccatatgaagacataagaaacgttattctggaggttaatgaagacatgctgagtgaggctttaattcagaaccttgtgaaacatcttcctgagcagaagatactcaacgaattagcagagcttaagaatgaatatgatgacctctgtgagcctgaacaatttggagttgtgatgagctctgtgaaaatgttacagcctcgtctcagtagtatcctgttcaagctcacatttgaagaacacataaacaacatcaaaccaagcatcatagcagtaactcttgcctgtgaagaactgaagaaaagtgaaagctttaacagacttttagagttagttcttcttgttggaaactacatgaactcaggctcaagaaatgcccagtctttgggatttaagatcaacttcctttgtaagatcagagatactaaatcagcggatcaaaaaacaacccttttgcattttattgccgacatttgtgaggaaaaatatcgagatatcctaaaatttcctgaagaactggaacacgtagaaagtgcaagcaaagtttcagctcaaattctcaagagcaaccttgcatcaatggaacaacaaattgttcatctggaacgtgacatcaagaaattcccccaagcagaaaatcaacacgataagtttgtggaaaagatgaccagctttacaaagactgcccgagaacagtatgaaaaactctccaccatgcacaacaacatgatgaagctctatgagaatcttggagaatacttcatttttgactcaaagacagtgagcatagaagagttctttggtgatctcaacaacttccgaactttgtttttggaagcagtgagagaaaacaataagagaagagaaatggaagagaagaccaggagggcaaaacttgcaaaagagaaagctgaacaagaaaagttagaacgccagaagaaaaagaaacaactcattgatataaacaaagagggtgatgagactggtgtgatggataatcttctagaagccctacaatcaggtgcagcattcagagaccgtcgaaagcggattccaaggaatccagataacagacgagtacctttggaaaggtcacgctctcgccacaatggagctatctcatctaagtgattcctgatgccaaagaatatgaaaatatttaagtaaaaacaaaatgatgcattttgagaagaacaaagtgtgcactcagcggctggaaaggaaataagtgcatttctgcaaagatcaagataagctggatgaagtagtgtgcatttgtaatactattgcaagactcctcccacaattattctaatctgaacacagttatcaggattacaaaatgtgttccattttagtgtaaagatgtgtatcatttgtaattgtgtgtgacctgactgtgatgatggaagtgtaagaaattgaagagttctaaggctttcaaaaacactcagtcaaaaatttaaaatcttaaatgtgtaagtcacccccaccaaaaacaaaagagaagaaaaagaatagaaagaattatccagtgtcagcttccaatccctagtacatatataatagaaaagggccaagaaaaatatgcatcttgatttggagagaggctaatattatgcacactgtaagagaagccattttggaaattcacgaaagtactgctccaccccagttgagttatttagaattttatctcaagtgaaagctgatggattcatctgctttggctgaaattaaacttatcattagtctagctagcatttcagcatgatattgcaagcacttctcattgctaaaaataaataaaccaaagtttaaccgaatcagttagggaaagtgatttaaactttatttaaagaggtattttctaattatgcacagatatctactttatacaaatactttatatggctatttttgagaaaaccctcacattttaatgtttatgctagggatgaacctgaaaattctattacgtttatttagatttcaaaggcaaatattgattcctatgctctgtggtttatttcttttttctattgcttctttctcccttgagtcccttgaaggcagggaatagacttctagaaaacctgagaggaaaaagaattctttttacaggaggcagcagaaaactgtctgaaaggtcaattgttttatctccctttccactctctttccaatttcactttggtggtctgaagaagaaaaagaaattttatgtatgtatgtgtaaatatgtgtatatatttctatctcttgctacaataattccaactaagtgaacttctcaattatcatcatacttacttaccttatattaacaaattaagatgatgctgccaaaacaagtctagcagggaaaacaggttctacatttttcttaaataaattagggagtaaaagttatacttaacttgtctgtctattattttaaaatatgcattgaaataatgtggtataacttctctggagtgcaattttaagtctaattcatgcagatgattgattgtgattattgtaagaaatttcttacatgtatatttcttatgtagaaaatactgtttctactcattcaaagcacattgtagatattcagagagaagaacaaatggctggcttggcaaatccccatctgagataaagtaaacaagtgaccagcagcccacagatgattcctttatatagatgtataatgattcaaactgctgcctttgcctccagtgcatccttacttaggtattatacttctttaaaaagctctgaagctgctacaatagaaaaatcaaaaagggtaacagtatctgaaatttcacagtcctatccgatctgaaaacacacatacacaaatgcacacacatgcacacacacatttaagggacatagcagtaacactgttttttaacaacaacaaaagtttaggttctaatttatgtaaatacctagtatgtgtatttttgactttacaaagtctttcttttctgaaatcttcgtggtatggcttttttaattcttttgacagcttatcagtctgtaggagaatgatcttgaaatgttaaccctgactaaaatttgggagcatatgccttgctatattatcaagctggtcaaggtagaaatactgatatgtatcatcaccttttccagatacaaacttgccttattttctagtttgtgaacaagaacgaatgaagtactattattgataacttatatatttttatttagagcaatcccacatgcttttcacaaacattaaaaaaaaaaacctttcagggtctttcatgaagttccaatagttgagtgagttaaaaggtttgtttcccagatttgtaatggtcctgctctagccatttgcagttttgttttagatgattggaaagtatatcaccaaaaaaagtatatagtgacatttttagtatgaaaccaaattacactaaggtcttttgttggccatattactgccacacatgagaagcaccatttatgcagattttcttcagaatatttttaaaaggtacagaatccttaaaatattaacaactaattgcatccatcatctcctttggctgctgtaacaaattaccaccaataatatgatggcttaacacaacagaaacttatttgcttacatttttgaagggcagcaaagccatgctccctccagaggctctagaggagaatctttccttgccacgtccaccttttggtggctattggcattttttggcttatggccacatttctctttctgctgtgtcttcacatcaccctcctctgtatacctaatctgcctctgcctctgtttaataaggatccttatgatgacttttagggactacccagattactccaggataatctcctcacctcatgagtcttaacttaattacatctgcaaggcccccttctccaaataagataaattcatggttttggggattaggatgtggctatgtcttttaggaagccactcttagcccaccagagtctgccctttggcccaaaatttatgtctgtctcatgtgtaaaagacattcatcccatcctaacattaccaaaagtctcaacccattatatcaatcctaagtccaaaatttcattcaaatatcatcggttcaaaagttccaaagcttatcatttagatcatctaaatcaggtatgagtgaaactctgggtatggtctttcctgaggccaaattcctcttcctctgagaaccagtgaaacagaaaagttaatctgctttcaaattacaatggtgggaacaggcataggataacagttacagacatttctgtctcaaaaaggagagaatggaaattggaatggagtctcctgtcccaatcattttcaaaatctagccaggcaaatttctgttatatttcaaggcctggcagtaatcctctttctcagggctccaccctttgggcctgtagctcttctttcttggactatggattgggcctctgcctctgtgcctatgggttgcacttcttcctctgttcccacacttgggcctctgcctctgtacctgcagctctgctctcgggatggtgcttcctttatcttgaagggtggcacatgtttgcagctgagaagttttatcaacgggtttcctacctgtagaattctggcagtctcacaatcttctttcatttttttctgtctctgtcccttttaggcccagttggaagtgtttctgatggtagaacattctcaaaaatcttgtgggtcttctacgtatgtcacattgattcacacattcagaaaagagggtcctcacagatttttcctgaacaaccccatctctattcttggcttctgttgaaacagtcaaataaatccacaagttaatgcctaacctcttcagcactagccaaaggttgtcaagacacacccttgggcttatctacagagcacacttttctaacagtgaatctcctaattttagcatctttttttttttttacaatcattcagattgtgaattcaggctcagaatttacccagtcatcagatactgattccttttgtccacttatatagttattttctctttaaaaaaaaattttttttaatgtattagagatgaggtctcactctgtcacccaggctgcagtgtagtggtgcaaacatagctccctgtaacctcaaactcccaggctcaagggatcctcctgcatcagccttccaagtagctgggtctacaggtgcatgccaccatgcctggctaattttttgcatttttttgtagagacttgatcttgctatgttgtccaggctgctctcgaactcctagcctcaagcaatccacccatcttggcctcctaaagtgccggattacaggtgtaagccaccatgcccagcctgttttgtcaatgtatctgttttctgtcttattttactataagcactaagaagaaactaagctatatctctaacactagacttgaaaatttcctcagctaaacatccaagttcatcatttattcaacttttcacactactgtagtagacaatttagatagataaactttttgccactatatgacaaggattccctttcttccattttccaataaaatcttcatttccttctaaaccatcactagaaatgcctttaacattcatactactaccatctggtaaaggcaatctagttttttctatcacagccaccaaaattcttctagtctctacccattatccaattccaaagcctttttcacattttaagacatttgttacagaagtacccaatccgtcccagttccacaatctgcattagattcccatggctgctgtaacaaattaccctctagcccagtggcttaaaacaatagaaatttattatcttgttgttttggaggccaaaagtccaaaattgaggggttggcagggctgaacgtcttctggagactctaagggaaacactcttcccgtgtcttccagtttcttgtggctgccatcattccttggtttgtgactgcatctccctctcctctgtcttcacatcacttcccctctgtatatataatctacctctgcctctctcttataaggacacttgtgacgggacttagggcccatccagattacccatgataattcccttattccaagattcttaattatatctgaaaggaccttttttccaaataaggtactatcacaggttccagggagtaggatattgaatatcttttttggggagggggcaccatgcagctcactacactattcattgcacacaaatgaatttttcactttttaagatgcattcttggtgctcaaaccagatcgaagtttgtctctaaaagctattgtctgcacaggctgctgcatgctctgttgttaaatggatggacaggctattctaaattttggttgatacttttgctactatgggcaattaacttgaaaaaaataatcgatcccaactctgtgctctgatgtacctcttctgccccttttatgacacctttgaccaaatgccttctatggttcacagtgcaggcacaaaactacctctgatacagaagggttctttacaagcttattttacataccgtgaatccctcacctaaagggagaggtgaaagcaaagactgctttgaatgggtattgagggagattgtgtccataccaagccaccctgaagaagtatttcacttgcagtagaactgtggatttgtgctgtcatttcaccttggaataaacacctatctctaagcaggaccaagaatgacttgcaatctatatgtaatggctacttacttattcaataaagttaagatatacgttaaa

SEQ ID NO: 1791 - protein, 1101 aa, Homo sapiens
MEQPGAAASGAGGGSEEPGGGRSNKRSAGNRAANEEETKNKPKLNIQIKTLADDVRDRITSFRKSTVKKEKPLIQHPIDSQVAMSEFPAAQPLYDERSLNLSEKEVLDLFEKMMEDMNLNEEKKAPLRNKDFTTKREMVVQYISATAKSGGLKNSKHECTLSSQEYVHELRSGISDEKLLNCLESLRVSLTSNPVSWVNNFGHEGLGLLLDELEKLLDKKQQENIDKKNQYKLIQCLKAFMNNKFGLQRILGDERSLLLLARAIDPKQPNMMTEIVKILSAICIVGEENILDKLLGAITTAAERNNRERFSPIVEGLENQEALQLQVACMQFINALVTSPYELDFRIHLRNEFLRSGLKTMLPDLKEKENDELDIQLKVFDENKEDDLTELSHRLNDIRAEMDDMNEVYHLLYNMLKDTAAENYFLSILQHFLLIRNDYYIRPQYYKIIEECVSQIVLHCSGMDPDFKYRQRLDIDLTHLIDSCVNKAKVEESEQKAAEFSKKFDEEFTARQEAQAELQKRDEKIKELEAEIQQLRTQAQVLSSSSGIPGPPAAPPLPGVGPPPPPPAPPLPGGAPLPPPPPPLPGMMGIPPPPPPPLLFGGPPPPPPLGGVPPPPGISLNLPYGMKQKKMYKPEVSMKRINWSKIEPTELSENCFWLRVKEDKFENPDLFAKLALNFATQIKVQKNAEALEEKKTGPTKKKVKELRILDPKTAQNLSIFLGSYRMPYEDIRNVILEVNEDMLSEALIQNLVKHLPEQKILNELAELKNEYDDLCEPEQFGVVMSSVKMLQPRLSSILFKLTFEEHINNIKPSIIAVTLACEELKKSESFNRLLELVLLVGNYMNSGSRNAQSLGFKINFLCKIRDTKSADQKTTLLHFIADICEEKYRDILKFPEELEHVESASKVSAQILKSNLASMEQQIVHLERDIKKFPQAENQHDKFVEKMTSFTKTAREQYEKLSTMHNNMMKLYENLGEYFIFDSKTVSIEEFFGDLNNFRTLFLEAVRENNKRREMEEKTRRAKLAKEKAEQEKLERQKKKKQLIDINKEGDETGVMDNLLEALQSGAAFRDRRKRIPRNPDNRRVPLERSRSRHNGAISSK

SEQ ID NO: 1792 - DNA, 3733 bp, Homo sapiens
gcgggcactttgaagaatcacgtgtgttgaggccctcttaaagagataggcacctacttttccctccaccctaaacaccgccctgagggcggcggcgaccgtggtaattgcaactgctcaggggcagggcttgccccagcgccgagtagtggcaacggcgtggttgcgtcgggggtgcctgggagcctggagtcccgggggcctgaaatcggcagcttcccgggcagacactctctccctcaggaagaggtgccgccgagtcagcgcggggcagtgtgagcgccccgaggtgctttctcagttgaggagaggtggggttacagggcacaggtgacagggccggagaaagatggagcagcccggggcggcggcgtcgggagcgggaggcggcagcgaggaacccggtgggggccggagcaacaagcggagcgcggggaaccgggccgccaatgaagaggaaacgaaaaacaaacccaaattgaacattcaaataaaaactttggcagatgatgtgcgtgaccgaattacaagttttagaaaatctactgtcaaaaaagaaaaacctcttattcaacatcctattgattctcaagtcgcgatgagtgagtttcctgcagctcagccattatatgatgaacgatctttgaatttgtcagaaaaggaagtattggatctctttgaaaaaatgatggaggacatgaaccttaacgaagagaaaaaagctcctttacgaaacaaagactttaccaccaaacgtgagatggttgtccagtatatttctgccactgccaaatctggtgggctgaaaaacagcaaacatgaatgcaccctgtcttcacaagaatatgttcatgaattacgatcgggtatatcagatgagaaacttcttaattgcctagaatccctcagggtttctttaaccagcaatccggtcagctgggttaacaactttggccatgaaggtcttggactcttattggatgagctggaaaagcttctggacaaaaaacagcaagaaaatattgacaagaagaatcagtataaacttattcaatgcctcaaagcatttatgaataataagtttggattacaaaggattctaggagatgaaagaagtcttttactattggcaagagcaattgaccccaaacaacccaacatgatgactgaaatagtaaaaatactttctgctatttgcattgttggagaagagaacattctagataaacttttaggggctataacaacagcagcagaaagaaataacagggaacgattttcaccaattgtggaaggtttagaaaatcaggaagccttgcaattacaggtggcctgcatgcagtttataaatgcccttgtcacttctccttatgagcttgattttcgaatacatttaaggaatgaattcctccgttcaggactaaaaacaatgttaccagatctaaaagaaaaagagaatgatgagcttgatattcagttgaaagtatttgatgaaaacaaagaagatgacctaactgaattatcacaccgtctcaatgacattcgagcagaaatggatgatatgaatgaagtctaccatcttctatataatatgctgaaggacactgctgctgaaaattacttcttatctattctacaacattttttgcttatcagaaatgattattatatcaggccacaatattataaaataattgaggaatgtgtttcacagatagtgctacactgcagtggtatggatccagacttcaaatacaggcaaagattagacatcgatttaactcatctgatagattcttgtgtgaacaaggcgaaagttgaagaaagtgaacaaaaagctgcagagttttcaaagaagttcgatgaagaattcacagctcgacaggaagctcaagcagagcttcaaaaaagagatgagaaaatcaaagaacttgaagcagaaatccagcaacttcgaacccaggcacaagtactctcaagttcatcaggaattccaggtcctcctgcagcacctccattgccaggtgtagggccgcctccaccaccacccgcgccacctctacccggaggagctcctcttcctcctccaccacctcctttacctggaatgatggggataccaccaccacccccaccaccacttttatttgggggacctcctccaccaccaccccttggaggagttcctcctcccccaggaatatcacttaatctaccttatggaatgaagcagaaaaaaatgtataaacctgaagtgtccatgaagagaatcaattggtcaaagattgaacccacagaattatctgagaactgtttctggttaagagtcaaagaagacaagtttgagaatccagatctctttgccaaattggcattgaattttgctactcagataaaagttcaaaagaacgcagaagcattagaagaaaagaagactgggcctacaaagaagaaagtgaaagaactgagaattttggatcccaaaacagctcagaatctgtccatctttctgggatcatatcgcatgccatatgaagacataagaaacgttattctggaggttaatgaagacatgctgagtgaggctttaattcagaaccttgtgaaacatcttcctgagcagaagatactcaacgaattagcagagcttaagaatgaatatgatgacctctgtgagcctgaacaatttggagttgtgatgagctctgtgaaaatgttacagcctcgtctcagtagtatcctgttcaagctcacatttgaagaacacataaacaacatcaaaccaagcatcatagcagtaactcttgcctgtgaagaactgaagaaaagtgaaagctttaacagacttttagagttagttcttcttgttggaaactacatgaactcaggctcaagaaatgcccagtctttgggatttaagatcaacttcctttgtaagatcagagatactaaatcagcggatcaaaaaacaacccttttgcattttattgccgacatttgtgaggaaaaatatcgagatatcctaaaatttcctgaagaactggaacacgtagaaagtgcaagcaaagtttcagctcaaattctcaagagcaaccttgcatcaatggaacaacaaattgttcatctggaacgtgacatcaagaaattcccccaagcagaaaatcaacacgataagtttgtggaaaagatgaccagctttacaaagactgcccgagaacagtatgaaaaactctccaccatgcacaacaacatgatgaagctctatgagaatcttggagaatacttcatttttgactcaaagacagtgagcatagaagagttctttggtgatctcaacaacttccgaactttgtttttggaagcagtgagagaaaacaataagagaagagaaatggaagagaagaccaggagggcaaaacttgcaaaagagaaagctgaacaagaaaagttagaacgccagaagaaaaagaaacaactcattgatataaacaaagagggtgatgagactggtgtgatggataatcttctagaagccctacaatcaggtgcagcattcagagaccgtcgaaagcggattccaaggaatccagtggtaaatcatccctgtgcaacaagggctaatccaagatcagctacataaacggcctgagtgctgttttaaacaggattgggtgatggtacaacatgactttttaagataatcaagtagtaaaagtttctagtggaaacatga

SEQ ID NO: 1793 - protein, 1096 aa, Homo sapiens
MEQPGAAASGAGGGSEEPGGGRSNKRSAGNRAANEEETKNKPKLNIQIKTLADDVRDRITSFRKSTVKKEKPLIQHPIDSQVAMSEFPAAQPLYDERSLNLSEKEVLDLFEKMMEDMNLNEEKKAPLRNKDFTTKREMVVQYISATAKSGGLKNSKHECTLSSQEYVHELRSGISDEKLLNCLESLRVSLTSNPVSWVNNFGHEGLGLLLDELEKLLDKKQQENIDKKNQYKLIQCLKAFMNNKFGLQRILGDERSLLLLARAIDPKQPNMMTEIVKILSAICIVGEENILDKLLGAITTAAERNNRERFSPIVEGLENQEALQLQVACMQFINALVTSPYELDFRIHLRNEFLRSGLKTMLPDLKEKENDELDIQLKVFDENKEDDLTELSHRLNDIRAEMDDMNEVYHLLYNMLKDTAAENYFLSILQHFLLIRNDYYIRPQYYKIIEECVSQIVLHCSGMDPDFKYRQRLDIDLTHLIDSCVNKAKVEESEQKAAEFSKKFDEEFTARQEAQAELQKRDEKIKELEAEIQQLRTQAQVLSSSSGIPGPPAAPPLPGVGPPPPPPAPPLPGGAPLPPPPPPLPGMMGIPPPPPPPLLFGGPPPPPPLGGVPPPPGISLNLPYGMKQKKMYKPEVSMKRINWSKIEPTELSENCFWLRVKEDKFENPDLFAKLALNFATQIKVQKNAEALEEKKTGPTKKKVKELRILDPKTAQNLSIFLGSYRMPYEDIRNVILEVNEDMLSEALIQNLVKHLPEQKILNELAELKNEYDDLCEPEQFGVVMSSVKMLQPRLSSILFKLTFEEHINNIKPSIIAVTLACEELKKSESFNRLLELVLLVGNYMNSGSRNAQSLGFKINFLCKIRDTKSADQKTTLLHFIADICEEKYRDILKFPEELEHVESASKVSAQILKSNLASMEQQIVHLERDIKKFPQAENQHDKFVEKMTSFTKTAREQYEKLSTMHNNMMKLYENLGEYFIFDSKTVSIEEFFGDLNNFRTLFLEAVRENNKRREMEEKTRRAKLAKEKAEQEKLERQKKKKQLIDINKEGDETGVMDNLLEALQSGAAFRDRRKRIPRNPVVNHPCATRANPRSAT

SEQ ID NO: 1794 - DNA, 1040 bp, Homo sapiens
gctttctgcgctacctacagaggggtccatatggcgttgttctggattcccatcgtaacttaaagggaaactttcgcaatgtccggagcgcttgatatcctgcaaatgaaggaggaggatgtccttaagttccttgcagcaggaacctatttaggtggcaccaatcttgacttccagatggaacagtacatctataaaaggaaaagtgatggcatctacatcataaatctgaagcggacctgggagaagcttctgctggcagctcgtgccattgttgccattgaaaaccctgctgatgtcagtgttatatcttccaggaatactggccagagggccgtgctgaagtttgctgctgccactggagccactccaattgctggctgcttcactcctggaactgtccgtcgctaaccagatccaggcagccttctgggacccacggcttcttgtggttactgaccccagggctgaccaccagcctctcatggaggcatcttctgttaacctacctaccattgctctgtgtaacacagattctcctctgtgctatgtggacattgccatcccatgcaacaacaagggagctcactcagtgggtttgatgtggtggatgctggctcgggaagttctgcgcatgcgtggcaccatttcccatgaacacccatgggaggtcatgcctgatctctacttctacagggatcctgaagagattgaaaaagaagagcaggctgctgctgaaaaggtaatgaccaaggaggaatttcagggtgaatggactgctccagctcctgagttcactgctactcagcttgaggttgcagactggtctgaaggtgtgcgggtgccctctgtgcctattcagcagttccctgttgaagactggagcgctcagcctgccacggaagactggtctgcagctcccactgctcaggccactgaacgggtaggagcaaccactgaatggtcttaagctgttcttgcatgggctcttaagcaacatggaaaaatggttgatggaaaataaacatcagtttcttaaa

SEQ ID NO: 1795 - DNA, 3004 bp, Homo sapiens
ctggaaacccatgtgcatttcagttcaggaaagaatggtaggcttggtggggggagctcccgcaaaaggggaactaatacagaaacactctggtatttgtctgcctctcttgttccagcgccgttttccctatatccggaattcgtccctgcgcattccaatacctgaagcggccacagggtacaggacagggagccctccgacagaaaagagtcgcggcgctaaacaaagcctgatatcactccgcttccataagccggatccccataaactacgctctagctcctcccactgccgttgtgggtaacgcggacgtggaagaacctcgtctgcggaggaaaaggtagatgttaaatggtaactacgcgcgaggttctgaggagccctgggaacaggaaggagaaaagaataccaaaagtgacaacagtttgccaatcgcagtctttaatctgataaagcggttatctcgtcttgagtcccaggtgccgagtcaatccccatacacagccgccgccattgcctcgagtccttgtgtctgactgtctgttcctgctgctgtatgacacagcacctcgaggcaaggaaataagaaaactgcctctgatccaagcagagaaggtctgcctgtagatctgctgtagggcttgtcaccattggaagcaaggtcctacttcagtggcagatctggtggccttggagtggctgaagaccaccaccctccacagggctgggcccatgcacagccatccttccctaccttgagtgagcttcctctgcatgttttctatatcactggcagagcctgtagttggaaaggggacagagtgactactggactttgtgtgaaaacaccaaccgggacaaaacttcagtcaaggctgagacgggtgggggtatataacttgtccttacgttaaacttggaacatggttgactctgggacagaagcaagggctagaggaaaggctgaggctggcctgcaagatggaatcagtggtcctgccactgctagagtgaatggtaaaacccaggccgaggcagtggctgaggcagaactgaaaacagaatcagtgacccaggccaaagctggtgatggagcaatgaccaggacacatacagtgacctacagggaggctatggctgtgacaagggaagtgatcaaggtggaagatacaactaagactagagtcatggttgagactaagacaaaacccctggcagaacgcagtatagtgccacaaaccaagtcaaaggccatgcctatgtctagggtcagtactgtaaccaagtctgaagtcaaggttgttgctgtcattgaggcaaatattaggtcctatgccaagtcacatgataaggccaatactgggtccagacctgacagaagggaagagaccagcattgggatgaaatccagtgatgaggatgaagaaaatatatgctcctggttctggactggagaagagcctagtgtagggtcctggttctggcctgaagaagagacctctcttcaagtttataagcccctacctaagatccaggaaaagcccaagcccacacacaaacccacacttactataaaacaaaaggtaatagcatggtcaagggccaggtatattgtcctagttccagttgaaggaggggagcaatccttgcctccagaaggaaactggaccctggttgagaccttgattgaaactcctctggggattcgacctttgaccaagatcccaccttatcatgggccttattaccagaccttagctgagatcaaaaaacagattaggcaaagggaaaagtatgggcctaatccgaaggcctgccactgcaaatcacgtggctttagtttagagcctaaagagtttgataaacttgttgccctccttaagttaactaaggatcctttcattcatgaaatagctacaatgataatgggcatcagtcctgcttatccatttactcaagatataattcatgatgtaggtattactgttatgattgaaaacttggtcaataatcccaatgttaaagaacaccctggagctttaagtatggtggatgacagctctgagtcttccgaagaaccaaaatcaggggagtcatatatacatcaagtttgtaaaggcataatctcttgccccttgaactcccctgtgcagctggctggactgaaattactagggcacttgagtataaaatttgaagatcactatgtgattaccagttatattccagatttcctcaccttgttaaacaagggaagtgtcaaaaccaagttttatgttttaaaagtgttttcgtgtttgtctaaaaatcacgccaatacaagagaattgatcagtgccaaagtactgtcatcattggttgcaccctttaacaagaatgagtcaaaggccaatattcttaatattattgaaatatttgagaatataaattttcagttcaaaacaaaggcaaagctatttaccaaggaaaagttcactaaatctgagcttatttcaatattccaggaagcaaaacagtttggtcagaaactccaagacttagcagagcacagtgatcccgaagtgagagataaagtcatacgattaatactaaaactctgaatacccctctgttctcataaagcctcaaacagttttttggagttgcaatatgaaaccaatgcatattgtaattataaattcaatacttatgttttccatgttgattgagggaggcaattttatggataccaattaatcttgagatcctgaacatgtgctgatttttattgtgctatatagtatataaattgagatatttttggtatttctgcaacgtgacctgataatgaatctattcatcctgagtaagctatacttctgtgctttatattgatatgtgtattcttttgagattttatttacatgttgttaataaagttgcatgctaaaactggtgaaaaaaaaaaaaaaaaaaaaaaaaaaaaaaaaaaaaaaaaaaaaaaaaaaaaaaaaaaaaaaaa

SEQ ID NO: 1796 - protein, 558 aa, Homo sapiens
MVDSGTEARARGKAEAGLQDGISGPATARVNGKTQAEAVAEAELKTESVTQAKAGDGAMTRTHTVTYREAMAVTREVIKVEDTTKTRVMVETKTKPLAERSIVPQTKSKAMPMSRVSTVTKSEVKVVAVIEANIRSYAKSHDKANTGSRPDRREETSIGMKSSDEDEENICSWFWTGEEPSVGSWFWPEEETSLQVYKPLPKIQEKPKPTHKPTLTIKQKVIAWSRARYIVLVPVEGGEQSLPPEGNWTLVETLIETPLGIRPLTKIPPYHGPYYQTLAEIKKQIRQREKYGPNPKACHCKSRGFSLEPKEFDKLVALLKLTKDPFIHEIATMIMGISPAYPFTQDIIHDVGITVMIENLVNNPNVKEHPGALSMVDDSSESSEEPKSGESYIHQVCKGIISCPLNSPVQLAGLKLLGHLSIKFEDHYVITSYIPDFLTLLNKGSVKTKFYVLKVFSCLSKNHANTRELISAKVLSSLVAPFNKNESKANILNIIEIFENINFQFKTKAKLFTKEKFTKSELISIFQEAKQFGQKLQDLAEHSDPEVRDKVIRLILKL

SEQ ID NO: 1797 - DNA, 5985 bp, Homo sapiens
gcactttcgcgccgtatccctccgccccccttcccgacaccctcgcggagagcggttcttgccgcatcctgcgcagcccctgcccagtttggtgcagaggcgtggggggcgggactcgtctttgccattcggatcgctgggaaagcggtgggaatccaactgaagagcagccagaggagagctgaagagaggagggggaggccgatgacctgggctctgggcctctgaaggtctggcgtattctgacaggacacagtgagcatctgtagaggagaggcttgaaataaaggaggagcacgaatattccctggatttctggaggcctgctttaaggctggccagttctgcaagaaaggcaaggaggaggagactggctcacacctctggaggacccccttctgtcagctgtggggcttgacactacttgaacaagaaaaggagggggaaactgcaccacataagtgaagatccacctccagtggctgctctgctggtggtggggttgctgctgacaaccaccctcaacgggtctgcacccatccaggaaatctctgtcttcctcaagcttggttgtgcctgttctacactctatctgtattattgaattactgactgagactgtgtttgggaaggaggctgagtgactactggactggatattgactctaactcttgtttccaagcttatatcctcaatcacctaaagatcagagtgtgaagaaacaaacctgtgacagatctgtggttgaggtttagactgggggaggagtatagtactggactttctttgtaacttgtaccatgactggggcagagattgagtctggtgcccaggtcaagcctgaaaagaagcctggggaagaggttgtaggtggggctgagatagagaatgatgtccctctggtggtcagacccaaggttaggacccaggcccagataatgcctggggcaaggcccaagaataagtccaaggttatgcctggagcaagcaccaaagttgagacaagtgcagtgggtggggcacgccctaagagtaaggccaaggcaatacctgtttcacgatttaaggaagaagcccagatgtgggctcagcccaggtttggtgctgaaagattgtctaagacagagagaaactcccagaccaatatcatagcctctccacttgtcagtactgattctgtcttggttgctaaaacaaagtacctgtctgaggatagagaactggttaatacagacactgagagctttcctagaaggaaggcccattaccaagcaggattccagccttcttttaggtcaaaggaggagaccaatatggggtcctggtgctgtcctaggcctacatccaaacaagaagcctctcctaattctgatttcaaatgggtagacaaatctgtgagttccttgttctggagtggagatgaggtcactgcaaaatttcatcctgggaatagggtaaaagacagtaacagatccatgcacatggccaatcaagaggctaataccatgtctaggtcccaaactaaccaggagctctatattgcatctagttctggttctgaggatgagtctgttaagacaccctggttctgggccagagataaaaccaatacctggtctgggcccagggaagatcccaatagcaggtccaggtttaggtctaagaaagaagtctatgttgaatcaagttctggatctgagcatgaagaccatttggagtcctggtttggggctggaaaggaggccaaattcaggtccaaaatgagagctgggaaggaggccaataacagggccaggcacagggccaagcgagaagcttgcattgatttcatgcctgggtctatagatgtaattaaaaaagagtcctgtttctggcctgaagaaaatgctaataccttttcaaggcccatgatcaagaaagaggccagggccagagcaatgacaaaggaagaggccaaaaccaaggcccgagccagggccaagcaagaagccaggtcagaggaggaagccctcattgggacctggttctgggctacagacgagtccagcatggcagatgaagccagcatagagtccagtctacaagtggaggatgagtccataattgggagttggttctggactgaagaagaggccagtatggggactggggctagcagtaaatccagaccaaggactgatggggagcgtattggtgattccttatttggggctagggaaaagaccagtatgaaaactggggctgaggccacctctgaatctatactagcagctgatgatgaacaggtcattattggttcctggttctgggctggtgaagaggtcaaccaagaggctgaggaagagaccatttttgggtcgtggttctgggtcattgatgcggccagtgtggaatctggtgttggggtcagctgtgagtccaggacaaggtctgaggaagaagaggtcattggtccctggttttggtctggagaacaagttgatatagaggctggaatcggagaagaggccaggccaggagctgaagaagagacaatattcgggtcctggttttgggctgaaaaccagacctatatggattgtagggctgaaactagctgtgacaccatgcaaggggctgaggaggaggagcccattattgggtcctggttttggaccagagtagaagcttgtgtggagggtgatgtcaacagcaagtctagcctggaggacaaggaagaggccatgataccatgttttggagccaaagaagaggtcagtatgaagcatgggactggtgtcagatgcagatttatggcaggggctgaggagaccaataataagtcttgcttctgggcagaaaaagaaccctgtatgtatcctgccggtggaggaagttggaagtctaggccagaggaggaagaggacattgtcaattcgtggttctggtccagaaaatacacaaagccagaggccattatagggtcctggttatgggctacagaagagagtaatatagatgggactggagaaaaggccaagttactgactgaagaggagaccataatcaattcctggttctggaaagaagatgaagccatttcagaggctactgacagagaagagtccaggccagaagctgaggagggggacattattggttcttggttctgggctggagaagaggacagactagagccagctgctgagactagagaagaagacaggctagcagctgagaaagaaggtattgttgggtcctggtttggggccagagaagagaccattagaagagaggctgggtcttgcagcaaatccagtcctaaagctgaagaggaagaagtcattattgggtcctggttctgggaagaagaggccagtccggaggcagtggcaggagtcggctttgagtcaaagcctgggactgaggaggaagaaatcactgttgggtcctggttctggcctgaagaagaagccagtatacaggctggatctcaggcagtagaggaaatggagtcagagactgaagaggaaaccatttttgggtcctggttctgggatggaaaagaagtcagtgaagaagcaggaccatgctgtgtatccaagccagaggatgatgaagagatgattgttgagtcctggttctggtctagagacaaagccattaaggaaactggaactgtggccacctgtgagtccaagccagaaaatgaggaaggggccattgttgggtcttggtttgaggctgaagatgaggtagataacaggactgacaatggaagcaactgtgggtccaggacattagctgatgaagatgaggccatagtggggtcctggttctgggcaggagatgaggcccattttgaatcaaatcctagccccgtgttcagggccatttgcaggtccacgtgttcagttgaacaggagcctgatccttcacgcaggcctcagagttgggaggaggtcactgttcagttcaagcctggtccatggggtagggtcggcttcccatctataagcccctttagatttccgaaagaggcagcatctttattctgtgaaatgtttgggggcaaacccaggaacatggtacttagcccagaaggggaagatcaggaatctttgcttcagcctgatcagcctagtcctgagttcccatttcagtatgatccttcctacaggtcagtccaggaaattcgagagcatcttagggccaaggagagtacagagcctgagagttcatcctgtaactgcatacaatgtgagctgaaaattggttctgaagagtttgaagaactccttttattaatggaaaaaattcgggatccttttattcatgaaatatctaaaatcgcaatgggtatgagaagtgcttctcaatttacccgagatttcattcgagattcaggtgttgtctcacttattgaaaccttgcttaattatccgtcctcccgagttagaacaagttttttggaaaatatgattcgcatggccccaccttatccgaatctaaacataattcagacatacatatgtaaagtgtgtgaggaaacccttgcttatagcgtggattccccggaacagctgtctggaataaggatgattagacatctcactactactactgactatcacacactggttgccaattatatgtctgggtttctctccttattagctacaggcaatgccaaaacaaggtttcatgttttgaaaatgctactgaatttgtctgaaaatcttttcatgacaaaagaactactcagtgctgaagcagtgtcagaatttataggcctctttaacagggaagagacaaatgacaatattcaaattgttcttgcaatatttgagaatattggcaacaatatcaaaaaagaaacagtgttctctgatgatgatttcaatattgagccgcttatttctgcattccacaaagttgagaaatttgctaaggaactgcaaggcaaaacagacaatcaaaatgaccctgaaggggaccaagaaaattagtaatggttaattgctggcctcagattgtccttatgttcctgagttatgatccttgagtaatgctttgattttaatagttggttctgtgttgcaacatatatctttagtgctgacactaactttgtccaactctgtctgtaagctggagcatttttctgatgccagctgaatattagagctgaaaacacatttgttgatatttgtcttgtccacattgtgatgttcagtatttgagcttatagtgaactgagcaatcataaataagccacccttctgattgtcgttctactgtatatatatatatatttgagtgttgtttgtgtttcaataaagtcctatgttaaagttggcagaaatcacccttcttcttgaaattaaaatacagacccaatgataacacatgaacacacatagagataattaatatatgaataatatgttcctttcaaaagtttttttctcagctttaaacgcaaaaattaccaggggctgctatgtagggcatacttcagagaaaaagtagctacttcggttggactctgaagtttgggaaagatattggtggtgtaaaaaaaaaaaaaagcatggagttaggaaaaattttcctatgggagtgaggtatcctgtttgcctagagtgagtgagaggaatatattgagcaacatagaggatgacataagttttaaagagctgaggatttgcattttacagctcaaagtacaactgctgcttccatactacctaaagggcaaaagaataagacaggaaagcatagggatttgattgagtcaggaagacaatttaatcatgatggtaccatggtaagtgttaaggcaacatcatacagccattaaacatgatgatgtatagggttttaggaaaagccctgacatttttgatatttcatataatagagaacactggtgtcatacatgggaagtatgatcccatttgaaaaataaatgtgaataaattgaccaaaaaaaaaaaaaaaaa

SEQ ID NO: 1798 - protein, 1395 aa, Homo sapiens
MTGAEIESGAQVKPEKKPGEEVVGGAEIENDVPLVVRPKVRTQAQIMPGARPKNKSKVMPGASTKVETSAVGGARPKSKAKAIPVSRFKEEAQMWAQPRFGAERLSKTERNSQTNIIASPLVSTDSVLVAKTKYLSEDRELVNTDTESFPRRKAHYQAGFQPSFRSKEETNMGSWCCPRPTSKQEASPNSDFKWVDKSVSSLFWSGDEVTAKFHPGNRVKDSNRSMHMANQEANTMSRSQTNQELYIASSSGSEDESVKTPWFWARDKTNTWSGPREDPNSRSRFRSKKEVYVESSSGSEHEDHLESWFGAGKEAKFRSKMRAGKEANNRARHRAKREACIDFMPGSIDVIKKESCFWPEENANTFSRPMIKKEARARAMTKEEAKTKARARAKQEARSEEEALIGTWFWATDESSMADEASIESSLQVEDESIIGSWFWTEEEASMGTGASSKSRPRTDGERIGDSLFGAREKTSMKTGAEATSESILAADDEQVIIGSWFWAGEEVNQEAEEETIFGSWFWVIDAASVESGVGVSCESRTRSEEEEVIGPWFWSGEQVDIEAGIGEEARPGAEEETIFGSWFWAENQTYMDCRAETSCDTMQGAEEEEPIIGSWFWTRVEACVEGDVNSKSSLEDKEEAMIPCFGAKEEVSMKHGTGVRCRFMAGAEETNNKSCFWAEKEPCMYPAGGGSWKSRPEEEEDIVNSWFWSRKYTKPEAIIGSWLWATEESNIDGTGEKAKLLTEEETIINSWFWKEDEAISEATDREESRPEAEEGDIIGSWFWAGEEDRLEPAAETREEDRLAAEKEGIVGSWFGAREETIRREAGSCSKSSPKAEEEEVIIGSWFWEEEASPEAVAGVGFESKPGTEEEEITVGSWFWPEEEASIQAGSQAVEEMESETEEETIFGSWFWDGKEVSEEAGPCCVSKPEDDEEMIVESWFWSRDKAIKETGTVATCESKPENEEGAIVGSWFEAEDEVDNRTDNGSNCGSRTLADEDEAIVGSWFWAGDEAHFESNPSPVFRAICRSTCSVEQEPDPSRRPQSWEEVTVQFKPGPWGRVGFPSISPFRFPKEAASLFCEMFGGKPRNMVLSPEGEDQESLLQPDQPSPEFPFQYDPSYRSVQEIREHLRAKESTEPESSSCNCIQCELKIGSEEFEELLLLMEKIRDPFIHEISKIAMGMRSASQFTRDFIRDSGVVSLIETLLNYPSSRVRTSFLENMIRMAPPYPNLNIIQTYICKVCEETLAYSVDSPEQLSGIRMIRHLTTTTDYHTLVANYMSGFLSLLATGNAKTRFHVLKMLLNLSENLFMTKELLSAEAVSEFIGLFNREETNDNIQIVLAIFENIGNNIKKETVFSDDDFNIEPLISAFHKVEKFAKELQGKTDNQNDPEGDQEN

SEQ ID NO: 1799 - DNA, 3582 bp, Homo sapiens
gcctactttggtgcagaggcgtggggggcgggacgcgtctttcccgttcggatcgcggggaaagcagtggctccaagtgagccagaggagagctgaggagaggagggggaggccgacgacctgggccctgggcctctgaaggtctggcgtattctgacaggacacagtgagcgtctgtagaggagaggcttgaaataaaggagcacgaatattgcctggatttctggaggcctactttaaggctggccaattctgcaagaaaggcaaggaggaggagactggctcacagctctggaggacccccttctgtcagctgtggggcttgacaccacttgaacaagaaaaggagggggaaactgcaccacatcagtgaagatccacctccagtggctgctctgctggtggtggagttgctgctgacaaccaccctcaacgggtctgcacccatccaggaaatatctgtcttcctttagcttggttgtacctgttctcactctatctgtattattgaattattgactgagactgtgtttgggaaggaggctgagtgactactggactggatattgactctaactcttattcccaagcttatatccttaatcacctaaagatcagagtgtgaagaaacaaacctgtgacagatctgtggttgaggtttagactacgggaggagtatattacctgactttctttgtaacttgtaccatgactggggcagagattgagcctagtgcccaggccaagcctgaaaagaaggctggggaagaggttatcgctgggcctgagagagagaatgatgtccctctggtggtcagacccaaggttaggacccaggcaactactggggcaaggcccaaaactgagaccaagtctgtgcctgcggcaaggcccaaaactgaggcccaagcaatgtctggggcaaggcccaaaactgaggtccaagtaatgggtggtgcaagacccaaaacggaggctcaaggaatcacaggggccaggcccaaaaccgatgccagggcagtaggtggcgctcgttctaaaactgatgccaaggcaatccctggagcaaggcccaaggatgaggcccaggcatgggcccagagtgaatttgggactgaagcagtgtcacaggcagaaggagtgtcccagactaatgccgttgcttggccactggccactgctgagtctggatcagttactaaatctaagggcctgtctatggatagagaactagtcaatgtggatgctgaaacctttcctggcacccagggtcagaaaggaatccagccctggtttggaccaggggaggagactaatatggggtcttggtgctattccaggcccagggccagagaggaggcctctaatgagtctgggttctggtcagcagatgagacctctacagcgtcttctttctggactggagaagagacaagtgtcagatcatggcccagggaagagtccaataccaggtccaggcacagggctaaacatcagactaatcccaggtccaggcccagatccaagcaagaagcctatgttgattcctggtctggatctgaggatgaggccagcaacccattctccttctgggttggagaaaataccaataacttgttcaggcccagagtcagggaggaggcaaatatcaggtccaagctcaggacaaatagagaagattgttttgaatctgagtctgaagatgagttctataagcagtcctgggttttgcctggagaagaggccaatagtagattcaggcacagagacaaagaagatcctaatactgccttgaaactcagggcccagaaagatgttgacagtgatagggtcaaacaagaacccaggtttgaggaggaagtcattattgggtcctggttctgggcagaaaaagaggccagtttggagggtggagcttcagcaatctgtgaatctgagccaggaactgaggagggggccattggcggatccgcgtactgggctgaggaaaagtccagtttgggggctgtggccagagaagaggccaagccggagtctgaagaagaggccatatttgggtcctggttctgggacagagatgaggcctgctttgacctaaatccctgtcctgtgtacaaggtcagtgataggttcagagatgcagctgaggagcttaatgcatcctccaggccccaaacctgggacgaggtcactgttgaattcaaacctggtctttttcatggggttggcttccgatccacaagcccctttggaattcccgaagaggcttctgaaatgcttgaggcaaagcccaagaacctggaacttagcccagaaggagaagagcaggaatctttgcttcagcctgatcagcctagtcctgagttcacatttcagtatgatccttcctaccggtcagtccgggaaattcgagagcatcttagggccagggagagtgcagagtctgagagttggtcctgcagctgcatacaatgtgagctgaaaattggttctgaagagtttgaagaattccttttattaatggacaaaattcgggatccttttattcatgaaatatctaaaattgcaatgggtatgagaagtgcttctcaatttacccgagatttcattcgagattcaggtgttgtctcacttattgaaaccttgcttaattatccatcctctagagttaggacaagttttttggaaaatatgattcacatggctccaccttatccaaatctaaacatgattgagacattcatatgtcaagtgtgtgaggaaacccttgcacatagtgtggattcccttgagcagctgactggaataaggatgcttagacacctcactatgactattgactatcacacactgattgccaactatatgtccgggtttctctccttattaaccacagccaatgcgagaacgaagtttcacgttctgaaaatgctattgaatttgtctgaaaatcctgctgtggcaaaaaaactattcagtgccaaagctctttcaatatttgtgggtctctttaacatagaagagacaaatgataatattcaaattgttattaaaatgtttcagaatatcagtaacattataaaaagtggaaagatgtccttaattgatgatgatttcagtcttgagccgcttatttctgcatttcgtgaatttgaggagttagctaagcaactacaagcccaaatagacaaccaaaatgatcctgaggtgggacaacaaagttaatatgattaaccacctgccgctgatcagccttatgttcccaaagagccctgagtagtgctttggtgttcacagtctgtttttttgttgtaacttatattttttaatgctgatgttaactttgtcaaactcttgttttgagctggatcattttgtggatgccaaatgaatatcaaaactgaaaacacatttgttgatatttgtcttgctgtccagattgcggtatttttcagtattaagttttcaatgaactgtgtcacctaagtaagctaccctgctattcgttgtttaaatatatggttctctatttgagtctgtgttttcaataaagttctatgttaaaattggcaaaaaaaaaaa

SEQ ID NO: 1800 - protein, 838 aa, Homo sapiens
MTGAEIEPSAQAKPEKKAGEEVIAGPERENDVPLVVRPKVRTQATTGARPKTETKSVPAARPKTEAQAMSGARPKTEVQVMGGARPKTEAQGITGARPKTDARAVGGARSKTDAKAIPGARPKDEAQAWAQSEFGTEAVSQAEGVSQTNAVAWPLATAESGSVTKSKGLSMDRELVNVDAETFPGTQGQKGIQPWFGPGEETNMGSWCYSRPRAREEASNESGFWSADETSTASSFWTGEETSVRSWPREESNTRSRHRAKHQTNPRSRPRSKQEAYVDSWSGSEDEASNPFSFWVGENTNNLFRPRVREEANIRSKLRTNREDCFESESEDEFYKQSWVLPGEEANSRFRHRDKEDPNTALKLRAQKDVDSDRVKQEPRFEEEVIIGSWFWAEKEASLEGGASAICESEPGTEEGAIGGSAYWAEEKSSLGAVAREEAKPESEEEAIFGSWFWDRDEACFDLNPCPVYKVSDRFRDAAEELNASSRPQTWDEVTVEFKPGLFHGVGFRSTSPFGIPEEASEMLEAKPKNLELSPEGEEQESLLQPDQPSPEFTFQYDPSYRSVREIREHLRARESAESESWSCSCIQCELKIGSEEFEEFLLLMDKIRDPFIHEISKIAMGMRSASQFTRDFIRDSGVVSLIETLLNYPSSRVRTSFLENMIHMAPPYPNLNMIETFICQVCEETLAHSVDSLEQLTGIRMLRHLTMTIDYHTLIANYMSGFLSLLTTANARTKFHVLKMLLNLSENPAVAKKLFSAKALSIFVGLFNIEETNDNIQIVIKMFQNISNIIKSGKMSLIDDDFSLEPLISAFREFEELAKQLQAQIDNQNDPEVGQQS

SEQ ID NO: 1801 - DNA, 3494 bp, Homo sapiens
gcctactttggtgcagaggcgtggggggcgggacgcgtctttcccgttcggatcgcggggaaagcagtggctccaagtgagccagaggagagctgaggagaggagggggaggccgacgacctgggccctgggcctctgaaggcctactttaaggctggccaattctgcaagaaaggcaaggaggaggagactggctcacagctctggaggacccccttctgtcagctgtggggcttgacaccacttgaacaagaaaaggagggggaaactgcaccacatcagtgaagatccacctccagtggctgctctgctggtggtggagttgctgctgacaaccaccctcaacgggtctgcacccatccaggaaatatctgtcttcctttagcttggttgtacctgttctcactctatctgtattattgaattattgactgagactgtgtttgggaaggaggctgagtgactactggactggatattgactctaactcttattcccaagcttatatccttaatcacctaaagatcagagtgtgaagaaacaaacctgtgacagatctgtggttgaggtttagactacgggaggagtatattacctgactttctttgtaacttgtaccatgactggggcagagattgagcctagtgcccaggccaagcctgaaaagaaggctggggaagaggttatcgctgggcctgagagagagaatgatgtccctctggtggtcagacccaaggttaggacccaggcaactactggggcaaggcccaaaactgagaccaagtctgtgcctgcggcaaggcccaaaactgaggcccaagcaatgtctggggcaaggcccaaaactgaggtccaagtaatgggtggtgcaagacccaaaacggaggctcaaggaatcacaggggccaggcccaaaaccgatgccagggcagtaggtggcgctcgttctaaaactgatgccaaggcaatccctggagcaaggcccaaggatgaggcccaggcatgggcccagagtgaatttgggactgaagcagtgtcacaggcagaaggagtgtcccagactaatgccgttgcttggccactggccactgctgagtctggatcagttactaaatctaagggcctgtctatggatagagaactagtcaatgtggatgctgaaacctttcctggcacccagggtcagaaaggaatccagccctggtttggaccaggggaggagactaatatggggtcttggtgctattccaggcccagggccagagaggaggcctctaatgagtctgggttctggtcagcagatgagacctctacagcgtcttctttctggactggagaagagacaagtgtcagatcatggcccagggaagagtccaataccaggtccaggcacagggctaaacatcagactaatcccaggtccaggcccagatccaagcaagaagcctatgttgattcctggtctggatctgaggatgaggccagcaacccattctccttctgggttggagaaaataccaataacttgttcaggcccagagtcagggaggaggcaaatatcaggtccaagctcaggacaaatagagaagattgttttgaatctgagtctgaagatgagttctataagcagtcctgggttttgcctggagaagaggccaatagtagattcaggcacagagacaaagaagatcctaatactgccttgaaactcagggcccagaaagatgttgacagtgatagggtcaaacaagaacccaggtttgaggaggaagtcattattgggtcctggttctgggcagaaaaagaggccagtttggagggtggagcttcagcaatctgtgaatctgagccaggaactgaggagggggccattggcggatccgcgtactgggctgaggaaaagtccagtttgggggctgtggccagagaagaggccaagccggagtctgaagaagaggccatatttgggtcctggttctgggacagagatgaggcctgctttgacctaaatccctgtcctgtgtacaaggtcagtgataggttcagagatgcagctgaggagcttaatgcatcctccaggccccaaacctgggacgaggtcactgttgaattcaaacctggtctttttcatggggttggcttccgatccacaagcccctttggaattcccgaagaggcttctgaaatgcttgaggcaaagcccaagaacctggaacttagcccagaaggagaagagcaggaatctttgcttcagcctgatcagcctagtcctgagttcacatttcagtatgatccttcctaccggtcagtccgggaaattcgagagcatcttagggccagggagagtgcagagtctgagagttggtcctgcagctgcatacaatgtgagctgaaaattggttctgaagagtttgaagaattccttttattaatggacaaaattcgggatccttttattcatgaaatatctaaaattgcaatgggtatgagaagtgcttctcaatttacccgagatttcattcgagattcaggtgttgtctcacttattgaaaccttgcttaattatccatcctctagagttaggacaagttttttggaaaatatgattcacatggctccaccttatccaaatctaaacatgattgagacattcatatgtcaagtgtgtgaggaaacccttgcacatagtgtggattcccttgagcagctgactggaataaggatgcttagacacctcactatgactattgactatcacacactgattgccaactatatgtccgggtttctctccttattaaccacagccaatgcgagaacgaagtttcacgttctgaaaatgctattgaatttgtctgaaaatcctgctgtggcaaaaaaactattcagtgccaaagctctttcaatatttgtgggtctctttaacatagaagagacaaatgataatattcaaattgttattaaaatgtttcagaatatcagtaacattataaaaagtggaaagatgtccttaattgatgatgatttcagtcttgagccgcttatttctgcatttcgtgaatttgaggagttagctaagcaactacaagcccaaatagacaaccaaaatgatcctgaggtgggacaacaaagttaatatgattaaccacctgccgctgatcagccttatgttcccaaagagccctgagtagtgctttggtgttcacagtctgtttttttgttgtaacttatattttttaatgctgatgttaactttgtcaaactcttgttttgagctggatcattttgtggatgccaaatgaatatcaaaactgaaaacacatttgttgatatttgtcttgctgtccagattgcggtatttttcagtattaagttttcaatgaactgtgtcacctaagtaagctaccctgctattcgttgtttaaatatatggttctctatttgagtctgtgttttcaataaagttctatgttaaaattggcaaaaaaaaaaa

SEQ ID NO: 1802 - protein, 838 aa, Homo sapiens; identical to SEQ ID NO: 1800

SEQ ID NO: 1803 - DNA, 4004 bp, Homo sapiens
gagaggagtgttttcttgcatccagaaaagacctgagaggcggacgacacctgtgctccgcagagcagaacgtgggaggaacggcgggatgttaaggagctcaagaagcagagagtctacctgcccgacgcgttcgtggagaggagcagcggttgctgttggaggaggtgggtgcaaggacggcagatggcatccctgagaggtggtgactgagactagatgcgggtgcaggtccatctccactggtggctgtggtggctttggattgttggaagaccatcaccttcagcaggtctgcacttgggaacaatcattctcccccagcccgagcgtgcctctgccctctgtatcattgacagaggctgtatgtttggaaagagaactttgtgactgcagaactgacagttgactctaattcttgctaccaagtttttccccgacccagtgaaagagtgttaagacttcgacctaggacacattgagaaccaaggccaagactggacagggccatataactgggcttcaaccatggctgggactaagaataagacaagagcccaggccaaaactgaaaaaaaggctgctatacaagctaaagctggagcagagagggaggctactggtgttgttaggcctgtagccaagaccagggccaaagcaaaagccaagacagggtctaagacagatgcagtagcagagatgaaggcagtgtctaagaacaaggttgttgctgagacgaaggaaggagctctgtcagagcctaagactctgggcaaagccatgggagatttcactcccaaggctgggaatgagtccaccagctccacatgtaaaaatgaggctggtactgatgcctggttctgggctggggaagaggccactatcaattcctggttctggaatggagaagaggctggtaatagtttcagcactaagaatgataaacctgaaattggtgcccaggtctgtgctgaggagttggaacctgcggctggggccgattgcaaacctaggtcaggggctgaggaggaggaggaagagaatgttattgggaactggttttgggaaggagatgatactagttttgaccctaatcctaaacctgtgagcaggatagttaagcctcagcctgtgtatgaaattaatgaaaaaaataggcccaaggactggtctgaggtaactatctggcccaatgcccctgctgtaactccagctgtgttaggatttagatcacaggcaccatctgaggcaagccctccttcatatattgttctggcctccgctgaagaaaatgcctgttctttgcctgtggcaacagcttgccgcccttctaggaacactcgctcatgctcacagcctatccctgagtgtcgttttgattctgacccctgcatccagaccatagatgagattagacgtcaaatcaggatcagggaggtaaatgggattaagccatttgcttgtccttgcaaaatggaatgctatatggattctgaggaatttgaaaaacttgttagcttacttaagtcaactactgatcctcttattcataaaatagcacggattgcaatgggtgtccataatgttcacccatttgcccaagagtttattaacgaagtaggtgtagtgacacttattgaaagcttgctcagttttccttcccctgaaatgagaaaaaagactgtaattactctgaatcctccttctggggatgaaagacaacgcaaaattgaattacatgttaagcatatgtgtaaagaaaccatgtcatttcctttgaactcaccgggacagcaatctggattaaagatactaggacaactgactactgattttgtccatcactacattgttgccaattacttttcagagcttttccatttgctgtcctcaggaaattgcaaaaccagaaatcttgttttgaaactacttttaaatatgtctgaaaatccaactgcagccagagacatgatcaatatgaaggcattggcagcattaaaactcatctttaaccagaaagaggcaaaagccaatcttgttagtggtgtggccatatttattaacataaaggagcatatcagaaaaggctcaattgtagttgttgatcacttgagttataatacactcatggccattttcagggaagttaaagagattattgaaacaatgtaaaatgagccagagatagaacattttaagccatcttcaaactctagcaggctgtacattacagtgtacacattatacactgcatctttaacacagagtcacctgtgacaggctctaggtttgagctagactattttgggggtatcaaatgaatattataccttgggctgaaaatgtttgatttttatcttgtctagattggcatatttttaacattttacttaagatagcaaaccagttcgttttaagtaagctaacttgttcattagtatctgtggcttaaaatggcaaaaaagaaaatatccttgagtttgtaatctagttacagaagtaaggcatacacacacacaaagataacagtacctagagagagagtgtgtgtgagtgtgcgtgtctctgtgtgtgcacgtgcacgctcatggccaaatgtgcgcactctacataaaggaggcaggagttcctataggctatttaatgtaagagaaactatttttctcctgttccagctgtatcagatactcgttccgcaacacagaaatgactcagaatctcagacaaaatgtattatttgttcaattttaattttgctactacattcataactcttaaattgttaggctgtttcatttacatcaaagttatctcacaaaagagaaggcaggaaacgttttgtgagtgcctattctatgtcaaacactgtgttggcaccatattttacaagtttttttcctcttctcacagtgatcttgtgagttagttacttatatttttattagaactcattattctgggtaccctccaatgagaattagagaggttaaataccttttcctagattcccacagcaggaaggtggcatagctgttttgtctgacaccagaacccatctcaccacactgctttacagtcttcctgaaggacattttgaggtgggggggccttcaaagctcagagactggtttgaatggtttaattttgcaatggatcatgtccatgccaggtgttacaattcttaacttcctccaaattcgtgtgtccattagacatttggctacatctggctggaggtcaggagaaaattctgaggtaaatagatggattttatctggcagtgtcgaaaatagtaggagcctaaaactttgttcaatgagtaagatgtagatttggagtcatcagcaggggaaacttgttagatgtcctttgtatctttttctatccatttgtattttttctttcccaaagagctgaaatcattttataccctgaatttaaaaggtaattgcttttttcctccttgcgaaatcataccttaatttttttttttttttttttaccatttatgatttattctcctatgtgtcatatgaaaggccaaggggctttatcttttactagtaggcaagcctgggcatttctgcatttgtgccagctaacactacaaaatagacttaattagagaaatttagacccagaattgcagcttcaacaacacaaaacaggaaagctagaagaggttgctgtgtcaacctacaagatagtgattcttggaagttggtatggaccagaaagcattcccaggacatttaggctatggctgagttctctaagactcagggtgggaattataatccctggtctaagctgatatgaaagtttctatgtgtgaaaatatggagttatatgctttgagattttctgccagttaaactaaaacaagatcatactgtaaatgtttgtaacttgcttccccccactgtatactgtaaacatctttgcatgtcaataaatatgcctctacaacataaaaaaaaaaaaaaataaaaaaaaaaaaaaaa

SEQ ID NO: 1804 - protein, 547 aa, Homo sapiens
MAGTKNKTRAQAKTEKKAAIQAKAGAEREATGVVRPVAKTRAKAKAKTGSKTDAVAEMKAVSKNKVVAETKEGALSEPKTLGKAMGDFTPKAGNESTSSTCKNEAGTDAWFWAGEEATINSWFWNGEEAGNSFSTKNDKPEIGAQVCAEELEPAAGADCKPRSGAEEEEEENVIGNWFWEGDDTSFDPNPKPVSRIVKPQPVYEINEKNRPKDWSEVTIWPNAPAVTPAVLGFRSQAPSEASPPSYIVLASAEENACSLPVATACRPSRNTRSCSQPIPECRFDSDPCIQTIDEIRRQIRIREVNGIKPFACPCKMECYMDSEEFEKLVSLLKSTTDPLIHKIARIAMGVHNVHPFAQEFINEVGVVTLIESLLSFPSPEMRKKTVITLNPPSGDERQRKIELHVKHMCKETMSFPLNSPGQQSGLKILGQLTTDFVHHYIVANYFSELFHLLSSGNCKTRNLVLKLLLNMSENPTAARDMINMKALAALKLIFNQKEAKANLVSGVAIFINIKEHIRKGSIVVVDHLSYNTLMAIFREVKEIIETM

SEQ ID NO: 1805 - DNA, 1011 bp, Homo sapiens
atgtcctgcccaagcactgtcattcttttactctgcatcaaacaggaacaaagatggcagtgtcttcataattcacccactcaaagttccacttttggagaacccaacagacctatcacgcagacaggagactttaacaaccacctggagcctgtgggaagggacagcacccaagacacggggtcccacaggcccctttccggaatcagggccccgagtagcgaacgcggcccacctctcgtgggctgggcacagagctgggacgccggctccccccggccttcccgggagccccccacaatggctcccgctccgccatttctcccgcaggagctcccccacagccctttccgggcacagacaccgtcgagggcggggcgccggcgcctgcaaagctggcttggaggcggtcagcgcggttctcctccagacgatctgacggtgcctctcaagccagcccctcagcccttggcctggctcggcctgcaccggtcaccgcctccccatcgccaggggtctcgagcactgcgcacctctctccggcgaccggctccgaccggatcgtctcctccttgccaggatgtcagggtcggcggggcaggctgccagccggtccaccctggcggaccaccccaagctcacgcacccccacttgccttcagaggcccagggcccaggtcgtcgacctccccctcctctcctcagctctcctctggcggctcctcacttcgattctcaccgctttccccgctatcagaatggcaaagacgcgtcccgccccccacgcctctgcaccaaactgggcaggggctgcgcaggatgctgcaagaaccgctctctccgcgagggtgtcgggaaggggggcggagggatacggcgcgaaagtgctcgacgcccccctctcaggcccaccttagttccgacccagaggtgggcggggccatgacgagccccagcctgggcctgcgggttggcaccaggctgcctcaggaggacccccgcggaccctaa

SEQ ID NO: 1806 - protein, 336 aa, Homo sapiens
MSCPSTVILLLCIKQEQRWQCLHNSPTQSSTFGEPNRPITQTGDFNNHLEPVGRDSTQDTGSHRPLSGIRAPSSERGPPLVGWAQSWDAGSPRPSREPPTMAPAPPFLPQELPHSPFRAQTPSRAGRRRLQSWLGGGQRGSPPDDLTVPLKPAPQPLAWLGLHRSPPPHRQGSRALRTSLRRPAPTGSSPPCQDVRVGGAGCQPVHPGGPPQAHAPPLAFRGPGPRSSTSPSSPQLSSGGSSLRFSPLSPLSEWQRRVPPPTPLHQTGQGLRRMLQEPLSPRGCREGGRRDTARKCSTPPSQAHLSSDPEVGGAMTSPSLGLRVGTRLPQEDPRGP

SEQ ID NO: 1807 - DNA, 862 bp, Homo sapiens
cttggcggtgacgcacggccctcacgtgaccgggagctgcagagctacgcagccttcggtgcagtcgtcactcgtgtctcgctaccagctccccgctgccctgcgctcggcgggctggcatccggcccgggggaaagcggaccagcccttctgcaggtctgcggggccaagtgtcccggcggcgcacctcgtggcgagaatcgggagaaggaggagactacaaggataggcccaggagtaatggagtccaaagagaaacgagcagtaaacagtctcagcatggaaaatgccaaccaagaaaatgaagaaaaggagcaagttgctaataaaggggagcccttggccctccctttggatgctggtgaatactgtgtgcctagaggaaatcgtaggcggttccgcgttaggcagcccatcctgcagtatagatgggatatgatgcataggcttggagaaccacaggcaaggatgagagaagagaatatggaaaggattggggaggaggtgagacagctgatggaaaagctgagggaaaagcagttgagtcatagtctgcgggcagtcagcactgacccccctcaccatgaccatcatgatgagttttgccttatgccctgaatcctgatggtttccctaaagttattacggaaacagacccctgctttcgaatttacatgttcatgatgtgcccttgttgtaaacctttacctgtcacttgtttacgtgggtctcctattaccagcttctaattgaatattgtgtttttgaaccagtctgtaagatttttgttagcagaagaattttacctattgcatggaaagatgctcattatagtgaagttaataaagcacctttaaaaagc

SEQ ID NO: 1808 - protein, 125 aa, Homo sapiens
MESKEKRAVNSLSMENANQENEEKEQVANKGEPLALPLDAGEYCVPRGNRRRFRVRQPILQYRWDMMHRLGEPQARMREENMERIGEEVRQLMEKLREKQLSHSLRAVSTDPPHHDHHDEFCLMP

SEQ ID NO: 1809 - DNA, 1915 bp, Homo sapiens
atcttctccaaactcccgtccccaggccacacagattctcctcaagagagccctataaggacattggtaaaatgtcactgccttcaggacacactacgggtcacactgatcaagttgttcaaagaagagcaagatgttgggatatttaccaaaggagatttagcagtaggtctgaacctgtcaatcctggcatgcattcttcatcccatcagcagcaagatggagatgcagcaatgcatggtgcccacatggactctccagtaagatacactccctatactatttcaccctataatcggaaaggcagttttcgtaaacaagaccaaacccacgttaacatggagagagagcaaaaacctccagagagaagaatggaggggaacatgccggatgggaccttagggagctggttcaagatcacagttccctttggcataaaatacaatgagaagtggctgctgaatttgattcagaatgaatgcagtgtacccttcgtcccagttgagtttcactatgaaaacatgcatgccagcttctttgtggagaatgccagcatcgcctatgcactgaagaatgtcagtggcaagatttgggatgaggataatgaaaagatatcaatctttgtcaaccctgctggcataccccactttgtgcacagggagctgaagtcagaaaaggtggagcagataaagctggccatgaaccaacagtgtgatgtctcccaggaagctcttgatatccagagactcccattttacccagacatggtgaaccgtgatactaagatggcatcgaatcctagaaagtgcatggctgcctccctggacgtccatgaagagaacatacctacagtgatgtctgcaggggagatggacaagtggaaagggatagagccaggagagaagtgtgcggacagaagcccagtgtgcacgaccttctcggatacctccagcaacataaactccatcctggaattgttccccaaattattatgcctggatggccagcagtcacccagagcaactttatgtggtactgaagcccacaagaggttaccaacctgtaagggaagcttctttggatctgagatgttgaagaatctggtcctgcaattcctgcagcagtattacttgatctatgactctggagatcgacagggtctccttagtgcttaccacgatgaggcctgcttctccctgagcattcccttcaatcctgaggactcagccccgagcagcttctgcaagttcttcaaggatagcaggaatataaaaattctcaaggacccctaccttcggggggagctgctgaagcacacaaaacttgatattgtggactccctcagtgcgttgcctaaaactcagcatgacctcagctccttcctggtggacatgtggtaccagacggaatggatgctctgcttttctgtcaacggggtgttcaaggaagtggaaggacagtctcagggttctgttctcgccttcacccggaccttcattgctacccctggcagcagttccagtctgtgcatcgtgaatgacaagctctttgtgcgggataccagccaccaagggacccagagtgccttgttcaccctagtgcccacagccttctccagctccgtgcctgccttctcccaggagcagcagaaaatgctgccttcgtaacaaccagtgtgactacgtcagagctcctcatgttcttgcatggcccaagatgtatttccctgtgactgaaccaggagatctggctggggctaagaagccgaagcccaactcacagggctgactctcatccttccaaaggggccagttgttctgtgcacttgtccacccctgttacccccaggatctctgttccttttcacaataaagtatggtgtcttgttatgtcaaaaaaaaaaaaaaaaaaaaaa

SEQ ID NO: 1810 - protein, 531 aa, Homo sapiens
MSLPSGHTTGHTDQVVQRRARCWDIYQRRFSSRSEPVNPGMHSSSHQQQDGDAAMHGAHMDSPVRYTPYTISPYNRKGSFRKQDQTHVNMEREQKPPERRMEGNMPDGTLGSWFKITVPFGIKYNEKWLLNLIQNECSVPFVPVEFHYENMHASFFVENASIAYALKNVSGKIWDEDNEKISIFVNPAGIPHFVHRELKSEKVEQIKLAMNQQCDVSQEALDIQRLPFYPDMVNRDTKMASNPRKCMAASLDVHEENIPTVMSAGEMDKWKGIEPGEKCADRSPVCTTFSDTSSNINSILELFPKLLCLDGQQSPRATLCGTEAHKRLPTCKGSFFGSEMLKNLVLQFLQQYYLIYDSGDRQGLLSAYHDEACFSLSIPFNPEDSAPSSFCKFFKDSRNIKILKDPYLRGELLKHTKLDIVDSLSALPKTQHDLSSFLVDMWYQTEWMLCFSVNGVFKEVEGQSQGSVLAFTRTFIATPGSSSSLCIVNDKLFVRDTSHQGTQSALFTLVPTAFSSSVPAFSQEQQKMLPS

SEQ ID NO: 1811 - DNA, 3082 bp, Homo sapiens
atgctcgaggtgtccggtgaccgaaacactcttagctgggtgcagggtgcggctcagggcgtggtcaccgggggctacttagggccgccggtgcgggggacgacgcaaaggttaactgcgagctgccgggcactcagcgcgggtcatggcgtggatactggactgccttttcgcctcggcctttgagccccgcccccgccgtgcaaaaacaaccagaggctgctctgcttgagggtgaagccgcctcccagttttccctccccctctacccccacccccatagttctctccaccaggtccagtgacaattggatgatgcagccttgataatcatccgattccagaatgggtggctgcattccttttctgaaggcagcaagggcactgtgccccagaatcatgccccctttgctgttgttgtccgccttcatttttttagtgagtgtcttgggaggagccccaggacacaaccccgaccgcaggacgaagatggtatcgatacacagcctctctgagctggagcgtctgaagctgcaagagactgcttaccacgaactcgtggccagacatttcctgtccgaattcaaacctgacagagctctgcctattgaccgtccgaacaccttggataagtggtttctgattttgagaggacagcagagggctgtatcacacaagacatttggcattagcctggaagaggtcctggtgaacgagtttacccgccgcaagcatcttgaactgacagccacgatgcaggttgaagaagccaccggtcaggctgcgggccgtcgtcggggaaacgtggtgcgaagggtgtttggccgcatccggcgctttttcagtcgcaggcggaatgagcccaccttgccccgggagttcactcgccgtgggcgtcgaggtgcagtgtctgtggatagtctggctgagctggaagacggagccctgctgctgcagaccctgcagctttcaaaaatttcctttccaattggccaacgacttctgggatccaaaaggaagatgagtctcaatccgattgcgaaacaaatcccccaggttgttgaggcttgctgccaattcattgaaaaacatggcttaagcgcagtggggatttttacccttgaatactccgtgcagcgagtgcgtcagctccgtgaagaatttgatcaaggtctggatgtagtgctggatgacaatcagaatgtgcatgatgtggctgcactcctcaaggagtttttccgtgacatgaaggattctctgctgccagatgatctgtacatgtcattcctcctgacagcaactttaaagccccaggatcagctttctgccctgcagttgctggtctacctgatgccaccctgccacagtgataccctggagcgtctgctgaaggccctgcataaaatcactgagaactgcgaggactcaattggcattgatggacagttggtcccaggcaaccgtatgacttccactaacttggccttggtgtttggatctgctctcctgaaaaaaggaaagtttggcaagagagagtccaggaaaacaaagctggggattgatcactatgttgcttctgtcaatgtggtccgtgccatgatagataactgggatgtcctcttccaggtgcctccccatattcagaggcaggttgctaagcgcgtgtggaagtccagcccggaagcacttgattttatcagacgcaggaacttgaggaagatccagagtgcacgcataaagatggaagaggatgcactactttctgatccagtggaaacctctgctgaagcccgggctgctgtccttgctcaaagcaagccttctgatgaaggttcctctgaggagccagctgtgccttccggcactgcccgttcccatgacgatgaggaaggagcgggtaaccctcccattccggagcaagaccgcccattgctccgtgtgccccgggagaaggaggccaaaactggcgtcagctacttctttccttagatgtttttccttctataaggtgccagacaggggaaaagggtgggggtacatctgggatgtcacaggaaacattaaggagagagttgaaggtaaagatctgaaggtaagaaggagttccacctgatgctcgggtcaggatgagaattccaaacacactgccagccccttcactggggatgcttggtctcttctgctggtaaaagcagagatgtttctgtgtcatgcccaagctccccggtgctaccttgcctttctcttttacccctgatcttggctttctctctctctctgcagactttcctttaattgatgtgacatttgtggtaaacacctttcccagggaacctcacaaatcttgagatgctttcccttccccagatgggattgcatgattccctgactttcctaccctcctccagagagctcagttggaaaggccctcaagaggcatgctagaacgttaggtcagcctactgacagctgacaaacaattaatgcgaaatcatgtcacaccaacccatagccgtgtccacgcagcaactccaccaccttaggatttccccctccaaattattcagaccaatggcttgccaaatggcctctcccaaaattctgtacagttttgctcaggtcacgccaacagggaaacctcaagtgtaggtctaattagtgtttctgggatccaaagttagaggaaaatttagattttattgcctggatctgctttaaagacaattggtgtttacaccctcttgtcagcaaaacagctagttaggtaaggacatatagttccaagtaggtaaagtcacttgattacaaatgttcttaactatcgtctctgtaattcctttatacaggacagtacaaaattgtgggacatgctctggtaacacacagatatgggttgcatatgatccagaattacagctgatattatggatgacaactgctaaggtccataaaatgaagactgtattgtattgagggatagaaattgatcatttaatgggtaacaactgctgagctcaaagatttgtgattgttaaaacttctctggcatttaatcattaataaacatctgtattgtgacagc

SEQ ID NO: 1812 - protein, 547 aa, Homo sapiens
MGGCIPFLKAARALCPRIMPPLLLLSAFIFLVSVLGGAPGHNPDRRTKMVSIHSLSELERLKLQETAYHELVARHFLSEFKPDRALPIDRPNTLDKWFLILRGQQRAVSHKTFGISLEEVLVNEFTRRKHLELTATMQVEEATGQAAGRRRGNVVRRVFGRIRRFFSRRRNEPTLPREFTRRGRRGAVSVDSLAELEDGALLLQTLQLSKISFPIGQRLLGSKRKMSLNPIAKQIPQVVEACCQFIEKHGLSAVGIFTLEYSVQRVRQLREEFDQGLDVVLDDNQNVHDVAALLKEFFRDMKDSLLPDDLYMSFLLTATLKPQDQLSALQLLVYLMPPCHSDTLERLLKALHKITENCEDSIGIDGQLVPGNRMTSTNLALVFGSALLKKGKFGKRESRKTKLGIDHYVASVNVVRAMIDNWDVLFQVPPHIQRQVAKRVWKSSPEALDFIRRRNLRKIQSARIKMEEDALLSDPVETSAEARAAVLAQSKPSDEGSSEEPAVPSGTARSHDDEEGAGNPPIPEQDRPLLRVPREKEAKTGVSYFFP

SEQ ID NO: 1813 - DNA, 4636 bp, Homo sapiens
gctctgcagcacgccctgtgtctaggtcgtttgggaaacgccttggagagtcaagaataaatttgcaggtcaaacaatggatgactggaaaagtcggcttgtaatcaagagcatgcttccccatttcgccatggtgggaaatcgtcaggagcccagaaagctccaggaatcgggaaagaagccctcgtggatggaggaagaagatttatcttttctctacaagagcagcccaggaagaaagcatcagggaactgttaagaggagacaagaagaagaccacttccagtttccagacatggctgatgggggctaccctaataaaattaagaggccttgccttgaagatgtcacccttgcaatgggcccaggtgctcatcctagtactgcttgtgcagaactgcaggtccctccattgacaataaatcctagccctgcggctatgggagtggctggccagtcattactgctggagaataaccctatgaatggcaacatcatgggctcaccatttgtagtaccacagactacagaagtgggactgaaagggcccactgttccttactatgagaaaatcaacagcgtgccggctgtagaccaggagcttcaagagctgctagaggagctcaccaaaattcaagacccttctccaaatgagctagatcttgagaagatactggggacgaagccagaagagccactggttttagatcatccccaggcaaccctaagcacaactcccaagccttcggttcagatgtcacacttggagagcctggcttccagcaaggagtttgcttctagttgcagccaagttactggcatgtcacttcagatcccatcctcctccacagggatcagctattcgattccttccaccagtaagcagatagtgtcaccgagttcttcaatggcacagtccaagagccaggtccaggccatgctccctgtcgctctgccccccttaccagtgcctcagtggcatcacgcccaccagctgaaggcgttggcagccagcaagcaggggtctgctacaaagcagcaagggcccacccccagttggtctggtctgcctcctccaggactctctccaccttaccgcccagtgccatcaccacacccaccaccgctgccactgccaccaccaccacccccattcagcccccagagcctcatggtgtcctgcatgtcgtccaataccttgtcgggtagcactctccgaggctctcccaatgccttactgtcaagcatgacgtccagcagcaatgctgccctggggcccgccatgccctatgctcctgagaagctccccagccctgctctcactcaacagccgcagttcggccctcagagctccattcttgccaacctcatgtcctctaccatcaaaacccctcaaggacacctgatgtctgctctgcctgccagcaaccctgggccgtccccaccctatcgcccagagaagctctctagcccaggcttgccacagcagtccttcaccccacagtgttccctgatccgaagcctcactcccaccagtaatcttctaagccagcaacagcagcagcagcagcagcagcagcaagcaaatgtgatctttaagcccataagcagcaactcatccaaaaccctgagcatgatcatgcagcaggggatggcaagctccagcccaggagccacggagccatttacttttggcaacaccaagcccttgtcccattttgtttctgagccgggtccccagaagatgccctccatgcctaccacctctaggcagccttccctgctccactacctgcagcagccgacaccaacgcaggcctcctcagccactgcctcctccacggccactgccaccttgcagctgcagcagcagcagcagcaacagcagcagcagcctgaccattcttcattccttctgcagcagatgatgcagcaaccccagcgttttcagcgatcagtggcctcagattccatgcctgctctgcccagacagggctgttgccatctgtttgcatggacttctgcagctagctcggtgaagccccagcatcaacacgggaactctttcactagcaggcaagatcctcagcctggagacgtgtcaccgtctaacattactcatgtagacaaagcctgcaagcttggggaagccaggcacccccaggtcagcctcgggcgacagcccccgtcctgccaggccctggggagtgagtccttcctgcccggcagctcctttgctcatgagctggcccgagtcacctcctcgtacagcacctcagaggcagcgccctggggcagctgggatccgaaggcctggaggcaggtgcccgctccactactgcctagctgcgacgccacagcaagaggaacagagatcaggtcttatggcaatgacccctgaacggcagaatgcatatatctcccaacagatgagtccatttgaagccgtccaagaacaagtcacctccaagtgtagccggatcaaggcaagccccccatctagcaagcacttgatgccacccagaactgggcttcttcagaacaatctgagtccaggaatgatcccactcaccaggcaccagagctgcgagggcatgggagtgatctcaccaactctggggaagcggcaaggaattttcacctccagcccccagtgtcccatcctctcacactcaggccagactcccctgggcagacttgactctgtctgccagcatatgcagagccccaaggccaccccaccagaagtgcccctgcctgggttctgtcccagctccctgggcacccagtccttgagtccccaccagctcagacggcctagtgtgccaagaatgcccactgcgttcaacaatgctgcatgggtcacagcggcagcagctgtgaccacagcagtttcggggaaaacacccctcagccaagtggataatagcgttcagcagcactcaccttctggccaggcctgccttcagaggccatctgattgggaggcacaagtgcccgctgcgatgggaacacaagtgcccctggccaacaaccccagcttcagcctgctgggcagccagagcctcaggcagagcccggtacagggcccggtgcctgtagcaaacaccaccaagttcctccagcagggtatggccagctttagtcccctgagccccatacagggcatcgagccaccaagctatgtggctgctgctgccaccgctgctgctgcttctgccgttgctgccagccagttcccaggtccgttcgacagaacggatattccccctgagctgccacctgccgactttttgcgccagccccaacccccactaaatgatctgatttcgtcacctgactgcaatgaggtagatttcattgaagctctcttgaaaggctcctgtgtgagcccagatgaagactgggtgtgcaacttgaggctgatcgacgacattttggaacagcatgctgctgctcaaaatgccacagcccagaattctgggcaagtcacccaggatgctggggcactttaaatctgagcaggatgcccatagaaacccccatggtgacatcactctaggaagtggtgtcgatccatacccgcagttgtctcccgttacaatttgagtggtgttgtcagcccatgcttatccctctctctacctgtgacaaaatggaaagctggtgatttttcaagctacgtgtacatatttgaaaattttgtaaatggttttcctaaacattaatgacagaagtatttatacttcattttgtgactttgtaaataaagcgacggcttttgtttcagtagagttgtgtttactatgcattgttttgtgtttattatacaatgttacaaatatgcagaccgtgttgtttgctccagtgataccttgttaagctaggtggctgagtcgcttatggttttaatgcaatgagcaatgtggatatgaccaagagttgttgtgcaagttgacaaatgccaaatagaaaaccacttggccatttatttctatgttcactaaaaatcctattgccttgtgtgattcttaatctcttttgcgaacctttcagtctccgctagctctttcctaatgagctttacagcagaagctgttttatcgttaagtgccccacagagacactttaccaggaggctgggagagttctccagatttgggagaggcgcagagacagtgtgtgagccgagccctgtctcagcaatccacctggaggagctagagtatcctcctccctttaccattcagaccgagagaaaaagcccagcttgtgtgcaccctcgtggggttaaggcgagctgttcctggtttaaagcctttcagtatttgttttgatgtaaggctctgtggtttgggggggaacatctgtaaacattattagttgatttggggtttgtctttgatggtttctatctgcaattatcgtcatgtatatttaagtgtctgttatagaaaacccacacccactgtcctgtaaacttttctcagtgtccagactttctgtaatcacattttaattgccacctcgtatttcacctctacatttgaaatctggcgtctgtttcaagccagtgtgttttttcttcgttctgtaataaacagccaggagaaaagtgaaaaaaaaaaaaaaaaaa

SEQ ID NO: 1814 - protein, 774 aa, Homo sapiens
MDDWKSRLVIKSMLPHFAMVGNRQEPRKLQESGKKPSWMEEEDLSFLYKSSPGRKHQGTVKRRQEEDHFQFPDMADGGYPNKIKRPCLEDVTLAMGPGAHPSTACAELQVPPLTINPSPAAMGVAGQSLLLENNPMNGNIMGSPFVVPQTTEVGLKGPTVPYYEKINSVPAVDQELQELLEELTKIQDPSPNELDLEKILGTKPEEPLVLDHPQATLSTTPKPSVQMSHLESLASSKEFASSCSQVTGMSLQIPSSSTGISYSIPSTSKQIVSPSSSMAQSKSQVQAMLPVALPPLPVPQWHHAHQLKALAASKQGSATKQQGPTPSWSGLPPPGLSPPYRPVPSPHPPPLPLPPPPPPFSPQSLMVSCMSSNTLSGSTLRGSPNALLSSMTSSSNAALGPAMPYAPEKLPSPALTQQPQFGPQSSILANLMSSTIKTPQGHLMSALPASNPGPSPPYRPEKLSSPGLPQQSFTPQCSLIRSLTPTSNLLSQQQQQQQQQQQANVIFKPISSNSSKTLSMIMQQGMASSSPGATEPFTFGNTKPLSHFVSEPGPQKMPSMPTTSRQPSLLHYLQQPTPTQASSATASSTATATLQLQQQQQQQQQQPDHSSFLLQQMMQQPQRFQRSVASDSMPALPRQGCCHLFAWTSAASSVKPQHQHGNSFTSRQDPQPGDVSPSNITHVDKACKLGEARHPQVSLGRQPPSCQALGSESFLPGSSFAHELARVTSSYSTSEAAPWGSWDPKAWRQVPAPLLPSCDATARGTEIRSYGNDP

SEQ ID NO: 1815 - DNA, 1113 bp, Homo sapiens
atgcctttggaactcatccccacttctctctttctgtatgtagccgtccaagaacaagtcacctccaagtgtagccggatcaaggcaagccccccatctagcaagcacttgatgccacccagaactgggcttcttcagaacaatctgagtccaggaatgatcccactcaccaggcaccagagctgcgagggcatgggagtgatctcaccaactctggggaagcggcaaggaattttcacctccagcccccagtgtcccatcctctcacactcaggccagactcccctgggcagacttgactctgtctgccagcatatgcagagccccaaggccaccccaccagaagtgcccctgcctgggttctgtcccagctccctgggcacccagtccttgagtccccaccagctcagacggcctagtgtgccaagaatgcccactgcgttcaacaatgctgcatgggtcacagcggcagcagctgtgaccacagcagtttcggggaaaacacccctcagccaagtggataatagcgttcagcagcactcaccttctggccaggcctgccttcagaggccatctgattgggaggcacaagtgcccgctgcgatgggaacacaagtgcccctggccaacaaccccagcttcagcctgctgggcagccagagcctcaggcagagcccggtacagggcccggtgcctgtagcaaacaccaccaagttcctccagcagggtatggccagctttagtcccctgagccccatacagggcatcgagccaccaagctatgtggctgctgctgccaccgctgctgctgcttctgccgttgctgccagccagttcccaggtccgttcgacagaacggatattccccctgagctgccacctgccgactttttgcgccagccccaacccccactaaatgatctgatttcgtcacctgactgcaatgaggtagatttcattgaagctctcttgaaaggctcctgtgtgagcccagatgaagactgggtgtgcaacttgaggctgatcgacgacattttggaacagcatgctgctgctcaaaatgccacagcccagaattctgggcaagtcacccaggatgctggggcactttaa

SEQ ID NO: 1816 - protein, 370 aa, Homo sapiens [sequence omitted]

SEQ ID NO: 1817 - DNA, 3411 bp, Homo sapiens
gcagccgagcagcctggcaacggcggtggcgcccggagcccgagagtttccaggatggcttctgcatcaacttctaaatataattcacactccttggagaatgagtctattaagaggacgtctcgagatggagtcaatcgagatctcactgaggctgttcctcgacttccaggagaaacactaatcactgacaaagaagttatttacatatgtcctttcaatggccccattaagggaagagtttacatcacaaattatcgtctttatttaagaagtttggaaacggattcttctctaatacttgatgttcctctgggtgtgatctcgagaattgaaaaaatgggaggcgcgacaagtagaggagaaaattcctatggtctagatattacttgtaaagacatgagaaacctgaggttcgctttgaaacaggaaggccacagcagaagagatatgtttgagatcctcacgagatacgcgtttcccctggctcacagtctgccattatttgcatttttaaatgaagaaaagtttaacgtggatggatggacagtttacaatccagtggaagaatacaggaggcagggcttgcccaatcaccattggagaataacttttattaataagtgctatgagctctgtgacacttaccctgctcttttggtggttccgtatcgtgcctcagatgatgacctccggagagttgcaacttttaggtcccgaaatcgaattccagtgctgtcatggattcatccagaaaataagacggtcattgtgcgttgcagtcagcctcttgtcggtatgagtgggaaacgaaataaagatgatgagaaatatctcgatgttatcagggagactaataaacaaatttctaaactcaccatttatgatgcaagacccagcgtaaatgcagtggccaacaaggcaacaggaggaggatatgaaagtgatgatgcatatcataacgccgaacttttcttcttagacattcataatattcatgttatgcgggaatctttaaaaaaagtgaaggacattgtttatcctaatgtagaagaatctcattggttgtccagtttggagtctactcattggttagaacatatcaagctcgttttgacaggagccattcaagtagcagacaaagtttcttcagggaagagttcagtgcttgtgcattgcagtgacggatgggacaggactgctcagctgacatccttggccatgctgatgttggatagcttctataggagcattgaagggttcgaaatactggtacaaaaagaatggataagttttggacataaatttgcatctcgaataggtcatggtgataaaaaccacaccgatgctgaccgttctcctatttttctccagtttattgattgtgtgtggcaaatgtcaaaacagttccctacagcttttgaattcaatgaacaatttttgattataattttggatcatctgtatagttgccgatttggtactttcttattcaactgtgaatctgctcgagaaagacagaaggttacagaaaggactgtttctttatggtcactgataaacagtaataaagaaaaattcaaaaaccccttctatactaaagaaatcaatcgagttttatatccagttgccagtatgcgtcacttggaactctgggtgaattactacattagatggaaccccaggatcaagcaacaacagccgaatccagtggagcagcgttacatggagctcttagccttacgcgacgaatacataaagcggcttgaggaactgcagctcgccaactctgccaagctttctgatcccccaacttcaccttccagtccttcgcaaatgatgccccatgtgcaaactcacttctgaggggggaccctggcaccgcattagagctcgaaataaaggcgatagctgactttcatttggggcatttgtaaaaagtagattaaaatatttgcctccatgtagaacttgaactaacataatcttaaactcttgaatatgtgccttctagaatacatattacaagaaaactacagggtccacacggcaatcagaagaaaggagctgagatgaggttttggaaaaccctgacacctttaaaaagcagtttttgaaagacaaaatttagatttaatttacgtcttgagaaatactatatatacaatatatatggggggggcttaattgaaacaacattattttaaaatcaaaggggatatatgtttgtggaatggattttcctgaagctgcttaacagttgctttggattctctaagatgaatccaaatgtgaaagatgcatgttactgccaaaaccaaattgagctcagcttcctaggcattacccaaaagcaaggtgtttaagtaattgccagcttttataccatcatgagtggtgacttaaggagaaatagctgtatagatgagtttttcattatttggaaatttaggggtagaaaatgttttcccctaattttccagagaagcctatttttatatttttaaaaaactgacagggcccagttaaatatgatttgcattttttaaatttgccagttttattttctaaattctttcatgagcttgcctaaaattcggaatggttttcgggttgtggcaaaccccaaagagagcactgtccaaggatgtcgggagcatcctgctgcttaggggaatgttttcgcaaatgttgctctagtcagtccagctcatctgccaaaatgtagggctaccgtcttggatgcatgagctattgctagagcatcatccttagaaatcagtgccccagatgtacatgtgttgagcgtattcttgaagtattgtgtttatgcatttcaatttcaatggtgttggcttcccctccccaccccacgcgtgcataaaaactggttctacaaatttttacttgaagtaccaggccgtttgctttttcaggttgttttgttttatagtattaagtgaaattttaaatgcacagttctatttgctatctgaactaattcatttattaagtatatttgtaaaagctaaggctcgagttaaaacaatgaagtgttttacaatgatttgtaaaggactatttataactaatatggttttgttttcaatgaattaagaaagattaaatatatctttgtaaattattttatgtcatagtttaattggtctcccaagtaagacatctcaaatacagtagtataatgtatgaattttgtaagtataagaaattttattagacattctcttactttttgtaaatgctgtaaatatttcataaattaacaaagtgtcactccataaaaagaaagctaatactaatagcctaaaagattttgtgaaatttcatgaaaactttttaatggcaataatgactaaagacctgctgtaataaatgtattaactgaaacct

SEQ ID NO: 1818 - protein, 603 aa, Homo sapiens
MASASTSKYNSHSLENESIKRTSRDGVNRDLTEAVPRLPGETLITDKEVIYICPFNGPIKGRVYITNYRLYLRSLETDSSLILDVPLGVISRIEKMGGATSRGENSYGLDITCKDMRNLRFALKQEGHSRRDMFEILTRYAFPLAHSLPLFAFLNEEKFNVDGWTVYNPVEEYRRQGLPNHHWRITFINKCYELCDTYPALLVVPYRASDDDLRRVATFRSRNRIPVLSWIHPENKTVIVRCSQPLVGMSGKRNKDDEKYLDVIRETNKQISKLTIYDARPSVNAVANKATGGGYESDDAYHNAELFFLDIHNIHVMRESLKKVKDIVYPNVEESHWLSSLESTHWLEHIKLVLTGAIQVADKVSSGKSSVLVHCSDGWDRTAQLTSLAMLMLDSFYRSIEGFEILVQKEWISFGHKFASRIGHGDKNHTDADRSPIFLQFIDCVWQMSKQFPTAFEFNEQFLIIILDHLYSCRFGTFLFNCESARERQKVTERTVSLWSLINSNKEKFKNPFYTKEINRVLYPVASMRHLELWVNYYIRWNPRIKQQQPNPVEQRYMELLALRDEYIKRLEELQLANSAKLSDPPTSPSSPSQMMPHVQTHF

SEQ ID NO: 1819 - DNA, 2732 bp, Homo sapiens
gacagctaatggcggcggccgcctgaggcgggcgggcggtatagagcgggcggcaggaggcaagcagcgaaaccttcccggccgccgctcccgtcccgacggcggcttccccaaggcggcaggactcggcgcgccatggacaggccggcggcggcggcggcggcgggctgcgagggcggcgggggcccgaacccggggccggcgggcggcaggaggcctcctcgggccgcggggggcgccaccgccggctcccggcagcccagcgtggagaccctggacagtcccacaggatcacatgttgaatggtgtaaacagcttatagctgctacaatttctagtcagatttcaggttcagtgacatcagaaaatgtgtccagagattacaaggctctaagggatggaaataagctggcacagatggaagaggctccacttttcccaggagaatcaattaaagccattgtgaaagatgtcatgtatatctgcccatttatgggagcagtgagtggaaccctgacagtgacggactttaagctgtacttcaaaaatgtcgagagggacccgcattttatccttgatgttccccttggagtgatcagcagagtggagaagattggagcacagagccatggagacaattcctgtggtatagagatagtgtgcaaggatatgaggaacttgcggcttgcttataaacaggaagaacagagtaaactagggatatttgaaaacctcaacaaacatgcatttcctctttctaacggacaggcactatttgcattcagctataaagaaaaatttccaattaatggctggaaagtttatgatccagtatctgaatataagagacagggcttgccaaatgagagttggaaaatatccaaaataaacagtaattatgagttctgtgacacctaccctgccatcattgttgtgccaactagtgtaaaagatgatgacctttcaaaagtggcagcttttcgagcaaaaggcagagtccctgtgttgtcatggattcatccggaaagtcaagcaacgattacccgttgcagccagccacttgtgggtcccaatgataagcgctgcaaagaggatgaaaaatacttgcaaacaataatggatgctaacgcacagtcacacaagcttatcatctttgatgctcgacaaaacagtgtcgctgataccaacaagacaaagggtggaggatatgaaagtgaaagtgcttacccaaatgcagaacttgtgttcttggagatccacaacattcatgtcatgcgagagtcactacgcaaattaaaagagattgtgtacccttcgatcgatgaggcgcggtggctctccaatgtggatgggacgcattggctggaatatataaggatgctgcttgctggggcagtaagaattgctgataaaatagaatctgggaaaacatctgtggtggtgcattgcagcgacggttgggaccgaacagcccagctcacatctctggctatgctaatgttggacagttactacaggaccattaaaggatttgaaactctcgtagaaaaggagtggataagctttggacacaggtttgcactgcgagtgggccatggtaatgacaaccatgcggatgctgaccgatctcccatatttctgcagtttgttgattgtgtttggcaaatgacaaggcagtttccttcagcattcgagtttaatgagctattcttgattacaattttggatcacctttatagctgtctttttgggacctttttgtgcaactgtgaacagcagcgattcaaagaggatgtatatacaaagacgatatctttatggtcgtatatcaatagccagctagacgagttttctaatcccttctttgtgaattatgaaaaccacgtgttatatcctgttgctagtctgagtcatttggaattgtgggtaaattattatgtacgatggaatccacggatgagacctcagatgcccattcaccagaatctcaaggagctgctggccgtcagggcggagctgcagaagcgtgtggagggcctacagcgggaggtggccacgcgcgccgtctcatcctcatctgagcggggctcctcgccctcccactccgccacctccgtccacacctcggtctgatgggcgagaaatatgtaatcccctggctgactaggactgttaaacatagtgtggactggatgatgccttcgacaaaccagagaagccaagttggggggagctggtgcctggagtgggccctgtgcacctcacctggcggaggctggggggggctctgtcagcaggaccctagaggagactctcattcgattttaaagaagcacaacgggtcattttcctttgtatgttcctagcgcagaactgtttctaaaacaacttgaagtatagttttgttatctaagcaatttttgttttaagtaagtaagtgtactagaatgcgaagccgttatggttcaggtttttaaaaactggtacagtattgtatttgtctcatctgttgcactgtatttcaatcatctgtaattaaaatgatcatatgtttgctccctggtcttttttaagtaagtaagtaagtatcttagtagatttttcctttgaggaaaatcggtaataaaataacatggattgaatgtttactgtgcgtcaagcacagttaatatatgatgatgtaaagtaactaactttatgtgatttaattcattcagtaaattgtaaatgta

SEQ ID NO: 1820 - protein, 665 aa, Homo sapiens
MDRPAAAAAAGCEGGGGPNPGPAGGRRPPRAAGGATAGSRQPSVETLDSPTGSHVEWCKQLIAATISSQISGSVTSENVSRDYKALRDGNKLAQMEEAPLFPGESIKAIVKDVMYICPFMGAVSGTLTVTDFKLYFKNVERDPHFILDVPLGVISRVEKIGAQSHGDNSCGIEIVCKDMRNLRLAYKQEEQSKLGIFENLNKHAFPLSNGQALFAFSYKEKFPINGWKVYDPVSEYKRQGLPNESWKISKINSNYEFCDTYPAIIVVPTSVKDDDLSKVAAFRAKGRVPVLSWIHPESQATITRCSQPLVGPNDKRCKEDEKYLQTIMDANAQSHKLIIFDARQNSVADTNKTKGGGYESESAYPNAELVFLEIHNIHVMRESLRKLKEIVYPSIDEARWLSNVDGTHWLEYIRMLLAGAVRIADKIESGKTSVVVHCSDGWDRTAQLTSLAMLMLDSYYRTIKGFETLVEKEWISFGHRFALRVGHGNDNHADADRSPIFLQFVDCVWQMTRQFPSAFEFNELFLITILDHLYSCLFGTFLCNCEQQRFKEDVYTKTISLWSYINSQLDEFSNPFFVNYENHVLYPVASLSHLELWVNYYVRWNPRMRPQMPIHQNLKELLAVRAELQKRVEGLQREVATRAVSSSSERGSSPSHSATSVHTSV

SEQ ID NO: 1821 - DNA, 3635 bp, Homo sapiens
gctttgggcgggaccctgcagaggcggcggggctcctcctcccgctcctcctcggcctccccttcgggcgctctcgcgctaactgtgctcctccggggccctccgcctgctcccagccatggtggcctggcgctcggcgttccttgtctgcctcgctttctccttggccaccctggtccagcgaggatctggggactttgatgattttaacctggaggatgcagtgaaagaaacttcctcagtaaagcagccatgggaccacaccaccaccaccacaaccaataggccaggaaccaccagagctccggcaaaacctccaggtagtggattggacttggctgatgctttggatgatcaagatgatggccgcaggaaaccgggtataggaggaagagagagatggaaccatgtaaccaccacgaccaagaggccagtaaccaccagagctccagcaaatactttaggaaatgattttgacttggctgatgccctggatgatcgaaatgatcgagatgatggccgcaggaaaccaattgctggaggaggaggtttttcagacaaggatcttgaagacatagtagggggtggagaatacaaacctgacaagggtaaaggtgatggccggtacggcagcaatgacgaccctggatctggcatggtggcagagcctggcaccattgccggggtggccagcgccctggccatggccctcatcggtgccgtctccagctacatctcctaccagcagaagaagttctgcttcagcattcagcagggtctcaacgcagactacgtgaagggagagaacctggaagccgtggtatgtgaggaaccccaagtgaaatactccacgttgcacacgcagtctgcagagccgccgccgccgcccgaaccagcccggatctgagggccctgtccagctgcaggcatgcacaatggtgccaccgcttgtcacccggctccccccaccccttcatttggacccgcagctgctgtgctgctctgtgccatcggctccttgttggtctgagtttcccggatgagctctgggtgtttgtgagtttggtttctctgccctgccccaagcgtgctgagacttggtgccgaaattcaagagccagctctgatagaaagccagcaccagcctcgggagctgctgagccaccaactcccaaagccagcctgcctccagctttactgagcacaggatgcgggggccaagatgatgctgaggcctgatgacatttatgcttaggggacaagagtttgaactcaagggactgtgacccctgcacactggagtggctcattgtggcaggtttctgccaatagacagcccctgacagtggcctcaaggagctgcaggtggggggctcagcctgcacccacttggagcccctgcaaggagcgaaccggtcagcaccaagtaacaccacacacacgcagcacccaggatgatggtttcacttcagtcttccccatcccaggttttatgttgctgggcttccggagagccggtccaagcggaggctttcagtgatttaagtacaaacatgcatctcgtgatagtcctgccttgagagcttaggaatcttccggataagtatgaagcaattcgtaggcctgtttcccatctgattccatagggggctgggtgtggccttcgggttgacatgagaaaggtctttagcaatcatttctgcaccggagatgagttttatcctgtgttggggagaggtgctcaccctccaccctgtgtccctgttttggtagcaagagtgaccgatgtcaagaacgagcatcaaagccagaatcctgcttgtttgcttaaaaatgtaattgggggcggcgggggaggagaggggaaagagacattcgcttggtttagtgaaacgcaggtgactttgtagctctgtggtcagcctacttgtctgctctgagggagagtgcgtggggagccatgctcaccgtggcaaacacaggaaccccatgactcgcccctcacctggcgtggagctgcctggtttgggctggagcagagctggtttcctggaatgttcctttggcccacatatggttctgtcccggtgagctctgttgtcagaggctcacgggacagaaccacatgctagggtctagggcccctgtctactgatagtcagtttgctgtgtcagaaagcacttctgaaagcagatatgagtcaccagacaggcaggatcttacaaaactcacgggcctctttggtctgcatgatggccccatgcgtttcataggctgtccactgagcgggattgtctgctgagtgggatgagccaactccagtttcttaaggaaaccactggaatctgcagcccccacatgcatctgtctaacgcatgcctcgtgttcgttttgcaaacatgcctgtggtggagggtggtcagttgtagccctgtgcgtctcaaggctgccttgtgaggccattcccagtgcgtgcccttgagctccttaccaccccttttcctgctcggccctttaatccctgacagacctggactgtgtggctgaagggggacctgcagcactgcagaaatgcctctgcgtggtgccatgaaggaaagaaaccttggcctggtctcgagaagcttcccatgcttcaggaagttagtaagggtggggtggcttgcaggattggcctgtttccagggcctcccacactcattggccagattgtgaactttgtcaggcttgtccctccctgataccaagtatgtcgagaaccgatggccccaccctctggctggtgctgggccggaggtggctatggaggattttggcatgcgtggcctgtcgccacctggacagcgtgacctcaggggttgtccactttacctttatggtgaggcctgtcggatggctaagtccttgaaaccctagagctgtgacgtagaatatgtgctgtctgtgagaccgtgttcccaggagcactgactgcagttgagagagacccattttgctctcccttaccgccccccgccccgggtgctttctgcacaaagcctagagcctggcactcaagcccaccggtggcagctcctagtgactggacatgcctggaagacccctcagccttctgtttgcagaacgttcatttcaggagcttctccttcccacagacatcttacacttgctcgacactgccacctgcagaagcctggcgggctctggtcaccatgtgtctatctgaaggttgcactggccagcatgggcctgtcccaagcgagaggggagacacagtggactgaaaggactggttgaaagtggccaatctctatcagcttaatttggcagagaaaatttgtaacaactctgagcacatgctgggtgaagtcacagctcaaggaaagataaagctgggcggaaggaggtgtgcgtggcttctggggtgggacccagaggggaggctctgggacaggggctggggttcagtgccagggccctgaggaagaaatggggactgatctcaaaattccagaattccctgtacatctgttcacgtgcttgtgtccaggtgtgacttgtaaactgtctagtgtttgcattaaataaaatggcaccgagcagaaaaaaaaaaaaaaaaaaaaaaaaaaaaaaa

SEQ ID NO: 1822 - protein, 262 aa, Homo sapiens
MVAWRSAFLVCLAFSLATLVQRGSGDFDDFNLEDAVKETSSVKQPWDHTTTTTTNRPGTTRAPAKPPGSGLDLADALDDQDDGRRKPGIGGRERWNHVTTTTKRPVTTRAPANTLGNDFDLADALDDRNDRDDGRRKPIAGGGGFSDKDLEDIVGGGEYKPDKGKGDGRYGSNDDPGSGMVAEPGTIAGVASALAMALIGAVSSYISYQQKKFCFSIQQGLNADYVKGENLEAVVCEEPQVKYSTLHTQSAEPPPPPEPARI

SEQ ID NO: 1823 - DNA, 3419 bp, Homo sapiens
gctttgggcgggaccctgcagaggcggcggggctcctcctcccgctcctcctcggcctccccttcgggcgctctcgcgctaactgtgctcctccggggccctccgcctgctcccagccatggtggcctggcgctcggcgttccttgtctgcctcgctttctccttggccaccctggtccagcgaggatctggggactttgatgattttaacctggaggatgcagtgaaagaaacttcctcagtaaagcgaaatgattttgacttggctgatgccctggatgatcgaaatgatcgagatgatggccgcaggaaaccaattgctggaggaggaggtttttcagacaaggatcttgaagacatagtagggggtggagaatacaaacctgacaagggtaaaggtgatggccggtacggcagcaatgacgaccctggatctggcatggtggcagagcctggcaccattgccggggtggccagcgccctggccatggccctcatcggtgccgtctccagctacatctcctaccagcagaagaagttctgcttcagcattcagcagggtctcaacgcagactacgtgaagggagagaacctggaagccgtggtatgtgaggaaccccaagtgaaatactccacgttgcacacgcagtctgcagagccgccgccgccgcccgaaccagcccggatctgagggccctgtccagctgcaggcatgcacaatggtgccaccgcttgtcacccggctccccccaccccttcatttggacccgcagctgctgtgctgctctgtgccatcggctccttgttggtctgagtttcccggatgagctctgggtgtttgtgagtttggtttctctgccctgccccaagcgtgctgagacttggtgccgaaattcaagagccagctctgatagaaagccagcaccagcctcgggagctgctgagccaccaactcccaaagccagcctgcctccagctttactgagcacaggatgcgggggccaagatgatgctgaggcctgatgacatttatgcttaggggacaagagtttgaactcaagggactgtgacccctgcacactggagtggctcattgtggcaggtttctgccaatagacagcccctgacagtggcctcaaggagctgcaggtggggggctcagcctgcacccacttggagcccctgcaaggagcgaaccggtcagcaccaagtaacaccacacacacgcagcacccaggatgatggtttcacttcagtcttccccatcccaggttttatgttgctgggcttccggagagccggtccaagcggaggctttcagtgatttaagtacaaacatgcatctcgtgatagtcctgccttgagagcttaggaatcttccggataagtatgaagcaattcgtaggcctgtttcccatctgattccatagggggctgggtgtggccttcgggttgacatgagaaaggtctttagcaatcatttctgcaccggagatgagttttatcctgtgttggggagaggtgctcaccctccaccctgtgtccctgttttggtagcaagagtgaccgatgtcaagaacgagcatcaaagccagaatcctgcttgtttgcttaaaaatgtaattgggggcggcgggggaggagaggggaaagagacattcgcttggtttagtgaaacgcaggtgactttgtagctctgtggtcagcctacttgtctgctctgagggagagtgcgtggggagccatgctcaccgtggcaaacacaggaaccccatgactcgcccctcacctggcgtggagctgcctggtttgggctggagcagagctggtttcctggaatgttcctttggcccacatatggttctgtcccggtgagctctgttgtcagaggctcacgggacagaaccacatgctagggtctagggcccctgtctactgatagtcagtttgctgtgtcagaaagcacttctgaaagcagatatgagtcaccagacaggcaggatcttacaaaactcacgggcctctttggtctgcatgatggccccatgcgtttcataggctgtccactgagcgggattgtctgctgagtgggatgagccaactccagtttcttaaggaaaccactggaatctgcagcccccacatgcatctgtctaacgcatgcctcgtgttcgttttgcaaacatgcctgtggtggagggtggtcagttgtagccctgtgcgtctcaaggctgccttgtgaggccattcccagtgcgtgcccttgagctccttaccaccccttttcctgctcggccctttaatccctgacagacctggactgtgtggctgaagggggacctgcagcactgcagaaatgcctctgcgtggtgccatgaaggaaagaaaccttggcctggtctcgagaagcttcccatgcttcaggaagttagtaagggtggggtggcttgcaggattggcctgtttccagggcctcccacactcattggccagattgtgaactttgtcaggcttgtccctccctgataccaagtatgtcgagaaccgatggccccaccctctggctggtgctgggccggaggtggctatggaggattttggcatgcgtggcctgtcgccacctggacagcgtgacctcaggggttgtccactttacctttatggtgaggcctgtcggatggctaagtccttgaaaccctagagctgtgacgtagaatatgtgctgtctgtgagaccgtgttcccaggagcactgactgcagttgagagagacccattttgctctcccttaccgccccccgccccgggtgctttctgcacaaagcctagagcctggcactcaagcccaccggtggcagctcctagtgactggacatgcctggaagacccctcagccttctgtttgcagaacgttcatttcaggagcttctccttcccacagacatcttacacttgctcgacactgccacctgcagaagcctggcgggctctggtcaccatgtgtctatctgaaggttgcactggccagcatgggcctgtcccaagcgagaggggagacacagtggactgaaaggactggttgaaagtggccaatctctatcagcttaatttggcagagaaaatttgtaacaactctgagcacatgctgggtgaagtcacagctcaaggaaagataaagctgggcggaaggaggtgtgcgtggcttctggggtgggacccagaggggaggctctgggacaggggctggggttcagtgccagggccctgaggaagaaatggggactgatctcaaaattccagaattccctgtacatctgttcacgtgcttgtgtccaggtgtgacttgtaaactgtctagtgtttgcattaaataaaatggcaccgagcagaaaaaaaaaaaaaaaaaaaaaaaaaaaaaaa

SEQ ID NO: 1824 - protein, 190 aa, Homo sapiens
MVAWRSAFLVCLAFSLATLVQRGSGDFDDFNLEDAVKETSSVKRNDFDLADALDDRNDRDDGRRKPIAGGGGFSDKDLEDIVGGGEYKPDKGKGDGRYGSNDDPGSGMVAEPGTIAGVASALAMALIGAVSSYISYQQKKFCFSIQQGLNADYVKGENLEAVVCEEPQVKYSTLHTQSAEPPPPPEPARI

SEQ ID NO: 1825 - DNA, 3488 bp, Homo sapiens
gctttgggcgggaccctgcagaggcggcggggctcctcctcccgctcctcctcggcctccccttcgggcgctctcgcgctaactgtgctcctccggggccctccgcctgctcccagccatggtggcctggcgctcggcgttccttgtctgcctcgctttctccttggccaccctggtccagcgaggatctggggactttgatgattttaacctggaggatgcagtgaaagaaacttcctcagtaaagcagagatggaaccatgtaaccaccacgaccaagaggccagtaaccaccagagctccagcaaatactttaggaaatgattttgacttggctgatgccctggatgatcgaaatgatcgagatgatggccgcaggaaaccaattgctggaggaggaggtttttcagacaaggatcttgaagacatagtagggggtggagaatacaaacctgacaagggtaaaggtgatggccggtacggcagcaatgacgaccctggatctggcatggtggcagagcctggcaccattgccggggtggccagcgccctggccatggccctcatcggtgccgtctccagctacatctcctaccagcagaagaagttctgcttcagcattcagcagggtctcaacgcagactacgtgaagggagagaacctggaagccgtggtatgtgaggaaccccaagtgaaatactccacgttgcacacgcagtctgcagagccgccgccgccgcccgaaccagcccggatctgagggccctgtccagctgcaggcatgcacaatggtgccaccgcttgtcacccggctccccccaccccttcatttggacccgcagctgctgtgctgctctgtgccatcggctccttgttggtctgagtttcccggatgagctctgggtgtttgtgagtttggtttctctgccctgccccaagcgtgctgagacttggtgccgaaattcaagagccagctctgatagaaagccagcaccagcctcgggagctgctgagccaccaactcccaaagccagcctgcctccagctttactgagcacaggatgcgggggccaagatgatgctgaggcctgatgacatttatgcttaggggacaagagtttgaactcaagggactgtgacccctgcacactggagtggctcattgtggcaggtttctgccaatagacagcccctgacagtggcctcaaggagctgcaggtggggggctcagcctgcacccacttggagcccctgcaaggagcgaaccggtcagcaccaagtaacaccacacacacgcagcacccaggatgatggtttcacttcagtcttccccatcccaggttttatgttgctgggcttccggagagccggtccaagcggaggctttcagtgatttaagtacaaacatgcatctcgtgatagtcctgccttgagagcttaggaatcttccggataagtatgaagcaattcgtaggcctgtttcccatctgattccatagggggctgggtgtggccttcgggttgacatgagaaaggtctttagcaatcatttctgcaccggagatgagttttatcctgtgttggggagaggtgctcaccctccaccctgtgtccctgttttggtagcaagagtgaccgatgtcaagaacgagcatcaaagccagaatcctgcttgtttgcttaaaaatgtaattgggggcggcgggggaggagaggggaaagagacattcgcttggtttagtgaaacgcaggtgactttgtagctctgtggtcagcctacttgtctgctctgagggagagtgcgtggggagccatgctcaccgtggcaaacacaggaaccccatgactcgcccctcacctggcgtggagctgcctggtttgggctggagcagagctggtttcctggaatgttcctttggcccacatatggttctgtcccggtgagctctgttgtcagaggctcacgggacagaaccacatgctagggtctagggcccctgtctactgatagtcagtttgctgtgtcagaaagcacttctgaaagcagatatgagtcaccagacaggcaggatcttacaaaactcacgggcctctttggtctgcatgatggccccatgcgtttcataggctgtccactgagcgggattgtctgctgagtgggatgagccaactccagtttcttaaggaaaccactggaatctgcagcccccacatgcatctgtctaacgcatgcctcgtgttcgttttgcaaacatgcctgtggtggagggtggtcagttgtagccctgtgcgtctcaaggctgccttgtgaggccattcccagtgcgtgcccttgagctccttaccaccccttttcctgctcggccctttaatccctgacagacctggactgtgtggctgaagggggacctgcagcactgcagaaatgcctctgcgtggtgccatgaaggaaagaaaccttggcctggtctcgagaagcttcccatgcttcaggaagttagtaagggtggggtggcttgcaggattggcctgtttccagggcctcccacactcattggccagattgtgaactttgtcaggcttgtccctccctgataccaagtatgtcgagaaccgatggccccaccctctggctggtgctgggccggaggtggctatggaggattttggcatgcgtggcctgtcgccacctggacagcgtgacctcaggggttgtccactttacctttatggtgaggcctgtcggatggctaagtccttgaaaccctagagctgtgacgtagaatatgtgctgtctgtgagaccgtgttcccaggagcactgactgcagttgagagagacccattttgctctcccttaccgccccccgccccgggtgctttctgcacaaagcctagagcctggcactcaagcccaccggtggcagctcctagtgactggacatgcctggaagacccctcagccttctgtttgcagaacgttcatttcaggagcttctccttcccacagacatcttacacttgctcgacactgccacctgcagaagcctggcgggctctggtcaccatgtgtctatctgaaggttgcactggccagcatgggcctgtcccaagcgagaggggagacacagtggactgaaaggactggttgaaagtggccaatctctatcagcttaatttggcagagaaaatttgtaacaactctgagcacatgctgggtgaagtcacagctcaaggaaagataaagctgggcggaaggaggtgtgcgtggcttctggggtgggacccagaggggaggctctgggacaggggctggggttcagtgccagggccctgaggaagaaatggggactgatctcaaaattccagaattccctgtacatctgttcacgtgcttgtgtccaggtgtgacttgtaaactgtctagtgtttgcattaaataaaatggcaccgagcagaaaaaaaaaaaaaaaaaaaaaaaaaaaaaaa

SEQ ID NO: 1826 - protein, 213 aa, Homo sapiens
MVAWRSAFLVCLAFSLATLVQRGSGDFDDFNLEDAVKETSSVKQRWNHVTTTTKRPVTTRAPANTLGNDFDLADALDDRNDRDDGRRKPIAGGGGFSDKDLEDIVGGGEYKPDKGKGDGRYGSNDDPGSGMVAEPGTIAGVASALAMALIGAVSSYISYQQKKFCFSIQQGLNADYVKGENLEAVVCEEPQVKYSTLHTQSAEPPPPPEPARI

SEQ ID NO: 1827 - DNA, 3199 bp, Homo sapiens
cgagcgcgtggggttttccgaggctgcgggcaggggcccgccgcgcccatcccgatggctggaggcgtctgaggggcggacggaggcggcggcggcggcggcgggagcgggagcgggcggcgagtggggagcggggccgggagtggagcagccgccgcggcgggactggaccgagcctcgccggcgcgcacctgcccgcagcgcccgcggagcgcgcagcgcggcccgagcgcgacgacctgccgagcggcggccgaggcggcggtgtgggcgcgtcaggccgcgacgagggcgctgagacaaatttacatgtattggagaccagaccagaagcccttctgaattaagatctcacattcttgaaggtggcattgaagagcactaagatcggaagatgagtgagcttgaccagttacggcaggaggccgagcaacttaagaaccagattcgagacgccaggaaagcatgtgcagatgcaactctctctcagatcacaaacaacatcgacccagtgggaagaatccaaatgcgcacgaggaggacactgcgggggcacctggccaagatctacgccatgcactggggcacagactccaggcttctcgtcagtgcctcgcaggatggtaaacttatcatctgggacagctacaccaccaacaaggtccacgccatccctctgcgctcctcctgggtcatgacctgtgcatatgccccttctgggaactatgtggcctgcggtggcctggataacatttgctccatttacaatctgaaaactcgtgaggggaacgtgcgcgtgagtcgtgagctggcaggacacacaggttacctgtcctgctgccgattcctggatgacaatcagatcgtcaccagctctggagacaccacgtgtgccctgtgggacatcgagaccggccagcagacgaccacgtttaccggacacactggagatgtcatgagcctttctcttgctcctgacaccagactgttcgtctctggtgcttgtgatgcttcagccaaactctgggatgtgcgagaaggcatgtgccggcagaccttcactggccacgagtctgacatcaatgccatttgcttctttccaaatggcaatgcatttgccactggctcagacgacgccacctgcaggctgtttgaccttcgtgctgaccaggagctcatgacttactcccatgacaacatcatctgcgggatcacctctgtctccttctccaagagcgggcgcctcctccttgctgggtacgacgacttcaactgcaacgtctgggatgcactcaaagccgaccgggcaggtgtcttggctgggcatgacaaccgcgtcagctgcctgggcgtgactgacgatggcatggctgtggcgacagggtcctgggatagcttcctcaagatctggaactaacgccagtagcatgtggatgccatggagactggaagaccattccaacttggacgcgttaccatgagagcatatcctatccaaccgtactaacgtggacaccctacacctcccctcagaacttcaaaagggcaagatcttttttccttcacttattgctgaaaccaagagcacaattcccattgagagaaagatctctgtgctgtaaactaaaacaaattgtgcattccttccggggccatcgtctttgttttcttttttgtcttgaatgaattttaaaaggaaatatataataaaaatgttaaccagaaggtaaacttgagtgtaattgtcagacagacacacttttccaccagtgtatttgaattttagaccagtgaccctgttttgtggcattcatgcaaaacatgctgagggctttgttcatctggtcatcgtgtccaaatttcagtcatgtttgtagcaagattttggaagcattcatatttcctttttaaaatgtattcctttgtgttcaacagttaatcaaaaccagagagtctagggcagcctctctgatgttgtcaatgatgtaaattcagtccctggtttttaattttctgtctgatgtcacagatcattgttgcacacaaacgtggcatagaaaagaacatgttcagaagccatggggccaagcacatgcggggacggtctcaaatgcgtgatcagagaatccttcacctttgctgaaaagtgagctcagatccagcaccatgttcctcctgacccatcctgtctatcttctcagttgagtttttaatctcactttgggtttccttgtgaagttggagggaagtttataatagcctaacactaccccacccccaactaggaggaacctctgttttcaagagagatgcctgtcctgtgcttggatagtcagtcaattatttgtgtatgaaacaatgtacaaatcaatgttttgaaaataatgatctcagactttctaagttaaattttaaaaattttgattgtttgccatattgggtgggtttactcttagaatcgcatgctgtagaaatgctcaaaagtgcatatgggactcagtccttaggtgttctttttcttttaagaaataacctcttacagttgtaaccattgcggctctgtccacttctcgttgctgctctgtggcacatatcggaagcagtacagcgcgcggctctacacgcttgggtagcgggataagtcactgttttctttatttctttaaaaaaaaaaaagttctgttgcaaacgactgctgttggattctgagggtggggagggagagagagggagggagagggagtgaagagcctgccctcctatatggattcttcagggccctccacatctgaggtggctcattcccatcacacacagattgtcctggtgttcatttcaaggccagtgttcagcagcagcgtttggaaagcaggttctgtgggaccccccgccccgccccccgcactccttcatagcagcagtagtggcttctccatcctgttttctgcaacattctatacaaaactgtgctgtgaccttgcggtaggcctggatctggcaaagagaatacaaatgaaaccccttctttctctttccgtccaacaactctgtagagctctctgcacccttacccctttccaccttttgtatttaattttaaagtcagtgtactgcaaggaagctggatgcaagatagatactatattaaactgtactgttatttaagatgtaataaagcagtttgacatgagggactttg

SEQ ID NO: 1828 - protein, 340 aa, Homo sapiens [sequence omitted]

SEQ ID NO: 1829 - DNA, 2664 bp, Homo sapiens
cgagcgcgtggggttttccgaggctgcgggcaggggcccgccgcgcccatcccgatggctggaggcgtctgaggggcggacggaggcggcggcggcggcggcgggagcgggagcgggcggcgagtggggagcggggccgggagtggagcagccgccgcggcgggactggaccgagcctcgccggcgcgcacctgcccgcagcgcccgcggagcgcgcagcgcggcccgagcgcgacgacctgccgagcggcggccgaggcggcggtgtgggcgcgtcaggccgcgacgagggcgctgagacaaatttacatgtattggagaccagaccagaagcccttctgaattaagatctcacattcttgaaggtggcattgaagagcactaagatcggaagatgagtgagcttgaccagttacggcaggaggccgagcaacttaagaaccagattcgagacgccaggaaagcatgtgcagatgcaactctctctcagatcacaaacaacatcgacccagtgggaagaatccaaatgcgcacgaggaggacactgcgggggcacctggccaagatctacgccatgcactggggcacagactccaggcttctcgtcagtgcctcgcaggatggtaaacttatcatctgggacagctacaccaccaacaaggtccacgccatccctctgcgctcctcctgggtcatgacctgtgcatatgccccttctgggaactatgtggcctgcggtggcctggataacatttgctccatttacaatctgaaaactcgtgaggggaacgtgcgcgtgagtcgtgagctggcaggacacacaggttacctgtcctgctgccgattcctggatgacaatcagatcgtcaccagctctggagacaccacgtgtgccctgtgggacatcgagaccggccagcagacgaccacgtttaccggacacactggagatgtcatgagcctttctcttgctcctgacaccagactgttcgtctctggtgcttgtgatgcttcagccaaactctgggatgtgcgagaaggcatgtgccggcagaccttcactggccacgagtctgacatcaatgccatttgcttctttccaaatggcaatgcatttgccactggctcagacgacgccacctgcaggctgtttgaccttcgtgctgaccaggagctcatgacttactcccatgacaacatcatctgcgggatcacctctgtctccttctccaagagcgggcgcctcctccttgctgggtacgacgacttcaactgcaacgtctgggatgcactcaaagccgaccgggcaggtgtcttggctgggcatgacaaccgcgtcagctgcctgggcgtgactgacgatggcatggctgtggcgacagggtcctgggatagcttcctcaagatctggaactaacgccagtagcatgtggatgccatggagactggaagaccattccaacttggacgcgttaccatgagagcatatcctatccaaccgtactaacgtggacaccctacacctcccctcagaacttcaaaagggcaagatcttttttccttcacttattgctgaaaccaagagcacaattcccattgagagaaagatctctgtgctgtaaactaaaacaaattgtgcattccttccggggccatcgtctttgttttcttttttgtcttgaatgaattttaaaaggaaatatataataaaaatgttaaccagaaggtaaacttgagtgtaattgtcagacagacacacttttccaccagtgtatttgaattttagaccagtgaccctgttttgtggcattcatgcaaaacatgctgagggctttgttcatctggtcatcgtgtccaaatttcagtcatgtttgtagcaagattttggaagcattcatatttcctttttaaaatgtattcctttgtgttcaacagttaatcaaaaccagagagtctagggcagcctctctgatgttgtcaatgatgtaaattcagtccctggtttttaattttctgtctgatgtcacagatcattgttgcacacaaacgtggcatagaaaagaacatgttcagaagccatggggccaagcacatgcggggacggtctcaaatgcgtgatcagagaatccttcacctttgctgaaaagtgagctcagatccagcaccatgttcctcctgacccatcctgtctatcttctcagttgagtttttaatctcactttgggtttccttgtgaagttggagggaagtttataatagcctaacactaccccacccccaactaggaggaacctctgttttcaagagagatgcctgtcctgtgcttggatagtcagtcaattatttgtgtatgaaacaatgtacaaatcaatgttttgaaaataatgatctcagactttctaagttaaattttaaaaattttgattgtttgccatattgggtgggtttactcttagaatcgcatgctgtagaaatgctcaaaagtgcatatgggactcagtccttaggtgttctttttcttttaagaaataacctcttacagttgtaaccattgcggctctgtccacttctcgttgctgctctgtggcacatatcggaagcagtacagcgcgcggctctacacgcttgggtagcgggataagtcactgttttctttatttcttt

SEQ ID NO: 1830 - protein, 340 aa, Homo sapiens [sequence omitted]

SEQ ID NO: 1831 - DNA, 1728 bp, Homo sapiens
cgagcgcgtggggttttccgaggctgcgggcaggggcccgccgcgcccatcccgatggctggaggcgtctgaggggcggacggaggcggcggcggcggcggcgggagcgggagcgggcggcgagtggggagcggggccgggagtggagcagccgccgcggcgggactggaccgagcctcgccggcgcgcacctgcccgcagcgcccgcggagcgcgcagcgcggcccgagcgcgacgacctgccgagcggcggccgaggcggcggtgtgggcgcgtcaggccgcgacgagggcgctgagacaaatttacatgtattggagaccagaccagaagcccttctgaattaagatctcacattcttgaaggtggcattgaagagcactaagatcggaagatgagtgagcttgaccagttacggcaggaggccgagcaacttaagaaccagattcgagacgccaggaaagcatgtgcagatgcaactctctctcagatcacaaacaacatcgacccagtgggaagaatccaaatgcgcacgaggaggacactgcgggggcacctggccaagatctacgccatgcactggggcacagactccaggcttctcgtcagtgcctcgcaggatggtaaacttatcatctgggacagctacaccaccaacaaggtccacgccatccctctgcgctcctcctgggtcatgacctgtgcatatgccccttctgggaactatgtggcctgcggtggcctggataacatttgctccatttacaatctgaaaactcgtgaggggaacgtgcgcgtgagtcgtgagctggcaggacacacaggttacctgtcctgctgccgattcctggatgacaatcagatcgtcaccagctctggagacaccacgtgtgccctgtgggacatcgagaccggccagcagacgaccacgtttaccggacacactggagatgtcatgagcctttctcttgctcctgacaccagactgttcgtctctggtgcttgtgatgcttcagccaaactctgggatgtgcgagaaggcatgtgccggcagaccttcactggccacgagtctgacatcaatgccatttgcttctttccaaatggcaatgcatttgccactggctcagacgacgccacctgcaggctgtttgaccttcgtgctgaccaggagctcatgacttactcccatgacaacatcatctgcgggatcacctctgtctccttctccaagagcgggcgcctcctccttgctgggtacgacgacttcaactgcaacgtctgggatgcactcaaagccgaccgggcaggtgtcttggctgggcatgacaaccgcgtcagctgcctgggcgtgactgacgatggcatggctgtggcgacagggtcctgggatagcttcctcaagatctggaactaacgccagtagcatgtggatgccatggagactggaagaccattccaacttggacgcgttaccatgagagcatatcctatccaaccgtactaacgtggacaccctacacctcccctcagaacttcaaaagggcaagatcttttttccttcacttattgctgaaaccaagagcacaattcccattgagagaaagatctctgtgctgtaaactaaaacaaattgtgcattccttccggggccatcgtctttgttttcttttttgtcttgaatgaattttaaaaggaaatatataataaaaatgttaaccagaaggt

SEQ ID NO: 1832 - protein, 340 aa, Homo sapiens [sequence omitted]

SEQ ID NO: 1833 - DNA, 859 bp, Homo sapiens
cgagcgcgtggggttttccgaggctgcgggcaggggcccgccgcgcccatcccgatggctggaggcgtctgaggggcggacggaggcggcggcggcggcggcgggagcgggagcgggcggcgagtggggagcggggccgggagtggagcagccgccgcggcgggactggaccgagcctcgccggcgcgcacctgcccgcagcgcccgcggagcgcgcagcgcggcccgagcgcgacgacctgccgagcggcggccgaggcggcggtgtgggcgcgtcaggccgcgacgagggcgctgagacaaatttacatgtattggagaccagaccagaagcccttctgaattaagatctcacattcttgaaggtggcattgaagagcactaagatcggaagatgagtgagcttgaccagttacggcaggaggccgagcaacttaagaaccagattcgagtatgtagttgtgtgtgcttggttttattaatcatttgagtttcaggttagatgttacttgttttaggaaaaatggtttacaggatgacttgttctatgttttatatgaaattgaatcttagttggcccaggatgtactaattatagatctagatacttagcctagtacattgtttttgggattttgctttctgtatacaatttgttatttgaatatacaccagatgtctccgtagaatttataagtgtcttttgcattctttatcataaccttgaaaatttgtgataccctgggccactgatcagactgtgatatctacctccctcccctgaatattgggactattgacagcagaaaacttgcttaaaagtaagagtattaacaacaataaaaaaagtatttcaggt

SEQ ID NO: 1834 - protein, 31 aa, Homo sapiens
MSELDQLRQEAEQLKNQIRVCSCVCLVLLII

SEQ ID NO: 1835 - DNA, 1239 bp, Homo sapiens
gaataacattggtattattttagaagtgcagtgttggcatttattatagttttgtcgttgtttttctctgcccgaaagatttggctcatgttggtctctaaattggattacattcttactgtctgtgactttggctttagcattagtggattggtaatagatattctcaatttttaaatctggcttgaccatatggcaggccatgttattttgaaacccctatttagtgtaagtctcacaagacatggaacaaaaatttttataaaattttaaactggtttgaccgggcgtggtggctcacacctgtaatcccagcactttgggaggccgagtcaggcggatcatgaggtcaggagatcgagaccaccctggctaacacggtgaaaccccttctctactaaaattacttctctacaaaaaattagctgggcgtggtgctgggcacctgtaatcccagctactcaggaggctgaggcaggagaatggcaggaacccgggagggggagcttgcagtgagccaagatcggccactgcactccagcctgggcgacacagcgagactccgtctcaaaaaataaaaataaaaaaaattttaaactggtttacattctgatttcaggtttgcatttgttaagagtggttggagagattatgaagtaggcaattcagttaagtgtttggtttaggaacacagaatgaggagataaaataaatttaaaatggaaactatcagaaatttatgaaactgcagtgttcaacattactgaaagaaaaagcagggccaacgtatatgggagtgagtgtgtatgaagagagagaaatgcaacatcacatcagctgctctgggagagggacagagcaccacctatttcaaagctatgcattttgttctagaactttgattgaagaaatagagacaatctatagacatttgagtttgctagtggattagtggaatgctgaaagctttttttgtgagacagagtcccactcagccacccagtctggagtgcagtggcgcaatctcggctcactgcaaccaccatctcacgggttcaagtgattctccagtctcagcctcccgagtagctgggattacaggcacccgccatctctactaaaaatacaaaaaattacccaggcatggtgatgcatgcctgtaattccagctactcgggaggctgaggttgcagtgagccgagatcgtgccattgcactccagcctgggcaacaagaagg

SEQ ID NO: 1836 - protein, 54 aa, Homo sapiens
MLKAFFVRQSPTQPPSLECSGAISAHCNHHLTGSSDSPVSASRVAGITGTRHLY

SEQ ID NO: 1837 - DNA, 974 bp, Homo sapiens
ggcgggaaggccgcgggcgggggcggtccctccggggacggggcgggtgggggcaccgcgggcgagatcgcttcctgcagaggaggcaacaggccccgctagcaggtcagggtcccgggcaggcgcaggtgccccccggcctctcaagcagggactgcggcgagctcagacgcggctgacgggcagagactcgcgcttgggctcagtgcgtgtgaagtgggcctcgggctgcggaggagggcagcaccccgtggctcctcgcgctgctgcgagcagggccgcctggcaggggcgggggccggtgggcgggagtgtcggggtaaggccgcggactcctcccatgccgctgagcagtggacagcggggactggagacctccaggcctgcaccagcacagctgaaggggagagagacccaacctcatccactgggcctcccctcaaccagggccacaacctcaaggggccatgccacctccaacacctatttcccaccttctactctctccacaccctgggacaccacccgcctctctcagctgacgttttccttcttgttttgtgtgcatggtgcttgtgtgagaaagtggacacacagtaagtgcggcttccagatgcgtccgccacctgccctccgtgccacgcgcttccccctacctaggggagcctccaccagacagggaacccacgccttgccacccttctctctccctcccacttcacctgtccgcatcatttctggagccctttctttctggcacgagatgctccagggccctgttgtattctccctgccccagcctgaacccagctatttctgctgcagcctggttcattgtgggagaatgtcatgcagagcccgggatctggctccggatgtgctcattgctactggggtgtcattgcagctggcggagcaagggaacacatctatgtacatgcccacacgcatatgtatacacacagtttcatggg

SEQ ID NO: 1838 - protein, 210 aa, Homo sapiens
MPLSSGQRGLETSRPAPAQLKGRETQPHPLGLPSTRATTSRGHATSNTYFPPSTLSTPWDTTRLSQLTFSFLFCVHGACVRKWTHSKCGFQMRPPPALRATRFPLPRGASTRQGTHALPPFSLPPTSPVRIISGALSFWHEMLQGPVVFSLPQPEPSYFCCSLVHCGRMSCRARDLAPDVLIATGVSLQLAEQGNTSMYMPTRICIHTVS

SEQ ID NO: 1839 - DNA, 2319 bp, Homo sapiens
ggtaattagacccagacagggagggctcagtgcgggtctgaggagggaacacacgtgtgcaggcgtgtgctccacggtggcatgttgatacggaccagcctgggcaccaggccccctcgggagccagctttgctgttctgagtggaagggagatcaggtttccctgagaaaccccaaaatagcccccaactgtgcctggcttccagcgggcagcccagcccccaggccctgttttgctccctttcccccttcacccccagcccatgtcctgctgtctcctccctgaatggtggaccctcagcccctcctgtacaagatggtcaagcggtgcctcatgcatttgttcattcgacctgtcctgagagtttgtgacatgctggcacggggccaatgttgagtccaccaggatgggagggtggccaggctctgagccactgagcaccagctggccaggatgggtcttcaacaagaaatctcactggtaagtgatgacagcatgggaccagggtcccatgaagacctgctggagggccgcacctctgggaaggtagacttggagcttggtccagtgaagagggaacagcacggggaacagcgtgtgtgagggtcccgccatgtctcagccctttcctggcccccgcacttagccttcggtgcccatcttcagggtcaggggaagcccaggccaaagcgggccgggaaggggccctgtggataaggccgagagcctgtcccaaaatagggccggcaggatttcccacccataaaaggctcttggaatctggaccccggggaccccaggcagccaggcccagctaaaactcagctgccaccactgccccagcactctgcccacagcagccctggtgtcaccaccctgcagaatcctgtcagacaaccaccgacatggtaaggctgctctctgtgcccgatggagtctctggtgggctggctgggtaggttgagctggaacctggaggtgcaatgacctgccacggagcctgggcaggaaggggctgaggtagaagagggggccaagccctgctgccaccaacacagcccttgttccggggccagggtggagcagccctttctgaaagctggctcccagatgggcagcagcagtggtggcaggcaggtgtggcccggtgctggactctccctccggaatgccacacaggctggagcccagggttctgcttcctgggctgtatcccaatcctgggctggaagcctttcccgggccagggctgggctcctccccaccctgctctcggcttccttcacctgcctcacctggtgtccattgccaggctccagggccgctgcctggcccgcctggccctgcagctgctgctgttccctcgcacgctggctcctgcctgtctggcccttgcccctgttagctgcctggcagagccctgctggccctgcaaacccctggcgtgtgaccccttgtcctggaagcctgctctccgctgggggcctcctctcttaccactcaccttgaaaggctgccaatggaggaatgggtgcagggggtacctctgacccttccctggacacaggggcagaaggggctcctggtcaggccggtgcgggtgtcccctgcagacagagcgcctgtcggctgagcagatcaaggagtacaagggagtctttgagatgttcgacgaagagggcaacggggaggtgaagacgggggagctggagtggctcatgagcctgctgggtatcaaccccaccaagagtgagctggcctcaatggccaaggatgtggacagagacagtgagctcatggctggagtggggtgggcagcctcgggggggccctgggtcaggtgtcagtgcctacggggggaagaggcaaagcccatggggagtgctgtgccccatcccttgagccccagctgtgccccttgcagacaaagggttcttcaactgcgatggtttcctggcactaatgggagtttaccatgagaaggcccagaaccaggagagcgagctgagggcggcattccgtgtctttgacaaagagggcaagggctacattgactggaacacactcaagtacgtgctaatgaacgcaggggagcccctcaacgaggtggaggcggagcagatgatgaaggaggccgacaaggatggggacaggaccatcgactatgaggagtttgtggccatgatgacgggggagtccttcaagctgatccagtaggtgcagctgccgcagccgggggaggcctgcccgggaaggctgctgcccctgccccctggcccccactcccccggctccgtgtaaaataaatgttccagccc

SEQ ID NO: 1840 - protein, 84 aa, Homo sapiens
MGVYHEKAQNQESELRAAFRVFDKEGKGYIDWNTLKYVLMNAGEPLNEVEAEQMMKEADKDGDRTIDYEEFVAMMTGESFKLIQ

SEQ ID NO: 1841 - DNA, 1101 bp, Homo sapiens
ggtaattagacccagacagggagggctcagtgcgggtctgaggagggaacacacgtgtgcaggcgtgtgctccacggtggcatgttgatacggaccagcctgggcaccaggccccctcgggagccagctttgctgttctgagtggaagggagatcaggtttccctgagaaaccccaaaatagcccccaactgtgcctggcttccagcgggcagcccagcccccaggccctgttttgctccctttcccccttcacccccagcccatgtcctgctgtctcctccctgaatggtggaccctcagcccctcctgtacaagatggtcaagcggtgcctcatgcatttgttcattcgacctgtcctgagagtttgtgacatgctggcacggggccaatgttgagtccaccaggatgggagggtggccaggctctgagccactgagcaccagctggccaggatgggtcttcaacaagaaatctcactgcagccctggtgtcaccaccctgcagaatcctgtcagacaaccaccgacatgacagagcgcctgtcggctgagcagatcaaggagtacaagggagtctttgagatgttcgacgaagagggcaacggggaggtgaagacgggggagctggagtggctcatgagcctgctgggtatcaaccccaccaagagtgagctggcctcaatggccaaggatgtggacagagacaacaaagggttcttcaactgcgatggtttcctggcactaatgggagtttaccatgagaaggcccagaaccaggagagcgagctgagggcggcattccgtgtctttgacaaagagggcaagggctacattgactggaacacactcaagtacgtgctaatgaacgcaggggagcccctcaacgaggtggaggcggagcagatgatgaaggaggccgacaaggatggggacaggaccatcgactatgaggagtttgtggccatgatgacgggggagtccttcaagctgatccagtaggtgcagctgccgcagccgggggaggcctgcccgggaaggctgctgcccctgccccctggcccccactcccccggctccgtgtaaaataaatgttccagccc

SEQ ID NO: 1842 - protein, 181 aa, Homo sapiens; identical to SEQ ID NO: 4

SEQ ID NO: 1843 - DNA, 769 bp, Homo sapiens
cctgaatggtggaccctcagcccctcctgtacaagatggtcaagcggtgcctcatgcatttgttcattcgacctgtcctgagagtttgtgacatgctggcacggggccaatgttgagtccaccaggatgggagggtggccaggctctgagccactgagcaccagctggccaggatgggtcttcaacaagaaatctcactgacagagcgcctgtcggctgagcagatcaaggagtacaagggagtctttgagatgttcgacgaagagggcaacggggaggtgaagacgggggagctggagtggctcatgagcctgctgggtatcaaccccaccaagagtgagctggcctcaatggccaaggatgtggacagagacaacaaagggttcttcaactgcgatggtttcctggcactaatgggagtttaccatgagaaggcccagaaccaggagagcgagctgagggcggcattccgtgtctttgacaaagagggcaagggctacattgactggaacacactcaagtacgtgctaatgaacgcaggggagcccctcaacgaggtggaggcggagcagatgatgaaggaggccgacaaggatggggacaggaccatcgactatgaggagtttgtggccatgatgacgggggagtccttcaagctgatccagtaggtgcagctgccgcagccgggggaggcctgcccgggaaggctgctgcccctgccccctggcccccactcccccggctccgtgtaaaataaatgttccagccc

SEQ ID NO: 1844 - protein, 164 aa, Homo sapiens
MGLQQEISLTERLSAEQIKEYKGVFEMFDEEGNGEVKTGELEWLMSLLGINPTKSELASMAKDVDRDNKGFFNCDGFLALMGVYHEKAQNQESELRAAFRVFDKEGKGYIDWNTLKYVLMNAGEPLNEVEAEQMMKEADKDGDRTIDYEEFVAMMTGESFKLIQ

SEQ ID NO: 1845 - DNA, 1118 bp, Homo sapiens
tccgctgtcgcccagtcccggccgctggcgggaactgacctggagcaagcaggaccttccctcccacctctcccgcctggcctccgcgggagtcccctacgatcccgctcagcagtggggcactcgctgaggacagcgagtcctgggagtgagcccaaggccacccctggccagcccaggagagatagccagggcaggcccagcagcccgaggccaggctctggccacggcggtctccgacatggagagacattgtctgctttttatcctgttaacctgtcttcggtggttgtgccacgacattccccagggtgcaggtgcccggtggccgagggtcagtccagtggtagagccttgctctcctaggctcatcctgctggcggtcctcctgcttctgctgtgtggtgtcacagctggttgtgtccggttctgctgcctccggaagcaggcacaggcccagccacatctgccaccagcacggcagccctgcgacgtggcagtcatccctatggacagtgacagccctgtacacagcactgtgacctcctacagctccgtgcagtacccactgggcatgcggttgcccctgccctttggggagctggacctggactccatggctcctcctgcctacagcctgtacaccccggagcctccaccctcctacgatgaagctgtcaagatggccaagcccagagaggaaggaccagcactctcccagaaacccagccctctccttggggcctcgggcctagagaccactccagtgccccaggagtcgggccccaatactcaactaccaccttgtagccctggtgccccttgaaggaggtaggagaacggaccagagcttggagaactaatgcttggagccaagggccccagcccaccccaccgtcccacacattgctgtggccccaacctcggtgccatgttacaccggcccctggcgtcacccactaggcaggctgctgctttcagcctcagcccctggcccagccccagcaggccctcagcctggaagaggccccttgggcctaagcctcgggtgggagctcagggccacctgtgacgtctgcatcttcttggagagagaataaagtttgtatttaagtggt

SEQ ID NO: 1846 - protein, 194 aa, Homo sapiens
MERHCLLFILLTCLRWLCHDIPQGAGARWPRVSPVVEPCSPRLILLAVLLLLLCGVTAGCVRFCCLRKQAQAQPHLPPARQPCDVAVIPMDSDSPVHSTVTSYSSVQYPLGMRLPLPFGELDLDSMAPPAYSLYTPEPPPSYDEAVKMAKPREEGPALSQKPSPLLGASGLETTPVPQESGPNTQLPPCSPGAP

SEQ ID NO: 1847 - DNA, 1387 bp, Homo sapiens
gagcatggcccgggggccgctggccgcccgcggactgcggctgctgctgccgctcctgccgctcctgccgctcctgccgctgccgcaggtggcgctgggcttcgcggacggcagctgcgacccctcggaccagtgcccgccccaggcccgctggagcagcctgtggcacgtggggtaagtggaggccgcggcggagccgtgcgtccgacggttctggggcgggggtcaccggggccaggcccgccaggcccttacctcaccaggccgcctccgctgtcgcccagtcccggccgctggcgggaactgacctggagcaagcaggaccttccctcccacctctcccgcctggcctccgcgggagtcccctacgatcccgctcagcagtggggcactcgctgaggacagcgagtcctgggagtgagcccaaggccacccctggccagcccaggagagatagccagggcaggcccagcagcccgaggccaggctctggccacggcggtctccgacatggagagacattgtctgctttttatcctgttaacctgtcttcggtggttgtgccacgacattccccagggtgcaggtgcccggtggccgagggtcagtccagtggtagagccttgctctcctaggctcatcctgctggcggtcctcctgcttctgctgtgtggtgtcacagctggttgtgtccggttctgctgcctccggaagcaggcacaggcccagccacatctgccaccagcacggcagccctgcgacgtggcagtcatccctatggacagtgacagccctgtacacagcactgtgacctcctacagctccgtgcagtacccactgggcatgcggttgcccctgccctttggggagctggacctggactccatggctcctcctgcctacagcctgtacaccccggagcctccaccctcctacgatgaagctgtcaagatggccaagcccagagaggaaggaccagcactctcccagaaacccagccctctccttggggcctcgggcctagagaccactccagtgccccaggagtcgggccccaatactcaactaccaccttgtagccctggtgccccttgaaggaggtaggagaacggaccagagcttggagaactaatgcttggagccaagggccccagcccaccccaccgtcccacacattgctgtggccccaacctcggtgccatgttacaccggcccctggcgtcacccactaggcaggctgctgctttcagcctcagcccctggcccagccccagcaggccctcagcctggaagaggccccttgggcctaagcctcgggtgggagctcagggccacctgtgacgtctgcatcttcttggagagagaataaagtttgtatttaagtggt

SEQ ID NO: 1848 - protein, 194 aa, Homo sapiens; identical to SEQ ID NO: 1846

SEQ ID NO: 1849 - DNA, 1037 bp, Homo sapiens
agagcatggcccgggggccgctggccgcccgcggactgcggctgctgctgccgctcctgccgctcctgccgctcctgccgctgccgcaggtggcgctgggcttcgcggacggcagctgcgacccctcggaccagtaagtcgggggggagggagccggggcctggccccgccctatggggaggcacgggtggcgaggtcggccgtcccatgccccgcctgctccaggtgccgccgtccccacaggtgcccgccccaggcccgctggagcagcctgtggcacgtggggctcatcctgctggcggtcctcctgcttctgctgtgtggtgtcacagctggttgtgtccggttctgctgcctccggaagcaggcacaggcccagccacatctgccaccagcacggcagccctgcgacgtggcagtcatccctatggacagtgacagccctgtacacagcactgtgacctcctacagctccgtgcagtacccactgggcatgcggttgcccctgccctttggggagctggacctggactccatggctcctcctgcctacagcctgtacaccccggagcctccaccctcctacgatgaagctgtcaagatggccaagcccagagaggaaggaccagcactctcccagaaacccagccctctccttggggcctcgggcctagagaccactccagtgccccaggagtcgggccccaatactcaactaccaccttgtagccctggtgccccttgaaggaggtaggagaacggaccagagcttggagaactaatgcttggagccaagggccccagcccaccccaccgtcccacacattgctgtggccccaacctcggtgccatgttacaccggcccctggcgtcacccactaggcaggctgctgctttcagcctcagcccctggcccagccccagcaggccctcagcctggaagaggccccttgggcctaagcctcgggtgggagctcagggccacctgtgacgtctgcatcttcttggagagagaataaagtttgtatttaagtggt

SEQ ID NO: 1850 - protein, 105 aa, Homo sapiens [sequence omitted]

SEQ ID NO: 1851 - DNA, 930 bp, Homo sapiens
ctcagagcatggcccgggggccgctggccgcccgcggactgcggctgctgctgccgctcctgccgctcctgccgctcctgccgctgccgcaggtggcgctgggcttcgcggacggcagctgcgacccctcggaccagtgcccgccccaggcccgctggagcagcctgtggcacgtggggctcatcctgctggcggtcctcctgcttctgctgtgtggtgtcacagctggttgtgtccggttctgctgcctccggaagcaggcacaggcccagccacatctgccaccagcacggcagccctgcgacgtggcagtcatccctatggacagtgacagccctgtacacagcactgtgacctcctacagctccgtgcagtacccactgggcatgcggttgcccctgccctttggggagctggacctggactccatggctcctcctgcctacagcctgtacaccccggagcctccaccctcctacgatgaagctgtcaagatggccaagcccagagaggaaggaccagcactctcccagaaacccagccctctccttggggcctcgggcctagagaccactccagtgccccaggagtcgggccccaatactcaactaccaccttgtagccctggtgccccttgaaggaggtaggagaacggaccagagcttggagaactaatgcttggagccaagggccccagcccaccccaccgtcccacacattgctgtggccccaacctcggtgccatgttacaccggcccctggcgtcacccactaggcaggctgctgctttcagcctcagcccctggcccagccccagcaggccctcagcctggaagaggccccttgggcctaagcctcgggtgggagctcagggccacctgtgacgtctgcatcttcttggagagagaataaagtttgtatttaagtggt

SEQ ID NO: 1852 - protein, 209 aa, Homo sapiens; identical to SEQ ID NO: 6

SEQ ID NO: 1853 - DNA, 449 bp, Homo sapiens
caggtggcgctgggcttcgcggacggcagctgcgacccctcggaccagtgcccgccccaggcccgctggagcagcctgtggcacgtggggctcatcctgctggcggtcctcctgcttctgctgtgtggtgtcacagctggttgtgtccggttctgctgcctccggaagcaggcacaggcccagccacatctgccaccagcacggcagccctgcgacgtggcagtcatccctatggacagtgacagccctgtacacagcactgtgacctcctacagctccgtgcagtacccactgggcatgcggttgcccctgccctttggggagctggacctggactccatggctcctcctgcctacagcctgtacaccccggagcctccaccctccgtcccacacattgctgtggccccaacctcggtgccatgttacaccggcccctggcgtcaccc

SEQ ID NO: 1854 - protein, 71 aa, Homo sapiens
MDSDSPVHSTVTSYSSVQYPLGMRLPLPFGELDLDSMAPPAYSLYTPEPPPSVPHIAVAPTSVPCYTGPWR

SEQ ID NO: 1855 - DNA, 313 bp, Homo sapiens
gagcatggcccgggggccgctggccgcccgcggactgcggctgctgctgccgctcctgccgctcctgccgctcctgccgctgccgcaggtgggtcgggcggcgttctctctcggttcggccaccgcggggcgggtccctgctcggaccacgcccctcccgggctcacccttgtccccacaggtggcgctgggcttcgcggacggcagctgcgacccctcggaccagtgcccgccccaggcccgctggagcagcctgtggcacgtggggctcatcctgctggcggtcctcctgcttctgctgtgtggtgtcaca

SEQ ID NO: 1856 - protein, 102 aa, Homo sapiens
MARGPLAARGLRLLLPLLPLLPLLPLPQVGRAAFSLGSATAGRVPARTTPLPGSPLSPQVALGFADGSCDPSDQCPPQARWSSLWHVGLILLAVLLLLLCGV

SEQ ID NO: 1857 - DNA, 2871 bp, Homo sapiens
ataggggaaggcaccagggtggggaccccggttctggccgcctcctcactccgtgcctcggtttatcctctggtgaagcagacgccacagtctgtgagcagctctgtgggggtctgtgtgcccctccgcactggctactgtcttcctcgggcgccggtcggcttttgcgtccccacattcaatcccaactgcggctcccgcggttcccgcactggccgcagaggagccacggggcacagctggctgtgtttagggccctgcacagccccacagccagtcgctccccccacagttccgaaagaatatggccccccagaggaaggacctgcatggactgtcattctccgttcttcgagcacagaaccgcgacaagctgttcaaagtctctgtcccccacgtcctggagatgcggaagcgggagctgaggcccaggtgggtccaggaggggctgccccacctgcttccctccaggcccctctggtgggacccactgtggcccctgtagagtcccctccctacagattgcccggaatgacccatgtggctggaaggactgatgccttcagacacagctggatccaggtgctgccttcctgggacctacccaccccatttccccaggcctgacacccctgcacacagcctcaatccacgggtggggagcaaagccaccaccccccacccagccccccgggtgcagaatgagccctgggaaagctctaatgggtgcctgtggccccgggaaggaacatggctctctagccaggggccaaaggcacctgccccaacccctagcctccagccaccagctgacgaggacctgaagtgagtgatgagacccccacaggagccagagaagggtggaaaagccagtttgtcagacacaactgggacagccacagcttgggaccctgggaccctgggaccctgaggcagagccgcaggggtccggcctgggccgatggtgggtgggggcaaggcgggagcgcaagcctctgacttccttctagttccgacgagtaccaggccgcccgagccaccctgctcagagcgttccaggcgaagtttgacacatttgtagttccctgtgttgttgccagtggcgacatcaaagacaggaaggggtcagaacccctgagcttcaggtgcggggtgctctggccagaacagggtgtggtcagccgcaaacgcgctgtccctctgctactgcccaactctggggcctgggcgggcagggggccgcccaccctgccctcagcatgcccttcctatcccagcccccacaacaccctgtacctggagctgtggtgcccgacggtggcaccatctgttgtggtgacgtcccataaaggcaagaccatctttaacttcggcgacgtcgctgtggggcaccgcagtatcaagaagatctccatccagaacgtctctcccgaggatctggccctggacttctccctgctgaaccccaacggcccctttgtcctgctgaaccactccagcctgctgcgtgcaggtgggacccaggtcctggtgctttccttctctccccacgagagcatcctggctcaagaaacactggacatcatcaccaagagaggcacgctcaccctcaccctcatgggcactggcgtggcgtccatgatcacgtgctccattgaaggcagcgtcctcaacatgggctatgtgattgccggagagtctgtgtcctcaggcttcaagctgcagaacaactctctgctccccatcaagttctccatgcacctggacagcctctccagcacccggggccggggccagcagcagctgccgcagttcctcagctcgccctcccagaggacggaggtggtcgggacgcagaatctcaacggtcagagcgtgttcagcgtggcccccgtcaagggcgtcatggaccccgggaagacacaagacttcactgtcaccttcagccccgaccacgaaagcctctacttctccgacaagctccaggtggtgctctttgaaaagaaaatctcccaccagatcctgctgaagggtgccgcctgtcagcacatgatgttcgtggagggcggcgaccccctggacgtgcccgtggagtctctgacagcgatccctgtatttgaccccaggcacagagaggccagctcccggccaggccctctctctccagaagctgaggagctgaggcccatcctggtgaccctggactacatccagtttgacacagacacgccagccccacctgccacccgagagctgcaggtgggctgtatccggaccacccagccatctccaaagaagaccgttgagttcagcatagacagcgtcgcatccctgcagcacaagggtttctctattgagccctccaggggctccgtggagcgcggccagacgaagaccatcagcatctcctgggtgccacctgcggactttgatccagaccacccactcatggtgtcggccctgctgcagctaaggggggatgtgaaggagacctacaaggtcatctttgtagcccaggtgttgactggcccctaagcctctgcacagagcaccctcgggccctcctgtccaccctcaaagccctccccaggctgagggccaggtcatactaccctagagcctgggacctggccatcctctgccagattccaataggccgccctccacatggcgccacggccacttcctgctgccctggaccccgcaagcccagggacatccaagagcacccctcctgagaccccagactcagaagcagcgagaaggccaggccagccctcagccatcctagccagaccccctcagagcccccagcccccaggagagccctccacagcctgtcaataaattttttgtaggccaacacatgca

SEQ ID NO: 1858 - protein, 305 aa, Homo sapiens; identical to SEQ ID NO: 8

SEQ ID NO: 1859 - DNA, 2397 bp, Homo sapiens
atgtacattcacgttgacgctaaccgaagacttgaaggcacctccagcattggcccagcaggcccagcacgggcggagccgcacagggcggggaagaggctctgcggtgccccctggaggggccgggctgcggggggcttctgtctagctctgcagctgtggctgttgttagacgcgcaccagcggggagagcgacctgtgggcaacggctgccctactggacagcccagaagcccagctctgcctggtcacagagggtcctacggggccacactgggcttgagggccttgcttcacatccgcaggagcacgaggtgcaaagtcaacaaaaagtcctgctcagacttgcaaggaaacagctctgctacccggggccttgctgctgaccagctgccggctggtgcccccagaacccagtggcagatggaaaccaggagcctgccacagggaagtgatgactcaaacacgccagtagcagaaccagagagattaaccacagtgatacctcccagcgaagagcagacggagatcacgctgggggaggtaacagaaggggaaattggccccttcagctccatcaaggtgcccatcgtcttcactccggtcgtcccaggcgacgtccaagccaggttcaaagtcacgtttaagaacccccagtgccccacggaactcctgttgctgagctcctgtgtccatatgcagctgcatttcagggtcgtgggcgtggccatcgatgtgccggtctgggtgccgaagcccagcgtggacctgaagatctgcatgtatgaccggctctaccaggactctgtgctcgtgcacacgcggtcgaaagctgccctgcgcctgaagttcgaggtgtgcaaggagctgagggcccacctggagctcctgcccaagacaggctatatccaggcacagtcgtcctactccgtgcagctcaagttcctgccgcgacactccctcccggaggacgcagggaggtattttgacaaggagacccgagtcctggaggccccgatgaccatatgggttgccgaccagaacaagccagtgggattcaccgtgcatgccattgtcaccacctcggacctggagctcagtccctcggaggtggattttggctactgcaccatctatgaggccatcaggacggaaatcagcctccacaaccactcgctcctgccccaggagttcgggttcgtcaggcttcccaagtttgtggacgtccaacccaacgatgggtttgggacgatcctgcccctggaaacgctgcagttctgtgtgatcttccagcccaccaaggccgaggaacacagattccaactgacctgcaagtctgagatcaaccggtgcttcaagctgtcttgccgggctgtaggcgtccacccacccctggagctgtcccactaccagatcaagtttgccgccacggccctatacgacacctccgtggctacagtgtacgtcatcaactctcacctgagcatgagctcaccgacccactccaagccccgcattggctcagaggacgcctctcccatggggcccacgtctttcgagttcctgctgcccccagactcgcctatcaccatctcgccctcagtggggaccgtgtggccaggaaagagcagaaagctctgggcctggcagggccttcgggtgaccctgagggctgccgaaggcctaagtgaggaagggcataggtgcctggtccaggtggccttccggccagtgctgcccgagaagctgatccgccaggaagccctcccactcctgaacaaagaaatggagaccaaatctttccgaaagaatatggccccccagaggaaggacctgcatggactgtcattctccgttcttcgagcacagaaccgcgacaagctgttcaaagtctctgtcccccacgtcctggagatgcggaagcgggagctgaggcccagttccgacgagtaccaggccgcccgagccaccctgctcagagcgttccaggcgaagtttgacacatttgtagttccctgtgttgttgccagtggcgacatcaaagacaggaaggggtcagaacccctgagcttcagcccccacaacaccctgtacctggagctgtggtgcccgacggtggcaccatctgttgtggtgacgtcccataaaggcaagaccatctttaacttcggcgacgtcgctgtggggcaccgcagtatcaagaagatctccatccagaacgtctctcccgaggatctggccctggacttctccctgctgaaccccaacggcccctttgtcctgctgaaccactccagcctgctgcgtgcaggtgggacccaggtcctggtgctttccttctctccccacgagagcatcctgcctggcccccaggccctcacaccagccgccaagtga

SEQ ID NO: 1860 - protein, 798 aa, Homo sapiens
MYIHVDANRRLEGTSSIGPAGPARAEPHRAGKRLCGAPWRGRAAGGFCLALQLWLLLDAHQRGERPVGNGCPTGQPRSPALPGHRGSYGATLGLRALLHIRRSTRCKVNKKSCSDLQGNSSATRGLAADQLPAGAPRTQWQMETRSLPQGSDDSNTPVAEPERLTTVIPPSEEQTEITLGEVTEGEIGPFSSIKVPIVFTPVVPGDVQARFKVTFKNPQCPTELLLLSSCVHMQLHFRVVGVAIDVPVWVPKPSVDLKICMYDRLYQDSVLVHTRSKAALRLKFEVCKELRAHLELLPKTGYIQAQSSYSVQLKFLPRHSLPEDAGRYFDKETRVLEAPMTIWVADQNKPVGFTVHAIVTTSDLELSPSEVDFGYCTIYEAIRTEISLHNHSLLPQEFGFVRLPKFVDVQPNDGFGTILPLETLQFCVIFQPTKAEEHRFQLTCKSEINRCFKLSCRAVGVHPPLELSHYQIKFAATALYDTSVATVYVINSHLSMSSPTHSKPRIGSEDASPMGPTSFEFLLPPDSPITISPSVGTVWPGKSRKLWAWQGLRVTLRAAEGLSEEGHRCLVQVAFRPVLPEKLIRQEALPLLNKEMETKSFRKNMAPQRKDLHGLSFSVLRAQNRDKLFKVSVPHVLEMRKRELRPSSDEYQAARATLLRAFQAKFDTFVVPCVVASGDIKDRKGSEPLSFSPHNTLYLELWCPTVAPSVVVTSHKGKTIFNFGDVAVGHRSIKKISIQNVSPEDLALDFSLLNPNGPFVLLNHSSLLRAGGTQVLVLSFSPHESILPGPQALTPAAK

SEQ ID NO: 1861 - DNA, 550 bp, Homo sapiens
ctgtgctctgggtggtgaggcgagcgtctgccctccgcagcactaacccccgtgtgctatgggtcacgtcctgcagctttgacccccctggccccctgtcagccggaatgtcctgtgaagtgcttgtcaccttcaagccgatgataaacaaggatctagaaggaaatatctcatttttggctcagacgggcgagttttcagttccactgaaatgttcaacaaagaaatgttcgagcagtctcctgacctacgaagataaaagcttgtatgacaaagccgccaccagcttctctgagcagcagctagagggcacggagtcctcccaggcggacatgcagagccggaaggagctggagaagctggacaaggagcaggaggaggagcagcccgcagaaccagagagattaaccacagtgatacctcccagcgaagagcagacggagatcacgctgggggaggtaacagaaggggaaattggccccttcagctccatcaaggtgcccatcgtcttcactccggtcgtcccaggcgacgtccaagccaggttcaa

SEQ ID NO: 1862 - protein, 146 aa, Homo sapiens
MSCEVLVTFKPMINKDLEGNISFLAQTGEFSVPLKCSTKKCSSSLLTYEDKSLYDKAATSFSEQQLEGTESSQADMQSRKELEKLDKEQEEEQPAEPERLTTVIPPSEEQTEITLGEVTEGEIGPFSSIKVPIVFTPVVPGDVQAR

SEQ ID NO: 1863 - DNA, 4710 bp, Homo sapiens
gttgccatggagctgcccgccccaaaccacgccgccggcgccgcggagggcaatcgccaaggaccgccgcctgcctgagcagcccggggtgtctgtgcctccggagcccgagaacctgggacccaggccagccagagctaatttctatctcccagcatggaggatgacggcagcctgctccctgaggacgagcttttggccgatgcccttcttttggaagatgaaagagatgaattagaggatccggagtttgacatcaaatgtcttctacaggaagctgaggatgacgtggacccgggacacagcagctcagtgaaagaactagatactgatgctgataaattgaagaagaaaacagctgaggacagaacgcaggcatttcacctgcggcagaacctgagcgccctggataagatgcatgaggagcaagagcttttcactgagaagatgagaggggagctgcgcgcctgtcggcagaggcgggacctgatcgacaagcagcaggaggctgtggcagccgagatcgccacagaggaagaggcgggcaacatggccgctgtgggccgcctccaggccgtgtccagacgcctgtttgcagagctggagaacgagagagacctgcagtcgaggactgaggccgtgctgaaggagagcgagaacaccatgtggcacatcgagatccaggaggggcgactcgaggccttccggacagctgaccgtgaggaggtggaggccacggggcggcggctccaggtgcgcgcagccgagcagctctgcagagagcaggaggccctggggaaggtggagcggaaccgactgctgaggatcaggaagtccctgaacacccagaaggagctcgggctcaggcaccagaagctgctggaggacgcccggaagaaccacaaggttgccgtgcggttcctgaaggcctccctgggaagaatccgagagcaagagaagaaggaggagatggagtgccacgagtacatgaggcgacgcatggatgcggtggtggcgctgaagggcagcatctccgcgaaccgggacacactgcggaagttccaagcatgggaccgtgccaaggcagagctggcggagcagagggtccaggctgagaagaaggcgattctggcccagggcagggatgcattcaggcaccttgtccaccagcgccggcgccaggagctggaggcccagaagagggcctttgaggaggagcagaagctcagaaagcaggagatcatcagtcggattctgaaagaggaggctgaggaggaaaagaggaagaaacagcatccccccaccagtgccaggcaccggctgaccctgagggacaagacctggaactacatttctgacttttgcaagaagaccacagtcccaaccaacacgtacacactggactacgaggctgctgcaggccccgggccctctcggttgctggaagtcgtttccagtgagcttatccagggggaccccggggccagctcagaggaggaaacgttagctgagcccgagatctctgggctttggaatgaagactacaagccataccaggtgcccaaggaggacgtggaccgaaagcccgtgggcgggacaaagatggacaaggacatcctggagcgcacggtggagcggctgcggagcagggtggtccacaagcaggtggtgtgggggcgtgagttccaaggacgccccttcaacagcaaaccggagctcctccacttccaggactttgatattggcaaagtgtacaagaaaaagatcacgttggtaaacaccacctacacgatcaactactgcaagctggtgggcgtggaggagcacctccgggacttcatccacgttgactttgacccccctggccccctgtcagccggaatgtcctgtgaagtgcttgtcaccttcaagccgatgataaacaaggatctagaaggaaatatctcatttttggctcagacgggcgagttttcagttccactgaaatgttcaacaaagaaatgttcgctgtccctcgacaaggagctcattgacttcggcagctacgtggtaggagagaccacgtctcggaccatcacgctgaccaacgttgggggcttgggcacgactttcaagttcctgccagcttcagagccctgtgagatggacgactcccagtctgccctgaaattaagcagtctcctgacctacgaagataaaagcttgtatgacaaagccgccaccagcttctctgagcagcagctagagggcacggagtcctcccaggcggacatgcagagccggaaggagctggagaagctggacaaggagcaggaggaggagcagcccgcaggtgagccaggctgccaggccaagccagggtgggcgggcggtgagggcctcagggcagcattccagggggctgaggggcccaggggagggctggaaagtagagaattttcctaggccttcgatgttaagtgacggttaagcaagaaaatattcttatgtgccactaagtgttgtttttggagtggacgaaaatgtacattcacgttgacgctaaccgaagacttgaaggcacctccagcattggcccagcaggcccagcacgggcggagccgcacagggcggggaagaggctctgcggtgccccctggaggggccgggctgcggggggcttctgtctagctctgcagctgtggctgttgttagacgcgcaccagcggggagaggtgccgagaaacgggcgggccctgccctccccatgcctcctgccctgcagcccgccgccatcgggaatcgcttgcgtctcctccttgcttctcttgatcgttttcccacatacgcatcgagatccagaaacctccgtcctcctcctgtctgtcttcgcgtggtgcgcgttccgcacgccctgcagctcagcgcggagctgggccggttctccacagcctgtgtgagccgcacttccggtgtgagccgcacttccggtgtgagccgcacttccggtgtgagccgcacttcctgtcctcaccactgcgtggcgtttcctttcctgagagagcctcgggttctagatccgtccttctgccagtgcacacttgggagcgttcgtggtacacactgttgcgaaggccgttctgcactgccccttggcctgtgtgtgagttcccacagggcacctggctggggctcatgcctgcatcacagggcatagccagcctcactggcatcagctaataccaaagtgagttctttttatgttgagacagggtctctgtcgcctaggctggagtgcagtggtgcagtcacagctcactgcagcctcgacctcccgggctcaagcaatcctcctgcctcagctcctgagtagctggaactacaggcacgcaccaccgcacctggctagtttttgtatttttttgtagacacagggtttcgccatgtttcccaggctggtgtggaactcctgaactcaggctgtctgcccacctcagcctcccaaggtgctggattacaggcatgagccacctcgcctagcccaccgagttctttttcaaagtggttgtgcaagtttacactcccaccaacagtgtacaagactgtgctgtccagcgtggctgtcactgccacatctggctatttaaacttaaattgatccaaattaaataatagtgaaaattcaggtcctcctccacaagggccacatttcacatgctccatagcgacctgtgggcaacggctgccctactggacagcccagaagcccagctctgcctggtcacagagggtcctacggggccacactgggcttgagggccttgcttcacatccgcaggagcacgaggtcacacggcccggggctgcttgtctggggggcctgcaccacggtctgctgttgagatgttgctttttggtttcccagatcaccagtgagattgcgtgtctttccctgggcccatttacaagttgtatcttctttggtgtgacatctctgtttaaggctatcccttgttcttctgtgggattgtctgtcttcttctcattcattcataggagctcttcatgcacccagattccagccctcctccctgaggaatgttgcaggtgctgcctccgagtctgtggctgggccttcctctccctttatgacgtcttttctcaaatcaaagttcttcagtccagtctttgcatatttaccagtcatttctattggaatttgttttttatgatttttaggcaatttttttctcctccagggtcataaagacataggacatcgcttttgtgttgaggtgtatgatccacctcaaattcactcctgcttgtggtggaagtcagggctgaggctcatttcccctggtgcgtgtttgtgtattccacggcacaagtggactctgctatcccattcgatccattcgttgtccgtgtcaaaaatcaattgaccatccaggcacagtggctcatgcctgtaatcccagaactttgggaggccgaggcaggaggatcacttgaggtcaagagtttgagaccagcctggccaacatggtgaaaccccatttctactaaaaatacaaaaaattagccaggcgtggtggcgggcgcctgtaatcccagctacttgggtggctgaggcaagagaattgcttgaacccgggaggcggaggttgcagtgagctgagatcgcgccattgcactccagcctggcctataagagtaaaatactgtctc

SEQ ID NO: 1864 - protein, 762 aa, Homo sapiens
MEDDGSLLPEDELLADALLLEDERDELEDPEFDIKCLLQEAEDDVDPGHSSSVKELDTDADKLKKKTAEDRTQAFHLRQNLSALDKMHEEQELFTEKMRGELRACRQRRDLIDKQQEAVAAEIATEEEAGNMAAVGRLQAVSRRLFAELENERDLQSRTEAVLKESENTMWHIEIQEGRLEAFRTADREEVEATGRRLQVRAAEQLCREQEALGKVERNRLLRIRKSLNTQKELGLRHQKLLEDARKNHKVAVRFLKASLGRIREQEKKEEMECHEYMRRRMDAVVALKGSISANRDTLRKFQAWDRAKAELAEQRVQAEKKAILAQGRDAFRHLVHQRRRQELEAQKRAFEEEQKLRKQEIISRILKEEAEEEKRKKQHPPTSARHRLTLRDKTWNYISDFCKKTTVPTNTYTLDYEAAAGPGPSRLLEVVSSELIQGDPGASSEEETLAEPEISGLWNEDYKPYQVPKEDVDRKPVGGTKMDKDILERTVERLRSRVVHKQVVWGREFQGRPFNSKPELLHFQDFDIGKVYKKKITLVNTTYTINYCKLVGVEEHLRDFIHVDFDPPGPLSAGMSCEVLVTFKPMINKDLEGNISFLAQTGEFSVPLKCSTKKCSLSLDKELIDFGSYVVGETTSRTITLTNVGGLGTTFKFLPASEPCEMDDSQSALKLSSLLTYEDKSLYDKAATSFSEQQLEGTESSQADMQSRKELEKLDKEQEEEQPAGEPGCQAKPGWAGGEGLRAAFQGAEGPRGGLESREFS

SEQ ID NO: 1865 - DNA, 4655 bp, Homo sapiens
atggaggatgacggcagcctgctccctgaggacgagcttttggccgatgcccttcttttggaagatggtaataaagcttctttcacagccctgaaggacactaagggaccctcagggttcctcggattttgctttgagaaccatcaagttagacttgtcaagatttatcctaacactggccgggtgtggtaccaccaaccacaccgaggaatgagttctgagcctgcagctggggtggtggcagctgacgtccttttcatcctaagctcagtgaaagaactagatactgatgctgataaattgaagaagaaaacagctgaggacagaacgcaggcatttcacctgcggcagaacctgagcgccctggataagatgcatgaggagcaagagcttttcactgagaagatgagaggggagctgcgcgcctgtcggcagaggcgggacctgatcgacaagcagcaggaggctgtggcagccgagatcgccacagaggaagaggcgggcaacatggccgctgtgggccgcctccaggccgtgtccagacgcctgtttgcagagctggagaacgagagagacctgcagtcgaggactgaggccgtgctgaaggagagcgagaacaccatgtggcacatcgagatccaggaggggcgactcgaggccttccggacagctgaccgtgaggaggtggaggccacggggcggcggctccaggtgcgcgcagccgagcagctctgcagagagcaggaggccctggggaaggtggagcggaaccgactgctgaggatcaggaagtccctgaacacccagaaggagctcgggctcaggcaccagaagctgctggaggacgcccggaagaaccacaaggttgccgtgcggttcctgaaggcctccctgggaagaatccgagagcaagagaagaaggaggagatggagtgccacgagtacatgaggcgacgcatggatgcggtggtggcgctgaagggcagcatctccgcgaaccgggacacactgcggaagttccaagcatgggaccgtgccaaggcagagctggcggagcagagggtccaggctgagaagaaggcgattctggcccagggcagggatgcattcaggcaccttgtccaccagcgccggcgccaggagctggaggcccagaagagggcctttgaggaggagcagaagctcagaaagcaggagatcatcagtcggattctgaaagaggaggctgaggaggaaaagaggaagaaacagcatccccccaccagtgccaggcaccggctgaccctgagggacaagacctggaactacatttctgacttttgcaagaagaccacagtcccaaccaacacgtacacactggactacgaggctgctgcaggccccgggccctctcggttgctggaagtcgtttccagtgagcttatccagggggaccccggggccagctcagaggaggaaacgttagctgagcccgagatctctgggctttggaatgaagactacaagccataccaggtgcccaaggaggacgtggaccgaaagcccgtgggcgggacaaagatggacaaggacatcctggagcgcacggtggagcggctgcggagcagggtggtccacaagcaggtggtgtgggggcgtgagttccaaggacgccccttcaacagcaaaccggagctcctccacttccaggactttgatattggcaaagtgtacaagaaaaagatcacgttggtaaacaccacctacacgatcaactactgcaagctggtgggcgtggaggagcacctccgggacttcatccacgttgactttgacccccctggccccctgtcagccggaatgtcctgtgaagtgcttgtcaccttcaagccgatgataaacaaggatctagaaggaaatatctcatttttggctcagacgggcgagttttcagttccactgaaatgttcaacaaagaaatgttcgctgtccctcgacaaggagctcattgacttcggcagctacgtggtaggagagaccacgtctcggaccatcacgctgaccaacgttgggggcttgggcacgactttcaagttcctgccagcttcagagccctgtgagatggacgactcccagtctgccctgaaattaagcagtctcctgacctacgaagataaaagcttgtatgacaaagccgccaccagcttctctgagcagcagctagagggcacggagtcctcccaggcggacatgcagagccggaaggagctggagaagctggacaaggagcaggaggaggagcagcccgcaggtgagccaggctgccaggccaagccagggtgggcgggcggtgagggcctcagggcagcattccagggggctgaggggcccaggggagggctggaaagtagagaattttcctaggccttcgatgttaagtgacggttaagcaagaaaatattcttatgtgccactaagtgttgtttttggagtggacgaaaatgtacattcacgttgacgctaaccgaagacttgaaggcacctccagcattggcccagcaggcccagcacgggcggagccgcacagggcggggaagaggctctgcggtgccccctggaggggccgggctgcggggggcttctgtctagctctgcagctgtggctgttgttagacgcgcaccagcggggagaggtgccgagaaacgggcgggccctgccctccccatgcctcctgccctgcagcccgccgccatcgggaatcgcttgcgtctcctccttgcttctcttgatcgttttcccacatacgcatcgagatccagaaacctccgtcctcctcctgtctgtcttcgcgtggtgcgcgttccgcacgccctgcagctcagcgcggagctgggccggttctccacagcctgtgtgagccgcacttccggtgtgagccgcacttccggtgtgagccgcacttccggtgtgagccgcacttcctgtcctcaccactgcgtggcgtttcctttcctgagagagcctcgggttctagatccgtccttctgccagtgcacacttgggagcgttcgtggtacacactgttgcgaaggccgttctgcactgccccttggcctgtgtgtgagttcccacagggcacctggctggggctcatgcctgcatcacagggcatagccagcctcactggcatcagctaataccaaagtgagttctttttatgttgagacagggtctctgtcgcctaggctggagtgcagtggtgcagtcacagctcactgcagcctcgacctcccgggctcaagcaatcctcctgcctcagctcctgagtagctggaactacaggcacgcaccaccgcacctggctagtttttgtatttttttgtagacacagggtttcgccatgtttcccaggctggtgtggaactcctgaactcaggctgtctgcccacctcagcctcccaaggtgctggattacaggcatgagccacctcgcctagcccaccgagttctttttcaaagtggttgtgcaagtttacactcccaccaacagtgtacaagactgtgctgtccagcgtggctgtcactgccacatctggctatttaaacttaaattgatccaaattaaataatagtgaaaattcaggtcctcctccacaagggccacatttcacatgctccatagcgacctgtgggcaacggctgccctactggacagcccagaagcccagctctgcctggtcacagagggtcctacggggccacactgggcttgagggccttgcttcacatccgcaggagcacgaggtcacacggcccggggctgcttgtctggggggcctgcaccacggtctgctgttgagatgttgctttttggtttcccagatcaccagtgagattgcgtgtctttccctgggcccatttacaagttgtatcttctttggtgtgacatctctgtttaaggctatcccttgttcttctgtgggattgtctgtcttcttctcattcattcataggagctcttcatgcacccagattccagccctcctccctgaggaatgttgcaggtgctgcctccgagtctgtggctgggccttcctctccctttatgacgtcttttctcaaatcaaagttcttcagtccagtctttgcatatttaccagtcatttctattggaatttgttttttatgatttttaggcaatttttttctcctccagggtcataaagacataggacatcgcttttgtgttgaggtgtatgatccacctcaaattcactcctgcttgtggtggaagtcagggctgaggctcatttcccctggtgcgtgtttgtgtattccacggcacaagtggactctgctatcccattcgatccattcgttgtccgtgtcaaaaatcaattgaccatccaggcacagtggctcatgcctgtaatcccagaactttgggaggccgaggcaggaggatcacttgaggtcaagagtttgagaccagcctggccaacatggtgaaaccccatttctactaaaaatacaaaaaattagccaggcgtggtggcgggcgcctgtaatcccagctacttgggtggctgaggcaagagaattgcttgaacccgggaggcggaggttgcagtgagctgagatcgcgccattgcactccagcctggcctataagagt

SEQ ID NO: 1866 - protein, 800 aa, Homo sapiens
MEDDGSLLPEDELLADALLLEDGNKASFTALKDTKGPSGFLGFCFENHQVRLVKIYPNTGRVWYHQPHRGMSSEPAAGVVAADVLFILSSVKELDTDADKLKKKTAEDRTQAFHLRQNLSALDKMHEEQELFTEKMRGELRACRQRRDLIDKQQEAVAAEIATEEEAGNMAAVGRLQAVSRRLFAELENERDLQSRTEAVLKESENTMWHIEIQEGRLEAFRTADREEVEATGRRLQVRAAEQLCREQEALGKVERNRLLRIRKSLNTQKELGLRHQKLLEDARKNHKVAVRFLKASLGRIREQEKKEEMECHEYMRRRMDAVVALKGSISANRDTLRKFQAWDRAKAELAEQRVQAEKKAILAQGRDAFRHLVHQRRRQELEAQKRAFEEEQKLRKQEIISRILKEEAEEEKRKKQHPPTSARHRLTLRDKTWNYISDFCKKTTVPTNTYTLDYEAAAGPGPSRLLEVVSSELIQGDPGASSEEETLAEPEISGLWNEDYKPYQVPKEDVDRKPVGGTKMDKDILERTVERLRSRVVHKQVVWGREFQGRPFNSKPELLHFQDFDIGKVYKKKITLVNTTYTINYCKLVGVEEHLRDFIHVDFDPPGPLSAGMSCEVLVTFKPMINKDLEGNISFLAQTGEFSVPLKCSTKKCSLSLDKELIDFGSYVVGETTSRTITLTNVGGLGTTFKFLPASEPCEMDDSQSALKLSSLLTYEDKSLYDKAATSFSEQQLEGTESSQADMQSRKELEKLDKEQEEEQPAGEPGCQAKPGWAGGEGLRAAFQGAEGPRGGLESREFS

SEQ ID NO: 1867 - DNA, 691 bp, Homo sapiens
gactgtgctctgggtggtgaggcgagcgtctgccctccgcagcactaacccccgtgtgctatgggtcacgtcctgcagctttgacccccctggccccctgtcagccggaatgtcctgtgaagtgcttgtcaccttcaagccgatgataaacaaggatctagaaggaaatatctcatttttggctcagacgggcgagttttcagttccactgaaatgttcaacaaagaaatgttcgctgtccctcgacaaggagctcattgacttcggcagctacgtggtaggagagaccacgtctcggaccatcacgctgaccaacgttgggggcttgggcacgactttcaagttcctgccagcttcagagccctgtgagatggacgactcccagtctgccctgaaattaagcagtctcctgacctacgaagataaaagcttgtatgacaaagccgccaccagcttctctgagcagcagctagagggcacggagtcctcccaggcggacatgcagagccggaaggagctggagaagctggacaaggagcaggaggaggagcagcccgcaggtgagccaggctgccaggccaagccagggtgggcgggcggtgagggcctcagggcagcattccagggggctgaggggcccaggggagggctggaaagtagagaattttcctaggccttcgatgttaagtga

SEQ ID NO: 1868 - protein, 187 aa, Homo sapiens
MSCEVLVTFKPMINKDLEGNISFLAQTGEFSVPLKCSTKKCSLSLDKELIDFGSYVVGETTSRTITLTNVGGLGTTFKFLPASEPCEMDDSQSALKLSSLLTYEDKSLYDKAATSFSEQQLEGTESSQADMQSRKELEKLDKEQEEEQPAGEPGCQAKPGWAGGEGLRAAFQGAEGPRGGLESREFS

SEQ ID NO: 1869 - DNA, 550 bp, Homo sapiens
aggggaggcttctctggagcaaggaggcgcagcagggtgctcctggcggagggatcggcgggtgcaaaggccccggcgtgagacgggcagtgaggggtggatggggcaaaggctcagcccaggcactgggagcctgggtagcaggaaaggaccttctctggtgccctgaagggcaccgcagagaccctgtggaggccaaagctgaggcagcccaaggctttctctttcccagcagggcatcggttgcagcagtgaccttgaccttcaggttttggggtacacaagggcagagactgcagcactgtgccagactcaggagaggaccatcgtccctaccccacacctttagggaaagcctcctctttcagaatccgactgatgatctcctgctttctgagcttctgctcctcctcaaaggccctgcgtggagtcgcttctcagatgagtgcaagaggtcccctgcctccaccttgccccagctgcacttcccgggtgcctcctacatgccaggcctgcgccaggctaagggatgtataggcggtggagctgc

SEQ ID NO: 1870 - protein, 52 aa, Homo sapiens
MISCFLSFCSSSKALRGVASQMSARGPLPPPCPSCTSRVPPTCQACARLRDV

SEQ ID NO: 1871 - DNA, 2145 bp, Homo sapiens
gttgccatggagctgcccgccccaaaccacgccgccggcgccgcggagggcaatcgccaaggaccgccgcctgcctgagcagcccggggtgtctgtgcctccggagcccgagaacctgggacccaggccagccagagctaatttctatctcccagcatggaggatgacggcagcctgctccctgaggacgagcttttggccgatgcccttcttttggaagatgaaagagatgaattagaggatccggagtttgacatcaaatgtcttctacaggaagctgaggatgacgtggacccgggacacagcagctcagtgaaagaactagatactgatgctgataaattgaagaagaaaacagctgaggacagaacgcaggcatttcacctgcggcagaacctgagcgccctggataagatgcatgaggagcaagagcttttcactgagaagatgagaggggagctgcgcgcctgtcggcagaggcgggacctgatcgacaagcagcaggaggctgtggcagccgagatcgccacagaggaagaggcgggcaacatggccgctgtgggccgcctccaggccgtgtccagacgcctgtttgcagagctggagaacgagagagacctgcagtcgaggactgaggccgtgctgaaggagagcgagtgagtcggtgtgcagccgggactggcagcaggcaggccccagaacgaacagcgagctgggttttcaaagcccaggagagagacagctgcctcgtcctaaatgctttcctgtggagttgggttggatgcgtcgagttgccttcggcgagtttggcaagaaggggtttgggaaggtgcacgaatttctcagggcgactgaggggaccctgagctgacctcaagtaggactcccgaaccacacagcccccagccccgggagctgcagccaggtccatgacatccacagcactgaccctgcacgtgcccgggatgacctaagctttccagcctgggcagggcaggaggcacagagagggctgagtgcaggcctcaggccaccccacccctaagagtgcccatgccgccagccctcatgcaacctaacatctcagcctcactccactgaagacaccactgagctttgacccagtctctgacctgcactcactgtgatgtagtcacgacccagtctctgacccacacttgctgtgacgtagtttctggcccagtctctgacccacgctcgctgtgatacagtcacgacccaagctggtgtccagtgccctgcactgtggccccacctgtgtgggcagtgggaggggtgcaggggaggacaggacgctgaacccagctgtggctgagcgtggagaacactgtcccctgcgacactcctttgacaactggctctgtcatgcccctctcactgctcagcagcacctgcgccagggtgaggggcttcacagggctaatgaaccccagaaggcctcactttactaggttgatgtgattgtccacttctttaaaaaaaaaaaaaaaaaaagtttttgggctgggcccagtggctcatgcctataatcccaacactttgggaggcccaggctggtggatcacctgaggtcaggagttcaagaccagcccaggcaacatagcgaaaccctgtctctactaaaaatacaaaaattaactgggcgtggtggtgcatgcctgtaatcccagctactcgggaggctgaggcaggagaatcgctggagcccagaggtagaggttgcagtgagccaagattgcgccactgccacactccagcctgggcgacagagtgagcaagactctgtcttttaaaaaaaaaaaaaatggctgggcgcggtggctcacgcctgtcatcccagcactttgggaggccgaggcgggtggatcacaaggtcaggagatcgagaccatcctggctaacacggtgaaacccccatctctactaaaaatacaaaaaattagccgggcgtgctggcaggcgcctgtagtcccagctactcggaaggctgaggcaggagaatggcgtgagcccgggaggcggagcttgcagtgagccaagattgcgtcactgcactccagcctgggcgacagagcgagactccgtctcaaaaataaataaataaataaagttttattttgaaac

SEQ ID NO: 1872 - protein, 167 aa, Homo sapiens
MEDDGSLLPEDELLADALLLEDERDELEDPEFDIKCLLQEAEDDVDPGHSSSVKELDTDADKLKKKTAEDRTQAFHLRQNLSALDKMHEEQELFTEKMRGELRACRQRRDLIDKQQEAVAAEIATEEEAGNMAAVGRLQAVSRRLFAELENERDLQSRTEAVLKESE

SEQ ID NO: 1873 - DNA, 399 bp, Homo sapiens
gaaagagatgaattagaggatccggagtttgacatcaaatgtcttctacaggaagctgaggatgacgtggacccgggacacagcagctcagtgaaagaactagatactgatgctgataaattgaagaagaaaacagctgaggacagaacgcaggcatttcacctgcggcagaacctgagcgccctggataagatgcatgaggagcaagagcttttcactgagaagatgagcgtctcctaaaaactaaaaacattcagcggagagtggtggcgcacgcctgtggtcccagtgacttgggaggctgaggccagaggatggcttgagcccaggaggtcaaggctgcagcaagcctgggtgacagagcaagaccctgtctctaaaaataaaaaactgaaagac

SEQ ID NO: 1874 - protein, 52 aa, Homo sapiens
KLKTFSGEWWRTPVVPVTWEAEARGWLEPRRSRLQQAWVTEQDPVSKNKKLK

SEQ ID NO: 1875 - DNA, 1985 bp, Homo sapiens
ctcttccttctgctcagtgctgggaggcgttacactttccccatatggcacggagcagaacgtgcacctttggctctggaaggaatgaacatcctacccgttagttagccctgggagtcactgactcggttcttccctggacaccaatgtcctatggagcacacagaaagccacggaagtgtggtctgcgggttgagacggactccgttcatgtggataagcagaggaaatttggcagaaacgaccaaatgcaaaatacgtgtagcagcctgagaccggccgtctactgaaacaaaggatgcagttcagtcggaaaccacgcttagctgagtagctgtctttagccatccaggccctgagaaccaatgaacaacccagcttggccgcttagaacattttttctatacttgagttaaatagatatccaagaaccattactcgtttttaatgtggagaagtcggtattctattctcgtgttctatgttttttaaagtggcaatttgaattatttcgtgcgatagaaaaccttaaacacaaagtaacgtttctaacaaaagggctgtcgatcaagtgacaaacacgtcctacttttagatacaagcacgactgaggcaacggcacgaagacgcctaaagtgggctgctggggagacaagatctggccgcgaatggaactcgcggcagctcattaacgggaccgtccagcaggaaggtgggttggcagccttctcccagggctccccacgatccctacccctggtgtggcgtggccttcctcctcacatgtcgtctggaccaagcagtgtgttgttctcatccataaagagtgatgggccgggcacgatggccacacctgtgatcccagcactgtgggaggctgaggcgggaggatctcctgagcccaggagtttgacaccagcctgggtagcatagggagaccctgtctctacagaaaaaaagttagccaggtattccagaggctgaggtgggaggatcgcttgaacccaggaggtggagactgcagtgagccgtgatcgcaccactgcactccaacctgggcaacagactgagacccagtttctaaaacaaataataaaaaggcagggtgcagtggctcatacctgtaatcccagcacgttgggaggccaaggtgggcggatcacttgaggtcaggagttcgagaccagctggcccacatggtaaaaccccatctctactaaaatgcaaaaatcaaccgggcacagtggcacacgcctgtaatcccagctcttcaggaggccgaggcaggagaactgggaggcagagattgcagtgagctgagatcgtgccactgcactccaggctgggtgacagagctagacaccatcttgaaaaaaaataaaagttaaataaaaagagtgatgaggcatcctgagattcatttataaaatgccgtgattcaggtctcagggcactgtcgcccctactcactttgatgaagccagtgctgggttgctgctgaggtggggaggttcatgggccaggaactgaaggcagccatgagagccagacccctccaccacccccaagacagcagggaactcactccaacagccaccctgggatgctgccacagctgagcctggaggtgaccgtgaccctggctgacgtcggactgcagctttgtaagggagactgagccgggacccagacctacaaaagctgagatgataaacactgttttaagctgctgtgtgtcgcagtgactcgtgtggtagtggatttctagcagagccgtcgttcgtgtctgccttctctcagctcaacactctgtagggccacccatgccgttgtgcatgtcaacggtggattttttattgcgagtaatatttcattccattgcatgctcacacctcggtttgtttaactgtctacctgttgatgagctctgggacatatgcagttctgggctattatgagtaaagctgcttttaacatttaaatac

SEQ ID NO: 1876 - protein, 47 aa, Homo sapiens
MSYGAHRKPRKCGLRVETDSVHVDKQRKFGRNDQMQNTCSSLRPAVY

SEQ ID NO: 1877 - DNA, 650 bp, Homo sapiens
gggctccgcgctccgtccgccccctcgcgcccgcgccgcgctcgctcagctcccgcccgcctgtgccgcctgtgcggccgccgggagccaagtttgcgcggaccccgtcccgagcccgccgcggccatggacgcgcccgcccggctgctggccccgctcctgctcctctgcgcgcagcagctccgcggcaccagagcgatgaatgacatcggcgactacgtgggctccaacctggagatctcctggctccccaacctggacgggctgatagccggctacgcccgcaacttccggcctggcatcggaggcccccccgtgaatgtggcccttgccctggaggtggccagcatcgaccacatctcagaggccaacatggagtacaccatgacggtgttcctgcaccagagctggcgggacagcaggctctcctacaaccacaccaacgagaccctgggtctggacagccgcttcgtggacaagctgtggctgcccgacaccttcatcgtgaacgccaagtcggcctggttccacgacgtgacggtggagaacaagctcatccggctgcagcccgacggcgtgatcctgtacagcatccggtgagcgggctgcccacccggactccgggggagagcctgcccgggccaagcgtc

SEQ ID NO: 1878 - protein, 157 aa, Homo sapiens
MDAPARLLAPLLLLCAQQLRGTRAMNDIGDYVGSNLEISWLPNLDGLIAGYARNFRPGIGGPPVNVALALEVASIDHISEANMEYTMTVFLHQSWRDSRLSYNHTNETLGLDSRFVDKLWLPDTFIVNAKSAWFHDVTVENKLIRLQPDGVILYSIR

SEQ ID NO: 1879 - DNA, 1956 bp, Homo sapiens
gggctccgcgctccgtccgccccctcgcgcccgcgccgcgctcgctcagctcccgcccgcctgtgccgcctgtgcggccgccgggagccaagtttgcgcggaccccgtcccgagcccgccgcggccatggacgcgcccgcccggctgctggccccgctcctgctcctctgcgcgcagcagctccgcggcaccagagcgatgaatgacatcggcgactacgtgggctccaacctggagatctcctggctccccaacctggacgggctgatagccggctacgcccgcaacttccggcctggcatcggaggcccccccgtgaatgtggcccttgccctggaggtggccagcatcgaccacatctcagaggccaacatggagtacaccatgacggtgttcctgcaccagagctggcgggacagcaggctctcctacaaccacaccaacgagaccctgggtctggacagccgcttcgtggacaagctgtggctgcccgacaccttcatcgtgaacgccaagtcggcctggttccacgacgtgacggtggagaacaagctcatccggctgcagcccgacggcgtgatcctgtacagcatccgaatcacctccactgtggcctgcgacatggacctggccaaataccccatggacgagcaggagtgcatgctggacctggagagctacggttactcatcggaggacatcgtctactactggtcggagagccaggagcacatccacgggctggacaagctgcagctggcgcagttcaccatcaccagctaccgcttcaccacggagctgatgaacttcaagtccgctggccagttcccacggctcagcctgcacttccacctgcggaggaaccgcggcgtgtacatcatccaatcctacatgccctccgtcctgctggtcgccatgtcctgggtctccttctggatcagccaggcggcggtgcccgccagggtgtctctaggcatcaccacggtgctgacgatgaccacgctcatggtcagtgcccgctcctccctgccacgggcatcagccatcaaggcactggacgtctacttctggatctgctatgtcttcgtgtttgccgccctggtggagtacgcctttgctcatttcaacgccgactacaggaagaagcagaaggccaaggtcaaggtctccaggccgagggcagagatggacgtgaggaacgccattgtcctcttctccctctctgctgccggcgtcacgcaggagctggccatctcccgccggcagcgccgcgtcccggggaacctgatgggctcctacaggtcggtgggggtggagacaggggagacgaagaaggagggggcagcccgctcaggaggccaggggggcatccgtgcccggctcaggcccatcgacgcagacaccattgacatttacgcccgcgctgtgttccctgcggcgtttgcggccgtcaatgtcatctactgggcggcatacgccatgtgagcacaggactcaggccaccctcgcttgtcctggcgcccggcggcagctgcccagaaacttcctgggagaaagagccctcgggctgccttcccctctgcgtgtttcgaagtgggatgacagtcggccacggaaaacaagaggaagcctcggcctccctgagctctgaccccagcctcacccgaaaggccagcctggggctctccggcaggcagcccgagacctgcacagatgaaggagcagaggttctgaccgagaggctgagccaggccggggtctgggcccttcagggagccgcggatttttatgttcagaaagtgatcctggtttctaggtctttgctctgcaggatcgggatcagagcgtgggaggaggtgggggtggacgtccatccggtgaacagtgaaggcgtttgtgaggtctttctggtcccagcatgaaataaagccttggcctgggggccgcttcattctc

SEQ ID NO: 1880 - protein, 452 aa, Homo sapiens [sequence omitted]

SEQ ID NO: 1881 - DNA, 540 bp, Homo sapiens
cctgcggcgcgcgctgccagcccgagggccccgccgtccaggggtcccctgacatctcacacttgcggactgaagctgcgaggagcggagaacccggccagggtcacggacgggagcgtccggactcgggttctctgggccccagcccccactccgcccccagcgaatccaaggtcccctgtagggaagggccgtccacactccccatcccttactggctgcatccactgaagcccagacctgctgcctgcaggacctcacccaggcaccaggtcgtgcctggcgcctccttgatgccaggccctggggagacctgtggccacagaacccatgttctccctggagatggacaggaggcccctctcctacgcagaagctgtcgttttttcttcttaaacaccgtttgcccctccctccacccaccgagccatctctgcccctctctacagcaaagcttccgccaagccggccctgctccctgtctacctctcctgccaccacccactcacacgttttaaatacaagccgtcggttctcaga

SEQ ID NO: 1882 - protein, 74 aa, Homo sapiens
MPGPGETCGHRTHVLPGDGQEAPLLRRSCRFFFLNTVCPSLHPPSHLCPSLQQSFRQAGPAPCLPLLPPPTHTF

SEQ ID NO: 1883 - DNA, 1015 bp, Homo sapiens
gccccgcgcgccgccggagttccgcggagttgaccgggtcggcgccgtcggtcctgagcgctgccttccgcgttccgccgcggccccacctggagcccccgccccgcgccatggccggagctcccggggcgcagcgctgacggcggcggggggagcgcgccatgcccagcaggaccggccccaagatggaagggagcggcggccgcgtccgcctcaaggcgcattacgggggggacatcttcatcaccagcgtggacgccgccacgaccttcgaggagctctgtgaggaagtgagagacatgtgtcgtctgcaccagcagcacccgctcaccctcaagtgggtggacagcgaaggtgacccttgcacggtgtcctcccagatggagctggaagaggctttccgcctggcccgtcagtgcagggatgaaggcctcatcattcatgttttcccgagcacccctgagcagcctggcctgccatgtccgggagaagacaaatctatctaccgccggggagccagaagatggaggaagctgtaccgtgccaacggccacctcttccaagccaagcgctttaacaggagagcgtactgcggtcagtgcagcgagaggatatggggcctcgcgaggcaaggctacaggtgcatcaactgcaaactgctggtccataagcgctgccacggcctcgtcccgctgacctgcaggaagcatatggattctgtcatgccttcccaagagcctccagtagacgacaagaacgaggacgccgaccttccttccgaggagacagatggaattgcttacatttcctcatcccggaagcatgacagcattaaagacgactcggaggaccttaagccagttatcgatgggatggatggaatcaaaatctctcaggggcttgggctgcaggactttgacctaatcagagtcatcgggcgcgggagctacgccaaggttctcctggtgcggttgaagaagaatgaccaaatttacgccatgaaagtggtgaagaa

SEQ ID NO: 1884 - protein, 283 aa, Homo sapiens
MPSRTGPKMEGSGGRVRLKAHYGGDIFITSVDAATTFEELCEEVRDMCRLHQQHPLTLKWVDSEGDPCTVSSQMELEEAFRLARQCRDEGLIIHVFPSTPEQPGLPCPGEDKSIYRRGARRWRKLYRANGHLFQAKRFNRRAYCGQCSERIWGLARQGYRCINCKLLVHKRCHGLVPLTCRKHMDSVMPSQEPPVDDKNEDADLPSEETDGIAYISSSRKHDSIKDDSEDLKPVIDGMDGIKISQGLGLQDFDLIRVIGRGSYAKVLLVRLKKNDQIYAMKVV

SEQ ID NO: 1885 - DNA, 2330 bp, Homo sapiens
gccccgcgcgccgccggagttccgcggagttgaccgggtcggcgccgtcggtcctgagcgctgccttccgcgttccgccgcggccccacctggagcccccgccccgcgccatggccggagctcccggggcgcagcgctgacggcggcggggggagcgcgccatgcccagcaggaccggccccaagatggaagggagcggcggccgcgtccgcctcaaggcgcattacgggggggacatcttcatcaccagcgtggacgccgccacgaccttcgaggagctctgtgaggaagtgagagacatgtgtcgtctgcaccagcagcacccgctcaccctcaagtgggtggacagcgaaggtgacccttgcacggtgtcctcccagatggagctggaagaggctttccgcctggcccgtcagtgcagggatgaaggcctcatcattcatgttttcccgagcacccctgagcagcctggcctgccatgtccgggagaagacaaatctatctaccgccggggagccagaagatggaggaagctgtaccgtgccaacggccacctcttccaagccaagcgctttaacaggagagcgtactgcggtcagtgcagcgagaggatatggggcctcgcgaggcaaggctacaggtgcatcaactgcaaactgctggtccataagcgctgccacggcctcgtcccgctgacctgcaggaagcatatggattctgtcatgccttcccaagagcctccagtagacgacaagaacgaggacgccgaccttccttccgaggagacagatggaattgcttacatttcctcatcccggaagcatgacagcattaaagacgactcggaggaccttaagccagttatcgatgggatggatggaatcaaaatctctcaggggcttgggctgcaggactttgacctaatcagagtcatcgggcgcgggagctacgccaaggttctcctggtgcggttgaagaagaatgaccaaatttacgccatgaaagtggtgaagaaagagctggtgcatgatgacgaggatattgactgggtacagacagagaagcacgtgtttgagcaggcatccagcaaccccttcctggtcggattacactcctgcttccagacgacaagtcggttgttcctggtcattgagtacgtcaacggcggggacctgatgttccacatgcagaggcagaggaagctccctgaggagcacgccaggttctacgcggccgagatctgcatcgccctcaacttcctgcacgagagggggatcatctacagggacctgaagctggacaacgtcctcctggatgcggacgggcacatcaagctcacagactacggcatgtgcaaggaaggcctgggccctggtgacacaacgagcactttctgcggaaccccgaattacatcgcccccgaaatcctgcggggagaggagtacgggttcagcgtggactggtgggcgctgggagtcctcatgtttgagatgatggccgggcgctccccgttcgacatcatcaccgacaacccggacatgaacacagaggactaccttttccaagtgatcctggagaagcccatccggatcccccggttcctgtccgtcaaagcctcccatgttttaaaaggatttttaaataaggaccccaaagagaggctcggctgccggccacagactggattttctgacatcaagtcccacgcgttcttccgcagcatagactgggacttgctggagaagaagcaggcgctccctccattccagccacagatcacagacgactacggtctggacaactttgacacacagttcaccagcgagcccgtgcagctgaccccagacgatgaggatgccataaagaggatcgaccagtcagagttcgaaggctttgagtatatcaacccattattgctgtccaccgaggagtcggtgtgaggccgcgtgcgtctctgtcgtggacacgcgtgattgaccctttaactgtatccttaaccaccgcatatgcatgccaggctgggcacggctccgagggcggccagggacagacgcttgcgccgagaccgcagagggaagcgtcagcgggcgctgctgggagcagaacagtccctcacacctgggcccgggcaggccagcttcgtgctggaggaacttgctgctgtgcctgcgtcgcggcggatccgcggggaccctgccgagggggctgtcatgcggtttccaaggtgcacattttccacggaaacagaactcgatgcactgacctgctccgccaggaaagtgagcgtgtagcgtcctgaggaataaaatgttccgatgatgtggaagctc

SEQ ID NO: 1886 - protein, 592 aa, Homo sapiens; identical to SEQ ID NO: 18

SEQ ID NO: 1887 - DNA, 627 bp, Homo sapiens
cgcgcgccgccggagttccgcggagttgaccgggtcggcgccgtcggtcctgagcgctgccttccgcgttccgccgcggccccacctggagcccccgccccgcgccatggccggagctcccggggcgcagcgctgacggcggcggggggagcgcgccatgcccagcaggaccggccccaagatggaagggagcggcggccgcgtccgcctcaaggcgcattacgggggggacatcttcatcaccagcgtggacgccgccacgaccttcgaggagctctgtgaggaagtgagagacatgtgtcgtctgcaccagcagcacccgctcaccctcaagtgggtggacagcgaaggtgacccttgcacggtgtcctcccagatggagctggaagaggctttccgcctggcccgtcagtgcagggatgaaggcctcatcattcatgttttcccgagcacccctgagcagcctggcctgccatgtccgggagaagacaaatctatctaccgccggggagccagaagatggaggaagctgtaccgtgccaacggccacctcttccaagccaagcgctttaacaggagagcgtactgcggtcagtgcagcgagaggatatggggcctcgcgaggca

SEQ ID NO: 1888 - protein, 155 aa, Homo sapiens
MPSRTGPKMEGSGGRVRLKAHYGGDIFITSVDAATTFEELCEEVRDMCRLHQQHPLTLKWVDSEGDPCTVSSQMELEEAFRLARQCRDEGLIIHVFPSTPEQPGLPCPGEDKSIYRRGARRWRKLYRANGHLFQAKRFNRRAYCGQCSERIWGLA

SEQ ID NO: 1889 - DNA, 519 bp, Homo sapiens
ccgggtcggcgccgtcggtcctgagcgctgccttccgcgttccgccgcggccccacctggagcccccgccccgcgccatggccggagctcccggggcgcagcgctgacggcggcggggggagcgcgccatgcccagcaggaccggccccaagatggaagggagcggcggccgcgtccgcctcaaggcgcattacgggggggacatcttcatcaccagcgtggacgccgccacgaccttcgaggagctctgtgaggaagtgagagacatgtgtcgtctgcaccagcagcacccgctcaccctcaagtgggtggacagcgaaggtagcccttgtcccatgttggccagaatcctcagcctcaggggacttcgccagggcagcctctgtgtgcggagtgtgctcagccaattctgtggggagacttaaagctgtggaattaaacttgttggcgccaacttttccccagtggggatggtgggaaagaggttggccacagatgcttatcaaggacctgggccca

SEQ ID NO: 1890 - protein, 98 aa, Homo sapiens [sequence omitted]

SEQ ID NO: 1891 - DNA, 502 bp, Homo sapiens
gggacatcttcatcaccagcgtggacgccgccacgaccttcgaggagctctgtgaggaagtgagagacatgtgtcgtctgcaccagcagcacccgctcaccctcaagtgggtggacagcgaaggtgacccttgcacggtgtcctcccagatggagctggaagaggctttccgcctggcccgtcagtgcagggatgaaggcctcatcattcatgttttcccgagcacccctgagcagcctggcctgccatgtccgggagaagacaggagggtcaagtgggaagagagcggccccaccgagtgtgttccaggccccggcggcgtctgagaggaggcggccaaacctagtggggctgcgcgaccgcctgtggaacagtggggacgctgctggtgtcctccaggcctgggtgggcgggttaccacggaagcctatcaacggatgcctgtgattccctggtatttataggtatgtctattgttttattaaaaaatccagtttcattc

SEQ ID NO: 1892 - protein, 85 aa, Homo sapiens
MCRLHQQHPLTLKWVDSEGDPCTVSSQMELEEAFRLARQCRDEGLIIHVFPSTPEQPGLPCPGEDRRVKWEESGPTECVPGPGGV

SEQ ID NO: 1893 - DNA, 725 bp, Homo sapiens
gctgagtccgagccctgcctgggtctggctgctgcccgcccgctctctggactgtgctgatgcagagatgcttgttttcctgtgacgtcagcgtcagctcctgcacatccatgccgtgttttagtttgtgcctcagctgctggctacagcttcccgggggagccgggtaccacccgggcctggagacatgaggaggcagggatgtgaggggcgggggacaggacagccggccttccgttaaatatctgctcctcgcgctcgagcctccctgcctattgtcggggccggaggcgagccgacgcagcatcagctcgtcaacgggaaggaagatgcctccctgcacgcccgccgcgcacagagcataaagaatctgcgctgaggaggcaggagaagaaagccgaatctatctaccgccggggagccagaagatggaggaagctgtaccgtgccaacggccacctcttccaagccaagcgctttaacaggagagcgtactgcggtcagtgcagcgagaggatatggggcctcgcgaggcaaggctacaggtgcatcaactgcaaactgctggtccataagcgctgccacggcctcgtcccgctgacctgcaggaagcatatgttgcttacatttcctcatcccggaagcatgacagcattaaagacgactcggaggaccttaagccagttatcgatgggatggatggaatcaaaatctctcaggggctt

SEQ ID NO: 1894 - protein, 35 aa, Homo sapiens
MLLTFPHPGSMTALKTTRRTLSQLSMGWMESKSLR

SEQ ID NO: 1895 - DNA, 856 bp, Homo sapiens
gctgagtccgagccctgcctgggtctggctgctgcccgcccgctctctggactgtgctgatgcagagatgcttgttttcctgtgacgtcagcgtcagctcctgcacatccatgccgtgttttagtttgtgcctcagctgctggctacagcttcccgggggagccgggtaccacccgggcctggagacatgaggaggcagggatgtgaggggcgggggacaggacagccggccttccgttaaatatctgctcctcgcgctcgagcctccctgcctattgtcggggccggaggcgagccgacgcagcatcagctcgtcaacgggaaggaagatgcctccctgcacgcccgccgcgcacagagcataaagaatctgcgctgaggaggcaggagaagaaagccgaatctatctaccgccggggagccagaagatggaggaagctgtaccgtgccaacggccacctcttccaagccaagcgctttaacaggagagcgtactgcggtcagtgcagcgagaggatatggggcctcgcgaggcaaggctacaggtgcatcaactgcaaactgctggtccataagcgctgccacggcctcgtcccgctgacctgcaggaagcatatggattctgtcatgccttcccaagagcctccagtagacgacaagaacgaggacgccgaccttccttccgaggagacagatggaattgcttacatttcctcatcccggaagcatgacagcattaaagacgactcggaggaccttaagccagttatcgatgggatggatggaatcaaaatctctcaggggcttgggctgcaggactttgacctaatcagagtcatcgggcgcgggagctacg

SEQ ID NO: 1896 - protein, 79 aa, Homo sapiens
MDSVMPSQEPPVDDKNEDADLPSEETDGIAYISSSRKHDSIKDDSEDLKPVIDGMDGIKISQGLGLQDFDLIRVIGRGS

SEQ ID NO: 1897 - DNA, 2235 bp, Homo sapiens
gctgagtccgagccctgcctgggtctggctgctgcccgcccgctctctggactgtgctgatgcagagatgcttgttttcctgtgacgtcagcgtcagctcctgcacatccatgccgtgttttagtttgtgcctcagctgctggctacagcttcccgggggagccgggtaccacccgggcctggagacatgaggaggcagggatgtgaggggcgggggacaggacagccggccttccgttaaatatctgctcctcgcgctcgagcctccctgcctattgtcggggccggaggcgagccgacgcagcatcagctcgtcaacgggaaggaagatgcctccctgcacgcccgccgcgcacagagcataaagaatctgcgctgaggaggcaggagaagaaagccgaatctatctaccgccggggagccagaagatggaggaagctgtaccgtgccaacggccacctcttccaagccaagcgctttaacaggagagcgtactgcggtcagtgcagcgagaggatatggggcctcgcgaggcaaggctacaggtgcatcaactgcaaactgctggtccataagcgctgccacggcctcgtcccgctgacctgcaggaagcatatggattctgtcatgccttcccaagagcctccagtagacgacaagaacgaggacgccgaccttccttccgaggagacagatggaattgcttacatttcctcatcccggaagcatgacagcattaaagacgactcggaggaccttaagccagttatcgatgggatggatggaatcaaaatctctcaggggcttgggctgcaggactttgacctaatcagagtcatcgggcgcgggagctacgccaaggttctcctggtgcggttgaagaagaatgaccaaatttacgccatgaaagtggtgaagaaagagctggtgcatgatgacgaggatattgactgggtacagacagagaagcacgtgtttgagcaggcatccagcaaccccttcctggtcggattacactcctgcttccagacgacaagtcggttgttcctggtcattgagtacgtcaacggcggggacctgatgttccacatgcagaggcagaggaagctccctgaggagcacgccaggttctacgcggccgagatctgcatcgccctcaacttcctgcacgagagggggatcatctacagggacctgaagctggacaacgtcctcctggatgcggacgggcacatcaagctcacagactacggcatgtgcaaggaaggcctgggccctggtgacacaacgagcactttctgcggaaccccgaattacatcgcccccgaaatcctgcggggagaggagtacgggttcagcgtggactggtgggcgctgggagtcctcatgtttgagatgatggccgggcgctccccgttcgacatcatcaccgacaacccggacatgaacacagaggactaccttttccaagtgatcctggagaagcccatccggatcccccggttcctgtccgtcaaagcctcccatgttttaaaaggatttttaaataaggaccccaaagagaggctcggctgccggccacagactggattttctgacatcaagtcccacgcgttcttccgcagcatagactgggacttgctggagaagaagcaggcgctccctccattccagccacagatcacagacgactacggtctggacaactttgacacacagttcaccagcgagcccgtgcagctgaccccagacgatgaggatgccataaagaggatcgaccagtcagagttcgaaggctttgagtatatcaacccattattgctgtccaccgaggagtcggtgtgaggccgcgtgcgtctctgtcgtggacacgcgtgattgaccctttaactgtatccttaaccaccgcatatgcatgccaggctgggcacggctccgagggcggccagggacagacgcttgcgccgagaccgcagagggaagcgtcagcgggcgctgctgggagcagaacagtccctcacacctgggcccgggcaggccagcttcgtgctggaggaacttgctgctgtgcctgcgtcgcggcggatccgcggggaccctgccgagggggctgtcatgcggtttccaaggtgcacattttccacggaaacagaactcgatgcactgacctgctccgccaggaaagtgagcgtgtagcgtcctgaggaataaaatgttccgatgatgtggaagctc

SEQ ID NO: 1898 - protein, 409 aa, Homo sapiens; identical to SEQ ID NO: 14

SEQ ID NO: 1899 - DNA, 646 bp, Homo sapiens
acatccatgccgtgttttagtttgtgcctcagctgctggctacagcttcccgggggagccgggtaccacccgggcctggagacatgaggaggcagggatgtgaggggcgggggacaggacagccggccttccgttaaatatctgctcctcgcgctcgagcctccctgcctattgtcggggccggaggcgagccgacgcagcatcagctcgtcaacgggaaggaagattgcagcgagaggatatggggcctcgcgaggcaaggctacaggtgcatcaactgcaaactgctggtccataagcgctgccacggcctcgtcccgctgacctgcaggaagcatatggattctgtcatgccttcccaagagcctccagtagacgacaagaacgaggacgccgaccttccttccgaggagacagatggaattgcttacatttcctcatcccggaagcatgacagcattaaagacgactcggaggaccttaagccagttatcgatgggatggatggaatcaaaatctctcaggggcttgggctgcaggactttgacctaatcagagtcatcgggcgcgggagctacgccaaggttctcctggtgcggttgaagaagaatgaccaaatttacgccatgaaagtggtgaagaaaga

SEQ ID NO: 1900 - protein, 101 aa, Homo sapiens
MDSVMPSQEPPVDDKNEDADLPSEETDGIAYISSSRKHDSIKDDSEDLKPVIDGMDGIKISQGLGLQDFDLIRVIGRGSYAKVLLVRLKKNDQIYAMKVVK

SEQ ID NO: 1901 - DNA, 540 bp, Homo sapiens
gggtctgagtcccggcgttgccgctgcctgtgcgctgcacagatgctccgggcagcaacacggctggtgccacggcccggggaaggcgtgcggctgcagcagctcccagcaatgtcaggggaaacgcagtgagaggctgttgttttgcgggtgacagatttttagaaaaataaggctgtggagggaccttctgagcgaggcaggggctgctggagggacatgctcaccccgaggacggatgaatctatctaccgccggggagccagaagatggaggaagctgtaccgtgccaacggccacctcttccaagccaagcgctttaacaggagagcgtactgcggtcagtgcagcgagaggatatggggcctcgcgaggcaaggctacaggtgcatcaactgcaaactgctggtccataagcgctgccacggcctcgtcccgctgacctgcaggaagcatatgttgcttacatttcctcatcccggaagcatgacagcattaaagacgactcggaggaccttaagccagttatcgatgggatgg

SEQ ID NO: 1902 - protein, 106 aa, Homo sapiens
MLTPRTDESIYRRGARRWRKLYRANGHLFQAKRFNRRAYCGQCSERIWGLARQGYRCINCKLLVHKRCHGLVPLTCRKHMLLTFPHPGSMTALKTTRRTLSQLSMG

SEQ ID NO: 1903 - DNA, 581 bp, Homo sapiens
gcacagatgctccgggcagcaacacggctggtgccacggcccggggaaggcgtgcggctgcagcagctcccagcaatgtcaggggaaacgcagtgagaggctgttgttttgcgggtgacagatttttagaaaaataaggctgtggagggaccttctgagcgaggcaggggctgctggagggacatgctcaccccgaggacggatgaatctatctaccgccggggagccagaagatggaggaagctgtaccgtgccaacggccacctcttccaagccaagcgctttaacaggagagcgtactgcggtcagtgcagcgagaggatatggggcctcgcgaggcaaggctacaggtgcatcaactgcaaactgctggtccataagcgctgccacggcctcgtcccgctgacctgcaggaagcatatggattctgtcatgccttcccaagagcctccagtagacgacaagaacgaggacgccgaccttccttccgaggagacagatggaatcaaaatctctcaggggcttgggctgcaggactttgacctaatcagagtcatcgggcgcgggagctacgccaaggt

SEQ ID NO: 1904 - protein, 131 aa, Homo sapiens
MLTPRTDESIYRRGARRWRKLYRANGHLFQAKRFNRRAYCGQCSERIWGLARQGYRCINCKLLVHKRCHGLVPLTCRKHMDSVMPSQEPPVDDKNEDADLPSEETDGIKISQGLGLQDFDLIRVIGRGSYA

SEQ ID NO: 1905 - DNA, 618 bp, Homo sapiens
acagatgctccgggcagcaacacggctggtgccacggcccggggaaggcgtgcggctgcagcagctcccagcaatgtcaggggaaacgcagtgagaggctgttgttttgcgggtgacagatttttagaaaaataaggctgtggagggaccttctgagcgaggcaggggctgctggagggacatgctcaccccgaggacggatgaatctatctaccgccggggagccagaagatggaggaagctgtaccgtgccaacggccacctcttccaagccaagcgctttaacaggagagcgtactgcggtcagtgcagcgagaggatatggggcctcgcgaggcaaggctacaggtgcatcaactgcaaactgctggtccataagcgctgccacggcctcgtcccgctgacctgcaggaagcatatggattctgtcatgccttcccaagagcctccagtagacgacaagaacgaggacgccgaccttccttccgaggagacagatggaattgcttacatttcctcatcccggaagcatgacagcattaaagacgactcggaggaccttaagccagttatcgatgggatggatggaatcaaaatctctcaggggcttgggctgca

SEQ ID NO: 1906 - protein, 144 aa, Homo sapiens
MLTPRTDESIYRRGARRWRKLYRANGHLFQAKRFNRRAYCGQCSERIWGLARQGYRCINCKLLVHKRCHGLVPLTCRKHMDSVMPSQEPPVDDKNEDADLPSEETDGIAYISSSRKHDSIKDDSEDLKPVIDGMDGIKISQGLG

SEQ ID NO: 1907 - DNA, 592 bp, Homo sapiens
gacctcagcagacgcagggctgctccgcacagccagcttgggccgcaggggtccttgagtgatgaagattctgtgttgatgggaatctatctaccgccggggagccagaagatggaggaagctgtaccgtgccaacggccacctcttccaagccaagcgctttaacaggagagcgtactgcggtcagtgcagcgagaggatatggggcctcgcgaggcaaggctacaggtgcatcaactgcaaactgctggtccataagcgctgccacggcctcgtcccgctgacctgcaggaagcatatggattctgtcatgccttcccaagagcctccagtagacgacaagaacgaggacgccgaccttccttccgaggagacagatggaattgcttacatttcctcatcccggaagcatgacagcattaaagacgactcggaggaccttaagccagttatcgatgggatggatggaatcaaaatctctcaggggcttgggctgcaggactttgacctaatcagagtcatcgggcgcgggagctacgccaaggttctcctggtgcggttgaagaagaatgaccaaatttacgccatgaaa

SEQ ID NO: 1908 - protein, 97 aa, Homo sapiens
MDSVMPSQEPPVDDKNEDADLPSEETDGIAYISSSRKHDSIKDDSEDLKPVIDGMDGIKISQGLGLQDFDLIRVIGRGSYAKVLLVRLKKNDQIYAM

SEQ ID NO: 1909 - DNA, 531 bp, Homo sapiens
atttggcaagagggaggctccgtggcacgatcacacgtgcaggagctgggggctgccagagcggctgttcaagatggacttggcaaatcacctctttcaagttgccggctacccggctgccgtagacagagtgaagtctggtagtttgtgtttatttatttatcttggccagcagagagaattgagtttgcatggagactgtaatttcattctaatctatctaccgccggggagccagaagatggaggaagctgtaccgtgccaacggccacctcttccaagccaagcgctttaacaggagagcgtactgcggtcagtgcagcgagaggatatggggcctcgcgaggcaaggctacaggtgcatcaactgcaaactgctggtccataagcgctgccacggcctcgtcccgctgacctgcaggaagcatatgttgcttacatttcctcatcccggaagcatgacagcattaaagacgactcggaggaccttaagccagttatcgatgggatggatggaatcaaaatctctca

SEQ ID NO: 1910 - protein, 73 aa, Homo sapiens
MDLANHLFQVAGYPAAVDRVKSGSLCLFIYLGQQRELSLHGDCNFILIYLPPGSQKMEEAVPCQRPPLPSQAL

SEQ ID NO: 1911 - DNA, 546 bp, Homo sapiens
agaacatcgctcggtgccagacaggcaggacgcagcgggctggcctgcggggctcactgctgccccccggggccgagcacgaaagggagagttggagggcgcttcctcgccgggtgttgcggtgtgagcggggactggtgagtgtgtgctgtcttcagagagagaagagcagttttcaggaatctatctaccgccggggagccagaagatggaggaagctgtaccgtgccaacggccacctcttccaagccaagcgctttaacaggagagcgtactgcggtcagtgcagcgagaggatatggggcctcgcgaggcaaggctacaggtgcatcaactgcaaactgctggtccataagcgctgccacggcctcgtcccgctgacctgcaggaagcatatggtgagtggcagggctggggaggcccggggggcacgggcggggtcggggcgtggcagccagcccattgtccaagcagaccttggtgaccctgggttcttcaagaggggccgtggtgccgtcctagctctgggctgcagcgtgagactca

SEQ ID NO: 1912 - protein, 49 aa, Homo sapiens
MVSGRAGEARGARAGSGRGSQPIVQADLGDPGFFKRGRGAVLALGCSVR

SEQ ID NO: 1913 - DNA, 527 bp, Homo sapiens
agaacatcgctcggtgccagacaggcaggacgcagcgggctggcctgcggggctcactgctgccccccggggccgagcacgaaagggagagttggagggcgcttcctcgccgggtgttgcggtgtgagcggggactggtgagtgtgtgctgtcttcagagagagaagagcagttttcaggaatctatctaccgccggggagccagaagatggaggaagctgtaccgtgccaacggccacctcttccaagccaagcgctttaacaggagagcgtactgcggtcagtgcagcgagaggatatggggcctcgcgaggcaaggctacaggtgcatcaactgcaaactgctggtccataagcgctgccacggcctcgtcccgctgacctgcaggaagcatatgttgcttacatttcctcatcccggaagcatgacagcattaaagacgactcggaggaccttaagccagttatcgatgggatggatggaatcaaaatctctcaggggcttgggctgcaggactttgacctaa

SEQ ID NO: 1914 - protein, 43 aa, Homo sapiens
MLLTFPHPGSMTALKTTRRTLSQLSMGWMESKSLRGLGCRTLT

SEQ ID NO: 1915 - DNA, 706 bp, Homo sapiens
agaacatcgctcggtgccagacaggcaggacgcagcgggctggcctgcggggctcactgctgccccccggggccgagcacgaaagggagagttggagggcgcttcctcgccgggtgttgcggtgtgagcggggactggtgagtgtgtgctgtcttcagagagagaagagcagttttcaggaatctatctaccgccggggagccagaagatggaggaagctgtaccgtgccaacggccacctcttccaagccaagcgctttaacaggagagcgtactgcggtcagtgcagcgagaggatatggggcctcgcgaggcaaggctacaggtgcatcaactgcaaactgctggtccataagcgctgccacggcctcgtcccgctgacctgcaggaagcatatggattctgtcatgccttcccaagagcctccagtagacgacaagaacgaggacgccgaccttccttccgaggagacagatggaattgcttacatttcctcatcccggaagcatgacagcattaaagacgactcggaggaccttaagccagttatcgatgggatggatggaatcaaaatctctcaggggcttgggctgcaggactttgacctaatcagagtcatcgggcgcgggagctacgccaaggttctcctggtgcggttgaagaagaatgaccaaatttacgccatgaaagtggtgaagaaagagct

SEQ ID NO: 1916 - protein, 102 aa, Homo sapiens
MDSVMPSQEPPVDDKNEDADLPSEETDGIAYISSSRKHDSIKDDSEDLKPVIDGMDGIKISQGLGLQDFDLIRVIGRGSYAKVLLVRLKKNDQIYAMKVVKK

SEQ ID NO: 1917 - DNA, 2015 bp, Homo sapiens
agaacatcgctcggtgccagacaggcaggacgcagcgggctggcctgcggggctcactgctgccccccggggccgagcacgaaagggagagttggagggcgcttcctcgccgggtgttgcggtgtgagcggggactggtgagtgtgtgctgtcttcagagagagaagagcagttttcaggaatctatctaccgccggggagccagaagatggaggaagctgtaccgtgccaacggccacctcttccaagccaagcgctttaacaggagagcgtactgcggtcagtgcagcgagaggatatggggcctcgcgaggcaaggctacaggtgcatcaactgcaaactgctggtccataagcgctgccacggcctcgtcccgctgacctgcaggaagcatatggattctgtcatgccttcccaagagcctccagtagacgacaagaacgaggacgccgaccttccttccgaggagacagatggaattgcttacatttcctcatcccggaagcatgacagcattaaagacgactcggaggaccttaagccagttatcgatgggatggatggaatcaaaatctctcaggggcttgggctgcaggactttgacctaatcagagtcatcgggcgcgggagctacgccaaggttctcctggtgcggttgaagaagaatgaccaaatttacgccatgaaagtggtgaagaaagagctggtgcatgatgacgaggatattgactgggtacagacagagaagcacgtgtttgagcaggcatccagcaaccccttcctggtcggattacactcctgcttccagacgacaagtcggttgttcctggtcattgagtacgtcaacggcggggacctgatgttccacatgcagaggcagaggaagctccctgaggagcacgccaggttctacgcggccgagatctgcatcgccctcaacttcctgcacgagagggggatcatctacagggacctgaagctggacaacgtcctcctggatgcggacgggcacatcaagctcacagactacggcatgtgcaaggaaggcctgggccctggtgacacaacgagcactttctgcggaaccccgaattacatcgcccccgaaatcctgcggggagaggagtacgggttcagcgtggactggtgggcgctgggagtcctcatgtttgagatgatggccgggcgctccccgttcgacatcatcaccgacaacccggacatgaacacagaggactaccttttccaagtgatcctggagaagcccatccggatcccccggttcctgtccgtcaaagcctcccatgttttaaaaggatttttaaataaggaccccaaagagaggctcggctgccggccacagactggattttctgacatcaagtcccacgcgttcttccgcagcatagactgggacttgctggagaagaagcaggcgctccctccattccagccacagatcacagacgactacggtctggacaactttgacacacagttcaccagcgagcccgtgcagctgaccccagacgatgaggatgccataaagaggatcgaccagtcagagttcgaaggctttgagtatatcaacccattattgctgtccaccgaggagtcggtgtgaggccgcgtgcgtctctgtcgtggacacgcgtgattgaccctttaactgtatccttaaccaccgcatatgcatgccaggctgggcacggctccgagggcggccagggacagacgcttgcgccgagaccgcagagggaagcgtcagcgggcgctgctgggagcagaacagtccctcacacctgggcccgggcaggccagcttcgtgctggaggaacttgctgctgtgcctgcgtcgcggcggatccgcggggaccctgccgagggggctgtcatgcggtttccaaggtgcacattttccacggaaacagaactcgatgcactgacctgctccgccaggaaagtgagcgtgtagcgtcctgaggaataaaatgttccgatgatgtggaagctc

SEQ ID NO: 1918 - protein, 409 aa, Homo sapiens; identical to SEQ ID NO: 14

SEQ ID NO: 1919 - DNA, 349 bp, Homo sapiens
gcccctctggtgggcgaggacctccacacgtgtcaccaggccaggtaactctcagcaagcccctctggtgggcgaggacctccacacgtgtcaccaggccaggcgactcttcagcaagcccctccacacgtgtcaccaggccaggtgactctcagcaagcccctccggtgggcgaggacctctgcacgtgtctccagaggccaaagcagaagaaaacgttagcacaggagtcacttgacttcaccaaacgcagccaggattgcggtttctccggctcggctgtctcagttgtttaagagagttcatgcttttgagatcaaagttaaaagaaggcctgtgcctcgcaggg

SEQ ID NO: 1920 - protein, 97 aa, Homo sapiens [sequence omitted]

SEQ ID NO: 1921 - DNA, 348 bp, Homo sapiens
gcccctctggtgggcgaggacctccacgtgtgtcaccaggccaggtaactctcagcaagcccctccggtgggcgaggacctccacacgtgtcaccaggccaggcgactcttcagcaagcccctccacacgtgtcaccaggccaggtgactctcagcaagcccctccggtgggcgaggacctctgcacgtgtctccagaggccaaagcagaagaaaacgttagcacaggagtcacttgacttcaccaaacgcagccaggattgcggtttctccggctcggctgtctcagttgtttaagagagttcatgcttttgagatcaaagttaaaagaaggcctgtgcctcgcagg

SEQ ID NO: 1922 - protein, 97 aa, Homo sapiens
PSGGRGPPRVSPGQVTLSKPLRWARTSTRVTRPGDSSASPSTRVTRPGDSQQAPPVGEDLCTCLQRPKQKKTLAQESLDFTKRSQDCGFSGSAVSVV

SEQ ID NO: 1923 - DNA, 581 bp, Homo sapiens
ggactcaggaccctcaccctccagcccgcaccctcgactccccaccagccagaccctctgtcctggtgtggacagcacccacatcctggctccacccttgtttcttgccctttgacctacagcctcaggacgtgcaggagggagaatctatctaccgccggggagccagaagatggaggaagctgtaccgtgccaacggccacctcttccaagccaagcgctttaacaggagagcgtactgcggtcagtgcagcgagaggatatggggcctcgcgaggcaaggctacaggtgcatcaactgcaaactgctggtccataagcgctgccacggcctcgtcccgctgacctgcaggaagcatatggattctgtcatgccttcccaagagcctccagtagacgacaagaacgaggacgccgaccttccttccgaggagacagatggaattgcttacatttcctcatcccggaagcatgacagcattaaagacgactcggaggaccttaagccagttatcgatgggatggatggaatcaaaatctctcaggggcttgggctgcaggactttgacctaatcagagtc

SEQ ID NO: 1924 - protein, 73 aa, Homo sapiens
MDSVMPSQEPPVDDKNEDADLPSEETDGIAYISSSRKHDSIKDDSEDLKPVIDGMDGIKISQGLGLQDFDLIR

SEQ ID NO: 1925 - DNA, 8664 bp, Homo sapiens
aaactgacaatgctggggagatgaagatagtgtgtggctgcttctggactcaaggaggaggagagagattccgcgagccgacaccatgcgatccaaggcgagggcgaggaagctagccaaaagtgacggtgacgttgtaaataatatgtatgagcccaaccgggacctgctggccagccacagcgcggaggacgaggccgaggacagtgccatgtcgcccatccccgtggggccaccgtcccccttccccaccagcgaggacttcacccccaaggagggctcgccgtacgaggcccctgtctacattcctgaagacattccgatcccagcagacttcgagctccgagagtcctccatcccaggggctggcctgggggtctgggccaagaggaagatggaagccggggagaggctgggcccctgcgtggtggtgccccgggcggcggcaaaggagacagacttcggatgggagcaaatactgacggacgtggaagtgtcgccccaggaaggctgcatcacaaagatctccgaagacctgggcagtgagaagttctgcgtggatgcaaatcaggcgggggctggcagctggctcaagtacatccgtgtggcgtgctcctgcgatgaccagaacctcaccatgtgtcagatcagtgagcagatttactataaagtcattaaggacattgagccaggtgaggagctgctggtgcacgtgaaggaaggcgtctaccccctgggcacagtgccgcccggcctggacgaggagcccacgttccgctgtgacgagtgtgacgaactcttccagtccaagctggacctgcggcgccataagaagtacacgtgtggctcagtgggggctgcgctctacgagggcctggctgaggagctcaagcccgagggccttggcggtggcagcggccaagcccacgagtgcaaggactgcgagcggatgttccccaacaagtacagcctggagcagcacatggtcatccacacggaggagcgcgagtacaaatgcgaccagtgtcccaaggccttcaactggaagtccaacctcatccgccaccagatgtcccacgacagcggcaaacgcttcgaatgtgaaaactgcgtgaaggtgttcacggaccccagcaaccttcagcggcacatccgctcgcagcacgtgggcgctcgggcccacgcctgccccgactgcgggaagaccttcgccacgtcctccggcctcaagcagcacaagcatatccacagcacggtgaagcctttcatatgtgaggtctgccacaagtcctacacgcagttctccaacctgtgccggcacaagcggatgcacgccgactgccgcacgcagatcaagtgcaaggactgtggccagatgttcagcactacctcctccctcaacaagcaccggcgcttctgcgagggcaagaaccattacacgccgggcggcatctttgccccgggcctgcccttgacccccagccccatgatggacaaggcaaaaccctcccccagcctcaatcacgccagcctgggcttcaacgagtactttccctccaggccgcacccggggagcctgcccttctccacggcgcctcccacgttccccgcactcacccccggcttcccgggcatcttccctccatccttgtacccccggccgcctctgctacctcccacatcgctgctcaagagccccctgaaccacacccaggacgccaagctccccagtcccctggggaacccagccctgcccctggtctccgccgtcagcaacagcagccagggcacgacggcagctgcggggcccgaggagaagttcgagagccgcctggaggactcctgtgtggagaagctgaagaccaggagcagcgacatgtcggacggcagtgactttgaggacgtcaacaccaccacggggaccgacctggacacgaccacggggacgggctcggacctggacagcgacgtggacagcgaccctgacaaggacaagggcaagggcaagtccgccgagggccagcccaagtttgggggcggcttggcgcccccgggggccccgaacagcgtggccgaggtgcctgtcttctattcccagcactcattcttcccgccacccgacgagcagctgctgactgcaacgggcgccgccggggactccatcaaggccatcgcatccattgccgagaagtactttggccccggcttcatggggatgcaggagaagaagctgggctcgctcccctaccactcggcgttccccttccagttcctgcccaacttcccccactccctttaccccttcacggaccgagccctcgcccacaacttgctggtcaaggccgagccaaagtcaccccgggacgccctcaaggtgggcggccccagtgccgagtgcccctttgatctcaccaccaagcccaaagacgtgaagcccatcctgcccatgcccaagggcccctcggcccccgcatccggcgaggagcagccgctggacctgagcatcggcagccgggcccgtgccagccaaaacggcggcgggcgggagccccgcaagaaccacgtctatggggaacgcaagctgggcgccggcgaggggctgccccaggtgtgcccggcgcggatgccccagcagcccccgctccactacgccaagccctcgcccttcttcatggaccccatctacagggtagaaaagcggaaggtcacagaccccgtgggagccctgaaggagaagtacctgcggccgtccccgctgctcttccacccccagatgtcagccatagagaccatgacagagaagctggagagctttgcagccatgaaggcggactcgggcagctccctgcagcccctcccccaccaccccttcaacttccggtccccacccccaacgctctccgaccccatcctcaggaagggcaaggagcgatacacgtgcaggtactgtgggaagatcttccccagatcagccaatctcaccagacacctgaggacgcacactggggagcagccgtacaggtgtaagtactgcgaccgctccttcagcatctcttcgaacctccagcggcacgtccggaacatccacaacaaggagaagcctttcaagtgccacctgtgcaaccgctgcttcgggcagcagaccaacctggaccggcacctcaagaagcacgagcacgagaacgcaccagtgagccagcaccccggggtcctcacgaaccacctggggaccagcgcgtcctctcccacctcagagtcggacaaccacgcacttttagacgagaaagaagactcttatttctcggaaatcagaaactttattgccaatagtgagatgaaccaagcatcaacgcgaacagagaaacgggcggacatgcagatcgtggacggcagtgcccagtgtccaggcctagccagtgagaagcaggaggacgtggaggaggaggacgacgatgacctggaggaggacgatgaggacagcctggccgggaagtcgcaggatgacaccgtgtcccccgcacccgagccccaggccgcctacgaggatgaggaggatgaggagccagccgcctccctggccgtgggctttgaccacacccgaaggtgtgctgaggaccacgaaggcggtctgttagctttggagccgatgccgacttttgggaaggggctggacctccgcagagcagctgaggaagcatttgaagttaaagatgtgcttaattccaccttagattctgaggctttaaaacatacactgtgcaggcaggctaagaaccagggttctctggacgcttggttgaaggtcactggagccacgtcggagtctggagcatttcaccccatcaaccacctctgacgggctgggcagccgggggccggtggccagagcgagggcaccagccacgaaggacggaggcgggcggggccccggagaaccctgtccctgcgtgtggccactcctcagcatcctccccacccaccatggttcattccgacttttccaatggaaactcagatcccaaaagtccctaaagcagtcgtagagtctcaccatctccaaggattggtcttgagaacactgttcagtgacggccatgcaggtggccgtccaaagacagccaacggagctgcctcgcagaatcagccagtgggcaggtggacgctctgctgagacagaagctggtggccactgccgggtgcccgcgtggggtcgcggaagggaatggatagactggtgtgctcaaaagagagagatcactcaaatgatttttataatgaaatgacaagaataacccttttggtaaccgtattgactgcagagtctatttaagcatgtggttttaaaaatagacagtattttttaaaaatcaaaaaatgacttgcaaattgttttttaaaagtaattttgcattgctttgaaatttgagctcatttgcaaacccgagtctgcctgggaacccgcactgtgcctgggtgtattctttatactgtagataatggagaaattttctatctctgtccctatttgtataagccaaggtgatgctgggtgccccgaggcagaacaagaggcgcggggccacacccgtgaaccatgcagacggccgaagaagtcttaggcagggcgccctgggctgcaggcctgcccgaggctgggatgggaagtgtgcctgccctcgtgtgacatggaattggtgtcaggaccgccacgtggccttcagaggaatccacaggtccccacccaagatccctcaattatatggggaagtcgagggcctgtggcttggatccgccatgcagagatgtggccgggcacccatcttccttccctcctctgtccctgcctcggccaccccacgcgggaacccagcgccgtcctctgaaggcagggccttggccacgtcctgggtctcccacctcccacctgaccccagcggctccggtgtcctccacgtggctgccctggggagcaatcccagcggatcgctccgggccaccaagccgcacctgtgcctgagactccggatggacgacacagtcgtcacgtcgctcttcctgcgggttcttggcgagacacagcttgagaacagaagggcgtcgggggaacctgccgcaaggagcagagacagcacagccccccgggcccagccgcctccctctcttgggacgcaacttcttccccactcggatgggctttaaattattcccataggggccaatttcaaataataatttttttccctgatggaatttaccttaatctgtatataacttgtaattttttctaattcatttcttttcttattttatttcctccttaacagtatttttggcattagacattcttattgtgaagaaataatgttaatataagtatctggtgaaggaccaaaaccgtgtgataaggttgtgtgtcgtgtgggagtggggcgattttttatgtgccaaatacccccgtcccccccatgaatcctgctgtccctgctgccgtttaccagacaatcatatgtttttgttaaatttgcgtttcagttacatttgcatttaagacaagtgttctatttatttcttgtattgtttggaagaaaaaatgatgatagagtcccaaaaagaagagaaaaaaaatgcccaagttgccctttaaaaaaaaagagcgtaaatacaaacaggagtggtgcaagccgccttggtgtgggtttgtgtcacgtgtggacatctcctcaggctttgtgtcacgcgtggacatctcctcaggctgtccccagcggtgacgggaggtgtcctggctgctccaggacaaaagacaatcgtctctgtgggtgccgggtggtccaggcttgcactgaagacgtgccacggggaggctcctgcaggaggctcaacccgacggatcacagtgaaagggattcctcccacgccagatctgcacaacgaggcaagacaggacccacctgtgcgtgcgctggggccatggggtggccccgccggggcagcgggggagctgcctgcagaagagccagctggcgtgtcgggaaggatccaggatctgcaaacacaactgctcaggccttctcacgcgtttccacaacatcccctgggtcagacccaccaggtaccccgtaggaatttccagtttcccttgatctagatgggattcttataaaaattcaacctcagacataaacaccccatttctgtaaacccaaattatatggtttcttctgcgaaagagtaaggtgtgtgcttttttttttttgcaatatgaccccgtctctctgaagtgggacattcggacggatggagccctcagcgtgtcttttcagcaggagcagaaccgatgagagccgcccttaccgttggtctccggatcccccagtcccatcccgccgttttcggctgtcttcctaaccgtcctgtcttctcttggcgctctttccttccacctttcccaagagtcctggttgcacgttttaagtcatatattttcgtccccctgaaaatgatggcaagcccagtttctcctgagcattcagacccccaggccccagcacttggcgttttcaggaggccctgttcttagagcccctgacaaaggcagcacttatttcctgggctggtgcgccccaaaacacggccccgacacttagtgtggccccaggccccagcgagcctcgccctcccagttttgctctgcccagcagtgttggtgcccagagatgacaagggccagggagcctggcccgggtgtgagaattcagagattctggcctccagctgtcaccacaccgtaacggggccatgtaactgtgcagcatggacagggatgcgacggggcagctggctgtgtccatggccaggtggccagggtcagggctgcaagccaggggtccagggcccttccgttcagcccaaatgctgccccaatgctaactccttggattgtcaacccccatcccccaaatggaaattccgaaggaggcctcctcgcacctgccctccgctgctcctcagaccccagcccccagcgagccgacgtccccacccgttcctgctctcatccccaggttgggcacgtggggttcctcctctgtgggcctggcagacccttcatgagtgggacccaagatatcactgacttcaacccagaggatcgagcccctgcaccctgcctggggccctggggtgtggagcagtggctggggtgggcgtggtgtggcctgagagactgcccagctggagaggccttcctttacaaggccacgcgtgcagctgtcccatccagaccccgactggccaagacctccacgtccccagagtccagccctggaaattccaagggccctggcgtcctctgccttccccgcttccccatgagcgtctgcaaaacacttgcctgaatacatatcacgtattttagactcgaagcctcaaagcactggattgtggtcccctgccccctctgtcccgtccccctgcccaagtgactgaaacctactgagctatattcactgtgctgtcctagggggagggagagcagagctcgcccctgcactgcagccttgtgggggagggcaaggctctcctcccagccagggacgccaggacatagctgctcctggtcagtggaggtcagccgggtatcaaaagccatgaaactgtgtctctgtagcaatgagtgatactgtgacaaaaccatccttgcattcttcctagaagagttcctctgctccttccattccatttttgtgtttgttttgttcttttctgtcactgatccgtattaccacttttggaaaaaaataaataaataaataaataaaaggcagcttgagtttccaaacgtgtgattcacttgtgaacaaaagtcattctaacaattgccttcagcgtcacgtgcattgccactgcgctttcggcacgagggatgctgagccctggtgtcagagtcgtaatttaaagcgtgtgtgtatatggactttgtcccttaaggtcgatataaagaatcctcgcagaatcacagacctgtgccgcccgccaccttctgccattgttacattacagatttggtttagttttgttttgttttgttttttcttttagaactgtatagtattgaaaaagaaatcaaatgtaaatgtctggttttcatataatgtttaaaaagaccattgagaaggaggctggcgctcgccccatgtcccccttgattgtaaattgcttctgttctgtttataagtaaactgtgcatgactcctgcttagcggtcattatcgtgtctgttggtgaaatttttattaaaaggaaaattctgtagatgcacttattgaatatgtgattaggatctacgtctgagactaggagtcctgaactgctgacgcgaaagaggcgcagttcccaattaatacggaaatcgctgtgggagaagaatgaaataagacgtgaagtgtaggaaatcatgaaaagaacaattttgcaaattgcattctgatgcttgtgatgaacacaaatgtacttgtgtagagacatttccttaagagaaagcctaggagaagccgatttggaggttaatgctgtagaataggactgtataccaaatgtaatctttccaatgctccaatgaatttatacatgagattgatatgcaataaatctgtgtgcttttct

SEQ ID NO: 1926 - protein, 1256 aa, Homo sapiens; identical to SEQ ID NO: 22

SEQ ID NO: 1927 - DNA, 8721 bp, Homo sapiens
aaactgacaatgctggggagatgaagatagtgtgtggctgcttctggactcaaggaggaggagagagattccgcgagccgacaccatgcgatccaaggcgagggcgaggaagctagccaaaagtgacggtgacgttgtaaataatatgtatgagcccaaccgggacctgctggccagccacagcgcggaggacgaggccgaggacagtgccatgtcgcccatccccgtggggccaccgtcccccttccccaccagcgaggacttcacccccaaggagggctcgccgtacgaggcccctgtctacattcctgaagacattccgatcccagcagacttcgagctccgagagtcctccatcccaggggctggcctgggggtctgggccaagaggaagatggaagccggggagaggctgggcccctgcgtggtggtgccccgggcggcggcaaaggagacagacttcggatgggagcaaatactgacggacgtggaagtgtcgccccaggaaggctgcatcacaaagatctccgaagacctgggcagtgagaagttctgcgtggatgcaaatcaggcgggggctggcagctggctcaagtacatccgtgtggcgtgctcctgcgatgaccagaacctcaccatgtgtcagatcagtgagcagatttactataaagtcattaaggacattgagccaggtgaggagctgctggtgcacgtgaaggaaggcgtctaccccctgggcacagtgccgcccggcctggacgaggagcccacgttccgctgtgacgagtgtgacgaactcttccagtccaagctggacctgcggcgccataagaagtacacgtgtggctcagtgggggctgcgctctacgagggcctggctgaggagctcaagcccgagggccttggcggtggcagcggccaagcccacgagtgcaaggactgcgagcggatgttccccaacaagtacagcctggagcagcacatggtcatccacacggaggagcgcgagtacaaatgcgaccagtgtcccaaggccttcaactggaagtccaacctcatccgccaccagatgtcccacgacagcggcaaacgcttcgaatgtgaaaactgcgtgaaggtgttcacggaccccagcaaccttcagcggcacatccgctcgcagcacgtgggcgctcgggcccacgcctgccccgactgcgggaagaccttcgccacgtcctccggcctcaagcagcacaagcatatccacagcacggtgaagcctttcatatgtgaggtctgccacaagtcctacacgcagttctccaacctgtgccggcacaagcggatgcacgccgactgccgcacgcagatcaagtgcaaggactgtggccagatgttcagcactacctcctccctcaacaagcaccggcgcttctgcgagggcaagaaccattacacgccgggcggcatctttgccccgggcctgcccttgacccccagccccatgatggacaaggcaaaaccctcccccagcctcaatcacgccagcctgggcttcaacgagtactttccctccaggccgcacccggggagcctgcccttctccacggcgcctcccacgttccccgcactcacccccggcttcccgggcatcttccctccatccttgtacccccggccgcctctgctacctcccacatcgctgctcaagagccccctgaaccacacccaggacgccaagctccccagtcccctggggaacccagccctgcccctggtctccgccgtcagcaacagcagccagggcacgacggcagctgcggggcccgaggagaagttcgagagccgcctggaggactcctgtgtggagaagctgaagaccaggagcagcgacatgtcggacggcagtgactttgaggacgtcaacaccaccacggggaccgacctggacacgaccacggggacgggctcggacctggacagcgacgtggacagcgaccctgacaaggacaagggcaagggcaagtccgccgagggccagcccaagtttgggggcggcttggcgcccccgggggccccgaacagcgtggccgaggtgcctgtcttctattcccagcactcattcttcccgccacccgacgagcagctgctgactgcaacgggcgccgccggggactccatcaaggccatcgcatccattgccgagaagtactttggccccggcttcatggggatgcaggagaagaagctgggctcgctcccctaccactcggcgttccccttccagttcctgcccaacttcccccactccctttaccccttcacggaccgagccctcgcccacaacttgctggtcaaggccgagccaaagtcaccccgggacgccctcaaggtgggcggccccagtgccgagtgcccctttgatctcaccaccaagcccaaagacgtgaagcccatcctgcccatgcccaagggcccctcggcccccgcatccggcgaggagcagccgctggacctgagcatcggcagccgggcccgtgccagccaaaacggcggcgggcgggagccccgcaagaaccacgtctatggggaacgcaagctgggcgccggcgaggggctgccccaggtgtgcccggcgcggatgccccagcagcccccgctccactacgccaagccctcgcccttcttcatggaccccatctacagggtagaaaagcggaaggtcacagaccccgtgggagccctgaaggagaagtacctgcggccgtccccgctgctcttccacccccagatgtcagccatagagaccatgacagagaagctggagagctttgcagccatgaaggcggactcgggcagctccctgcagcccctcccccaccaccccttcaacttccggtccccacccccaacgctctccgaccccatcctcaggaagggcaaggagcgatacacgtgcaggtactgtgggaagatcttccccagatcagccaatctcaccagacacctgaggacgcacactggggagcagccgtacaggtgtaagtactgcgaccgctccttcagcatctcttcgaacctccagcggcacgtccggaacatccacaacaaggagaagcctttcaagtgccacctgtgcaaccgctgcttcgggcagcagaccaacctggaccggcacctcaagaagcacgagcacgagaacgcaccagtgagccagcaccccggggtcctcacgaaccacctggggaccagcgcgtcctctcccacctcagagtcggacaaccacgcacttttagacgagaaagaagactcttatttctcggaaatcagaaactttattgccaatagtgagatgaaccaagcatcaacgcgaacagagaaacgggcggacatgcagatcgtggacggcagtgcccagtgtccaggcctagccagtgagaagcaggaggacgtggaggaggaggacgacgatgacctggaggaggacgatgaggacagcctggccgggaagtcgcaggatgacaccgtgtcccccgcacccgagccccaggccgcctacgaggatgaggaggatgaggagccagccgcctccctggccgtgggctttgaccacacccgaaggtgtgctgaggaccacgaaggcggtctgttagctttggagccgatgccgacttttgggaaggggctggacctccgcagagcagctgaggaagcatttgaagttaaagatgtgcttaattccaccttagattctgaggctttaaaacatacactgtgcaggcaggctaagaaccaggcatatgcaatgatgctgtccctttccgaagacactcctctccacaccccctcccagggttctctggacgcttggttgaaggtcactggagccacgtcggagtctggagcatttcaccccatcaaccacctctgacgggctgggcagccgggggccggtggccagagcgagggcaccagccacgaaggacggaggcgggcggggccccggagaaccctgtccctgcgtgtggccactcctcagcatcctccccacccaccatggttcattccgacttttccaatggaaactcagatcccaaaagtccctaaagcagtcgtagagtctcaccatctccaaggattggtcttgagaacactgttcagtgacggccatgcaggtggccgtccaaagacagccaacggagctgcctcgcagaatcagccagtgggcaggtggacgctctgctgagacagaagctggtggccactgccgggtgcccgcgtggggtcgcggaagggaatggatagactggtgtgctcaaaagagagagatcactcaaatgatttttataatgaaatgacaagaataacccttttggtaaccgtattgactgcagagtctatttaagcatgtggttttaaaaatagacagtattttttaaaaatcaaaaaatgacttgcaaattgttttttaaaagtaattttgcattgctttgaaatttgagctcatttgcaaacccgagtctgcctgggaacccgcactgtgcctgggtgtattctttatactgtagataatggagaaattttctatctctgtccctatttgtataagccaaggtgatgctgggtgccccgaggcagaacaagaggcgcggggccacacccgtgaaccatgcagacggccgaagaagtcttaggcagggcgccctgggctgcaggcctgcccgaggctgggatgggaagtgtgcctgccctcgtgtgacatggaattggtgtcaggaccgccacgtggccttcagaggaatccacaggtccccacccaagatccctcaattatatggggaagtcgagggcctgtggcttggatccgccatgcagagatgtggccgggcacccatcttccttccctcctctgtccctgcctcggccaccccacgcgggaacccagcgccgtcctctgaaggcagggccttggccacgtcctgggtctcccacctcccacctgaccccagcggctccggtgtcctccacgtggctgccctggggagcaatcccagcggatcgctccgggccaccaagccgcacctgtgcctgagactccggatggacgacacagtcgtcacgtcgctcttcctgcgggttcttggcgagacacagcttgagaacagaagggcgtcgggggaacctgccgcaaggagcagagacagcacagccccccgggcccagccgcctccctctcttgggacgcaacttcttccccactcggatgggctttaaattattcccataggggccaatttcaaataataatttttttccctgatggaatttaccttaatctgtatataacttgtaattttttctaattcatttcttttcttattttatttcctccttaacagtatttttggcattagacattcttattgtgaagaaataatgttaatataagtatctggtgaaggaccaaaaccgtgtgataaggttgtgtgtcgtgtgggagtggggcgattttttatgtgccaaatacccccgtcccccccatgaatcctgctgtccctgctgccgtttaccagacaatcatatgtttttgttaaatttgcgtttcagttacatttgcatttaagacaagtgttctatttatttcttgtattgtttggaagaaaaaatgatgatagagtcccaaaaagaagagaaaaaaaatgcccaagttgccctttaaaaaaaaagagcgtaaatacaaacaggagtggtgcaagccgccttggtgtgggtttgtgtcacgtgtggacatctcctcaggctttgtgtcacgcgtggacatctcctcaggctgtccccagcggtgacgggaggtgtcctggctgctccaggacaaaagacaatcgtctctgtgggtgccgggtggtccaggcttgcactgaagacgtgccacggggaggctcctgcaggaggctcaacccgacggatcacagtgaaagggattcctcccacgccagatctgcacaacgaggcaagacaggacccacctgtgcgtgcgctggggccatggggtggccccgccggggcagcgggggagctgcctgcagaagagccagctggcgtgtcgggaaggatccaggatctgcaaacacaactgctcaggccttctcacgcgtttccacaacatcccctgggtcagacccaccaggtaccccgtaggaatttccagtttcccttgatctagatgggattcttataaaaattcaacctcagacataaacaccccatttctgtaaacccaaattatatggtttcttctgcgaaagagtaaggtgtgtgcttttttttttttgcaatatgaccccgtctctctgaagtgggacattcggacggatggagccctcagcgtgtcttttcagcaggagcagaaccgatgagagccgcccttaccgttggtctccggatcccccagtcccatcccgccgttttcggctgtcttcctaaccgtcctgtcttctcttggcgctctttccttccacctttcccaagagtcctggttgcacgttttaagtcatatattttcgtccccctgaaaatgatggcaagcccagtttctcctgagcattcagacccccaggccccagcacttggcgttttcaggaggccctgttcttagagcccctgacaaaggcagcacttatttcctgggctggtgcgccccaaaacacggccccgacacttagtgtggccccaggccccagcgagcctcgccctcccagttttgctctgcccagcagtgttggtgcccagagatgacaagggccagggagcctggcccgggtgtgagaattcagagattctggcctccagctgtcaccacaccgtaacggggccatgtaactgtgcagcatggacagggatgcgacggggcagctggctgtgtccatggccaggtggccagggtcagggctgcaagccaggggtccagggcccttccgttcagcccaaatgctgccccaatgctaactccttggattgtcaacccccatcccccaaatggaaattccgaaggaggcctcctcgcacctgccctccgctgctcctcagaccccagcccccagcgagccgacgtccccacccgttcctgctctcatccccaggttgggcacgtggggttcctcctctgtgggcctggcagacccttcatgagtgggacccaagatatcactgacttcaacccagaggatcgagcccctgcaccctgcctggggccctggggtgtggagcagtggctggggtgggcgtggtgtggcctgagagactgcccagctggagaggccttcctttacaaggccacgcgtgcagctgtcccatccagaccccgactggccaagacctccacgtccccagagtccagccctggaaattccaagggccctggcgtcctctgccttccccgcttccccatgagcgtctgcaaaacacttgcctgaatacatatcacgtattttagactcgaagcctcaaagcactggattgtggtcccctgccccctctgtcccgtccccctgcccaagtgactgaaacctactgagctatattcactgtgctgtcctagggggagggagagcagagctcgcccctgcactgcagccttgtgggggagggcaaggctctcctcccagccagggacgccaggacatagctgctcctggtcagtggaggtcagccgggtatcaaaagccatgaaactgtgtctctgtagcaatgagtgatactgtgacaaaaccatccttgcattcttcctagaagagttcctctgctccttccattccatttttgtgtttgttttgttcttttctgtcactgatccgtattaccacttttggaaaaaaataaataaataaataaataaaaggcagcttgagtttccaaacgtgtgattcacttgtgaacaaaagtcattctaacaattgccttcagcgtcacgtgcattgccactgcgctttcggcacgagggatgctgagccctggtgtcagagtcgtaatttaaagcgtgtgtgtatatggactttgtcccttaaggtcgatataaagaatcctcgcagaatcacagacctgtgccgcccgccaccttctgccattgttacattacagatttggtttagttttgttttgttttgttttttcttttagaactgtatagtattgaaaaagaaatcaaatgtaaatgtctggttttcatataatgtttaaaaagaccattgagaaggaggctggcgctcgccccatgtcccccttgattgtaaattgcttctgttctgtttataagtaaactgtgcatgactcctgcttagcggtcattatcgtgtctgttggtgaaatttttattaaaaggaaaattctgtagatgcacttattgaatatgtgattaggatctacgtctgagactaggagtcctgaactgctgacgcgaaagaggcgcagttcccaattaatacggaaatcgctgtgggagaagaatgaaataagacgtgaagtgtaggaaatcatgaaaagaacaattttgcaaattgcattctgatgcttgtgatgaacacaaatgtacttgtgtagagacatttccttaagagaaagcctaggagaagccgatttggaggttaatgctgtagaataggactgtataccaaatgtaatctttccaatgctccaatgaatttatacatgagattgatatgcaataaatctgtgtgcttttct

SEQ ID NO: 1928 - protein, 1275 aa, Homo sapiens; identical to SEQ ID NO: 20

SEQ ID NO: 1929 - DNA, 581 bp, Homo sapiens
aatgctggggagatgaagatagtgtgtggctgcttctggactcaaggaggaggagagagattccgcgagccgacaccatgcgatccaaggcgagggcgaggaagctagccaaaagtgacggtgacgttgtaaataatatgtatgagcccaaccgggacctgctggccagccacagcgcggaggacgaggccgaggacagtgccatgtcgcccatccccgtggggccaccgtcccccttccccaccagcgaggacttcacccccaaggagggctcgccgtacgaggcccctgtctacattcctgaagacattccgatcccagcagacttcgagctccgagagtcctccatcccaggggctggcctgggggtctgggccaagaggaagatggaagccggggagaggctgggcccctgcgtggtggtgccccgggcggcggcaaaggagacagacttcggatgggaggtgagcgatcgcgcctgagtatgattgatcacggccatttatcttgtgttcaatctatttataaagccgggctgagcagccactgcccgaggcgggaggcgcggccagagagagcgt

SEQ ID NO: 1930 - protein, 134 aa, Homo sapiens [sequence omitted]

SEQ ID NO: 1931 - DNA, 469 bp, Homo sapiens
gccttgccagccccagctgaaccacttcagagagccattaacctctgcaaaacggagtggacaacttccacgtggctttctgtagaaatcagatgggactgcaagcaatggcacggcccctgccaaggtggatcttggagcctccagaagagacatgggcagagacctccctggtcttcctgcagctcctgccctggaacctgagtctcccaggcatctgaccagctgcactccaccaccagaagccggttaccaccgtccttcgggctttgtcctggagggtgcggggctggtgtggaccactcagtctggcagtgaccaccacccagtcagaggcacggcagaacgcacctgctgcacggacgctgtttgaacttcttcaaaacgtggtgcagtgtttcctgaagacatttaccatccttggcagttaaatacagcacagtgtcaattacaggtccatcttctgtaa

SEQ ID NO: 1932 - protein, 42 aa, Homo sapiens
MGLQAMARPLPRWILEPPEETWAETSLVFLQLLPWNLSLPGI

SEQ ID NO: 1933 - DNA, 1719 bp, Homo sapiens
aacatgcatcaggtataatcatttgaacagaccacttgttcagactcttttgatgaatctgttcctctcagggtaaattcctaattcagcagtcctgtagttttccaaaaatgtcatgtgcttttattgctctgtctccccacatatgctgtccctcaccagagattcccccttccccttcctggtcatgctgtcacctgttgtggaagcctttggtaattcctcctaattccaagtgtcccatagtaaactcatatcacttctgtttagcaagggataaatgcgtccatcagctgagagcctgtatatgtattcttgtcattctgcctaatgatggtgctcaagaatactttagaactttgggtgagctctgttaatatttgtctctcagcagtgaatatttgttgcttgcactagtcactagggaaacagcagggaattaagacctagcttctaggaacttacagcttcacagataagataattaaagtttggtgggataaggttgctgagggtgccactagaccttcaagagtcacccagtacaggttgggttaagagagagaaggttgggagggccttcagaggcagcagcacccaactcccatcttaagaatagccaggtgggctttgccgtgtctactgtgaaaatgaagaccattcacagcaatcagactgttgtcattccagaaaatgtcaacattaccctgaagagatgcacagttactgtgaatggccccagaggaaccatgcagagggacttcagtcacatcaatgtagaactcagtctaaagaggctctggagtgccacacggtggggtaacagaaaggaactggctaccgttcgaactgttggtagttatgtgcagaacacgatcaagggtgttacactgggcttctgttacaagatgaggtctgcgtatgctcacttccccaccgacattgttatccaggaggatgggtctcttgttgaaatccgaaatttcttggatgaaaaatacacccgcagggttcagatgagaccaggtgttgcttgttcagtatctcaagcctagaaagatgaatttaatccttgaaggaaatgacatcgagcttgtttcaaattcagttgccttgattcagcaagccacaacagttaaggatatcaggaagtttggggatggtatctatgtctctgaaaaaggaactgttcagcaggctgatgaataagatctaagagttgtcccgctacagaaacaacatgctggatgattcctaagacctattggtgatatttaaatgatgccataaaagacattgatttgggaagaaaagaatagccaggtgggggcggcagagaagagtcttttgggcagagagaaggtgagtgtagaaatcttgagtcaagaaagcatggttaggctggactcggtgcctcacacctgtaatcccagtactttgggaggccgaggtgtgcggatcacttgagctcaggatttcgagaccagcctggccaacatggtgaaaccctgtcctacaaaaattagccgggtgtggtgtcatgcctcgggaggctgaggcaggagaatggcgtgaacccgggagcctgtaatcccagggaggctgaagcaggagaattgcttgaacccagaagttgaggttgcagctgagattgcaccattgcactccaccctaggggacagagtgagtaagactccatctcaaaaaaatgaaaaaagg

SEQ ID NO: 1934 - protein, 134 aa, Homo sapiens
MKTIHSNQTVVIPENVNITLKRCTVTVNGPRGTMQRDFSHINVELSLKRLWSATRWGNRKELATVRTVGSYVQNTIKGVTLGFCYKMRSAYAHFPTDIVIQEDGSLVEIRNFLDEKYTRRVQMRPGVACSVSQA

SEQ ID NO: 1935 - DNA, 4018 bp, Homo sapiens
tcacggcgcgaggaggcgcgcgtcgccgccccgcgtcccgcctgcggcccgcgcccccggcgtcaccgcctcctgcccgcctgcccgcctgcccgcctgcccgcctacccgcctacccgcctacccgcctacccccctgccggcctgccgtccttccacgcggagagccatggagggagtgagcgcgctgctggcccgctgccccacggccggcctggccggcggcctgggggtcacggcgtgcgccgcggccggcgtgttgctctaccggatcgcgcggaggatgaagccaacgcacacgatggtcaactgctggttctgcaaccaggatacgctggtgccctatgggaaccgcaactgctgggactgtccccactgcgagcagtacaacggcttccaggagaacggcgactacaacaagccgatccccgcccagtacttggagcacctgaaccacgtggtgagcagcgcgcccagcctgcgcgacccttcgcagccgcagcagtgggtgagcagccaagtcctgctgtgcaagaggtgcaaccaccaccagaccaccaagatcaagcagctggccgccttcgctccccgcgaggagggcaggtatgacgaggaggtcgaggtgtaccggcatcacctggagcagatgtacaagctgtgccggccgtgccaagcggctgtggagtactacatcaagcaccagaaccgccagctgcgcgccctgttgctcagccaccagttcaagcgccgggaggccgaccagacccacgcacagaacttctcctccgccgtgaagtccccggtccaggtcatcctgctccgtgccctcgccttcctggcctgcgccttcctactgaccaccgcgctgtatggggccagcggacacttcgccccaggcaccactgtgcccctggccctgccacctggtggcaatggctcagccacacctgacaatggcaccacccctggggccgagggctggcggcagttgctgggcctactccccgagcacatggcggagaagctgtgtgaggcctgggcctttgggcagagccaccagacgggcgtcgtggcactgggcctactcacctgcctgctggcaatgctgctggctggccgcatcaggctccggaggatcgatgccttctgcacctgcctgtgggccctgctgctggggctgcacctggctgagcagcacctgcaggccgcctcgcctagctggctagacacgctcaagttcagcaccacatctttgtgctgcctggttggcttcacggcggctgtggccacaaggaaggcaacgggcccacggaggttccggccccgaaggtcagagaagcagccatgactgcggggggaggacacacggatgctcaggcccaggctttgccaggtccgaagcgggcccctctctgtcctgcctcttttcacctgctcacgccctcccacccccaccctacagccccaggtcctggcccagtccctccactgcctcgaagagtcagtctgccctgccttttcctttcgggcaccaccagccatccccgagtgccctgtagccactcaccactgctgccacctctctggccaatggccctttcactggcctggtgactggaatgtgggcagcgcccacacaggctctggcccatggcttcctactggcagctccaggcacccccctctcaccacgccgtttgctggctctgacactgttgggtgagggtcctggtcctgctgtcttcccttctggcctctgcacaggggtggtgacagtggctacaggctgggcccctggcgtgccctgaccgtgcagcagagtgaggctggggcagcagagagccccagcctcacccctgaggagcacctgtggtctgtccccttggtcctgcttatggctggaccggccctgcaggaggtggtggagccgtgaaggaggccgagctgcagctctggctgctgcttggcctcctgctccaagaccctcccgagtccccggaaatggagagtgcagttcttgggcccagcctggccttcgccatgagtttggggagcgagaccccacctgagacaggcagtaggagcctgtgctgaccttggggaatctgagcttttccaagggtaaggggcccagggtatgcaggccttcagtgacatcaggtcgttgtcatcctttccctccctgacctgtcacgagcctctgcaggtgcctgctcaccatggcccagcgccactctgtcctccgactcaggtgagggggcagcccacagacctgctcctcagtagcagggcctggccaggcccctgctgttctcagcctcagtttgccatctatgaaatgaggtggacccctctccatagcccttgggtgccagctcagtgggtgtggggatcacatgaggtggctcatgaggacacactctggaagtcgaggggctgccacgtgcagaggaagttcccggcctgggggctttatccaggggtcccagtcgagagtggcccgaggccgtccctcaccgggcatgttccctctggctgcccactccctcagggcccacatgtcctgccactcgccactctgagcacgagttcaccttccagatgtggccagggtgtgccagctcctctctcctgtgcgttggaaccccgggggaggcaagagcagatcacaggtgcatgagggttacacccgtcacctgggtctgccgggatgggttgggggggcaggtgccaggcctcactgctgtgaatctgccacgcctgggggtcctagaggctgccccaccccagtgattgggtagcagctcacatcccacccagcttcacaagtgaggaacccaggtgcatcgggagaccctcgggggcttctgtggcctctgtgcccgatgacctgcgtggcttcagacaaggccccagcgttactgggctcagcttgttgttctgtgtggagcgtgaggtgagaaaacccctctgaaaagatgtggtcggggccacgcttcccactggttctgcagtgaggagttggggcgggtgagccaaagcggccccccatggtgtctacctgaggggcagggaaccgcctgcctgtgcactcacgccaccccccagcccacaaagagcccatctgagagaaggacgtggtggagccaggacgggaaagcgtcctgtcggctggccatgctgttgcttgcgtctcgaatcttcggttctcgaggaagtgttgacagtgtgatgctaatgtctgcttttcttggcgttgggtagaagcaggacatctgtgtgtatgtgcgtatttaaattagattatttataataaccagagccagccctcgcgctggccaggatcctcctgccgagctgatgtcgctcctgccctctgccggggtccggaagcgacatctcaggaggtagctctcagcagagtgaggattcctgcctttcgtagagttttgtgtgactttttaaattattcatgtgtcccttaaaagtttcactacgtggagaaaattccagcaccaagtgttgtggcaacagctgagagagtgcaggcaccactgtgttgtggcttgttgaccgggaatgtgtcacccctgccagggaactcttctcctcgcgggggacttgggatggccatcagaccttctagggtctggctggggtcatcctaggtatgggtgaccgtccctgagacataagcgaggtagattcagccatcctcaccctcagacttgaggtccccacccaggccaagccggccccccgtaccccttgcctgggagcaaaccgccaggacgcagcctccacgccgcacctgccacattcagccctgcccaggaaggaacacatgacccttctgtctgtgactgttgctgagtctctgtctcatgtcgtagaattgtggataattgtctagtgaccctctcatcactgtaaccatcgcgcctggcctagatgtcgtgttttggatgctgtgttttcaataaatgcctctggggccctgcttttacccgctggcgtc

SEQ ID NO: 1936 - protein, 392 aa, Homo sapiens; identical to SEQ ID NO: 26

SEQ ID NO: 1937 - DNA, 4200 bp, Homo sapiens
atgtgtctgacgccgccgtgctggtgcctgggggacctgcaattcatgcccagctccccatcgacccctggcctacctgcctcttgggacctttcagggctcacccccaaaggcactgtgggagaggaccccctggcaggatcctcacagtggcctctcctggggcagggatgctcagcagccccttttgacagctggctggctccgtttcgtcgctggtctgcaggccttgcccgctgtctccatgctgttgacaagatgcagcggtccttgtcctctcgcctcaggatgaaaggccagagggccgtgctctctggtcctgtggacggggggccgtctgtgcagggagtggctgcccactctggcaggggctcaagcggtgtcctcgagctggaggtggcccctgggggagaggtggagagtcggagcagcaaagccggggccccagggctcccacagctgctgcctgtcacccacattgttcctggatttccggaactggggggcttttttgggcagtggcggatgaagccaacgcacacgatggtcaactgctggttctgcaaccaggatacgctggtgccctatgggaaccgcaactgctgggactgtccccactgcgagcagtacaacggcttccaggagaacggcgactacaacaagccgatccccgcccagtacttggagcacctgaaccacgtggtgagcagcgcgcccagcctgcgcgacccttcgcagccgcagcagtgggtgagcagccaagtcctgctgtgcaagaggtgcaaccaccaccagaccaccaagatcaagcagctggccgccttcgctccccgcgaggagggcaggtatgacgaggaggtcgaggtgtaccggcatcacctggagcagatgtacaagctgtgccggccgtgccaagcggctgtggagtactacatcaagcaccagaaccgccagctgcgcgccctgttgctcagccaccagttcaagcgccgggaggccgaccagacccacgcacagaacttctcctccgccgtgaagtccccggtccaggtcatcctgctccgtgccctcgccttcctggcctgcgccttcctactgaccaccgcgctgtatggggccagcggacacttcgccccaggcaccactgtgcccctggccctgccacctggtggcaatggctcagccacacctgacaatggcaccacccctggggccgagggctggcggcagttgctgggcctactccccgagcacatggcggagaagctgtgtgaggcctgggcctttgggcagagccaccagacgggcgtcgtggcactgggcctactcacctgcctgctggcaatgctgctggctggccgcatcaggtgtgcatggggccagggccaggagttggcgggcaggggactgtgtgctggattactgtctagggcgggggccaagagaccccattgggtgcacagccctaggctgaactccaccatgtcactgtgctgtgtgccaggcctcactgctctgatgtcgctcctgccctctgccggggtccggaagcgacatctcaggaggttcttcccaggagactctgccggccttttccccaccagccccagcttggccatccctcacccgagtgtcggaggctctccagcgtctctgttcatccccagcccgcccagcttcctgcccctcgccaaccagcagctcttccggtctcctcgacggacctcaccctcctcattgcctggccgcctcagccgggccctctctctgggaaccataccctctctgactcgagcagactccggctatctgttcagcggtagccgcccaccatctcaggtgtctcgatctggggagtttcctgtttcagattacttctctcttctgtcggggagctgcccctcctccccactcccttccccagcgccttccgtggccggctcggtggcctccagctccggctctctgcgccaccgcaggcccctcatcagccctgcccggctcaacctgaagggacagaagctgctgctgttcccgtcaccccctggagaggcccccaccacgcccagcagctccgatgagcactcgcctcacaacggcagcctcttcaccatggagccgccccatgttccccggaagccgcccctgcaggacgtgaagcacgccctggacctgagatccaagctggaaagaggcagtgcctgcagcaaccgctccatcaagaaagaggacgactcttcccagtcatctacctgtgtggtggacaccaccaccaggggctgctcggaggaggccgccacctggagaggtcgtttcggcccttccctggtccggggcctcctggccgtgagcttggccgccaacgccctgttcacctcggtgtttctgtaccagagcctgcgctgacccaccgttggagcccctcggaggggagcaacccggtgcctgctgcttcaccactgccggcctcaggaccctccctggaggggctgccacctctgccctcatctccagggccttgacctcactggactgtgactgtcctcaggacacctgcccctcctcacctaacggactgcagggctgagcatgtgtctgaggtcacactctctgcccactcacctccttggctgacatcggttgtgtttggtgctgacactctgatcccgaagccagggagccccaaggggctgcatgaccctggggtgccccacacagttcagccctgcctggcagggacgccagtactactgtaactgcagcaggagctgcccggcctgccttctggccccacgcccacaggcgtagtcacatctttgtactgtactcccctgtctcacctggggcaacctcagagccccactaagctgaaggccccctgggggagggggaagcatggtccttatcatctgccctatcttgccccttcctgtggagtgggcagaagggctcccgggatcctcagagctcccaggtctgagcagccaaaggcccagctgggcctccaggaccagcgcgagcccctgccccaccctcccctgccccatgtgccctgctttgtgacctctgttgaccttcctggaagcagccccattaccctgagaatgcggagcgccctggcccacctcgccctgtgtttccaggcctgcacgtctggtccttcagctgcacatggaactgcagggcaggctggcggggggccttcagatctcagatgagactgcaccccttcgaccaccctactgggcacctgcctccagcccctgagaactccatcttcccctagttctgcccaggagcccctgagaaccccatcttcccctggttctcttgcccactcccctgctggggctccttcctggcactgaggaggggcgctcccaatgctgtgaggcagcggggagggaccgtgcacccgtggctatcagagcccctccgctgtcccaccctgggcctgggacacgggcctggggcagtgtgtgtctgctggtcatgtgctggtgccagttggggaggaatcagctgtctcggtggattctgagactcactgtggggcgggaagaagggtcttcactctgccattcagggataaagtttaattttatttttctacacattttgccaggtcaggcattttgctagtaagcaggatgcccccaactctccctgccatggaggattcttttttttaagctttgggtgcttttttaatacttttttttttaatgtggggaaggagcttgctctgacgtcaccctcctctcccctgactcctgtcctgagagctgtggatgccgcctcctgccctgcctacccctgaaacgtggggaatgggggccccaggacagcatcaggacttttgagtccagctgccagcaatggttccaactcggaggcagcgcctcttggtccccatttctgtatagcaggcgtgtgtgtgtgtgtcgaggttttttattttttgcttaatcaaactccattcccaaatgcactccatctctggctctgagggcgctccctcctctcagccgggcagcctggcctctcctgcccagacctgcggtcccagcatcccccagagccagggaacaggcccagcgggagggggttttatgttttgtttcaaacagaaaacacaaccttatttttctttacaaaagcaaaaaaggaaaccaaaaaagatacagcctttgaatgatg

SEQ ID NO: 1938 - protein, 801 aa, Homo sapiens [sequence omitted]

SEQ ID NO: 1939 - DNA, 2190 bp, Homo sapiens
acaggccggccgggcgggcggggtgccgggtgcgagctggagactccgcgggagcgcggccgggaggcttcgccccggagctggcccgacgcctcccgagctggcagggctctcggcggaggtcggagcgtgggcttcctcctcccgccagggaaaacagagaggatgaaggcctatctaaagagcgcagaaggcttttttgtcctaaataaaagtaccacaattggaaggcatgaaaattcagaccttgttttacagtctcctgacatcgacaaccaccatgcactcattgaatataacgaggcggagtgcagctttgttctccaggacttcaattcccgcaacggcacgtttgtcaacgagtgccacattcaaaacgtggctgtgaagctcatccctggagacatcctgagatttgggtctgcagggctgacctatgaactggtcattgaaaatccacctccggtctctttcccatggatgaggggcccagcaccatggccagggccacagccacctcgtgccacacagcagccaaaccaggcccccccaccatcacatatccccttccaccaaggtgtccagccagcaccgatgcaaaggagctggtcccaggcctttcccagacccaccgtggtcctgccggcctcccacaggcggcctgtgagcgccaacaaggagatgttctcgttcgtggtggacgacgcccgcaagccacccgtcatcaagcaaggcctcagggaaactcatgatgtcttttgtgctctctgctgatctcacgccttagtgtggaccaatgccatgaaactgtcagaaaaatcagtggccgaggggattcctggggcagttccccctgcggagatttatgtggaggaggacttggcccagcaggacaagatcagtgccctacagaaaggctacagcaaggtgctgtgccagaccctgtcagagcggaactcagaaatcacatccctgaagaatgagggcgagaacttaaagagagacaacgctatcacatcagggatggtgtcatctttgcaaaaagacatattagcaaaggatgagcaagttcaacaactaaaggaagaggtcagtcacctaaaaagtcagaacaaggacaaggaccaccagctggaagcccttggctctagatgctcggtgctaaaggaagagttaaaacaggaagatgctcacagggagctcagggaagcccaggagaaagagttaaaactctgcaaaacccaaatccaagacatggagaaagaaatgaagaagcttagggcagagctgaggaagagttgtactgaacaaagcgtgatctctaggactctgagagaaaaaagcaagctggagcacttcagaagtcaagtcatcaaggccacctatggacgggcgaagccgttccgggacaagcccgtcaccgaccaacagttaatagagaaaattacccaggtcactgaggacaacatcaattttcagcagaaaaagtggaccctccagaaagagacccagctgagcaactccaagcaggaggagaccaccgagaacatcgagaagctgaggacgtcgctggacagctgccaggcttgcatgaaaatatcctgttgcagccatgacctgaagaaggaggtcgaccttcttcagcacctccaggtgagcccacctgtctcggggctccagaaggtggtgctggacgtcctgaggcacgcgctgtcctggctggaggaggtggagcagctcctccgggacctcgggatcctgccctccagccccaacaaagggttctctttgtatctgatatatcttctggaacattataaaaaacttatgagccaggcccaggaacttcagatcaagttcaacagttctcaggaaactcagcagtctttactgcaggaaaagctgcgggagcatctggcagagaaggagaagctgaacgaggagaggctagagcaagaggagaagctcaaagccaaaatcaggcaactgacggaagagaaggcggctttggaggagtacattactcaagagagaaacagagcgaaagagactttagaggaagaacggaagagaatgcaagaactggagagcctcctggcccagcagaagaaggctttggcgaaaagcattacccagtggaaagtactagagaaacctcgtcccaccaggcctcatgtgatcctctgtgag

SEQ ID NO: 1940 - protein, 462 aa, Homo sapiens
MKLSEKSVAEGIPGAVPPAEIYVEEDLAQQDKISALQKGYSKVLCQTLSERNSEITSLKNEGENLKRDNAITSGMVSSLQKDILAKDEQVQQLKEEVSHLKSQNKDKDHQLEALGSRCSVLKEELKQEDAHRELREAQEKELKLCKTQIQDMEKEMKKLRAELRKSCTEQSVISRTLREKSKLEHFRSQVIKATYGRAKPFRDKPVTDQQLIEKITQVTEDNINFQQKKWTLQKETQLSNSKQEETTENIEKLRTSLDSCQACMKISCCSHDLKKEVDLLQHLQVSPPVSGLQKVVLDVLRHALSWLEEVEQLLRDLGILPSSPNKGFSLYLIYLLEHYKKLMSQAQELQIKFNSSQETQQSLLQEKLREHLAEKEKLNEERLEQEEKLKAKIRQLTEEKAALEEYITQERNRAKETLEEERKRMQELESLLAQQKKALAKSITQWKVLEKPRPTRPHVILC

SEQ ID NO: 1941 - DNA, 3906 bp, Homo sapiens
caaacagaaagagatccagagcttgaaaagccagatcagtgccctacagaaaggctacagcaaggtgctgtgccagaccctgtcagagcggaactcagaaatcacatccctgaagaatgagggcgagaacttaaagagagacaacgctatcacatcagggatggtgtcatctttgcaaaaagacatattagcaaaggatgagcaagttcaacaactaaaggaagaggtcagtcacctaaaaagtcagaacaaggacaaggaccaccagctggaagcccttggctctagatgctcggtgctaaaggaagagttaaaacaggaagatgctcacagggagctcagggaagcccaggagaaagagttaaaactctgcaaaacccaaatccaagacatggagaaagaaatgaagaagcttagggcagagctgaggaagagttgtactgaacaaagcgtgatctctaggactctgagagaaaaaagcaaggttgaagagaagcttcaggaggattccagaaggaaattgcttcagctgcaagaaatggggaacagagagagcgtcattaaaatcaatttggagagggcagtaggtcagctggagcacttcagaagtcaagtcatcaaggccacctatggacgggcgaagccgttccgggacaagcccgtcaccgaccaacagttaatagagaaaattacccaggtcactgaggacaacatcaattttcagcagaaaaagtggaccctccagaaagagacccagctgagcaactccaagcaggaggagaccaccgagaacatcgagaagctgaggacgtcgctggacagctgccaggcttgcatgaaaatatcctgttgcagccatgacctgaagaaggaggtcgaccttcttcagcacctccaggtgagcccacctgtctcggggctccagaaggtggtgctggacgtcctgaggcacgcgctgtcctggctggaggaggtggagcagctcctccgggacctcgggatcctgccctccagccccaacaaagggttctctttgtatctgatatatcttctggaacattataaaaaacttatgagccaggcccaggaacttcagatcaagttcaacagttctcaggaaactcagcagtctttactgcaggaaaagctgcgggagcatctggcagagaaggagaagctgaacgaggagaggctagagcaagaggagaagctcaaagccaaaatcaggcaactgacggaagagaaggcggctttggaggagtacattactcaagagagaaacagagcgaaagagactttagaggaagaacggaagagaatgcaagaactggagagcctcctggcccagcagaagaaggctttggcgaaaagcattacccaggagaagaacagagtgaaggaagcattagaggaagagcagacaagagtccaagagctggaggaacgcttggcccgccagaaggaggttttggagagcagcatagcccatgaaaaaagaaaagcaaaggaagccttggagtcggaaaagagaaaagttcaggatctggagaaccatttaacccaacagaaggagatctcagagagcaacattgcgtacgagaaacgcaaagcaaaggaggccatggagaaggaaaagaaaaaggtgcaagacctggagaatcgcttaaccaagcagaaagaggaattagaattaaaagagcaaaaagaggacgttttaaataataaattaagtgacgcactggccatggttgaagagactcagaaaacaaaggcaactgaaagtctaaaagcagagagcctcgccttgaaattaaatgaaacattagccgaactggaaactaccaagacaaaaatgatcatggtggaagagcggctaatcctgcagcagaagatggtaaaggccctccaggatgagcaggaatcacagagacacgggtttgaagaagagatcatggaatataaggagcaaatcaaacagcacgcccagacaattgtgagcctcgaagagaaactccagaaagtcactcagcaccataaaaaaatagaaggcgagattgcaacattgaaggacaatgacccagccccaaaggaggaaaggccgcaagaccctctggtggctcccatgacagagagcagtgccaaagacatggcgtacgaacatctgatagatgacttattggctgctcagaaggaaattctgtctcagcaggaagtcatcatgaagttaaggaaagaccttaccgaagcccacagcagaatgtcggatttgagaggggagctaaacgagaagcagaagatggaactggagcagaacgtggtgctggtccagcagcagagcaaggagctgagtgtgctcaaggagaagatggcccagatgagcagcctggtagaaaagaaagatcgggagctgaaggcccttgaggaggcactcagggcttcccaagagaaacacagactccagctgaacacagagaaggaacagaagccccggaagaagacccagacgtgtgacacctctgtgcagatagaacccgtccacactgaggccttctccagcagccaagagcagcaatccttcagcgatctaggggtcaggtgcaaagggtcccggcacgaggaggtcattcagcgtcagaaaaaggccttatctgaacttcgagcgcgaattaaagaactcgagaaggcgcgctcaccagatcataaagaccaccagaatgaatcatttctagatttaaagaacctcagaatggaaaacaatgtccagaaaatactactggatgcaaaaccggatttgccaactctctcaagaatagagatcctagcgcctcagaatggcctttgcaacgcaaggttcggctcagccatggagaagtcagggaagatggatgtggctgaggctttagagctcagtgaaaagctgtacctggatatgagcaaaaccctcggaagtctcatgaacatcaagaatatgtcaggccacgtgtccatgaaatacctctcccgccaggagagggagaaggtcaaccagcttcgacaaagggacctcgacctggtgtttgataagatcacccaactcaagaaccagctggggaggaaagaggagctgttgagaggatatgaaaaggacgttgaacagctcaggcggagcaaagtgtccattgagatgtaccagtcgcaggtggcaaagctggaggatgatatctacaaagaggccgaagagaaggccctgctgaaggaggccctggagcgcatggagcaccagctgtgccaggagaagaggatcaacagggccatccggcagcagaagtagatgggagcttccagcccctgcctcgcagacagatggtgaggatgaaagaatgcaggcatccctcgctatctgctgtccactctcgctgtcgtcatacctcaggagccaagtgcttttggatggtgagggtgcttgtcccgtctctgaagcacctgcccagggcctggcaccagccggcggacactgccttccccatgctgcccatgacccatgctgcccgtgacccatgcaggtggtctcctgggaaagtgtagaggagcacgaactgagaaacgcaaaagaatcgacaccttgcaactgtgccttcaaagagaaagacaggcagagacgagtatttgtagagatggtgaagaacaggatgcagaactcaaattcccaggttggaaccagaaaagcctccctaaagatggaccaagaaagagagatgctgaggaaagagacctccagcaagtccagccagagccttttgcattctaagcccagtggaaagtactagagaaacctcgtcccaccaggcctcatgtgatcctctgtgagttcatgtgactcttctgtgtcatctgtgtcaaaatactgagttgcttttgtaagtcttt

SEQ ID NO: 1942 - protein, 1049 aa, Homo sapiens
MVSSLQKDILAKDEQVQQLKEEVSHLKSQNKDKDHQLEALGSRCSVLKEELKQEDAHRELREAQEKELKLCKTQIQDMEKEMKKLRAELRKSCTEQSVISRTLREKSKVEEKLQEDSRRKLLQLQEMGNRESVIKINLERAVGQLEHFRSQVIKATYGRAKPFRDKPVTDQQLIEKITQVTEDNINFQQKKWTLQKETQLSNSKQEETTENIEKLRTSLDSCQACMKISCCSHDLKKEVDLLQHLQVSPPVSGLQKVVLDVLRHALSWLEEVEQLLRDLGILPSSPNKGFSLYLIYLLEHYKKLMSQAQELQIKFNSSQETQQSLLQEKLREHLAEKEKLNEERLEQEEKLKAKIRQLTEEKAALEEYITQERNRAKETLEEERKRMQELESLLAQQKKALAKSITQEKNRVKEALEEEQTRVQELEERLARQKEVLESSIAHEKRKAKEALESEKRKVQDLENHLTQQKEISESNIAYEKRKAKEAMEKEKKKVQDLENRLTKQKEELELKEQKEDVLNNKLSDALAMVEETQKTKATESLKAESLALKLNETLAELETTKTKMIMVEERLILQQKMVKALQDEQESQRHGFEEEIMEYKEQIKQHAQTIVSLEEKLQKVTQHHKKIEGEIATLKDNDPAPKEERPQDPLVAPMTESSAKDMAYEHLIDDLLAAQKEILSQQEVIMKLRKDLTEAHSRMSDLRGELNEKQKMELEQNVVLVQQQSKELSVLKEKMAQMSSLVEKKDRELKALEEALRASQEKHRLQLNTEKEQKPRKKTQTCDTSVQIEPVHTEAFSSSQEQQSFSDLGVRCKGSRHEEVIQRQKKALSELRARIKELEKARSPDHKDHQNESFLDLKNLRMENNVQKILLDAKPDLPTLSRIEILAPQNGLCNARFGSAMEKSGKMDVAEALELSEKLYLDMSKTLGSLMNIKNMSGHVSMKYLSRQEREKVNQLRQRDLDLVFDKITQLKNQLGRKEELLRGYEKDVEQLRRSKVSIEMYQSQVAKLEDDIYKEAEEKALLKEALERMEHQLCQEKRINRAIRQQK

SEQ ID NO: 1943 - DNA, 4631 bp, Homo sapiens
ccatgtaagaagtgcttttcgcctcccaccatgattctgaggcctccccggccatgtggaactatcagtgccctacagaaaggctacagcaaggtgctgtgccagaccctgtcagagcggaactcagaaatcacatccctgaagaatgagggcgagaacttaaagagagacaacgctatcacatcagggatggtgtcatctttgcaaaaagacatattagcaaaggatgagcaagttcaacaactaaaggaagaggtcagtcacctaaaaagtcagaacaaggacaaggaccaccagctggaagcccttggctctagatgctcggtgctaaaggaagagttaaaacaggaagatgctcacagggagctcagggaagcccaggagaaagagttaaaactctgcaaaacccaaatccaagacatggagaaagaaatgaagaagcttagggcagagctgaggaagagttgtactgaacaaagcgtgatctctaggactctgagagaaaaaagcaaggttgaagagaagcttcaggaggattccagaaggaaattgcttcagctgcaagaaatggggaacagagagagcgtcattaaaatcaatttggagagggcagtaggtcagctggagcacttcagaagtcaagtcatcaaggccacctatggacgggcgaagccgttccgggacaagcccgtcaccgaccaacagttaatagagaaaattacccaggtcactgaggacaacatcaattttcagcagaaaaagtggaccctccagaaagagacccagctgagcaactccaagcaggaggagaccaccgagaacatcgagaagctgaggacgtcgctggacagctgccaggcttgcatgaaaatatcctgttgcagccatgacctgaagaaggaggtcgaccttcttcagcacctccaggtgagcccacctgtctcggggctccagaaggtggtgctggacgtcctgaggcacgcgctgtcctggctggaggaggtggagcagctcctccgggacctcgggatcctgccctccagccccaacaaagggttctctttgtatctgatatatcttctggaacattataaaaaacttatgagccaggcccaggaacttcagatcaagttcaacagttctcaggaaactcagcagtctttactgcaggaaaagctgcgggagcatctggcagagaaggagaagctgaacgaggagaggctagagcaagaggagaagctcaaagccaaaatcaggcaactgacggaagagaaggcggctttggaggagtacattactcaagagagaaacagagcgaaagagactttagaggaagaacggaagagaatgcaagaactggagagcctcctggcccagcagaagaaggctttggcgaaaagcattacccaggagaagaacagagtgaaggaagcattagaggaagagcagacaagagtccaagagctggaggaacgcttggcccgccagaaggagatctcagagagcaacattgcgtacgagaaacgcaaagcaaaggaggccatggagaaggaaaagaaaaaggtgcaagacctggagaatcgcttaaccaagcagaaagaggaattagaattaaaagagcaaaaagaggacgttttaaataataaattaagtgacgcactggccatggttgaagagactcagaaaacaaaggcaactgaaagtctaaaagcagagagcctcgccttgaaattaaatgaaacattagccgaactggaaactaccaagacaaaaatgatcatggtggaagagcggctaatcctgcagcagaagatggtaaaggccctccaggatgagcaggaatcacagagacacgggtttgaagaagagatcatggaatataaggagcaaatcaaacagcacgcccagacaattgtgagcctcgaagagaaactccagaaagtcactcagcaccataaaaaaatagaaggcgagattgcaacattgaaggacaatgacccagccccaaaggaggaaaggccgcaagaccctctggtggctcccatgacagagagcagtgccaaagacatggcgtacgaacatctgatagatgacttattggctgctcagaaggaaattctgtctcagcaggaagtcatcatgaagttaaggaaagaccttaccgaagcccacagcagaatgtcggatttgagaggggagctaaacgagaagcagaagatggaactggagcagaacgtggtgctggtccagcagcagagcaaggagctgagtgtgctcaaggagaagatggcccagatgagcagcctggtagaaaagaaagatcgggagctgaaggcccttgaggaggcactcagggcttcccaagagaaacacagactccagctgaacacagagaaggaacagaagccccggaagaagacccagacgtgtgacacctctgtgcagatagaacccgtccacactgaggccttctccagcagccaagagcagcaatccttcagcgatctaggggtcaggtgcaaagggtcccggcacgaggaggtcattcagcgtcagaaaaaggccttatctgaacttcgagcgcgaattaaagaactcgagaaggcgcgctcaccagatcataaagaccaccagaatgaatcatttctagatttaaagaacctcagaatggaaaacaatgtccagaaaatactactggatgcaaaaccggatttgccaactctctcaagaatagagatcctagcgcctcagaatggcctttgcaacgcaaggttcggctcagccatggagaagtcagggaagatggatgtggctgaggctttagagctcagtgaaaagctgtacctggatatgagcaaaaccctcggaagtctcatgaacatcaagaatatgtcaggccacgtgtccatgaaatacctctcccgccaggagagggagaaggtcaaccagcttcgacaaagggacctcgacctggtgtttgataagatcacccaactcaagaaccagctggggaggaaagaggagctgttgagaggatatgaaaaggacgttgaacagctcaggcggagcaaagtgtccattgagatgtaccagtcgcaggtggcaaagctggaggatgatatctacaaagaggccgaagagaaggccctgctgaaggaggccctggagcgcatggagcaccagctgtgccaggagaagaggatcaacagggccatccggcagcagaagtagatgggagcttccagcccctgcctcgcagacagatggtgaggatgaaagaatgcaggcatccctcgctatctgctgtccactctcgctgtcgtcatacctcaggagccaagtgcttttggatggtgagggtgcttgtcccgtctctgaagcacctgcccagggcctggcaccagccggcggacactgccttccccatgctgcccatgacccatgctgcccgtgacccatgcaggtggtctcctgggtgagtcctgcctcagacccggtagggtctacacactggaaagtttccccaaagcaagtcacacatgagcagcacccgggcggcttccaaagctccctgaaagctggcagaggggctttcctgtctgctttgcagttgacatattcatcatccactcctgcagtccacaaggcactggaacagtgacctctaaatagagccagactctccctttccttcactcttgcctaaggtggagcagatcccaaggctggggttaggcaagtcagggaaagaaccacagtcactgtttcttcatgaccgtctccaggccagggactgggctcacctgagctttgcagccgtgatagggcttattaatgcctctaatagccctgcctggtacgatgatccctattttacagatgaggaaactgcgcctcagagagttaagaggcgcccaagtgcacacagcggctggtaaggacagctgggacctgaccccagatccctctgaccctggttctcctgctgtctgcagggttggccgtgagtcccctccttgtaactgtcagcttttatgtgtgtgtgcattctcgtgtgtgtgtacattctcatgtgtgtgtgtgtgtgcacatgtgtaccatgtgcatgagggtttggctgtgtgtgacactatgtgtgtgtgtttgtgtgtgttgcctgcctgagctcagagagagccaaacccccagagaagggtgccccctccaccaaccaggtgagctccttgcagaggcctggccttcatcccacaaaccttgcagaccacaggctccctggcttgcagcccccaaaaatgaaggcagcgctctgctctggacgtggcctttccagcactcaccactctgaattaaacatcacaggcccccatctgcacatgtcgtggggctgcctcgggcagaggaccgtttccttttacgctgtgccatgccagggagatctgggcagcagcagagtcctgagatgtcctttgatgtacccacaggagagttcgctccttcccgaggcagtgtcccccagggcttggcaggccaggcccacagcagagacaccaaaccacagaatgggacggcagagggccctaaaaagcccattgtcatgcactggctgaaaatgaaagaaaacctgcagattt

SEQ ID NO: 1944 - protein, 1066 aa, Homo sapiens
MILRPPRPCGTISALQKGYSKVLCQTLSERNSEITSLKNEGENLKRDNAITSGMVSSLQKDILAKDEQVQQLKEEVSHLKSQNKDKDHQLEALGSRCSVLKEELKQEDAHRELREAQEKELKLCKTQIQDMEKEMKKLRAELRKSCTEQSVISRTLREKSKVEEKLQEDSRRKLLQLQEMGNRESVIKINLERAVGQLEHFRSQVIKATYGRAKPFRDKPVTDQQLIEKITQVTEDNINFQQKKWTLQKETQLSNSKQEETTENIEKLRTSLDSCQACMKISCCSHDLKKEVDLLQHLQVSPPVSGLQKVVLDVLRHALSWLEEVEQLLRDLGILPSSPNKGFSLYLIYLLEHYKKLMSQAQELQIKFNSSQETQQSLLQEKLREHLAEKEKLNEERLEQEEKLKAKIRQLTEEKAALEEYITQERNRAKETLEEERKRMQELESLLAQQKKALAKSITQEKNRVKEALEEEQTRVQELEERLARQKEISESNIAYEKRKAKEAMEKEKKKVQDLENRLTKQKEELELKEQKEDVLNNKLSDALAMVEETQKTKATESLKAESLALKLNETLAELETTKTKMIMVEERLILQQKMVKALQDEQESQRHGFEEEIMEYKEQIKQHAQTIVSLEEKLQKVTQHHKKIEGEIATLKDNDPAPKEERPQDPLVAPMTESSAKDMAYEHLIDDLLAAQKEILSQQEVIMKLRKDLTEAHSRMSDLRGELNEKQKMELEQNVVLVQQQSKELSVLKEKMAQMSSLVEKKDRELKALEEALRASQEKHRLQLNTEKEQKPRKKTQTCDTSVQIEPVHTEAFSSSQEQQSFSDLGVRCKGSRHEEVIQRQKKALSELRARIKELEKARSPDHKDHQNESFLDLKNLRMENNVQKILLDAKPDLPTLSRIEILAPQNGLCNARFGSAMEKSGKMDVAEALELSEKLYLDMSKTLGSLMNIKNMSGHVSMKYLSRQEREKVNQLRQRDLDLVFDKITQLKNQLGRKEELLRGYEKDVEQLRRSKVSIEMYQSQVAKLEDDIYKEAEEKALLKEALERMEHQLCQEKRINRAIRQQK

SEQ ID NO: 1945 - DNA, 3585 bp, Homo sapiens
ccatgtaagaagtgcttttcgcctcccaccatgattctgaggcctccccggccatgtggaactatcagtgccctacagaaaggctacagcaaggtgctgtgccagaccctgtcagagcggaactcagaaatcacatccctgaagaatgagggcgagaacttaaagagagacaacgctatcacatcagggatggtgtcatctttgcaaaaagacatattagcaaaggatgagcaagttcaacaactaaaggaagaggtcagtcacctaaaaagtcagaacaaggacaaggaccaccagctggaagcccttggctctagatgctcggtgctaaaggaagagttaaaacaggaagatgctcacagggagctcagggaagcccaggagaaagagttaaaactctgcaaaacccaaatccaagacatggagaaagaaatgaagaagcttagggcagagctgaggaagagttgtactgaacaaagcgtgatctctaggactctgagagaaaaaagcaaggttgaagagaagcttcaggaggattccagaaggaaattgcttcagctgcaagaaatggggaacagagagagcgtcattaaaatcaatttggagagggcagtaggtcagctggagcacttcagaagtcaagtcatcaaggccacctatggacgggcgaagccgttccgggacaagcccgtcaccgaccaacagttaatagagaaaattacccaggtcactgaggacaacatcaattttcagcagaaaaagtggaccctccagaaagagacccagctgagcaactccaagcaggaggagaccaccgagaacatcgagaagctgaggacgtcgctggacagctgccaggcttgcatgaaaatatcctgttgcagccatgacctgaagaaggaggtcgaccttcttcagcacctccaggtgagcccacctgtctcggggctccagaaggtggtgctggacgtcctgaggcacgcgctgtcctggctggaggaggtggagcagctcctccgggacctcgggatcctgccctccagccccaacaaagggttctctttgtatctgatatatcttctggaacattataaaaaacttatgagccaggcccaggaacttcagatcaagttcaacagttctcaggaaactcagcagtctttactgcaggaaaagctgcgggagcatctggcagagaaggagaagctgaacgaggagaggctagagcaagaggagaagctcaaagccaaaatcaggcaactgacggaagagaaggcggctttggaggagtacattactcaagagagaaacagagcgaaagagactttagaggaagaacggaagagaatgcaagaactggagagcctcctggcccagcagaagaaggctttggcgaaaagcattacccaggagaagaacagagtgaaggaagcattagaggaagagcagacaagagtccaagagctggaggaacgcttggcccgccagaaggagatctcagagagcaacattgcgtacgagaaacgcaaagcaaaggaggccatggagaaggaaaagaaaaaggtgcaagacctggagaatcgcttaaccaagcagaaagaggaattagaattaaaagagcaaaaagaggacgttttaaataataaattaagtgacgcactggccatggttgaagagactcagaaaacaaaggcaactgaaagtctaaaagcagagagcctcgccttgaaattaaatgaaacattagccgaactggaaactaccaagacaaaaatgatcatggtggaagagcggctaatcctgcagcagaagatggtaaaggccctccaggatgagcaggaatcacagagacacgggtttgaagaagagatcatggaatataaggagcaaatcaaacagcacgcccagacaattgtgagcctcgaagagaaactccagaaagtcactcagcaccataaaaaaatagaaggcgagattgcaacattgaaggacaatgacccagccccaaaggaggaaaggccgcaagaccctctggtggctcccatgacagagagcagtgccaaagacatggcgtacgaacatctgatagatgacttattggctgctcagaaggaaattctgtctcagcaggaagtcatcatgaagttaaggaaagaccttaccgaagcccacagcagaatgtcggatttgagaggggagctaaacgagaagcagaagatggaactggagcagaacgtggtgctggtccagcagcagagcaaggagctgagtgtgctcaaggagaagatggcccagatgagcagcctggtagaaaagaaagatcgggagctgaaggcccttgaggaggcactcagggcttcccaagagaaacacagactccagctgaacacagagaaggaacagaagccccggaagaagacccagacgtgtgacacctctgtgcagatagaacccgtccacactgaggccttctccagcagccaagagcagcaatccttcagcgatctaggggtcaggtgcaaagggtcccggcacgaggaggtcattcagcgtcagaaaaaggccttatctgaacttcgagcgcgaattaaagaactcgagaaggcgcgctcaccagatcataaagaccaccagaatgaatcatttctagatttaaagaacctcagaatggaaaacaatgtccagaaaatactactggatgcaaaaccggatttgccaactctctcaagaatagagatcctagcgcctcagaatggcctttgcaacgcaaggttcggctcagccatggagaagtcagggaagatggatgtggctgaggctttagagctcagtgaaaagctgtacctggatatgagcaaaaccctcggaagtctcatgaacatcaagaatatgtcaggccacgtgtccatgaaatacctctcccgccaggagagggagaaggtcaaccagcttcgacaaagggacctcgacctggtgtttgataagatcacccaactcaagaaccagctggggaggaaagaggagctgttgagaggatatgaaaaggacgttgaacagctcaggcggagcaaagtgtccattgagatgtaccagtcgcaggtggcaaagctggaggatgatatctacaaagaggccgaagagaaggccctgctgaaggaggccctggagcgcatggagcaccagctgtgccaggagaagaggatcaacagggccatccggcagcagaagtagatgggagcttccagcccctgcctcgcagacagatggtgaggatgaaagaatgcaggcatccctcgctatctgctgtccactctcgctgtcgtcatacctcaggagccaagtgcttttggatggttggaaccagaaaagcctccctaaagatggaccaagaaagagagatgctgaggaaagagacctccagcaagtccagccagagccttttgcattctaagcccagtggaaagtactagagaaacctcgtcccaccaggcctcatgtgatcctctgtgagttcatgtgactcttctgtgtcatctgtgtcaaaatactgagttgcttttgtaagtctttaaagattgttaccct

SEQ ID NO: 1946 - protein, 1066 aa, Homo sapiens; identical to SEQ ID NO: 1944

SEQ ID NO: 1947 - DNA, 4539 bp, Homo sapiens
ccatgtaagaagtgcttttcgcctcccaccatgattctgaggcctccccggccatgtggaactatcagtgccctacagaaaggctacagcaaggtgctgtgccagaccctgtcagagcggaactcagaaatcacatccctgaagaatgagggcgagaacttaaagagagacaacgctatcacatcagggatggtgtcatctttgcaaaaagacatattagcaaaggatgagcaagttcaacaactaaaggaagaggtcagtcacctaaaaagtcagaacaaggacaaggaccaccagctggaagcccttggctctagatgctcggtgctaaaggaagagttaaaacaggaagatgctcacagggagctcagggaagcccaggagaaagagttaaaactctgcaaaacccaaatccaagacatggagaaagaaatgaagaagcttagggcagagctgaggaagagttgtactgaacaaagcgtgatctctaggactctgagagaaaaaagcaaggttgaagagaagcttcaggaggattccagaaggaaattgcttcagctgcaagaaatggggaacagagagagcgtcattaaaatcaatttggagagggcagtaggtcagctggagcacttcagaagtcaagtcatcaaggccacctatggacgggcgaagccgttccgggacaagcccgtcaccgaccaacagttaatagagaaaattacccaggtcactgaggacaacatcaattttcagcagaaaaagtggaccctccagaaagagacccagctgagcaactccaagcaggaggagaccaccgagaacatcgagaagctgaggacgtcgctggacagctgccaggcttgcatgaaaatatcctgttgcagccatgacctgaagaaggaggtcgaccttcttcagcacctccaggtgagcccacctgtctcggggctccagaaggtggtgctggacgtcctgaggcacgcgctgtcctggctggaggaggtggagcagctcctccgggacctcgggatcctgccctccagccccaacaaagggttctctttgtatctgatatatcttctggaacattataaaaaacttatgagccaggcccaggaacttcagatcaagttcaacagttctcaggaaactcagcagtctttactgcaggaaaagctgcgggagcatctggcagagaaggagaagctgaacgaggagaggctagagcaagaggagaagctcaaagccaaaatcaggcaactgacggaagagaaggcggctttggaggagtacattactcaagagagaaacagagcgaaagagactttagaggaagaacggaagagaatgcaagaactggagagcctcctggcccagcagaagaaggctttggcgaaaagcattacccaggagaagaacagagtgaaggaagcattagaggaagagcagacaagagtccaagagctggaggaacgcttggcccgccagaaggagatctcagagagcaacattgcgtacgagaaacgcaaagcaaaggaggccatggagaaggaaaagaaaaaggtgcaagacctggagaatcgcttaaccaagcagaaagaggaattagaattaaaagagcaaaaagaggacgttttaaataataaattaagtgacgcactggccatggttgaagagactcagaaaacaaaggcaactgaaagtctaaaagcagagagcctcgccttgaaattaaatgaaacattagccgaactggaaactaccaagacaaaaatgatcatggtggaagagcggctaatcctgcagcagaagatggtaaaggccctccaggatgagcaggaatcacagagacacgggtttgaagaagagatcatggaatataaggagcaaatcaaacagcacgcccagacaattgtgagcctcgaagagaaactccagaaagtcactcagcaccataaaaaaatagaaggcgagattgcaacattgaaggacaatgacccagccccaaaggaggaaaggccgcaagaccctctggtggctcccatgacagagagcagtgccaaagacatggcgtacgaacatctgatagatgacttattggctgctcagaaggaaattctgtctcagcaggaagtcatcatgaagttaaggaaagaccttaccgaagcccacagcagaatgtcggatttgagaggggagctaaacgagaagcagaagatggaactggagcagaacgtggtgctggtccagcagcagagcaaggagctgagtgtgctcaaggagaagatggcccagatgagcagcctggtagaaaagaaagatcgggagctgaaggcccttgaggaggcactcagggcttcccaagagaaacacagactccagctgaacacagagaaggaacagaagccccggaagaagacccagacgtgtgacacctctgtgcagatagaacccgtccacactgaggccttctccagcagccaagagcagcaatccttcagcgatctaggggtcaggtgcaaagggtcccggcacgaggaggtcattcagcgtcagaaaaaggccttatctgaacttcgagcgcgaattaaagaactcgagaaggcgcgctcaccagatcataaagaccaccagaatgaatcatttctagatttaaagaacctcagaatggaaaacaatgtccagaaaatactactggatgcaaaaccggatttgccaactctctcaagaatagagatcctagcgcctcagaatggcctttgcaacgcaaggttcggctcagccatggagaagtcagggaagatggatgtggctgaggctttagagctcagtgaaaagctgtacctggatatgagcaaaaccctcggaagtctcatgaacatcaagaatatgtcaggccacgtgtccatgaaatacctctcccgccaggagagggagaaggtcaaccagcttcgacaaagggacctcgacctggtgtttgataagatcacccaactcaagaaccagctggggaggaaagaggagctgttgagaggatatgaaaaggacgttgaacagctcaggcggagcaaagtgtccattgagatgtaccagtcgcaggtggcaaagctggaggatgatatctacaaagaggccgaagagaaggccctgctgaaggaggccctggagcgcatggagcaccagctgtgccaggagaagaggatcaacagggccatccggcagcagaagatgaggaaactgcgcctcagagagttaagaggcgcccaagtgcacacagcggctggtaaggacagctgggacctgaccccagatccctctgaccctggttctcctgctgtctgcagggttggccgaaagtgtagaggagcacgaactgagaaacgcaaaagaatcgacaccttgcaactgtgccttcaaagagaaagacaggcaggccctgccccacctgcctgcagtttgaacggatgacctaagagacaagcacgcgtccagccccgtctgtccattaagagacgagtatttgtagagatggtgaagaacaggatgcagaactcaaattcccaggttggaaccagaaaagcctccctaaagatggaccaagaaagagagatgctgaggaaagagacctccagcaagtccagccagagccttttgcattctaagcccagtggaaagtactagagaaacctcgtcccaccaggcctcatgtgatcctctgtgagttcatgtgactcttctgtgtcatctgtgtcaaaatactgagttgcttttgtaagtctttaaagattgttaccctagtgtttcatttcctagaccagtattttgaacaatattatattttggagactgtggggagaagggttcttctttaaaaatacctatgaatgtacacgaactcaggtatatgaagaatagaagtgtgtaacccagatgtccaggcctggtagatataattatgtggtccacgttgggtcatgatgttcccaaatatcaaacctcctaagacttccaacagactcacacttgagaaaacctaagacttgtactggagcctcagggcagaattgtaaccttggagctctcagggccttgggatagtgaattcaagtctccgttatggcctggcaggatggctcatgcctgtaatctcagcactttgggaggccgaggcaggcggattataagatcaggagtttgagaccagcctggcaaacatagtgaatacctgtctctactaaaaatacaaaaattagccaggtgtggtggcacatgcctgtagtcccagctacacaggaggctgaggtgggagaatcacttgaacctaggaggcagaggttgcagtgagccaagaccacgccattgcacgccagcctaacagagtgagactctgtctttaaaaaaaaaaaaaaatggctgggcctgtaatcccagctactcgggaggctgagacaggagaatcacttcaacccgggaggtgatgattgcagggagccaagatcacacaactgcactctagcctgagtgacagagcaagactcc

SEQ ID NO: 1948 - protein, 1145 aa, Homo sapiens
MILRPPRPCGTISALQKGYSKVLCQTLSERNSEITSLKNEGENLKRDNAITSGMVSSLQKDILAKDEQVQQLKEEVSHLKSQNKDKDHQLEALGSRCSVLKEELKQEDAHRELREAQEKELKLCKTQIQDMEKEMKKLRAELRKSCTEQSVISRTLREKSKVEEKLQEDSRRKLLQLQEMGNRESVIKINLERAVGQLEHFRSQVIKATYGRAKPFRDKPVTDQQLIEKITQVTEDNINFQQKKWTLQKETQLSNSKQEETTENIEKLRTSLDSCQACMKISCCSHDLKKEVDLLQHLQVSPPVSGLQKVVLDVLRHALSWLEEVEQLLRDLGILPSSPNKGFSLYLIYLLEHYKKLMSQAQELQIKFNSSQETQQSLLQEKLREHLAEKEKLNEERLEQEEKLKAKIRQLTEEKAALEEYITQERNRAKETLEEERKRMQELESLLAQQKKALAKSITQEKNRVKEALEEEQTRVQELEERLARQKEISESNIAYEKRKAKEAMEKEKKKVQDLENRLTKQKEELELKEQKEDVLNNKLSDALAMVEETQKTKATESLKAESLALKLNETLAELETTKTKMIMVEERLILQQKMVKALQDEQESQRHGFEEEIMEYKEQIKQHAQTIVSLEEKLQKVTQHHKKIEGEIATLKDNDPAPKEERPQDPLVAPMTESSAKDMAYEHLIDDLLAAQKEILSQQEVIMKLRKDLTEAHSRMSDLRGELNEKQKMELEQNVVLVQQQSKELSVLKEKMAQMSSLVEKKDRELKALEEALRASQEKHRLQLNTEKEQKPRKKTQTCDTSVQIEPVHTEAFSSSQEQQSFSDLGVRCKGSRHEEVIQRQKKALSELRARIKELEKARSPDHKDHQNESFLDLKNLRMENNVQKILLDAKPDLPTLSRIEILAPQNGLCNARFGSAMEKSGKMDVAEALELSEKLYLDMSKTLGSLMNIKNMSGHVSMKYLSRQEREKVNQLRQRDLDLVFDKITQLKNQLGRKEELLRGYEKDVEQLRRSKVSIEMYQSQVAKLEDDIYKEAEEKALLKEALERMEHQLCQEKRINRAIRQQKMRKLRLRELRGAQVHTAAGKDSWDLTPDPSDPGSPAVCRVGRKCRGARTEKRKRIDTLQLCLQRERQAGPAPPACSLNG

SEQ ID NO: 1949 - DNA, 4203 bp, Homo sapiens
ccatgtaagaagtgcttttcgcctcccaccatgattctgaggcctccccggccatgtggaactatcagtgccctacagaaaggctacagcaaggtgctgtgccagaccctgtcagagcggaactcagaaatcacatccctgaagaatgagggcgagaacttaaagagagacaacgctatcacatcagggatggtgtcatctttgcaaaaagacatattagcaaaggatgagcaagttcaacaactaaaggaagaggtcagtcacctaaaaagtcagaacaaggacaaggaccaccagctggaagcccttggctctagatgctcggtgctaaaggaagagttaaaacaggaagatgctcacagggagctcagggaagcccaggagaaagagttaaaactctgcaaaacccaaatccaagacatggagaaagaaatgaagaagcttagggcagagctgaggaagagttgtactgaacaaagcgtgatctctaggactctgagagaaaaaagcaaggttgaagagaagcttcaggaggattccagaaggaaattgcttcagctgcaagaaatggggaacagagagagcgtcattaaaatcaatttggagagggcagtaggtcagctggagcacttcagaagtcaagtcatcaaggccacctatggacgggcgaagccgttccgggacaagcccgtcaccgaccaacagttaatagagaaaattacccaggtcactgaggacaacatcaattttcagcagaaaaagtggaccctccagaaagagacccagctgagcaactccaagcaggaggagaccaccgagaacatcgagaagctgaggacgtcgctggacagctgccaggcttgcatgaaaatatcctgttgcagccatgacctgaagaaggaggtcgaccttcttcagcacctccaggtgagcccacctgtctcggggctccagaaggtggtgctggacgtcctgaggcacgcgctgtcctggctggaggaggtggagcagctcctccgggacctcgggatcctgccctccagccccaacaaagggttctctttgtatctgatatatcttctggaacattataaaaaacttatgagccaggcccaggaacttcagatcaagttcaacagttctcaggaaactcagcagtctttactgcaggaaaagctgcgggagcatctggcagagaaggagaagctgaacgaggagaggctagagcaagaggagaagctcaaagccaaaatcaggcaactgacggaagagaaggcggctttggaggagtacattactcaagagagaaacagagcgaaagagactttagaggaagaacggaagagaatgcaagaactggagagcctcctggcccagcagaagaaggctttggcgaaaagcattacccaggagaagaacagagtgaaggaagcattagaggaagagcagacaagagtccaagagctggaggaacgcttggcccgccagaaggagatctcagagagcaacattgcgtacgagaaacgcaaagcaaaggaggccatggagaaggaaaagaaaaaggtgcaagacctggagaatcgcttaaccaagcagaaagaggaattagaattaaaagagcaaaaagaggacgttttaaataataaattaagtgacgcactggccatggttgaagagactcagaaaacaaaggcaactgaaagtctaaaagcagagagcctcgccttgaaattaaatgaaacattagccgaactggaaactaccaagacaaaaatgatcatggtggaagagcggctaatcctgcagcagaagatggtaaaggccctccaggatgagcaggaatcacagagacacgggtttgaagaagagatcatggaatataaggagcaaatcaaacagcacgcccagacaattgtgagcctcgaagagaaactccagaaagtcactcagcaccataaaaaaatagaaggcgagattgcaacattgaaggacaatgacccagccccaaaggaggaaaggccgcaagaccctctggtggctcccatgacagagagcagtgccaaagacatggcgtacgaacatctgatagatgacttattggctgctcagaaggaaattctgtctcagcaggaagtcatcatgaagttaaggaaagaccttaccgaagcccacagcagaatgtcggatttgagaggggagctaaacgagaagcagaagatggaactggagcagaacgtggtgctggtccagcagcagagcaaggagctgagtgtgctcaaggagaagatggcccagatgagcagcctggtagaaaagaaagatcgggagctgaaggcccttgaggaggcactcagggcttcccaagagaaacacagactccagctgaacacagagaaggaacagaagccccggaagaagacccagacgtgtgacacctctgtgcagatagaacccgtccacactgaggccttctccagcagccaagagcagcaatccttcagcgatctaggggtcaggtgcaaagggtcccggcacgaggaggtcattcagcgtcagaaaaaggccttatctgaacttcgagcgcgaattaaagaactcgagaaggcgcgctcaccagatcataaagaccaccagaatgaatcatttctagatttaaagaacctcagaatggaaaacaatgtccagaaaatactactggatgcaaaaccggatttgccaactctctcaagaatagagatcctagcgcctcagaatggcctttgcaacgcaaggttcggctcagccatggagaagtcagggaagatggatgtggctgaggctttagagctcagtgaaaagctgtacctggatatgagcaaaaccctcggaagtctcatgaacatcaagaatatgtcaggccacgtgtccatgaaatacctctcccgccaggagagggagaaggtcaaccagcttcgacaaagggacctcgacctggtgtttgataagatcacccaactcaagaaccagctggggaggaaagaggagctgttgagaggatatgaaaaggacgttgaacagctcaggcggagcaaagtgtccattgagatgtaccagtcgcaggtggcaaagctggaggatgatatctacaaagaggccgaagagaaggccctgctgaaggaggccctggagcgcatggagcaccagctgtgccaggagaagaggatcaacagggccatccggcagcagaaggttggaaccagaaaagcctccctaaagatggaccaagaaagagagatgctgaggaaagagacctccagcaagtccagccagagccttttgcattctaagcccagtggaaagtactagagaaacctcgtcccaccaggcctcatgtgatcctctgtgagttcatgtgactcttctgtgtcatctgtgtcaaaatactgagttgcttttgtaagtctttaaagattgttaccctagtgtttcatttcctagaccagtattttgaacaatattatattttggagactgtggggagaagggttcttctttaaaaatacctatgaatgtacacgaactcaggtatatgaagaatagaagtgtgtaacccagatgtccaggcctggtagatataattatgtggtccacgttgggtcatgatgttcccaaatatcaaacctcctaagacttccaacagactcacacttgagaaaacctaagacttgtactggagcctcagggcagaattgtaaccttggagctctcagggccttgggatagtgaattcaagtctccgttatggcctggcaggatggctcatgcctgtaatctcagcactttgggaggccgaggcaggcggattataagatcaggagtttgagaccagcctggcaaacatagtgaatacctgtctctactaaaaatacaaaaattagccaggtgtggtggcacatgcctgtagtcccagctacacaggaggctgaggtgggagaatcacttgaacctaggaggcagaggttgcagtgagccaagaccacgccattgcacgccagcctaacagagtgagactctgtctttaaaaaaaaaaaaaaatggctgggcctgtaatcccagctactcgggaggctgagacaggagaatcacttcaacccgggaggtgatgattgcagggagccaagatcacacaactgcactctagcctgagtgacagagcaagactcc

SEQ ID NO: 1950 - protein, 1104 aa, Homo sapiens
MILRPPRPCGTISALQKGYSKVLCQTLSERNSEITSLKNEGENLKRDNAITSGMVSSLQKDILAKDEQVQQLKEEVSHLKSQNKDKDHQLEALGSRCSVLKEELKQEDAHRELREAQEKELKLCKTQIQDMEKEMKKLRAELRKSCTEQSVISRTLREKSKVEEKLQEDSRRKLLQLQEMGNRESVIKINLERAVGQLEHFRSQVIKATYGRAKPFRDKPVTDQQLIEKITQVTEDNINFQQKKWTLQKETQLSNSKQEETTENIEKLRTSLDSCQACMKISCCSHDLKKEVDLLQHLQVSPPVSGLQKVVLDVLRHALSWLEEVEQLLRDLGILPSSPNKGFSLYLIYLLEHYKKLMSQAQELQIKFNSSQETQQSLLQEKLREHLAEKEKLNEERLEQEEKLKAKIRQLTEEKAALEEYITQERNRAKETLEEERKRMQELESLLAQQKKALAKSITQEKNRVKEALEEEQTRVQELEERLARQKEISESNIAYEKRKAKEAMEKEKKKVQDLENRLTKQKEELELKEQKEDVLNNKLSDALAMVEETQKTKATESLKAESLALKLNETLAELETTKTKMIMVEERLILQQKMVKALQDEQESQRHGFEEEIMEYKEQIKQHAQTIVSLEEKLQKVTQHHKKIEGEIATLKDNDPAPKEERPQDPLVAPMTESSAKDMAYEHLIDDLLAAQKEILSQQEVIMKLRKDLTEAHSRMSDLRGELNEKQKMELEQNVVLVQQQSKELSVLKEKMAQMSSLVEKKDRELKALEEALRASQEKHRLQLNTEKEQKPRKKTQTCDTSVQIEPVHTEAFSSSQEQQSFSDLGVRCKGSRHEEVIQRQKKALSELRARIKELEKARSPDHKDHQNESFLDLKNLRMENNVQKILLDAKPDLPTLSRIEILAPQNGLCNARFGSAMEKSGKMDVAEALELSEKLYLDMSKTLGSLMNIKNMSGHVSMKYLSRQEREKVNQLRQRDLDLVFDKITQLKNQLGRKEELLRGYEKDVEQLRRSKVSIEMYQSQVAKLEDDIYKEAEEKALLKEALERMEHQLCQEKRINRAIRQQKVGTRKASLKMDQEREMLRKETSSKSSQSLLHSKPSGKY

SEQ ID NO: 1951 - DNA, 3984 bp, Homo sapiens
ccatgtaagaagtgcttttcgcctcccaccatgattctgaggcctccccggccatgtggaactatcagtgccctacagaaaggctacagcaaggtgctgtgccagaccctgtcagagcggaactcagaaatcacatccctgaagaatgagggcgagaacttaaagagagacaacgctatcacatcagggatggtgtcatctttgcaaaaagacatattagcaaaggatgagcaagttcaacaactaaaggaagaggtcagtcacctaaaaagtcagaacaaggacaaggaccaccagctggaagcccttggctctagatgctcggtgctaaaggaagagttaaaacaggaagatgctcacagggagctcagggaagcccaggagaaagagttaaaactctgcaaaacccaaatccaagacatggagaaagaaatgaagaagcttagggcagagctgaggaagagttgtactgaacaaagcgtgatctctaggactctgagagaaaaaagcaaggttgaagagaagcttcaggaggattccagaaggaaattgcttcagctgcaagaaatggggaacagagagagcgtcattaaaatcaatttggagagggcagtaggtcagctggagcacttcagaagtcaagtcatcaaggccacctatggacgggcgaagccgttccgggacaagcccgtcaccgaccaacagttaatagagaaaattacccaggtcactgaggacaacatcaattttcagcagaaaaagtggaccctccagaaagagacccagctgagcaactccaagcaggaggagaccaccgagaacatcgagaagctgaggacgtcgctggacagctgccaggcttgcatgaaaatatcctgttgcagccatgacctgaagaaggaggtcgaccttcttcagcacctccaggtgagcccacctgtctcggggctccagaaggtggtgctggacgtcctgaggcacgcgctgtcctggctggaggaggtggagcagctcctccgggacctcgggatcctgccctccagccccaacaaagggttctctttgtatctgatatatcttctggaacattataaaaaacttatgagccaggcccaggaacttcagatcaagttcaacagttctcaggaaactcagcagtctttactgcaggaaaagctgcgggagcatctggcagagaaggagaagctgaacgaggagaggctagagcaagaggagaagctcaaagccaaaatcaggcaactgacggaagagaaggcggctttggaggagtacattactcaagagagaaacagagcgaaagagactttagaggaagaacggaagagaatgcaagaactggagagcctcctggcccagcagaagaaggctttggcgaaaagcattacccaggagaagaacagagtgaaggaagcattagaggaagagcagacaagagtccaagagctggaggaacgcttggcccgccagaaggagatctcagagagcaacattgcgtacgagaaacgcaaagcaaaggaggccatggagaaggaaaagaaaaaggtgcaagacctggagaatcgcttaaccaagcagaaagaggaattagaattaaaagagcaaaaagaggacgttttaaataataaattaagtgacgcactggccatggttgaagagactcagaaaacaaaggcaactgaaagtctaaaagcagagagcctcgccttgaaattaaatgaaacattagccgaactggaaactaccaagacaaaaatgatcatggtggaagagcggctaatcctgcagcagaagatggtaaaggccctccaggatgagcaggaatcacagagacacgggtttgaagaagagatcatggaatataaggagcaaatcaaacagcacgcccagacaattgtgagcctcgaagagaaactccagaaagtcactcagcaccataaaaaaatagaaggcgagattgcaacattgaaggacaatgacccagccccaaaggaggaaaggccgcaagaccctctggtggctcccatgacagagagcagtgccaaagacatggcgtacgaacatctgatagatgacttattggctgctcagaaggaaattctgtctcagcaggaagtcatcatgaagttaaggaaagaccttaccgaagcccacagcagaatgtcggatttgagaggggagctaaacgagaagcagaagatggaactggagcagaacgtggtgctggtccagcagcagagcaaggagctgagtgtgctcaaggagaagatggcccagatgagcagcctggtagaaaagaaagatcgggagctgaaggcccttgaggaggcactcagggcttcccaagagaaacacagactccagctgaacacagagaaggaacagaagccccggaagaagacccagacgtgtgacacctctgtgcagatagaacccgtccacactgaggccttctccagcagccaagagcagcaatccttcagcgatctaggggtcaggtgcaaagggtcccggcacgaggaggtcattcagcgtcagaaaaaggccttatctgaacttcgagcgcgaattaaagaactcgagaaggcgcgctcaccagatcataaagaccaccagaatgaatcatttctagatttaaagaacctcagaatggaaaacaatgtccagaaaatactactggatgcaaaaccggatttgccaactctctcaagaatagagatcctagcgcctcagaatggcctttgcaacgcaaggttcggctcagccatggagaagtcagggaagatggatgtggctgaggctttagagctcagtgaaaagctgtacctggatatgagcaaaaccctcggaagtctcatgaacatcaagaatatgtcaggccacgtgtccatgaaatacctctcccgccaggagagggagaaggtcaaccagcttcgacaaagggacctcgacctggtgtttgataagatcacccaactcaagaaccagctggggaggaaagaggagctgttgagaggatatgaaaaggacgttgaacagctcaggcggagcaaagtgtccattgagatgtaccagtcgcaggtggcaaagctggaggatgatatctacaaagaggccgaagagaaggccctgctgaaggaggccctggagcgcatggagcaccagctgtgccaggagaagaggatcaacagggccatccggcagcagaaggaaagtgtagaggagcacgaactgagaaacgcaaaagaatcgacaccttgcaactgtgccttcaaagagaaagacaggcaggccctgccccacctgcctgcagtttgaacggatgacctaagagacaagcacgcgtccagccccgtctgtccattaagagtcttgctctattgcccaggctagagtgcagtggtgcaatttcggctcactgcaacctccacctcccaggttcaagcgattctcctgcctcagcctcccgagtagctgggactacaggttggaaccagaaaagcctccctaaagatggaccaagaaagagagatgctgaggaaagagacctccagcaagtccagccagagccttttgcattctaagcccagtggaaagtactagagaaacctcgtcccaccaggcctcatgtgatcctctctaggacgggccatgttggaccaatctggctaatgacatataaggaaaagctcctgtggagggcttcccttccagcttctctaggtgaaagcattcacccttggtacctttgtcttgtctcctttctcactcctggagctcagaccagaagctggagcagccaccttggggatcagcagacaccagcagcaggccaaaggatagtggagtggagggacaagaaggcctgggtgagccttctctgagaatcactgagctctgaaccatgaatgaactgcctacctctgtacttcctgttgtataggacaaagaaatccctatctattt

SEQ ID NO: 1952 - protein, 1101 aa, Homo sapiens
MILRPPRPCGTISALQKGYSKVLCQTLSERNSEITSLKNEGENLKRDNAITSGMVSSLQKDILAKDEQVQQLKEEVSHLKSQNKDKDHQLEALGSRCSVLKEELKQEDAHRELREAQEKELKLCKTQIQDMEKEMKKLRAELRKSCTEQSVISRTLREKSKVEEKLQEDSRRKLLQLQEMGNRESVIKINLERAVGQLEHFRSQVIKATYGRAKPFRDKPVTDQQLIEKITQVTEDNINFQQKKWTLQKETQLSNSKQEETTENIEKLRTSLDSCQACMKISCCSHDLKKEVDLLQHLQVSPPVSGLQKVVLDVLRHALSWLEEVEQLLRDLGILPSSPNKGFSLYLIYLLEHYKKLMSQAQELQIKFNSSQETQQSLLQEKLREHLAEKEKLNEERLEQEEKLKAKIRQLTEEKAALEEYITQERNRAKETLEEERKRMQELESLLAQQKKALAKSITQEKNRVKEALEEEQTRVQELEERLARQKEISESNIAYEKRKAKEAMEKEKKKVQDLENRLTKQKEELELKEQKEDVLNNKLSDALAMVEETQKTKATESLKAESLALKLNETLAELETTKTKMIMVEERLILQQKMVKALQDEQESQRHGFEEEIMEYKEQIKQHAQTIVSLEEKLQKVTQHHKKIEGEIATLKDNDPAPKEERPQDPLVAPMTESSAKDMAYEHLIDDLLAAQKEILSQQEVIMKLRKDLTEAHSRMSDLRGELNEKQKMELEQNVVLVQQQSKELSVLKEKMAQMSSLVEKKDRELKALEEALRASQEKHRLQLNTEKEQKPRKKTQTCDTSVQIEPVHTEAFSSSQEQQSFSDLGVRCKGSRHEEVIQRQKKALSELRARIKELEKARSPDHKDHQNESFLDLKNLRMENNVQKILLDAKPDLPTLSRIEILAPQNGLCNARFGSAMEKSGKMDVAEALELSEKLYLDMSKTLGSLMNIKNMSGHVSMKYLSRQEREKVNQLRQRDLDLVFDKITQLKNQLGRKEELLRGYEKDVEQLRRSKVSIEMYQSQVAKLEDDIYKEAEEKALLKEALERMEHQLCQEKRINRAIRQQKESVEEHELRNAKESTPCNCAFKEKDRQALPHLPAV

SEQ ID NO: 1953 - DNA, 3931 bp, Homo sapiens
gtaagaagtgcttttcgcctcccaccatgattctgaggcctccccggccatgtggaactatcagtgccctacagaaaggctacagcaaggtgctgtgccagaccctgtcagagcggaactcagaaatcacatccctgaagaatgagggcgagaacttaaagagagacaacgctatcacatcagggatggtgtcatctttgcaaaaagacatattagcaaaggatgagcaagttcaacaactaaaggaagaggtcagtcacctaaaaagtcagaacaaggacaaggaccaccagctggaagcccttggctctagatgctcggtgctaaaggaagagttaaaacaggaagatgctcacagggagctcagggaagcccaggagaaagagttaaaactctgcaaaacccaaatccaagacatggagaaagaaatgaagaagcttagggcagagctgaggaagagttgtactgaacaaagcgtgatctctaggactctgagagaaaaaagcaaggttgaagagaagcttcaggaggattccagaaggaaattgcttcagctgcaagaaatggggaacagagagagcgtcattaaaatcaatttggagagggcagtaggtcagctggagcacttcagaagtcaagtcatcaaggccacctatggacgggcgaagccgttccgggacaagcccgtcaccgaccaacagttaatagagaaaattacccaggtcactgaggacaacatcaattttcagcagaaaaagtggaccctccagaaagagacccagctgagcaactccaagcaggaggagaccaccgagaacatcgagaagctgaggacgtcgctggacagctgccaggcttgcatgaaaatatcctgttgcagccatgacctgaagaaggaggtcgaccttcttcagcacctccaggtgagcccacctgtctcggggctccagaaggtggtgctggacgtcctgaggcacgcgctgtcctggctggaggaggtggagcagctcctccgggacctcgggatcctgccctccagccccaacaaagggttctctttgtatctgatatatcttctggaacattataaaaaacttatgagccaggcccaggaacttcagatcaagttcaacagttctcaggaaactcagcagtctttactgcaggaaaagctgcgggagcatctggcagagaaggagaagctgaacgaggagaggctagagcaagaggagaagctcaaagccaaaatcaggcaactgacggaagagaaggcggctttggaggagtacattactcaagagagaaacagagcgaaagagactttagaggaagaacggaagagaatgcaagaactggagagcctcctggcccagcagaagaaggctttggcgaaaagcattacccaggagaagaacagagtgaaggaagcattagaggaagagcagacaagagtccaagagctggaggaacgcttggcccgccagaaggaggttttggagagcagcatagcccatgaaaaaagaaaagcaaaggaagccttggagtcggaaaagagaaaagttcaggatctggagaaccatttaacccaacagaaggagatctcagagagcaacattgcgtacgagaaacgcaaagcaaaggaggccatggagaaggaaaagaaaaaggtgcaagacctggagaatcgcttaaccaagcagaaagaggaattagaattaaaagagcaaaaagaggacgttttaaataataaattaagtgacgcactggccatggttgaagagactcagaaaacaaaggcaactgaaagtctaaaagcagagagcctcgccttgaaattaaatgaaacattagccgaactggaaactaccaagacaaaaatgatcatggtggaagagcggctaatcctgcagcagaagatggtaaaggccctccaggatgagcaggaatcacagagacacgggtttgaagaagagatcatggaatataaggagcaaatcaaacagcacgcccagacaattgtgagcctcgaagagaaactccagaaagtcactcagcaccataaaaaaatagaaggcgagattgcaacattgaaggacaatgacccagccccaaaggaggaaaggccgcaagaccctctggtggctcccatgacagagagcagtgccaaagacatggcgtacgaacatctgatagatgacttattggctgctcagaaggaaattctgtctcagcaggaagtcatcatgaagttaaggaaagaccttaccgaagcccacagcagaatgtcggatttgagaggggagctaaacgagaagcagaagatggaactggagcagaacgtggtgctggtccagcagcagagcaaggagctgagtgtgctcaaggagaagatggcccagatgagcagcctggtagaaaagaaagatcgggagctgaaggcccttgaggaggcactcagggcttcccaagagaaacacagactccagctgaacacagagaaggaacagaagccccggaagaagacccagacgtgtgacacctctgtgcagatagaacccgtccacactgaggccttctccagcagccaagagcagcaatccttcagcgatctaggggtcaggtgcaaagggtcccggcacgaggaggtcattcagcgtcagaaaaaggccttatctgaacttcgagcgcgaattaaagaactcgagaaggcgcgctcaccagatcataaagaccaccagaatgaatcatttctagatttaaagaacctcagaatggaaaacaatgtccagaaaatactactggatgcaaaaccggatttgccaactctctcaagaatagagatcctagcgcctcagaatggcctttgcaacgcaaggttcggctcagccatggagaagtcagggaagatggatgtggctgaggctttagagctcagtgaaaagctgtacctggatatgagcaaaaccctcggaagtctcatgaacatcaagaatatgtcaggccacgtgtccatgaaatacctctcccgccaggagagggagaaggtcaaccagcttcgacaaagggacctcgacctggtgtttgataagatcacccaactcaagaaccagctggggaggaaagaggagctgttgagaggatatgaaaaggacgttgaacagctcaggcggagcaaagtgtccattgagatgtaccagtcgcaggtggcaaagctggaggatgatatctacaaagaggccgaagagaaggccctgctgaaggaggccctggagcgcatggagcaccagctgtgccaggagaagaggatcaacagggccatccggcagcagaagtagatgggagcttccagcccctgcctcgcagacagatggtgaggatgaaagaatgcaggcatccctcgctatctgctgtccactctcgctgtcgtcatacctcaggagccaagtgcttttggatggtgagggtgcttgtcccgtctctgaagcacctgcccagggcctggcaccagccggcggacactgccttccccatgctgcccatgacccatgctgcccgtgacccatgcaggtggtctcctgggaaagtgtagaggagcacgaactgagaaacgcaaaagaatcgacaccttgcaactgtgccttcaaagagaaagacaggcagagacgagtatttgtagagatggtgaagaacaggatgcagaactcaaattcccaggttggaaccagaaaagcctccctaaagatggaccaagaaagagagatgctgaggaaagagacctccagcaagtccagccagagccttttgcattctaagcccagtggaaagtactagagaaacctcgtcccaccaggcctcatgtgatcctctgtgagttcatgtgactcttctgtgtcatctgtgtcaaaatactgagttgcttttgtaagtcttt

SEQ ID NO: 1954 - protein, 1102 aa, Homo sapiens
MILRPPRPCGTISALQKGYSKVLCQTLSERNSEITSLKNEGENLKRDNAITSGMVSSLQKDILAKDEQVQQLKEEVSHLKSQNKDKDHQLEALGSRCSVLKEELKQEDAHRELREAQEKELKLCKTQIQDMEKEMKKLRAELRKSCTEQSVISRTLREKSKVEEKLQEDSRRKLLQLQEMGNRESVIKINLERAVGQLEHFRSQVIKATYGRAKPFRDKPVTDQQLIEKITQVTEDNINFQQKKWTLQKETQLSNSKQEETTENIEKLRTSLDSCQACMKISCCSHDLKKEVDLLQHLQVSPPVSGLQKVVLDVLRHALSWLEEVEQLLRDLGILPSSPNKGFSLYLIYLLEHYKKLMSQAQELQIKFNSSQETQQSLLQEKLREHLAEKEKLNEERLEQEEKLKAKIRQLTEEKAALEEYITQERNRAKETLEEERKRMQELESLLAQQKKALAKSITQEKNRVKEALEEEQTRVQELEERLARQKEVLESSIAHEKRKAKEALESEKRKVQDLENHLTQQKEISESNIAYEKRKAKEAMEKEKKKVQDLENRLTKQKEELELKEQKEDVLNNKLSDALAMVEETQKTKATESLKAESLALKLNETLAELETTKTKMIMVEERLILQQKMVKALQDEQESQRHGFEEEIMEYKEQIKQHAQTIVSLEEKLQKVTQHHKKIEGEIATLKDNDPAPKEERPQDPLVAPMTESSAKDMAYEHLIDDLLAAQKEILSQQEVIMKLRKDLTEAHSRMSDLRGELNEKQKMELEQNVVLVQQQSKELSVLKEKMAQMSSLVEKKDRELKALEEALRASQEKHRLQLNTEKEQKPRKKTQTCDTSVQIEPVHTEAFSSSQEQQSFSDLGVRCKGSRHEEVIQRQKKALSELRARIKELEKARSPDHKDHQNESFLDLKNLRMENNVQKILLDAKPDLPTLSRIEILAPQNGLCNARFGSAMEKSGKMDVAEALELSEKLYLDMSKTLGSLMNIKNMSGHVSMKYLSRQEREKVNQLRQRDLDLVFDKITQLKNQLGRKEELLRGYEKDVEQLRRSKVSIEMYQSQVAKLEDDIYKEAEEKALLKEALERMEHQLCQEKRINRAIRQQK

SEQ ID NO: 1955 - DNA, 3822 bp, Homo sapiens
taagaagtgcttttcgcctcccaccatgattctgaggcctccccggccatgtggaactatcagtgccctacagaaaggctacagcaaggtgctgtgccagaccctgtcagagcggaactcagaaatcacatccctgaagaatgagggcgagaacttaaagagagacaacgctatcacatcagggatggtgtcatctttgcaaaaagacatattagcaaaggatgagcaagttcaacaactaaaggaagaggtcagtcacctaaaaagtcagaacaaggacaaggaccaccagctggaagcccttggctctagatgctcggtgctaaaggaagagttaaaacaggaagatgctcacagggagctcagggaagcccaggagaaagagttaaaactctgcaaaacccaaatccaagacatggagaaagaaatgaagaagcttagggcagagctgaggaagagttgtactgaacaaagcgtgatctctaggactctgagagaaaaaagcaagctggagcacttcagaagtcaagtcatcaaggccacctatggacgggcgaagccgttccgggacaagcccgtcaccgaccaacagttaatagagaaaattacccaggtcactgaggacaacatcaattttcagcagaaaaagtggaccctccagaaagagacccagctgagcaactccaagcaggaggagaccaccgagaacatcgagaagctgaggacgtcgctggacagctgccaggcttgcatgaaaatatcctgttgcagccatgacctgaagaaggaggtcgaccttcttcagcacctccaggtgagcccacctgtctcggggctccagaaggtggtgctggacgtcctgaggcacgcgctgtcctggctggaggaggtggagcagctcctccgggacctcgggatcctgccctccagccccaacaaagggttctctttgtatctgatatatcttctggaacattataaaaaacttatgagccaggcccaggaacttcagatcaagttcaacagttctcaggaaactcagcagtctttactgcaggaaaagctgcgggagcatctggcagagaaggagaagctgaacgaggagaggctagagcaagaggagaagctcaaagccaaaatcaggcaactgacggaagagaaggcggctttggaggagtacattactcaagagagaaacagagcgaaagagactttagaggaagaacggaagagaatgcaagaactggagagcctcctggcccagcagaagaaggctttggcgaaaagcattacccaggagaagaacagagtgaaggaagcattagaggaagagcagacaagagtccaagagctggaggaacgcttggcccgccagaaggaggttttggagagcagcatagcccatgaaaaaagaaaagcaaaggaagccttggagtcggaaaagagaaaagttcaggatctggagaaccatttaacccaacagaaggagatctcagagagcaacattgcgtacgagaaacgcaaagcaaaggaggccatggagaaggaaaagaaaaaggtgcaagacctggagaatcgcttaaccaagcagaaagaggaattagaattaaaagagcaaaaagaggacgttttaaataataaattaagtgacgcactggccatggttgaagagactcagaaaacaaaggcaactgaaagtctaaaagcagagagcctcgccttgaaattaaatgaaacattagccgaactggaaactaccaagacaaaaatgatcatggtggaagagcggctaatcctgcagcagaagatggtaaaggccctccaggatgagcaggaatcacagagacacgggtttgaagaagagatcatggaatataaggagcaaatcaaacagcacgcccagacaattgtgagcctcgaagagaaactccagaaagtcactcagcaccataaaaaaatagaaggcgagattgcaacattgaaggacaatgacccagccccaaaggaggaaaggccgcaagaccctctggtggctcccatgacagagagcagtgccaaagacatggcgtacgaacatctgatagatgacttattggctgctcagaaggaaattctgtctcagcaggaagtcatcatgaagttaaggaaagaccttaccgaagcccacagcagaatgtcggatttgagaggggagctaaacgagaagcagaagatggaactggagcagaacgtggtgctggtccagcagcagagcaaggagctgagtgtgctcaaggagaagatggcccagatgagcagcctggtagaaaagaaagatcgggagctgaaggcccttgaggaggcactcagggcttcccaagagaaacacagactccagctgaacacagagaaggaacagaagccccggaagaagacccagacgtgtgacacctctgtgcagatagaacccgtccacactgaggccttctccagcagccaagagcagcaatccttcagcgatctaggggtcaggtgcaaagggtcccggcacgaggaggtcattcagcgtcagaaaaaggccttatctgaacttcgagcgcgaattaaagaactcgagaaggcgcgctcaccagatcataaagaccaccagaatgaatcatttctagatttaaagaacctcagaatggaaaacaatgtccagaaaatactactggatgcaaaaccggatttgccaactctctcaagaatagagatcctagcgcctcagaatggcctttgcaacgcaaggttcggctcagccatggagaagtcagggaagatggatgtggctgaggctttagagctcagtgaaaagctgtacctggatatgagcaaaaccctcggaagtctcatgaacatcaagaatatgtcaggccacgtgtccatgaaatacctctcccgccaggagagggagaaggtcaaccagcttcgacaaagggacctcgacctggtgtttgataagatcacccaactcaagaaccagctggggaggaaagaggagctgttgagaggatatgaaaaggacgttgaacagctcaggcggagcaaagtgtccattgagatgtaccagtcgcaggtggcaaagctggaggatgatatctacaaagaggccgaagagaaggccctgctgaaggaggccctggagcgcatggagcaccagctgtgccaggagaagaggatcaacagggccatccggcagcagaagtagatgggagcttccagcccctgcctcgcagacagatggtgaggatgaaagaatgcaggcatccctcgctatctgctgtccactctcgctgtcgtcatacctcaggagccaagtgcttttggatggtgagggtgcttgtcccgtctctgaagcacctgcccagggcctggcaccagccggcggacactgccttccccatgctgcccatgacccatgctgcccgtgacccatgcaggtggtctcctgggaaagtgtagaggagcacgaactgagaaacgcaaaagaatcgacaccttgcaactgtgccttcaaagagaaagacaggcagagacgagtatttgtagagatggtgaagaacaggatgcagaactcaaattcccaggttggaaccagaaaagcctccctaaagatggaccaagaaagagagatgctgaggaaagagacctccagcaagtccagccagagccttttgcattctaagcccagtggaaagtactagagaaacctcgtcccaccaggcctcatgtgatcctctgtgagttcatgtgactcttctgtgtcatctgtgtcaaaatactgagttgcttttgtaagtcttt

SEQ ID NO: 1956 - protein, 1066 aa, Homo sapiens
MILRPPRPCGTISALQKGYSKVLCQTLSERNSEITSLKNEGENLKRDNAITSGMVSSLQKDILAKDEQVQQLKEEVSHLKSQNKDKDHQLEALGSRCSVLKEELKQEDAHRELREAQEKELKLCKTQIQDMEKEMKKLRAELRKSCTEQSVISRTLREKSKLEHFRSQVIKATYGRAKPFRDKPVTDQQLIEKITQVTEDNINFQQKKWTLQKETQLSNSKQEETTENIEKLRTSLDSCQACMKISCCSHDLKKEVDLLQHLQVSPPVSGLQKVVLDVLRHALSWLEEVEQLLRDLGILPSSPNKGFSLYLIYLLEHYKKLMSQAQELQIKFNSSQETQQSLLQEKLREHLAEKEKLNEERLEQEEKLKAKIRQLTEEKAALEEYITQERNRAKETLEEERKRMQELESLLAQQKKALAKSITQEKNRVKEALEEEQTRVQELEERLARQKEVLESSIAHEKRKAKEALESEKRKVQDLENHLTQQKEISESNIAYEKRKAKEAMEKEKKKVQDLENRLTKQKEELELKEQKEDVLNNKLSDALAMVEETQKTKATESLKAESLALKLNETLAELETTKTKMIMVEERLILQQKMVKALQDEQESQRHGFEEEIMEYKEQIKQHAQTIVSLEEKLQKVTQHHKKIEGEIATLKDNDPAPKEERPQDPLVAPMTESSAKDMAYEHLIDDLLAAQKEILSQQEVIMKLRKDLTEAHSRMSDLRGELNEKQKMELEQNVVLVQQQSKELSVLKEKMAQMSSLVEKKDRELKALEEALRASQEKHRLQLNTEKEQKPRKKTQTCDTSVQIEPVHTEAFSSSQEQQSFSDLGVRCKGSRHEEVIQRQKKALSELRARIKELEKARSPDHKDHQNESFLDLKNLRMENNVQKILLDAKPDLPTLSRIEILAPQNGLCNARFGSAMEKSGKMDVAEALELSEKLYLDMSKTLGSLMNIKNMSGHVSMKYLSRQEREKVNQLRQRDLDLVFDKITQLKNQLGRKEELLRGYEKDVEQLRRSKVSIEMYQSQVAKLEDDIYKEAEEKALLKEALERMEHQLCQEKRINRAIRQQK

SEQ ID NO: 1957 - DNA, 575 bp, Homo sapiens
agcattagaggaagagcagacaagagtccaagagctggaggaacgcttggcccgccagaaggaggtacgctcggggagatagagtcggctgagccccagtcggcttgagggccatgtggaaggaagttcagagcggcgatgatggggatctcagagagcaacattgcgtacgagaaacgcaaagcaaaggaggccatggagaaggaaaagaaaaaggtgcaagacctggagaatcgcttaaccaagcagaaagaggaattagaattaaaagagcaaaaagaggacgttttaaataataaattaagtgacgcactggccatggttgaagagactcagaaaacaaaggcaactgaaagtctaaaagcagagagcctcgccttgaaattaaatgaaacattagccgaactggaaactaccaagacaaaaatgatcatggtggaagagcggctaatcctgcagcagaagatggtaaaggccctccaggatgagcaggaatcacagagacacgggtttgaagaagagatcatggaatataaggagcaaatcaaacagcacgcccagacaattgtgagcct

SEQ ID NO: 1958 - protein, 144 aa, Homo sapiens
MMGISESNIAYEKRKAKEAMEKEKKKVQDLENRLTKQKEELELKEQKEDVLNNKLSDALAMVEETQKTKATESLKAESLALKLNETLAELETTKTKMIMVEERLILQQKMVKALQDEQESQRHGFEEEIMEYKEQIKQHAQTIV

SEQ ID NO: 1959 - DNA, 1378 bp, Homo sapiens
gagacagacatgacagccctcctcaaatatttaaagggctgtctcataaaagagaaataaaacatactcaatgagctccaggtgacagaactgagctcagagaccagaaatcacaaggagacagatctccgctgaatataaagacgagttctataataattggaaccttccagagaaggcatggactttgtgctttaaaagaatcgacagaataattagagaatagactttaccctgtccttgaaggtgggggataagggggctgggtaaatatgtattcctgaatgtctgttattttgctacttgtttttttgtctaggaattagaattaaaagagcaaaaagaggacgttttaaataataaattaagtgacgcactggccatggttgaagagactcagaaaacaaaggcaactgaaagtctaaaagcagagagcctcgccttgaaattaaatgaaacattagccgaactggaaactaccaagacaaaaatgatcatggtggaagagcggctaatcctgcagcagaagatggtaaaggccctccaggatgagcaggaatcacagagacacgggtttgaagaagagatcatggaatataaggagcaaatcaaacagcacgcccagacaattgtgagcctcgaagagaaactccagaaagtcactcagcaccataaaaaaatagaaggcgagattgcaacattgaaggacaatgacccagccccaaaggaggaaaggccgcaagaccctctggtggctcccatgacagagagcagtgccaaagacatggcgtacgaacatctgattgagtctacaaagaagtctatcctcaaagaactgacagttttcagagaaacaaacgtatgaatgggaaagatccagaaagcagcacgtaaagaaggaggcgccgatgggatgcagtggagggattcagaagctcccccaagaggagaaccacctgcctgacccttgcaccaaatcctagtgaccgaagtctaatgtcacagggtttttaccccaaaaagacaaggatactcagcctccgcattgtgaaaagttcctgactcctcctcctgtttaaaatctagaaacggtggtgcccatgacttggagaagactcagcaccacccagctctgctctggtccacttccttggcgtgtgaacatgcttgaattctaaggttttatcctcaagttggaagatttgtggttgcagccaagaacacactcacgtggacacacacgcatgcatgcacacacagaatatactatatctatgtagttattttcattctgatgatcaccagtctttttgtttgtttgtttgacatgcaacctgccagtgttttactttaattcataataaacacagtaccttct

SEQ ID NO: 1960 - protein, 160 aa, Homo sapiens
MVEETQKTKATESLKAESLALKLNETLAELETTKTKMIMVEERLILQQKMVKALQDEQESQRHGFEEEIMEYKEQIKQHAQTIVSLEEKLQKVTQHHKKIEGEIATLKDNDPAPKEERPQDPLVAPMTESSAKDMAYEHLIESTKKSILKELTVFRETNV

SEQ ID NO: 1961 - DNA, 367 bp, Homo sapiens
cgtgacccatgcaggtggtctcctggatgaggaaactgcgcctcagagagttaagaggcgcccaagtgcacacagcggctgagacgagtatttgtagagatggtgaagaacaggatgcagaactcaaattcccaggttggaaccagaaaagcctccctaaagatggaccaagaaagagagatgctgaggaaagagacctccagcaagtccagccagagccttttgcattctaagcccagtggaaagtactagagaaacctcgtcccaccaggcctcatgtgatcctctgtgagttcatgtgactcttctgtgtcatctgtgtcaaaatactgagttgcttttgtaagtctttaaagattgttaccct

SEQ ID NO: 1962 - protein, 74 aa, Homo sapiens
MQVVSWMRKLRLRELRGAQVHTAAETSICRDGEEQDAELKFPGWNQKSLPKDGPRKRDAEERDLQQVQPEPFAF

SEQ ID NO: 1963 - DNA, 919 bp, Homo sapiens
ccccagggtcagcaactgtaaaccaaaccccagggaaatagcaagcttcagattctgggtgacgatgacattcaaacaggcccctaaagggagttcaaccatcatgggccccaccatccctgagccattgggataccgaggtgtgaaccaccgggcatctgcagccccttccacttgctctgggaggcgctgcctcgagctaaaacagacgtgtcctccgagaagagcattgttcctcacaggccctgggttgagcagcctccacctctgctggaatctagaacagagacccccaagagactcagcaagatggggcactgtggctcccaaaagctgtgcccccttctcgttgagaaaatggatttttctcaattttcagatgctacctgtttggaatgctgtccctgggaaggcccagcgttccaaatggttagcatctaaaagtggagaaaaatccatttttctttgatgcaaaaggcaaagaggaatctaagctagattttgttcttattctttctgtattgaagagacgagtatttgtagagatggtgaagaacaggatgcagaactcaaattcccaggttggaaccagaaaagcctccctaaagatggaccaagaaagagagatgctgaggaaagagacctccagcaagtccagccagagccttttgcattctaagcccagtggaaagtactagagaaacctcgtcccaccaggcctcatgtgatcctctaccagaagctggagcagccaccttggggatcagcagacaccagcagcaggccaaaggatagtggagtggagggacaagaaggcctgggtgagccttctctgagaatcactgagctctgaaccatgaatgaactgcctacctctgtacttcctgttgtataggacaaagaaatccctatctattta

SEQ ID NO: 1964 - protein, 50 aa, Homo sapiens
MVKNRMQNSNSQVGTRKASLKMDQEREMLRKETSSKSSQSLLHSKPSGKY

SEQ ID NO: 1965 - DNA, 4500 bp, Homo sapiens
gcaggggttccgaggcggacctggggagcagaaacccctgtttagggtgaaccgtggcgggcgccgatggcctcttggaagaggacagactagcagctgcgagggagatgggactgggtttcacccctgaaagggcccctggagacagcggggaaactgacagggagatcatgatgtcgccattttgatggggtccccagaggagagatgtcctccccaacggctcctggacaggactggggaaagagttcagataaggctgctgaacgccggagccttacaactgttaaactcaggcagagctcgggaaatgctgcccggatgggtgagtccttttaacacctcttgggttgatttttctcacaggttttcggggtttgcagagctctgagactgtgaccacagggtgagacctcaagctgcccagtactgtggccccatttcagaggccttgggcctgggccagagatggacgctggggctgccttttactccaagtttttttcttcattggtcattggtcattgggctccaagaaaagcactttttcaggaatcaaagaagcagtgatggaacgaaaagcagagaaagctgatgagccctgaatggaggtgaaacttccaggaaatatcacttgcctcttgattaggggaaatcacttttgaatgaccccgagttttgtgccccaagcatagattctggcagaaagaaacagtctggactgatgacacactacaacatttggtcatgtggaaagaatgatcttcaggaaaaatcacacccttggcaaaggctttttacagaggcaagggcgagccggccaattctgacaatattccagtggcaagggagccaggctgactcagtcatcattacttgtgtttcgtctcttcctcccacatctccttgtataactgtcttttggggaggggtgaagtgatagtaagaaaaacaacagcactttgaaaaagggacagggggagaaacaagaaggggagaaagagttggggagagctcttgggtgatggggagatagcactggggatgttctggagcctgacagaactgtgtggtccctccagctggagatgctgggaaaacaggaagggattcgggagacggcagggatgaagttggctcatgaaatgcagggctcccttagcactttacaaataccagcttacaaacactccacagtcatcaggaaacccttgatggatgctgcacagagatcgaagttcaggagcagcaccaatattcatccggggcaattggagtgagagcagcacaggatcacagcctgatttggcctcagaggctttcttatctcttgcaagatctggaagccatgcaaaaggtgtcatggggagaggcgctgatgtcaggcatttatgggaccactgagtgggggcaaagaggcaggagaaaaagccagtgatgatgggtcgacacctgcaggtagacccatttgcaggttattagaaactagcttatttatccagcttttttttttttttttttctgggcactgggcactggaattctcctggttgtaggcaagctgggggacagggaggtgagagctggaatagtcattctgaagtgtgatatttattggaccccatactaggtgactgatggagaggggctaccactcttccagctaaactccgctctggttgggacccagcaattattttccatagcgaagtgttaataaaatatctgttactcccaacacaacctcctgggggaagggacctgtctgtctgcttcaactttggatcctcagtgcccacatcaggatacctggcctgaggtgagtgctgtagaaatagctgttgaatgaatgcatgagggcctgctctgcctgagggctggggacagattgggtgttttctgtgtcccctccagagcatccggtgacccagttttaggtctcaaggtcactgccaagaaagagaagctgctaaagtgacacctctgtgcacccacatgacttaacacaaaagttaacaggagctcttcaaaaacaagcctctcgagtgtctgtctcctgttttccctgaggacagcatcagtggcatcagataggggttggggctgggtgacctgctggtcctcagccatcactgtggcccagaggtcatttaagcagctctctgcttagcagacaggcagagggaatagatggaaggtacaggtaaacactgcatgtggccaccgcgaggataccccggagcctgggaaacagacagggacgtcgtaaaaccaacacataatggaccagtgcagagacaggcaaaaccagtcagaagaaataggatggtgcctagcccagggacacctgacttaaggtatttttgtttgtttgttttgttttttgagacaggggtctctctctgtcacccaggctggagtgcagtggcatactcactgctcactgcagtctcaacctcccaggcttaagcgatcctcccacctcagcctccttagtagtagctgggactacaggtgtgcaccaacacatccagttcatttttgtatttttttgtagaggtggagtttcgccatgttgctcaggctggtctcgaactgggctcaagcgatctgcccgcctcggcctcccaaagtgtggggattacaggcgtgagccaccacacctcgttgacctaaggtattaactaaagaaagcaggtgattctcaggggggctatgaaagcagcatgcctaagggacaggaacgtaccatgaaggtgttgtcttttgaggctcagtccaggagaagcaggtcttttagacccaatgacaacgctccctagtgtgcaggtgcgtctctctgatgacaaaaggcagtgtgattgtgatattttatatatatatagtttttgttattgttgttttggggacaggtctcactctgtcacccagactggagtgcagtggtaagaatacggctcactgcagcctcaaaatcccagtttcaagcgatcctcccacctcagcttcctgagtagctgtaactacaggcatgcaccacctggctaatttttcaaatttttttatggagactgggtctcattatgttgcccaggctggtctcaaattcctgggtttaggcaatcctcctgcctcggcctccctcaatactgaggttacaggcgtgagccactgcaccaagcctatattttgttttttgttcacggttcctggcttataactcccatggcccttgttacagtaaacacgatctccctccctgacattcttctaccctcctttcacctgcccacagcaggactttaatctgattctgcgtgtaatctcattgcagagagggtcctgccggtattaccctggaggaaggaatgctgcacagaggccgagaggaatttgaacagactggccttgctgggtttttatctctttttgtccaatcccattttgacacagttgtccatgctccaatcatgcttatccaatgaagtttccataacaggcctgagaggacagggttcaggagcttccggacagctgagcaggtggaggttcctggagggtggtgtgccagggagggtgtggaagctctgccccttcccccataccttgtcctatgcattcctttatctgcatccttcattttattttatttttttttgagacggagtcttgctcttgtcgtccaggctggaatgcagtggtgcgcgatcttggcgcactgcaacctccgcctcccgagttcaagagattctcttgcctgagcctcccgagtagctgggattacaggcacccgccaccatccctggctaatttttgtatttttagtagagatggggtttcaccatgttggccaggttagtcttgaactcctgacctcaggtgatccacccacctcagcctcccaaagtgctgagattacaggcgtgagccacagtgcccggcctgtatcctttataatatcttttataaacaaccaatcagtaaatgtgttactctgacttctgtgagctgctctagcaaattaatcaaatccacagaagggtcatgggaaccccaacttgaagcctgtccgtcagaagttccagagtcctggacttgtgactggtgtctgaagtgggcaagtcttggggactgagcccctagcctgtgggatctgatgctatctccacatagatagcaatggaattgaattggcgggcacctggctggtgtctgctgcagagctcattgtttgcttagtggtggagagaagtctccctccacatgtggtcacagcatcttctgtctgtgttgattgcttttgatgttgatcgagagaacaggaaaaagcacattgaatgtctcaatgatgaagatgacaataatctggcttctaggttgttatgcggcaggcaacagctgtgcagatcctaataatctactctgggtgacagtttaacacaggggttggcaaatgtggcccacttcctatttttataaataaagttttattgaaacatg

SEQ ID NO: 1966 - protein, 67 aa, Homo sapiens [sequence omitted]

SEQ ID NO: 1967 - DNA, 2260 bp, Homo sapiens
gaaagctggtgtggagggagaagcgagtgtggtccggagaaagaaggcgtggagaagagggagggagcgagagcgagagaataaatatataaataaatacgagaacgaaatccactccgcagtctccgggctcggaaactttggccccgagcgccagagcgccagagcgcgagagcgcggcgctcgccactctgaggctggcggcctcgattccggccgcgttcccccggcccccctccgccgcggggcctggtctccgggttctgccaggcgcatcagcccgcacaacttctggccgaggccagccggcagaggcggacttggggttggagtgtttgtttgtttgaacttcctcgtcgtcgccaccttccctccccccaacctccaccccacctcacccccctccccagcttctggacgcgtttgactgcagccaggggtggggggtgggggtagggagtgtgtgtggaggggagggagaagaggttaaaaaaaagaagacgaagaagacggaaagaaagagatcgcagcaggggtgaagggagcggacgggaagcgatttttgccgactttggattcgtccccggcgtgcgcaagaatggcggcccttcccggcacggtaccgagaatgatgcggccggctccggggcagaactacccccgcacgggattccctttggaagtgtccaccccgcttggccaaggccgggtcaatcagctgggaggggtcttcatcaatgggcgacccctgcctaaccacatccgccacaagatagtggagatggcccaccatggcatccggccctgtgtcatctcccgacagctgcgtgtctcccacggctgcgtctccaagattctttgccgctaccaggagaccgggtccatccggcctggggccatcggcggcagcaagcccagacaggtggcgactccggatgtagagaaaaagattgaggagtacaagagggaaaacccaggcatgttcagctgggagatccgggacaggctgctgaaggatgggcactgtgaccgaagcactgtgccctcaggtttagtgagttcgattagccgcgtgctcagaatcaagttcgggaagaaagaggaggaggatgaagcggacaagaaggaggacgacggcgaaaagaaggccaaacacagcatcgacggcatcctgggcgacaaagggaaccggctggacgagggctcggatgtggagtcggaacctgacctcccactgaagcgcaagcagcgacgcagtcggaccacattcacggccgagcagctggaggagctggagaaggcctttgagaggacccactacccagacatatacacccgcgaggagctggcgcagaggaccaagctgacagaggcgcgtgtgcaggtctggttcagtaaccgccgcgcccgttggcgtaagcaggcaggagccaaccagctggcggcgttcaaccaccttctgccaggaggcttcccacccaccggcatgcccacgctgcccccctaccagctgccggactccacctaccccaccaccaccatctcccaagatgggggcagcactgtgcaccggcctcagcccctgccaccgtccaccatgcaccagggcgggctggctgcagcggctgcagccgccgacaccagctctgcctacggagcccgccacagcttctccagctactctgacagcttcatgaatccggcggcgccctccaaccacatgaacccggtcagcaacggcctgtctcctcaggtgatgagcatcttgggcaaccccagtgcggtgcccccgcagccacaggctgacttctccatctccccgctgcatggcggcctggactcggccacctccatctcagccagctgcagccagcgggccgactccatcaagccaggagacagcctgcccacctcccaggcctactgcccacccacctacagcaccaccggctacagcgtggaccccgtggccggctatcagtacggccagtacggccagagtgagtgcctggtgccctgggcgtcccccgtccccattccttctcccacccccagggcctcctgcttgtttatggagagctacaaggtggtgtcagggtggggaatgtccatttcacagatggaaaaattgaagtccagccagatggaacagttcacctaaaatgacactgagttgggcaaaacccaggacatctcctggctaagcctctgcttccgtactatggctccaacagaaataaaatacacaacacaaatatca

SEQ ID NO: 1968 - protein, 520 aa, Homo sapiens; identical to SEQ ID NO: 30

SEQ ID NO: 1969 - DNA, 1734 bp, Homo sapiens
gaagacgaagaagacggaaagaaagagatcgcagcaggggtgaagggagcggacgggaagcgatttttgccgactttggattcgtccccggcgtgcgcaagaatggcggcccttcccggcacggtaccgagaatgatgcggccggctccggggcagaactacccccgcacgggattccctttggaagtgtccaccccgcttggccaaggccgggtcaatcagctgggaggggtcttcatcaatgggcgacccctgcctaaccacatccgccacaagatagtggagatggcccaccatggcatccggccctgtgtcatctcccgacagctgcgtgtctcccacggctgcgtctccaagattctttgccgctaccaggagaccgggtccatccggcctggggccatcggcggcagcaagcccagacaggtggcgactccggatgtagagaaaaagattgaggagtacaagagggaaaacccaggcatgttcagctgggagatccgggacaggctgctgaaggatgggcactgtgaccgaagcactgtgccctcaggtttagtgagttcgattagccgcgtgctcagaatcaagttcgggaagaaagaggaggaggatgaagcggacaagaaggaggacgacggcgaaaagaaggccaaacacagcatcgacggcatcctgggcgacaaagggaaccggctggacgagggctcggatgtggagtcggaacctgacctcccactgaagcgcaagcagcgacgcagtcggaccacattcacggccgagcagctggaggagctggagaaggcctttgagaggacccactacccagacatatacacccgcgaggagctggcgcagaggaccaagctgacagaggcgcgtgtgcaggtctggttcagtaaccgccgcgcccgttggcgtaagcaggcaggagccaaccagctggcggcgttcaaccaccttctgccaggaggcttcccacccaccggcatgcccacgctgcccccctaccagctgccggactccacctaccccaccaccaccatctcccaagatgggggcagcactgtgcaccggcctcagcccctgccaccgtccaccatgcaccagggcgggctggctgcagcggctgcagccgccgacaccagctctgcctacggagcccgccacagcttctccagctactctgacagcttcatgaatccggcggcgccctccaaccacatgaacccggtcagcaacggcctgtctcctcaggtgatgagcatcttgggcaaccccagtgcggtgcccccgcagccacaggctgacttctccatctccccgctgcatggcggcctggactcggccacctccatctcagccagctgcagccagcgggccgactccatcaagccaggagacagcctgcccacctcccaggcctactgcccacccacctacagcaccaccggctacagcgtggaccccgtggccggctatcagtacggccagtacggccagactgctgttgattatctggccaaaaatgtgagcctctccacccagcgtcgcatgaagctcggggagcactctgctgtgctgggactcctgcctgtggaaactggccaggcctactagggcccctggggcgacttgccccagcccaattcccagcccaaccctaactgacccctgagcttcccagccttgccgcctcacccccctgttgtcctaggaggccaggaaaggagc

SEQ ID NO: 1970 - protein, 505 aa, Homo sapiens
MAALPGTVPRMMRPAPGQNYPRTGFPLEVSTPLGQGRVNQLGGVFINGRPLPNHIRHKIVEMAHHGIRPCVISRQLRVSHGCVSKILCRYQETGSIRPGAIGGSKPRQVATPDVEKKIEEYKRENPGMFSWEIRDRLLKDGHCDRSTVPSGLVSSISRVLRIKFGKKEEEDEADKKEDDGEKKAKHSIDGILGDKGNRLDEGSDVESEPDLPLKRKQRRSRTTFTAEQLEELEKAFERTHYPDIYTREELAQRTKLTEARVQVWFSNRRARWRKQAGANQLAAFNHLLPGGFPPTGMPTLPPYQLPDSTYPTTTISQDGGSTVHRPQPLPPSTMHQGGLAAAAAAADTSSAYGARHSFSSYSDSFMNPAAPSNHMNPVSNGLSPQVMSILGNPSAVPPQPQADFSISPLHGGLDSATSISASCSQRADSIKPGDSLPTSQAYCPPTYSTTGYSVDPVAGYQYGQYGQTAVDYLAKNVSLSTQRRMKLGEHSAVLGLLPVETGQAY

SEQ ID NO: 1971 - DNA, 3897 bp, Homo sapiens
ccccgcagctgcgcagcctgcccttcgggacgctggagctaggcgacaccgcggctctggatgccttctacaacgcggatgtggtggtgctggaggtgagcagctcgctggtacagccctccctgttctaccaccttggtgtgcgtgagagcttcagcatgaccaacaatgtgctcctctgctcccaggccgacctccctgacctgcaggccctgcgggattgcgttggcagctacacactgatcccctatgtggtgacggccactggtcgggtgctgtgtggtgatgcaggccttctgcggggcctggctgatgggctggtacaggctggagtggggaccgaggccctgctcactcccctggtgggccggcttgcccgcctgctggaggccacacccacagactcttgtggctatttccgggagaccattcggcgggacatccggcaggcgcgggagcggttcagtgggccacagctgcggcaggagctggctcgcctgcagcggagactggacagcgtggagctgctgagccccgacatcatcatgaacttgctgctctcctaccgcgatgtgcaggactactcggccatcattgagctggtggagacgctgcaggccttgcccacctgtgatgtggccgagcagcataatgtctgcttccactacacttttgccctcaaccggaggaacaggcctggggaccgggcgaaggccctgtctgtgctgctgccgctggtacagcttgagggctctgtggcgcccgatctgtactgcatgtgtggccgtatctacaaggacatgttcttcagctcgggtttccaggatgctgggcaccgggagcaggcctatcactggtatcgcaaggcttttgacgtagagcccagccttcactcaggcatcaatgcagctgtgctcctcattgctgccgggcagcactttgaggattccaaagagctccggctaataggcatgaagctgggctgcctgctggcccgcaaaggctgcgtggagaagatgcagtattactgggatgtgggtttctacctgggagcccagatcctcgccaatgaccccacccaggtggtgctggctgcagagcagctgtataagctcaatgcccccatatggtacctggtgtccgtgatggagaccttcctgctctaccagcacttcaggcccacgccagagccccctggagggccaccacgccgtgcccacttctggctccacttcttgctacagtcctgccaaccattcaagacagcctgtgcccagggcgaccagtgcttggtgctggtcctggagatgaacaaggtgctgctgcctgcaaagctcgaggttcggggtactgacccagtaagcacagtgaccctgagcctgctggagcctgagacccaggacattccctccagctggaccttcccagtcgcctccatatgcggagtcagcgcctcaaagcgcgacgagcgctgctgcttcctctatgcactccccccggctcaggacgtccagctgtgcttccccagcgtagggcactgccagtggttctgcggcctgatccaggcctgggtgacgaacccggattccacggcgcccgcggaggaggcggagggcgcgggggagatgttggagtttgattatgagtacacggagacgggcgagcggctggtgctgggcaagggcacgtatggggtggtgtacgcgggccgcgatcgccacacgagggtgcgcatcgccatcaaggagatcccggagcgggacagcaggttctctcagcccctgcatgaagagatcgctcttcacagacgcctgcgccacaagaacatagtgcgctatctgggctcagctagccagggcggctaccttaagatcttcatggaggaagtgcctggaggcagcctgtcctccttgctgcggtcggtgtggggacccctgaaggacaacgagagcaccatcagtttctacacccgccagatcctgcagggacttggctacttgcacgacaaccacatcgtgcacagggacataaaaggggacaatgtgctgatcaacaccttcagtgggctgctcaagatttctgacttcggcacctccaagcggctggcaggcatcacaccttgcactgagaccttcacaggaactctgcagtatatggccccagaaatcattgaccagggcccacgcgggtatgggaaagcagctgacatctggtcactgggctgcactgtcattgagatggccacaggtcgcccccccttccacgagctcgggagcccacaggctgccatgtttcaggtgggtatgtacaaggtccatccgccaatgcccagctctctgtcggccgaggcccaagcctttctcctccgaacttttgagccagacccccgcctccgagccagcgcccagacactgctgggggaccccttcctgcagcctgggaaaaggagccgcagccccagctccccacgacatgctccacggccctcagatgccccttctgccagtcccactccttcagccaactcaaccacccagtctcagacattcccgtgccctcaggcaccctctcagcacccacccagccccccgaagcgctgcctcagttatgggggcaccagccagctccgggtgcccgaggagcctgcggccgaggagcctgcgtctccggaggagagttcggggctgagcctgctgcaccaggagagcaagcgtcgggccatgctggccgcagtattggagcaggagctgccagcgctggcggagaatctgcaccaggagcagaagcaagagcagggggcccgtctgggcagaaaccatgtggaagagctgctgcgctgcctcggggcacacatccacactcccaaccgccggcagctcgcccaggagctgcgggcgctgcaaggacggctgagggcccagggccttgggcctgcgcttctgcacagaccgctgtttgccttcccggatgcggtgaagcagatcctccgcaagcgccagatccgtccacactggatgttcgttctggactcactgctcagccgtgctgtgcgggcagccctgggtgtgctaggaccggaggtggagaaggaggcggtctcaccgaggtcagaggagctgagtaatgaaggggactcccagcagagcccaggccagcagagcccgcttccggtggagcccgagcagggccccgctcctctgatggtgcagctgagcctcttgagggcagagactgatcggctgcgcgaaatcctggcggggaaggaacgggagtaccaggccctggtgcagcgggctctacagcggctgaatgaggaagcccggacctatgtcctggccccagagcctccaactgctctttcaacggaccagggcctggtgcagtggctacaggaactgaatgtggattcaggcaccatccaaatgctgttgaaccatagcttcaccctccacactctgctcacctatgccactcgagatgacctcatctacacccgcatcaggggagggatggtatgccgcatctggagggccatcttggcacagcgagcaggatccacaccagtcacctctggaccctgagagctgaatgagggcatcataggccagacaggcccaaggatggatgaatggagaggacaaaggcagcttctgacacaccagccccaggacctggggcgactggaggaagccaggcgagtggggcccaggactggttccagtgagagaaaccaaccacaggcacccaagcactaccagacaaagcgtattaaacagaacacttttgaacctttgtcctggcaattttggaggtgtatggtgggaggggtatcctgggaagagccccctaggtcttttttaaaaaattttttttgttggccgggcatggtggctcatg

SEQ ID NO: 1972 - protein, 1140 aa, Homo sapiens
MTNNVLLCSQADLPDLQALRDCVGSYTLIPYVVTATGRVLCGDAGLLRGLADGLVQAGVGTEALLTPLVGRLARLLEATPTDSCGYFRETIRRDIRQARERFSGPQLRQELARLQRRLDSVELLSPDIIMNLLLSYRDVQDYSAIIELVETLQALPTCDVAEQHNVCFHYTFALNRRNRPGDRAKALSVLLPLVQLEGSVAPDLYCMCGRIYKDMFFSSGFQDAGHREQAYHWYRKAFDVEPSLHSGINAAVLLIAAGQHFEDSKELRLIGMKLGCLLARKGCVEKMQYYWDVGFYLGAQILANDPTQVVLAAEQLYKLNAPIWYLVSVMETFLLYQHFRPTPEPPGGPPRRAHFWLHFLLQSCQPFKTACAQGDQCLVLVLEMNKVLLPAKLEVRGTDPVSTVTLSLLEPETQDIPSSWTFPVASICGVSASKRDERCCFLYALPPAQDVQLCFPSVGHCQWFCGLIQAWVTNPDSTAPAEEAEGAGEMLEFDYEYTETGERLVLGKGTYGVVYAGRDRHTRVRIAIKEIPERDSRFSQPLHEEIALHRRLRHKNIVRYLGSASQGGYLKIFMEEVPGGSLSSLLRSVWGPLKDNESTISFYTRQILQGLGYLHDNHIVHRDIKGDNVLINTFSGLLKISDFGTSKRLAGITPCTETFTGTLQYMAPEIIDQGPRGYGKAADIWSLGCTVIEMATGRPPFHELGSPQAAMFQVGMYKVHPPMPSSLSAEAQAFLLRTFEPDPRLRASAQTLLGDPFLQPGKRSRSPSSPRHAPRPSDAPSASPTPSANSTTQSQTFPCPQAPSQHPPSPPKRCLSYGGTSQLRVPEEPAAEEPASPEESSGLSLLHQESKRRAMLAAVLEQELPALAENLHQEQKQEQGARLGRNHVEELLRCLGAHIHTPNRRQLAQELRALQGRLRAQGLGPALLHRPLFAFPDAVKQILRKRQIRPHWMFVLDSLLSRAVRAALGVLGPEVEKEAVSPRSEELSNEGDSQQSPGQQSPLPVEPEQGPAPLMVQLSLLRAETDRLREILAGKEREYQALVQRALQRLNEEARTYVLAPEPPTALSTDQGLVQWLQELNVDSGTIQMLLNHSFTLHTLLTYATRDDLIYTRIRGGMVCRIWRAILAQRAGSTPVTSGP

SEQ ID NO: 1973 - DNA, 4452 bp, Homo sapiens
tgagctgccgatcaccggatgccccagattcctgggacccaatcccggatttcagaacctcaggaccttgcaagtccgagctaggatttctccctggactttagattcctggaacgggacgtcaggccgtattccggatccctagatcccgtgggagattctccgattccgaacggattccagatcccaagattcctgatctgccggcccaggctcctgccccgcccccggttcccagtgcgcggcgccccgcgcctgagcgcccccgcatggcggggccgtgtccccggtccggggcggagcgcgccggcagctgctggcaggacccgctggccgtggcgctgagccggggccggcagctcgcggcgcccccgggccggggctgcgcgcggagccggccgctcagcgtggtctacgtgctgacccgggagccgcagcccgggctcgagcctcgggagggaaccgaggcggagccgctgcccctgcgctgcctgcgcgaggcttgcgcgcaggtcccccggccgcggccgcccccgcagctgcgcagcctgcccttcgggacgctggagctaggcgacaccgcggctctggatgccttctacaacgcggatgtggtggtgctggaggtgagcagctcgctggtacagccctccctgttctaccaccttggtgtgcgtgagagcttcagcatgaccaacaatgtgctcctctgctcccaggccgacctccctgacctgcaggccctgcgggaggatgttttccagaagaactcggattgcgttggcagctacacactgatcccctatgtggtgacggccactggtcgggtgctgtgtggtgatgcaggccttctgcggggcctggctgatgggctggtacaggctggagtggggaccgaggccctgctcactcccctggtgggccggcttgcccgcctgctggaggccacacccacagactcttgtggctatttccgggagaccattcggcgggacatccggcaggcgcgggagcggttcagtgggccacagctgcggcaggagctggctcgcctgcagcggagactggacagcgtggagctgctgagccccgacatcatcatgaacttgctgctctcctaccgcgatgtgcaggactactcggccatcattgagctggtggagacgctgcaggccttgcccacctgtgatgtggccgagcagcataatgtctgcttccactacacttttgccctcaaccggaggaacaggcctggggaccgggcgaaggccctgtctgtgctgctgccgctggtacagcttgagggctctgtggcgcccgatctgtactgcatgtgtggccgtatctacaaggacatgttcttcagctcgggtttccaggatgctgggcaccgggagcaggcctatcactggtatcgcaaggcttttgacgtagagcccagccttcactcaggcatcaatgcagctgtgctcctcattgctgccgggcagcactttgaggattccaaagagctccggctaataggcatgaagctgggctgcctgctggcccgcaaaggctgcgtggagaagatgcagtattactgggatgtgggtttctacctgggagcccagatcctcgccaatgaccccacccaggtggtgctggctgcagagcagctgtataagctcaatgcccccatatggtacctggtgtccgtgatggagaccttcctgctctaccagcacttcaggcccacgccagagccccctggagggccaccacgccgtgcccacttctggctccacttcttgctacagtcctgccaaccattcaagacagcctgtgcccagggcgaccagtgcttggtgctggtcctggagatgaacaaggtgctgctgcctgcaaagctcgaggttcggggtactgacccagtaagcacagtgaccctgagcctgctggagcctgagacccaggacattccctccagctggaccttcccagtcgcctccatatgcggagtcagcgcctcaaagcgcgacgagcgctgctgcttcctctatgcactccccccggctcaggacgtccagctgtgcttccccagcgtagggcactgccagtggttctgcggcctgatccaggcctgggtgacgaacccggattccacggcgcccgcggaggaggcggagggcgcgggggagatgttggagtttgattatgagtacacggagacgggcgagcggctggtgctgggcaagggcacgtatggggtggtgtacgcgggccgcgatcgccacacgagggtgcgcatcgccatcaaggagatcccggagcgggacagcaggttctctcagcccctgcatgaagagatcgctcttcacagacgcctgcgccacaagaacatagtgcgctatctgggctcagctagccagggcggctaccttaagatcttcatggaggaagtgcctggaggcagcctgtcctccttgctgcggtcggtgtggggacccctgaaggacaacgagagcaccatcagtttctacacccgccagatcctgcagggacttggctacttgcacgacaaccacatcgtgcacagggacataaaaggggacaatgtgctgatcaacaccttcagtgggctgctcaagatttctgacttcggcacctccaagcggctggcaggcatcacaccttgcactgagaccttcacaggaactctgcagtatatggccccagaaatcattgaccagggcccacgcgggtatgggaaagcagctgacatctggtcactgggctgcactgtcattgagatggccacaggtcgcccccccttccacgagctcgggagcccacaggctgccatgtttcaggtgggtatgtacaaggtccatccgccaatgcccagctctctgtcggccgaggcccaagcctttctcctccgaacttttgagccagacccccgcctccgagccagcgcccagacactgctgggggaccccttcctgcagcctgggaaaaggagccgcagccccagctccccacgacatgctccacggccctcagatgccccttctgccagtcccactccttcagccaactcaaccacccagtctcagacattcccgtgccctcaggcaccctctcagcacccacccagccccccgaagcgctgcctcagttatgggggcaccagccagctccgggtgcccgaggagcctgcggccgaggagcctgcgtctccggaggagagttcggggctgagcctgctgcaccaggagagcaagcgtcgggccatgctggccgcagtattggagcaggagctgccagcgctggcggagaatctgcaccaggagcagaagcaagagcagggggcccgtctgggcagaaaccatgtggaagagctgctgcgctgcctcggggcacacatccacactcccaaccgccggcagctcgcccaggagctgcgggcgctgcaaggacggctgagggcccagggccttgggcctgcgcttctgcacagaccgctgtttgccttcccggatgcggtgaagcagatcctccgcaagcgccagatccgtccacactggatgttcgttctggactcactgctcagccgtgctgtgcgggcagccctgggtgtgctaggaccggaggtggagaaggaggcggtctcaccgaggtcagaggagctgagtaatgaaggggactcccagcagagcccaggccagcagagcccgcttccggtggagcccgagcagggccccgctcctctgatggtgcagctgagcctcttgagggcagagactgatcggctgcgcgaaatcctggcggggaaggaacgggagtaccaggccctggtgcagcgggctctacagcggctgaatgaggaagcccggacctatgtcctggccccagagcctccaactgctctttcaacggaccagggcctggtgcagtggctacaggaactgaatgtggattcaggcaccatccaaatgctgttgaaccatagcttcaccctccacactctgctcacctatgccactcgagatgacctcatctacacccgcatcaggggagggatggtatgccgcatctggagggccatcttggcacagcgagcaggatccacaccagtcacctctggaccctgagagctgaatgagggcatcataggccagacaggcccaaggatggatgaatggagaggacaaaggcagcttctgacacaccagccccaggacctggggcgactggaggaagccaggcgagtggggcccaggactggttccagtgagagaaaccaaccacaggcacccaagcactaccagacaaagcgtattaaacagaacacttttgaacctttgtcctggcaattttggaggtgtatggtgggaggggtatcctgggaagagccccctaggtcttttttaaaaaattttttttgttggccgggcatggtggctcatg

SEQ ID NO: 1974 - protein, 1288 aa, Homo sapiens; identical to SEQ ID NO: 34

SEQ ID NO: 1975 - DNA, 3793 bp, Homo sapiens
ccccgcagctgcgcagcctgcccttcgggacgctggagctaggcgacaccgcggctctggatgccttctacaacgcggatgtggtggtgctggaggtgagcagctcgctggtacagccctccctgttctaccaccttggtgtgcgtgagagcttcagcatgaccaacaatgtgctcctctgctcccaggccgacctccctgacctgcaggccctgcgggattgcgttggcagctacacactgatcccctatgtggtgacggccactggtcgggtgctgtgtggtgatgcaggccttctgcggggcctggctgatgggctggtacaggctggagtggggaccgaggccctgctcactcccctggtgggccggcttgcccgcctgctggaggccacacccacagactcttgtggctatttccgggagaccattcggcgggacatccggcaggcgcgggagcggttcagtgggccacagctgcggcaggagctggctcgcctgcagcggagactggacagcgtggagctgctgagccccgacatcatcatgaacttgctgctctcctaccgcgatgtgcaggactactcggccatcattgagctggtggagacgctgcaggccttgcccacctgtgatgtggccgagcagcataatgtctgcttccactacacttttgccctcaaccggaggaacaggcctggggaccgggcgaaggccctgtctgtgctgctgccgctggtacagcttgagggctctgtggcgcccgatctgtactgcatgtgtggccgtatctacaaggacatgttcttcagctcgggtttccaggatgctgggcaccgggagcaggcctatcactggtatcgcaaggcttttgacgtagagcccagccttcactcaggcatcaatgcagctgtgctcctcattgctgccgggcagcactttgaggattccaaagagctccggctaataggcatgaagctgggctgcctgctggcccgcaaaggctgcgtggagaagatgcagtattactgggatgtgggtttctacctgggagcccagatcctcgccaatgaccccacccaggtggtgctggctgcagagcagctgtataagctcaatgcccccatatggtacctggtgtccgtgatggagaccttcctgctctaccagcacttcaggcccacgccagagccccctggagggccaccacgccgtgcccacttctggctccacttcttgctacagtcctgccaaccattcaagacagcctgtgcccagggcgaccagtgcttggtgctggtcctggagatgaacaaggtgctgctgcctgcaaagctcgaggttcggggtactgacccagtaagcacagtgaccctgagcctgctggagcctgagacccaggacattccctccagctggaccttcccagtcgcctccatatgcggagtcagcgcctcaaagcgcgacgagcgctgctgcttcctctatgcactccccccggctcaggacgtccagctgtgcttccccagcgtagggcactgccagtggttctgcggcctgatccaggcctgggtgacgaacccggattccacggcgcccgcggaggaggcggagggcgcgggggagatgttggagtttgattatgagtacacggagacgggcgagcggctggtgctgggcaagggcacgtatggggtggtgtacgcgggccgcgatcgccacacgagggtgcgcatcgccatcaaggagatcccggagcgggacagcaggttctctcagcccctgcatgaagagatcgctcttcacagacgcctgcgccacaagaacatagtgcgctatctgggctcagctagccagggcggctaccttaagatcttcatggaggaagtgcctggaggcagcctgtcctccttgctgcggtcggtgtggggacccctgaaggacaacgagagcaccatcagtttctacacccgccagatcctgcagggacttggctacttgcacgacaaccacatcgtgcacagggacataaaaggggacaatgtgctgatcaacaccttcagtgggctgctcaagatttctgacttcggcacctccaagcggctggcaggcatcacaccttgcactgagaccttcacaggaactctgcagtatatggccccagaaatcattgaccagggcccacgcgggtatgggaaagcagctgacatctggtcactgggctgcactgtcattgagatggccacaggtcgcccccccttccacgagctcgggagcccacaggctgccatgtttcaggtgggtatgtacaaggtccatccgccaatgcccagctctctgtcggccgaggcccaagcctttctcctccgaacttttgagccagacccccgcctccgagccagcgcccagacactgctgggggaccccttcctgcagcctgggaaaaggagccgcagccccagctccccacgacatgctccacggccctcagatgccccttctgccagtcccactccttcagccaactcaaccacccagtctcagacattcccgtgccctcaggcaccctctcagcacccacccagccccccgaagcgctgcctcagttatgggggcaccagccagctccgggtgcccgaggagcctgcggccgaggagcctgcgtctccggaggagagttcggggctgagcctgctgcaccaggagagcaagcgtcgggccatgctggccgcagtattggagcaggagctgccagcgctggcggagaatctgcaccaggagcagaagcaagagcagggggcccgtctgggcagaaaccatgtggaagagctgctgcgctgcctcggggcacacatccacactcccaaccgccggcagctcgcccaggagctgcgggcgctgcaaggacggctgagggcccagggccttgggcctgcgcttctgcacagaccgctgtttgccttcccggatgcggtgaagcagatcctccgcaagcgccagatccgtccacactggatgttcgttctggactcactgctcagccgtgctgtgcgggcagccctgggtgtgctaggaccggaggtggagaaggaggcggtctcaccgaggtcagaggagctgagtaatgaaggggactcccagcagagcccaggccagcagagcccgcttccggtggagcccgagcagggccccgctcctctgatggtgcagctgagcctcttgagggcagagactgatcggctgcgcgaaatcctggcggggaaggaacgggagtaccaggccctggtgcagcgggctctacagcggctgaatgaggaagcccggacctatgtcctggccccagagcctccaactgctctttcaacggaccagggcctggtgcagtggctacaggaactgaatgtggattcaggcaccatccaaatgctgttgaaccatagcttcaccctccacactctgctcacctatgccactcgagatgacctcatctacacccgcatcaggggagggatggtatgccgcatctggagggccatcttggcacagcgagcaggatccacaccagtcacctctggaccctgagagctgaatgagggcatcataggccagacaggcccaaggatggatgaatggagaggacaaaggcagcttctgacacaccagccccaggacctggggcgactggaggaagccaggcgagtggggcccaggactggttccagtgagagaaaccaaccacaggcacccaagcactaccagacaaagcgtattaaacagaacacttttgaaccttt

SEQ ID NO: 1976 - protein, 1140 aa, Homo sapiens; identical to SEQ ID NO: 1972

SEQ ID NO: 1977 - DNA, 4348 bp, Homo sapiens
tgagctgccgatcaccggatgccccagattcctgggacccaatcccggatttcagaacctcaggaccttgcaagtccgagctaggatttctccctggactttagattcctggaacgggacgtcaggccgtattccggatccctagatcccgtgggagattctccgattccgaacggattccagatcccaagattcctgatctgccggcccaggctcctgccccgcccccggttcccagtgcgcggcgccccgcgcctgagcgcccccgcatggcggggccgtgtccccggtccggggcggagcgcgccggcagctgctggcaggacccgctggccgtggcgctgagccggggccggcagctcgcggcgcccccgggccggggctgcgcgcggagccggccgctcagcgtggtctacgtgctgacccgggagccgcagcccgggctcgagcctcgggagggaaccgaggcggagccgctgcccctgcgctgcctgcgcgaggcttgcgcgcaggtcccccggccgcggccgcccccgcagctgcgcagcctgcccttcgggacgctggagctaggcgacaccgcggctctggatgccttctacaacgcggatgtggtggtgctggaggtgagcagctcgctggtacagccctccctgttctaccaccttggtgtgcgtgagagcttcagcatgaccaacaatgtgctcctctgctcccaggccgacctccctgacctgcaggccctgcgggaggatgttttccagaagaactcggattgcgttggcagctacacactgatcccctatgtggtgacggccactggtcgggtgctgtgtggtgatgcaggccttctgcggggcctggctgatgggctggtacaggctggagtggggaccgaggccctgctcactcccctggtgggccggcttgcccgcctgctggaggccacacccacagactcttgtggctatttccgggagaccattcggcgggacatccggcaggcgcgggagcggttcagtgggccacagctgcggcaggagctggctcgcctgcagcggagactggacagcgtggagctgctgagccccgacatcatcatgaacttgctgctctcctaccgcgatgtgcaggactactcggccatcattgagctggtggagacgctgcaggccttgcccacctgtgatgtggccgagcagcataatgtctgcttccactacacttttgccctcaaccggaggaacaggcctggggaccgggcgaaggccctgtctgtgctgctgccgctggtacagcttgagggctctgtggcgcccgatctgtactgcatgtgtggccgtatctacaaggacatgttcttcagctcgggtttccaggatgctgggcaccgggagcaggcctatcactggtatcgcaaggcttttgacgtagagcccagccttcactcaggcatcaatgcagctgtgctcctcattgctgccgggcagcactttgaggattccaaagagctccggctaataggcatgaagctgggctgcctgctggcccgcaaaggctgcgtggagaagatgcagtattactgggatgtgggtttctacctgggagcccagatcctcgccaatgaccccacccaggtggtgctggctgcagagcagctgtataagctcaatgcccccatatggtacctggtgtccgtgatggagaccttcctgctctaccagcacttcaggcccacgccagagccccctggagggccaccacgccgtgcccacttctggctccacttcttgctacagtcctgccaaccattcaagacagcctgtgcccagggcgaccagtgcttggtgctggtcctggagatgaacaaggtgctgctgcctgcaaagctcgaggttcggggtactgacccagtaagcacagtgaccctgagcctgctggagcctgagacccaggacattccctccagctggaccttcccagtcgcctccatatgcggagtcagcgcctcaaagcgcgacgagcgctgctgcttcctctatgcactccccccggctcaggacgtccagctgtgcttccccagcgtagggcactgccagtggttctgcggcctgatccaggcctgggtgacgaacccggattccacggcgcccgcggaggaggcggagggcgcgggggagatgttggagtttgattatgagtacacggagacgggcgagcggctggtgctgggcaagggcacgtatggggtggtgtacgcgggccgcgatcgccacacgagggtgcgcatcgccatcaaggagatcccggagcgggacagcaggttctctcagcccctgcatgaagagatcgctcttcacagacgcctgcgccacaagaacatagtgcgctatctgggctcagctagccagggcggctaccttaagatcttcatggaggaagtgcctggaggcagcctgtcctccttgctgcggtcggtgtggggacccctgaaggacaacgagagcaccatcagtttctacacccgccagatcctgcagggacttggctacttgcacgacaaccacatcgtgcacagggacataaaaggggacaatgtgctgatcaacaccttcagtgggctgctcaagatttctgacttcggcacctccaagcggctggcaggcatcacaccttgcactgagaccttcacaggaactctgcagtatatggccccagaaatcattgaccagggcccacgcgggtatgggaaagcagctgacatctggtcactgggctgcactgtcattgagatggccacaggtcgcccccccttccacgagctcgggagcccacaggctgccatgtttcaggtgggtatgtacaaggtccatccgccaatgcccagctctctgtcggccgaggcccaagcctttctcctccgaacttttgagccagacccccgcctccgagccagcgcccagacactgctgggggaccccttcctgcagcctgggaaaaggagccgcagccccagctccccacgacatgctccacggccctcagatgccccttctgccagtcccactccttcagccaactcaaccacccagtctcagacattcccgtgccctcaggcaccctctcagcacccacccagccccccgaagcgctgcctcagttatgggggcaccagccagctccgggtgcccgaggagcctgcggccgaggagcctgcgtctccggaggagagttcggggctgagcctgctgcaccaggagagcaagcgtcgggccatgctggccgcagtattggagcaggagctgccagcgctggcggagaatctgcaccaggagcagaagcaagagcagggggcccgtctgggcagaaaccatgtggaagagctgctgcgctgcctcggggcacacatccacactcccaaccgccggcagctcgcccaggagctgcgggcgctgcaaggacggctgagggcccagggccttgggcctgcgcttctgcacagaccgctgtttgccttcccggatgcggtgaagcagatcctccgcaagcgccagatccgtccacactggatgttcgttctggactcactgctcagccgtgctgtgcgggcagccctgggtgtgctaggaccggaggtggagaaggaggcggtctcaccgaggtcagaggagctgagtaatgaaggggactcccagcagagcccaggccagcagagcccgcttccggtggagcccgagcagggccccgctcctctgatggtgcagctgagcctcttgagggcagagactgatcggctgcgcgaaatcctggcggggaaggaacgggagtaccaggccctggtgcagcgggctctacagcggctgaatgaggaagcccggacctatgtcctggccccagagcctccaactgctctttcaacggaccagggcctggtgcagtggctacaggaactgaatgtggattcaggcaccatccaaatgctgttgaaccatagcttcaccctccacactctgctcacctatgccactcgagatgacctcatctacacccgcatcaggggagggatggtatgccgcatctggagggccatcttggcacagcgagcaggatccacaccagtcacctctggaccctgagagctgaatgagggcatcataggccagacaggcccaaggatggatgaatggagaggacaaaggcagcttctgacacaccagccccaggacctggggcgactggaggaagccaggcgagtggggcccaggactggttccagtgagagaaaccaaccacaggcacccaagcactaccagacaaagcgtattaaacagaacacttttgaaccttt

SEQ ID NO: 1978 - protein, 1288 aa, Homo sapiens; identical to SEQ ID NO: 34

SEQ ID NO: 1979 - DNA, 2295 bp, Homo sapiens
gaagggcctgggtaccctatgaaggccctcctacaggggtatggaaggctgggaggagtgggaaggattcggaaaagggcctgggtaccggctccactggtggctcagcgctggggtgctgagacatcagagccaacactcatcccttctctggggcaggagatccagtgaacctgctccggtgccaggaaggtgaggcagcccttgcaggagccaggaacttgggatcacatggtgttgggtgttggcagacccccaagtgtggccaagatcctccccacagcctcctcagaacccttcttcagggacctgaaggagccaagagggtccctagggtcccacacttgttccagtgcctgggggtgggggtcagggaataacctgggcaccaccccagtccatctcccctttcccaggccccagaaactgccgggagctgttgagccagggcgccaccttgagcggctggtaccatctgtgcctacctgagggcagggccctcccagtcttttgtgacatggacaccgaggggggcggctggctggtgtttcagaggcgccaggatggttctgtggatttcttccgctcttggtcctcctacagagcaggttttgggaaccaagagtctgaattctggctgggaaatgagaatttgcaccagcttactctccagggtaactgggagctgcgggtagagctggaagactttaatggtaaccgtactttcgcccactatgcgaccttccgcctcctcggtgaggtagaccactaccagctggcactgggcaagttctcagagggcactgcaggtgagtgagcctaaggggagcagaggaaggaggctggatcctttcccagtgctgccactgcccccatgaatgacccagggcaatcctgtctcctctgtgggccttagtttccgcatctgagaaatggcaatcatgaaacaggatggtgcaacagtgaagaatttgggatctggaggcaaacagacctgagtttgaatccatctctgccatttagtacttatgtgaccttgggcaagtcctacccctccactgagcctcagtttcctcctctataaaatgggcagggaggccgggcacggtggctcatgcctgtaaccctagcactctgggaggccgaggcgggcagataacttgaggtcaggagttcaaacccaacctggccaacatggtgaaaccccgtctctactaaaaatacaaaaaaattagccgggcgtggtggagggtgcctgtaatcccagctactcgggaggctgaggcaggagaatcacttaaatctgggaggcagaggttgcagcgagccaagagagtgtcactgcactctagcctgggcgacagagcgagactccatctcagaaaaaaaaaaaaaggcggggggagcgcagggaggcaaggaggaagttttgggtgccgcctgaggctctgttgagtgttagtgttctctgctttggaagaggaaccacggaagtcttctttcagagaaacagtgactattggggagagatttaaaagagggaagtggttatgagggagtgcctcagggaaccacctttcctggccaggcacctaagaggttcctcccagcttttcctagcagagttgctcagactggatgggagctgagagaagacaaaggagctagaggggggccggggattctggagggggtaagacagggggaaaagctgggagctttggagccagacagtcccgagttcaagtcctgccgctgcttcaaccagccgagtaaccctgcgcaaacaacctggccccttggtgttgctcgtggggcctgataaaattcaactcttagttgctctgagactcccatggcattatatctccaaaggtgccaggcgtggtgctgggcaccaaggtgctttccatcccttccctgctaggggattccctgagcctccacagtgggaggccctttaccacctatgacgctgaccacgattcaagcaacagcaactgtgcagtgattgtccacggtgcctggtggtatgcatcctgttaccgatcaaatctcaatggtcgctatgcagtgtctgaggctgccgcccacaaatatggcattgactgggcctcaggccgtggtgtgggccacccctaccgcagggttcggatgatgcttcgatagggcactctggcagccagtgcccttatctctcctgtacagcttccggatcgtcagccaccttgcctttgccaaccacctctgcttgcctgtccacatttaaaaataaaatcattttagccctttcaa

SEQ ID NO: 1980 - protein, 99 aa, Homo sapiens
MDTEGGGWLVFQRRQDGSVDFFRSWSSYRAGFGNQESEFWLGNENLHQLTLQGNWELRVELEDFNGNRTFAHYATFRLLGEVDHYQLALGKFSEGTAGE

SEQ ID NO: 1981 - DNA, 1013 bp, Homo sapiens
cccctggtgggcccagcaagatggatctactgtggatcctgccctccctgtggcttctcctgcttggggggcctgcctgcctgaagacccaggaacaccccagctgcccaggacccagggaactggaagccagcaaagttgtcctcctgcccagttgtcccggagctccaggaagtcctggggagaagggagccccaggtcctcaagggccacctggaccaccaggcaagatgggccccaagggtgagccaggccccagaaactgccgggagctgttgagccagggcgccaccttgagcggctggtaccatctgtgcctacctgagggcagggccctcccagtcttttgtgacatggacaccgaggggggcggctggctggtgtttcagaggcgccaggatggttctgtggatttcttccgctcttggtcctcctacagagcaggttttgggaaccaagagtctgaattctggctgggaaatgagaatttgcaccagcttactctccagggtaactgggagctgcgggtagagctggaagactttaatggtaaccgtactttcgcccactatgcgaccttccgcctcctcggtgaggtagaccactaccagctggcactgggcaagttctcagagggcactgcaggggattccctgagcctccacagtgggaggccctttaccacctatgacgctgaccacgattcaagcaacagcaactgtgcagtgattgtccacggtgcctggtggtatgcatcctgttaccgatcaaatctcaatggtcgctatgcagtgtctgaggctgccgcccacaaatatggcattgactgggcctcaggccgtggtgtgggccacccctaccgcagggttcggatgatgcttcgatagggcactctggcagccagtgcccttatctctcctgtacagcttccggatcgtcagccaccttgcctttgccaaccacctctgcttgcctgtccacatttaaaaataaaatcattttagccctttcaa

SEQ ID NO: 1982 - protein, 288 aa, Homo sapiens; identical to SEQ ID NO: 38

SEQ ID NO: 1983 - DNA, 1060 bp, Homo sapiens
aatctggcatccttcccctggtgggcccagcaagatggatctactgtggatcctgccctccctgtggcttctcctgcttggggggcctgcctgcctgaagacccaggaacaccccagctgcccaggacccagggaactggaagccagcaaagttgtcctcctgcccagttgtcccggagctccaggaagtcctggggagaagggagccccaggtcctcaagggccacctggaccaccaggcaagatgggccccaagggtgagccaggagatccagtgaacctgctccggtgccaggaaggccccagaaactgccgggagctgttgagccagggcgccaccttgagcggctggtaccatctgtgcctacctgagggcagggccctcccagtcttttgtgacatggacaccgaggggggcggctggctggtgtttcagaggcgccaggatggttctgtggatttcttccgctcttggtcctcctacagagcaggttttgggaaccaagagtctgaattctggctgggaaatgagaatttgcaccagcttactctccagggtaactgggagctgcgggtagagctggaagactttaatggtaaccgtactttcgcccactatgcgaccttccgcctcctcggtgaggtagaccactaccagctggcactgggcaagttctcagagggcactgcaggggattccctgagcctccacagtgggaggccctttaccacctatgacgctgaccacgattcaagcaacagcaactgtgcagtgattgtccacggtgcctggtggtatgcatcctgttaccgatcaaatctcaatggtcgctatgcagtgtctgaggctgccgcccacaaatatggcattgactgggcctcaggccgtggtgtgggccacccctaccgcagggttcggatgatgcttcgatagggcactctggcagccagtgcccttatctctcctgtacagcttccggatcgtcagccaccttgcctttgccaaccacctctgcttgcctgtccacatttaaaaataaaatcattttagccctttcaa

SEQ ID NO: 1984 - protein, 299 aa, Homo sapiens; identical to SEQ ID NO: 36

SEQ ID NO: 1985 - DNA, 987 bp, Homo sapiens
agcaagatggatctactgtggatcctgccctccctgtggcttctcctgcttggggggcctgcctgcctgaagacccaggaacaccccagctgcccaggacccagggaactggaagccagcaaagttgtcctcctgcccagttgtcccggagctccaggaagtcctggggagaagggagccccaggtcctcaaggtgagaggggctggggagcgggctgggatcttgggaatggggaaggcaggaaagtagcaatttttgtctgtgctgaggggccacgacaaaggagcaaggaacctactctgtgccagctccaggctgggcacccggcatcctaagatcaactctgccaggtaagtggtttcatccccattctgctgaggaggaaagggaggttcagagaggataagatatttgcccgcaatcacaaagtgagtgaagggtgaaactgggatttgaacctctggctccaagtctcttgtttctttttggtcctgggcatggggtgggactcaggaaatctctgcctttgtgatttcagggccacctggaccaccaggcaagatgggccccaagggtgagccaggtgagtaagtggggctggaggcctccccgctttctttgcctctgtccctggactctagggtgggatctctgcttggctgctgtgcctatgatggctctctcacaggggaatggatggctgggaggagtgggaaggattaggagaagggcctggctaccctatgatggccctcctattggggatggagggctgggaggagtggggaggattaggagaagggcctgggtaccctatgaaggccctcctacagggtttggaaggctgggaggagtggagaggattaggagaagggcctgggtaccctatgatggccctcctacagggtatggaaggctgggaggagtgggaaggattcggaaaagggcctgggtaccggctccactggtggctcagcgctggggtg

SEQ ID NO: 1986 - protein, 109 aa, Homo sapiens
MDLLWILPSLWLLLLGGPACLKTQEHPSCPGPRELEASKVVLLPSCPGAPGSPGEKGAPGPQGERGWGAGWDLGNGEGRKVAIFVCAEGPRQRSKEPTLCQLQAGHPAS

SEQ ID NO: 1987 - DNA, 1563 bp, Homo sapiens
acacgctcagccgagcccagtctgggagggacgcgcccggcagctgtccaccgatcccggccaccgcccccggccacccccaccccgcgagcccatggaggctccgggaccccgcgccttgcggactgcgctctgtggcggctgttgctgcctcctcctatgtgcccagctggctgtggctggtaaaggagctcgaggctttgggaggggagccctgatccgcctgaatatctggccggcggtccaaggggcctgcaaacagctggaggtctgtgagcactgcgtggagggagacagagcgcgcaatctctccagctgcatgtgggagcagtgccggccagaggagccaggacactgtgtggcccaatctgaggtggtcaaggaaggttgctccatctacaaccgctcagaggcatgtccagctgctcaccaccaccccacctatgaaccgaagacagtcacaacagggagccccccagtccctgaggcccacagccctggatttgacggggccagctttatcggaggtgtcgtgctggtgttgagcctacaggcggtggctttctttgtgctgcacttcctcaaggccaaggacagcacctaccagacgctgtgagtacctggccagcagcaagtacctgagtcccagctcacctcctggttcctgccccaccgttccccttcagtacccagggtgctgtcttctccatgggcaagccctcaggacggtgacagcgtgctccatgtgagccacaccccttttgtctcctccagttggggtgtttcctttgtcagatgttggctgggaccaggactcagcctgggccagtctaggagcccagctgagccctcctgtgtcttttcccttcatgctgccagcagggaagagaaccagtaggtgccagcccaggcaagcctgtggcccgcgtttctgtggctgtgggcaggagctgggccttgtgtctagttgggttttgctctgagaaggggagctgtgcctgaggccctctgtgtgccgtgtgtgctgtggggcgggtcgccacagcctgtgttaaagtgtttgctcttcctctgctgcctcctctcgaggcagggggtccttggctggctgaggcagtgtcaccttcctgagtgtcctctttggcctctgcagaatctgacccctttgggcctggactccatcctgaggggaaaggaggatgcagagggtggcctctgggcacccttgtgggtaagcggggggcgggggcgggaaaaactctggccgccagtttttggctcctgcgggcaccaagcaggctcagtgtctgatgcctgacatctcctcctgtcctgggcctggaacctgcagctgagaaaatccctcaaccacctcgtctcctccatcgcccctgctgggccccccagcctgacagtgggttgtatgcctgcctctttccaccaactggcctgggcactgcccccaaataaaggaactctgcactgcacttcatgtcctgtgtcttgggctgtgtgtggattggatggggtgagggtacggccattgtcctcttcttaacggga

SEQ ID NO: 1988 - protein, 173 aa, Homo sapiens; identical to SEQ ID NO: 40

SEQ ID NO: 1989 - DNA, 939 bp, Homo sapiens
taggagtcctgaaaagggactatatcgtctgcatcttggctctgaaccctgaggtccaaggctgaaaggaattgtgagcaggggagggtctgagttctggctctgtcttcaccctattgggctggtgaggcccagggagggtgggagcccagtcactggtccaagccaccaattggaccatgtgatcatgaggcccagagagaatgtgggtggcataaaagccacagagcaagccaggagcagagccagggctggacagcaccccaccctcccctgccactgttcctcccaccaggcgcttcccaactgcctgcgggatctggactaaacggagcccagggtttaagcaccccatattgaggaccggggcctccaggttacttgtgccagttatgagggtaggactgggatcctggttcacagtgactgctatgacccctgccctgcctcacccctgcagggagccccccagtccctgaggcccacagccctggatttgacggggccagctttatcggaggtgtcgtgctggtgttgagcctacaggcggtggctttctttgtgctgcacttcctcaaggccaaggacagcacctaccagacgctaatctgacccctttgggcctggactccatcctgaggggaaaggaggatgcagagggtggcctctgggcacccttgtgggtaagcggggggcgggggcgggaaaaactctggccgccagtttttggctcctgcgggcaccaagcaggctcagtgtctgatgcctgacatctcctcctgtcctgggcctggaacctgcagctgagaaaatccctcaaccacctcgtctcctccatcgcccctgctgggccccccagcctgacagtgggttgtatgcctgcctctttccaccaactggcctgggcactgcccccaaataaaggaactctgcactgca

SEQ ID NO: 1990 - protein, 46 aa, Homo sapiens
MRPRENVGGIKATEQARSRARAGQHPTLPCHCSSHQALPNCLRDLD

SEQ ID NO: 1991 - DNA, 956 bp, Homo sapiens
agtctgggagggacgcgcccggcagctgtccaccgatcccggccaccgcccccggccacccccaccccgcgagcccatggaggctccgggaccccgcgccttgcggactgcgctctgtggcggctgttgctgcctcctcctatgtgcccagctggctgtggctggtaaaggagctcgaggctttgggaggggagccctgatccgcctgaatatctggccggcggtccaaggggcctgcaaacagctggaggtctgtgagcactgcgtggagggagacagagcgcgcaatctctccagctgcatgtgggagcagtgccggccagaggagccaggacactgtgtggcccaatctgaggtggtcaaggaaggttgctccatctacaaccgctcagaggcatgtccaggtaagggggttcttgcacctaagccaagttgcatgggtctccccagccatagcctgccccccaggaggaaacagcctctctcaggcggtggattttgctcacccatacctgggcccggtatcagttctgcctttagctcactgagaagtcccctcctctctctgcctatttcctcatctgaaaattagtacaggtgtgtggaggggatgggagtgttagctcttcttctagtttaaggcatagcaaggactttggaagttcagagggaatgagagggagtgcttcctggaggaggtggcatcagtaatgagcctggaaggtagagatggagagagagcacatctggtggagggaactgtgtggggcttgcaagtatgttggatgtctagagtagggacagggctgcatctgaatcggaagtttagcggtgagtgggggctggggtcttgatgggagtcagggggtgggaaggctgctttgctatggatcacctgtctcctcagctgctcaccaccaccccacctatgaaccgaagacagtcacaacaggtga

SEQ ID NO: 1992 - protein, 171 aa, Homo sapiens [sequence omitted]

SEQ ID NO: 1993 - DNA, 2548 bp, Homo sapiens
aaaccctgtcattctcaccagggaagcccaaccagccccatcacaagctcttccttcgtcacctggatctcgtcagcctctctgccacccaagggtcccatcaccccacagcctagccgggccccctttccactcttccaccacgttccctgcagcctctctgagacttcaaggctctcgcaccggcgcctctgaaacccccggcccgcagagggcgccgcgtcaaggacagcgcgggcagactcgggagggggcggggccgcagccacggtcgctttttatgaatgggggagcgggcggtgcgaggccttattactatgccgcgcaacgcgcgctgcgccccagcgcgccgcgcccattggctgatcggaccgctgacgtcaccgaaccggtggccgggggcggggcggggtgactcacgccgcttctcccgcggccgcgggggcttctcggggtccacgcacgccctgcgccgccaggacccgagcggagcctccccgcggcccggccgcgcctggtcctgagcggtaccatgatgtggggtgcaggcagccctctggcctggctctcagctggctcaggcaacgtgaatgtaagcagcgtgggcccagcagaggggcccacaggtccagccgcaccactgccctcgcctaaggcctgggatgtggtgctctgcatctcaggcaccctggtgtcctgcgagaatgcgctagtggtggccatcatcgtgggcactcctgccttccgtgcccccatgttcctgctggtgggcagcctggccgtggcagacctgctggcaggcctgggcctggtcctgcactttgctgctgtcttctgcatcggctcagcggagatgagcctggtgctggttggcgtgctggcaatggcctttaccgccagcatcggcagtctactggccatcactgtcgaccgctacctttctctgtacaatgccctcacctactattcagagacaacagtgacacggacctatgtgatgctggccttagtgtggggaggtgccctgggcctggggctgctgcctgtgctggcctggaactgcctggatggcctgaccacatgtggcgtggtttatccactctccaagaaccatctggtagttctggccattgccttcttcatggtgtttggcatcatgctgcagctctacgcccaaatctgccgcatcgtctgccgccatgcccagcagattgcccttcagcggcacctgctgcctgcctcccactatgtggccacccgcaagggcattgccacactggccgtggtgcttggagcctttgccgcctgctggttgcccttcactgtctactgcctgctgggtgatgcccactctccacctctctacacctatcttaccttgctccctgccacctacaactccatgatcaaccctatcatctacgccttccgcaaccaggatgtgcagaaagtgctgtgggctgtctgctgctgctgttcctcttccaagatccccttccgatcccgctcccccagtgatgtctagctgagtcttcatgacccttcaaccctgattactacagaattccagaatgttaggctctccagggcttctttccaaacccccagctccacaccccccagacccagctggttctggagttctaggacattgggtgtttcaaggttctgttcagatccctatgggggcccagctggctccacggttccagaatgttcaggtggtcagtgttctactcagaaatgtctcacagcccagctgggttgcaattccagaatgctgggagttttacagtgccattccaagtcccagatgtccctcttcccccaaacttgaccttgaccatgtcactttacgtttgaatttctgagctaaagagtcagagagattagtcacatagttgcctaaataggagagagaaagattatatatgcacatatacaaagacagtgtctatttatgattgatttatttatttataaatttacttatgggtggtaaggggcaaaaaagaggcccacaccttgatatccaggccataccagggtatcccttgtcccttcacccccatttctgacctcagttcctggaggggggaaagggtgaaagagaaaccacgtattttgttattattttggattattttttatcgaagagatcatagaaaccagagccttctccccaggcctgccctcctcgggtttggaaggggaacacaccagcctctggttttttatttttttaagaagccatcacctgagcaaccaaaaattcctctgcgctggggtccgactgccctctggtggccatttggggaaaactgcagcccggccaggcagctgggaccagaatgcaaccccagctccactccagcctggcgtccagggccacagccatggcctgggggccaagcctcaccctgcggtgccctaaaggagggggggcacgagccaacaccccacccctctgccaaccggggtatggcccccagtgcattccctgttcccgtctccaacccaactcaataaaaaatgattttgtcataaa

SEQ ID NO: 1994 - protein, 330 aa, Homo sapiens; identical to SEQ ID NO: 42

SEQ ID NO: 1995 - DNA, 1080 bp, Homo sapiens
gctccctgccacctacaactccatgatcaaccctatcatctacgccttccgcaaccaggatgtgcagaaagtgctgtgggctgtctgctgctgctgttcctcttccaagatccccttccgatcccgctcccccagtgatgtctagctgagtcttcatgacccttcaaccctgattactacagaattccagaatgttaggctctccagggcttctttccaaacccccagctccacaccccccagacccagctggttctggagttctaggacattgggtgtttcaaggttctgttcagatccctatgggggcccagctggctccacggttccagaatgttcaggtggtcagtgttctactcagaaatgtctcacagcccagctgggttgcaattccagaatgctgggagttttacagtgccattccaagtcccagatgtccctcttcccccaaacttgaccttgaccatgtcactttacgtttgaatttctgagctaaagagtcagagagattagtcacatagttgcctaaataggagagagaaagattatatatgcacatatacaaagacagtgtctatttatgattgatttatttatttataaatttacttatgggtggtaaggggcaaaaaagaggcccacaccttgatatccaggccataccagggtatcccttgtcccttcacccccatttctgacctcagttcctggaggggggaaagggtgaaagagaaaccacgtattttgttattattttggattattttttatttttttaagaagccatcacctgagcaaccaaaaattcctctgcgctggggtccgactgccctctggtggccatttggggaaaactgcagcccggccaggcagctgggaccagaatgcaaccccagctccactccagcctggcgtccagggccacagccatggcctgggggccaagcctcaccctgcggtgccctaaaggagggggggcacgagccaacaccccacccctctgccaaccggggtatggcccccagtgcattccctgttcccgtctccaacccaactcaataaaaaatgattttgtcataa

SEQ ID NO: 1996 - protein, 99 aa, Homo sapiens
MLGSPGLLSKPPAPHPPDPAGSGVLGHWVFQGSVQIPMGAQLAPRFQNVQVVSVLLRNVSQPSWVAIPECWEFYSAIPSPRCPSSPKLDLDHVTLRLNF

SEQ ID NO: 1997 - DNA, 968 bp, Homo sapiens
tccgcaaccaggatgtgcagaaagtgctgtgggctgtctgctgctgctgttcctcttccaagatccccttccgatcccgctcccccagtgatgtctagctgagtcttcatgacccttcaaccctgattactacagaattccagaatgttaggctctccagggcttctttccaaacccccagctccacaccccccagacccagctggttctggagttctaggacattgggtgtttcaaggttctgttcagatccctatgggggcccagctggctccacggttccagaatgttcaggtggtcagtgttctactcagaaatgtctcacagcccagctgggttgcaattccagaatgctgggagttttacagtgccattccaagtcccagatgtccctcttcccccaaacttgaccttgaccatgtcactttacgtttgaatttctgagctaaagagtcagagagattagtcacatagttgcctaaataggagagagaaagattatatatgcacatatacaaagacagtgtctatttatgattgatttatttatttataaatttacttatgggtggtaaggggcaaaaaagaggcccacaccttgatatccaggccataccagggtatcccttgtcccttcacccccatttctgacctcagttcctggaggggggaaagggtgaaagagaaaccacgtattttgttattattttggatttgccctctggtggccatttggggaaaactgcagcccggccaggcagctgggaccagaatgcaaccccagctccactccagcctggcgtccagggccacagccatggcctgggggccaagcctcaccctgcggtgccctaaaggagggggggcacgagccaacaccccacccctctgccaaccggggtatggcccccagtgcattccctgttcccgtctccaacccaactcaataaaaaatgattttgtcataa

SEQ ID NO: 1998 - protein, 99 aa, Homo sapiens; identical to SEQ ID NO: 1996

SEQ ID NO: 1999 - DNA, 2327 bp, Homo sapiens
tgaaaggcagaggggctccaggtcctgtttccagctcccctcactgcacatggtgaagctcgctccctccctccctcccttcccgcttttcccagagctaatacacaggtgctattattcagaaaaaaactggtcagctctagccaacagtgaggtttcttttcttctgccctaactattgtgtagcctcttatgctgaaatcggcttctgctggcttctccggctttcagagccctgaaacaaagagaaacaggatctgtccctacccagcacagcaaatggttgtagtaattgccaaagccctcataaagccctccggcttgaggagagagtgtatagtcatgggttctgcctctgtgcccttgctggccgcttctcctctgccttctttcctggaactcagggtgtggggactgagcctgtaggggacagcatgccgtcttgctgtggccactcccaagtgtgccctcttccctctttacacatcaggtgtctctggcacaggacttggcactaagctccatgctgagacaccaggctatgtgggcccccaccttgtttcccagcctgcaccttagaagccgaaggtgctttcatcagaaccctaaaatggtcgttgaaggcgcctgggccgcagcccagcagtagttggagaggcaggcagagggcagtggttctcccaaataggagacctggggcctggccaggccagggtttgggcctaatggctttgactaaattacccccatcctccttgcccggaaaagggagagctagagccactcactgtcattctgctctgaccttgaagggggcggtgttggcctggcttctggaatggactgagtccatcgtggaaagggctgggggcaggaggaggtggggaggggcactgcctgcggaaggtaggattagatcattagctcagtgacctcctagggtttcgatgtgctatgttctcatcctacagttggtttggtaatgatctgcaagtcccggagagcaacagcacagctctgcctgacgctctcattgaggtctctgtggctttggtgaccctgcttaagcattcccaccgtgtcccagctctgctctaggactgcctcccactgcggcccctcacctgacttcagggtatggggagggagggagccagtgctccaaggccagggggctttgctcatgagagatgtcaggcttcctggaggcatcaggctttgagccctgctggggtccaactgacctgggaccaggtgtcgcgcagagatgtgcctcattctgtgcctccttctgtgcctcctaccatgttccctttaactgtgcctcagtgtgggttagggaacaattttgttattgtattaagtttattcagttaattcacttgaggaactaaccagtttttactttctgtctagaatgatgtacatgtagtagagtaagccataatgctcccaaagtgccttgttttctctgatacaaacatatttataaggacatattcctgtgggttcttgggtgtgtttgccacatcaagattttagggaaggggggtatatgtgtagtagggatgccgtttgaaaacaggcactcttcccctgaggatgggaaaggagctcttcagttggagatctaggcagtgggttaagccagacccctaaagtgaccctttcctcttctgccctattcttctcagaccctcagaaagacatccaatttttttaaatccctgtagctccaagcctggtctcatttgcttccctgccaggctcatcgtgtgtataccacatttgtgccccactgacctgaaggttccatgtaactgtatacacatgaatacttaaatgccaacatttaaaataatttgataaagtctttgtagccactcagccacctctggtgtttgtggtattgttttaatgggacaagagattagaaggaaatgacactaacagccacaggtggtggccagagctcaggaggggctccagtgtgggtgggcctaaagggcaggaggcttttgggtgtggaaagtgcattgtgtgcagaggtggagaaggctggaaaccatttcagtttaggaggagacccaggttggaggacctgcagacccagatacccagtccccttctcaccatgagaaagggggtgtgctggggcctcaggagacaatctgctggcaactgtttgcatcaggcaggagaggagtacaggctgaatgctgatgctgcgcccaacatctggccggcatcttgtctgcctctcagacccaagcaacttaccttaaatagaacgatttacaatggaatccgataaaaggtttaggctg

SEQ ID NO: 2000 - protein, 47 aa, Homo sapiens
MFSSYSWFGNDLQVPESNSTALPDALIEVSVALVTLLKHSHRVPALL

SEQ ID NO: 2001 - DNA, 1604 bp, Homo sapiens
gctgaggacacgccttcctcacccttctgtctctttgccactaggttttcagctgcgcagggttgaggagcagcgggaacaagagaagcgggatgttgtgggcaatgacgtggccaccatcttgtctcgtcgcattgctgttgagtacagtgactcagaagatgactcctctgaatttgatgaggacgactggtccgattaactctttctgcctgctgcccaccttctttttctttccttcctacctgccttctttgatgccaaccccaacagacccgtagggggagaaaagggaggaaaaaagtaattttaaggggccaaagctttccctgaagcaaccaaagatatatccaagtgcttcctccaagtcaacatgtatttcctctccccattttcaggccctgtggggctcctgaggttcagtagctgggatgttccctctttccttcaagtgcctgttgcatattgaaaggaaggagaaatcccaaagcagattcctttgatcgggtttctgttggagatggggcttcccttaggagccatattcaactacagccttctaaaacctgtgccctcagccacttcgaatgccagccaccttctggttctaaaacggggagtggtctgaatgaacacagctgacccctttcccgcgcactgaaagggcagagtaggccgaagggtccaagggccagactgcctcaccctctgccctaatcagcagggtgggcctgccttttgctaagcgatctctatgcctgggatgccctttattccaggaggcatcaagcctctaaagaatgtctcacctcctctgcccaaaaatgatgcctttctgtaggctggtgttgttgcctccctcccaggatccctttggtgagtatggtgttcaggatgcaccaccaccacctctagataccttcaggcaacacagcccagttttaacctctagtatccatgaccaaactatccctgacacatgaggacaggggcctcttctggctgtcaggagcaaagcctggtctcatttgcttccctgccaggctcatcgtgtgtataccacatttgtgccccactgacctgaaggttccatgtaactgtatacacatgaatacttaaatgccaacatttaaaataatttgataaagtctttgtagccactcagccacctctggtgtttgtggtattgttttaatgggacaagagattagaaggaaatgacactaacagccacaggtggtggccagagctcaggaggggctccagtgtgggtgggcctaaagggcaggaggcttttgggtgtggaaagtgcattgtgtgcagaggtggagaaggctggaaaccatttcagtttaggaggagacccaggttggaggacctgcagacccagatacccagtccccttctcaccatgagaaagggggtgtgctggggcctcaggagacaatctgctggcaactgtttgcatcaggcaggagaggagtacaggctgaatgctgatgctgcgcccaacatctggccggcatcttgtctgcctctcagacccaagcaacttaccttaaatagaacgatttacaatggaatccgataaaaggtttaggctg

SEQ ID NO: 2002 - protein, 53 aa, Homo sapiens
MTKLSLTHEDRGLFWLSGAKPGLICFPARLIVCIPHLCPTDLKVPCNCIHMNT

SEQ ID NO: 2003 - DNA, 3111 bp, Homo sapiens
ggtttggctggacccaaaagatccagtgtggtcagcccaagccatccaccaccagctcctcctctaggctctccaccaggccctaaacccgggtttgctccaccacctgcccctccgccacctccgcctccaatgataggcatcccacctccaccaccgcctgtaggatttgggtctccagggacgcctccaccaccctcacccccatttttcccagagctaatacacaggtgctattattcagaaaaaaactggtcagctctagccaacagtgaggtttcttttcttctgccctaactattgtgtagcctcttatgctgaaatcggcttctgctggcttctccggctttcagagccctgaaacaaagagaaacaggatctgtccctacccagcacagcaaatggttgtagtaattgccaaagccctcataaagccctccggcttgaggagagagtgtatagtcatgggttctgcctctgtgcccttgctggccgcttctcctctgccttctttcctggaactcagggtgtggggactgagcctgtaggggacagcatgccgtcttgctgtggccactcccaagtgtgccctcttccctctttacacatcaggtgtctctggcacaggacttggcactaagctccatgctgagacaccaggctatgtgggcccccaccttgtttcccagcctgcaccttagaagccgaaggtgctttcatcagaaccctaaaatggtcgttgaaggcgcctgggccgcagcccagcagtagttggagaggcaggcagagggcagtggttctcccaaataggagacctggggcctggccaggccagggtttgggcctaatggctttgactaaattacccccatcctccttgcccggaaaagggagagctagagccactcactgtcattctgctctgaccttgaagggggcggtgttggcctggcttctggaatggactgagtccatcgtggaaagggctgggggcaggaggaggtggggaggggcactgcctgcggaaggtaggattagatcattagctcagtgacctcctagggtttcgatgtgctatgttctcatcctacagttggtttggtaatgatctgcaagtcccggagagcaacagcacagctctgcctgacgctctcattaaaatctatgcagccaagctcggcactttgtagcagccggccttgcgaagcctcctcagctcggggggccggggacccagtgagccgagaggccctctgggctccacttatgcatatgcaccaaaaaaaaaaaaaaaaaaaaaaggcttctttagacccagagccctttaagatgataaaggacccaatgcaggtaatcctgtttttggactcacgtaatgtagaatgcaaagtttagtgattatttaatctgggcctaagctagtgagagtatggaacaatggcccataaggactcctaagcgccgaagccaaggagcctcctcccttcctggttcaccccgcccaagggacctgcccccattcctgtggccctggggcccagcttccaatagtgtcagaagcaacttgtggctttgccttggttgtgagatgggtacattccaaaggagcagcctgggggagggggcaggctcagccagcccttggaggctcagagcagctggcccaggctccagctcgcctccagtggaagcccgagcgccctcagaaacgaccctggccaatgtcaacgcagagccgaggcggtgttgtcacggctaatgtgaaatctcttcccgtggcgcccatcctctgactctgcagtgccagcttggacagattgaggtctctgtggctttggtgaccctgcttaagcattcccaccgtgtcccagctctgctctaggactgcctcccactgcggcccctcacctgacttcagggtatggggagggagggagccagtgctccaaggccagggggctttgctcatgagagatgtcaggcttcctggaggcatcaggctttgagccctgctggggtccaactgacctgggaccaggtgtcgcgcagagatgtgcctcattctgtgcctccttctgtgcctcctaccatgttccctttaactgtgcctcagtgtgggttagggaacaattttgttattgtattaagtttattcagttaattcacttgaggaactaaccagtttttactttctgtctagaatgatgtacatgtagtagagtaagccataatgctcccaaagtgccttgttttctctgatacaaacatatttataaggacatattcctgtgggttcttgggtgtgtttgccacatcaagattttagggaaggggggtatatgtgtagtagggatgccgtttgaaaacaggcactcttcccctgaggatgggaaaggagctcttcagttggagatctaggcagtgggttaagccagacccctaaagtgaccctttcctcttctgccctattcttctcagaccctcagaaagacatccaatttttttaaatccctgtagctccaagcctggtctcatttgcttccctgccaggctcatcgtgtgtataccacatttgtgccccactgacctgaaggttccatgtaactgtatacacatgaatacttaaatgccaacatttaaaataatttgataaagtctttgtagccactcagccacctctggtgtttgtggtattgttttaatgggacaagagattagaaggaaatgacactaacagccacaggtggtggccagagctcaggaggggctccagtgtgggtgggcctaaagggcaggaggcttttgggtgtggaaagtgcattgtgtgcagaggtggagaaggctggaaaccatttcagtttaggaggagacccaggttggaggacctgcagacccagatacccagtccccttctcaccatgagaaagggggtgtgctggggcctcaggagacaatctgctggcaactgtttgcatcaggcaggagaggagtacaggctgaatgctgatgctgcgcccaacatctggccggcatcttgtctgcctctcagacccaagcaacttaccttaaatagaacgatttacaatggaatccgataaaaggtttaggctg

SEQ ID NO: 2004 - protein, 54 aa, Homo sapiens
MIGIPPPPPPVGFGSPGTPPPPSPPFFPELIHRCYYSEKNWSALANSEVSFLLP

SEQ ID NO: 2005 - DNA, 4951 bp, Homo sapiens
gatctggtttggctggacccaaaagatccagtgtggtcagcccaagccatccaccaccagctcctcctctaggctctccaccaggccctaaacccgggtttgctccaccacctgcccctccgccacctccgcctccaatgataggcatcccacctccaccaccgcctgtaggatttgggtctccagggacgcctccaccaccctcacccccatctttcccacctcaccctgattttgctgcccctccacctcctcctccaccaccaggccccctcctccccctttcactggtgcagatggccagcctgctataccaccaccgctttctgataccaccaagcccaagtcctccttgcctgccgtgagcgatgcccgtagcgacctgctttcagccatccgtcaaggttttcagctgcgcagggttgaggagcagcgggaacaagagaagcgggatgttgtgggcaatgacgtggccaccatcttgtctcgtcgcattgctgttgagtacagtgactcagaagatgactcctctgaatttgatgaggacgactggtccgattaactctttctgcctgctgcccaccttctttttctttccttcctacctgccttctttgatgccaaccccaacagacccgtagggggagaaaagggaggaaaaaagtaattttaaggggccaaagctttccctgaagcaaccaaagatatatccaagtgcttcctccaagtcaacatgtatttcctctccccattttcaggccctgtggggctcctgaggttcagtagctgggatgttccctctttccttcaagtgcctgttgcatattgaaaggaaggagaaatcccaaagcagattcctttgatcgggtttctgttggagatggggcttcccttaggagccatattcaactacagccttctaaaacctgtgccctcagccacttcgaatgccagccaccttctggttctaaaacggggagtggtctgaatgaacacagctgacccctttcccgcgcactgaaagggcagagtaggccgaagggtccaagggccagactgcctcaccctctgccctaatcagcagggtgggcctgccttttgctaagcgatctctatgcctgggatgccctttattccaggaggcatcaagcctctaaagaatgtctcacctcctctgcccaaaaatgatgcctttctgtaggctggtgttgttgcctccctcccaggatccctttggtgagtatggtgttcaggatgcaccaccaccacctctagataccttcaggcaacacagcccagttttaacctctagtatccatgaccaaactatccctgacacatgaggacaggggcctcttctggctgtcaggagcaaagcctgaagacttggagctgcaggactggaagaacagtggagccccgtgggtctcaccctttaaggatgctgaggcctagagatgggaagtgacttgctcaaggtcacacaattggatagtgacatagctagagcgcagagttcctgattccaagtcacctgtgctttctgggaccaaagaatgggcacctgctggagtccgggcagagctttctcagttgtattgctactccagacctcaccataggttggggtcccagtaggaaggctcagggtctgtgccagccctgtcggtgctgctcagaccttcatagcctctcttgtcattctttgttgccccttttctgtcaccagccaaccacatagccttgggaccagcctctctgggggaccagaagtagtgagagaaggaaggggataggcagctttgacaggtgctgctttcaattcctctgcaactcctcccccttttatttccccaatttaaacaaagattctgccaactgtggaaacttcagtccctcaggctggcagccatgccagtacctgcctgggggtggggggtgcctggcagccatgaagcaggctgaaaggcagaggggctccaggtcctgtttccagctcccctcactgcacatggtgaagctcgctccctccctccctcccttcccgcttttcccagagctaatacacaggtgctattattcagaaaaaaactggtcagctctagccaacagtgaggtttcttttcttctgccctaactattgtgtagcctcttatgctgaaatcggcttctgctggcttctccggctttcagagccctgaaacaaagagaaacaggatctgtccctacccagcacagcaaatggttgtagtaattgccaaagccctcataaagccctccggcttgaggagagagtgtatagtcatgggttctgcctctgtgcccttgctggccgcttctcctctgccttctttcctggaactcagggtgtggggactgagcctgtaggggacagcatgccgtcttgctgtggccactcccaagtgtgccctcttccctctttacacatcaggtgtctctggcacaggacttggcactaagctccatgctgagacaccaggctatgtgggcccccaccttgtttcccagcctgcaccttagaagccgaaggtgctttcatcagaaccctaaaatggtcgttgaaggcgcctgggccgcagcccagcagtagttggagaggcaggcagagggcagtggttctcccaaataggagacctggggcctggccaggccagggtttgggcctaatggctttgactaaattacccccatcctccttgcccggaaaagggagagctagagccactcactgtcattctgctctgaccttgaagggggcggtgttggcctggcttctggaatggactgagtccatcgtggaaagggctgggggcaggaggaggtggggaggggcactgcctgcggaaggtaggattagatcattagctcagtgacctcctagggtttcgatgtgctatgttctcatcctacagttggtttggtaatgatctgcaagtcccggagagcaacagcacagctctgcctgacgctctcattaaaatctatgcagccaagctcggcactttgtagcagccggccttgcgaagcctcctcagctcggggggccggggacccagtgagccgagaggccctctgggctccacttatgcatatgcaccaaaaaaaaaaaaaaaaaaaaaaggcttctttagacccagagccctttaagatgataaaggacccaatgcaggtaatcctgtttttggactcacgtaatgtagaatgcaaagtttagtgattatttaatctgggcctaagctagtgagagtatggaacaatggcccataaggactcctaagcgccgaagccaaggagcctcctcccttcctggttcaccccgcccaagggacctgcccccattcctgtggccctggggcccagcttccaatagtgtcagaagcaacttgtggctttgccttggttgtgagatgggtacattccaaaggagcagcctgggggagggggcaggctcagccagcccttggaggctcagagcagctggcccaggctccagctcgcctccagtggaagcccgagcgccctcagaaacgaccctggccaatgtcaacgcagagccgaggcggtgttgtcacggctaatgtgaaatctcttcccgtggcgcccatcctctgactctgcagtgccagcttggacagattgaggtctctgtggctttggtgaccctgcttaagcattcccaccgtgtcccagctctgctctaggactgcctcccactgcggcccctcacctgacttcagggtatggggagggagggagccagtgctccaaggccagggggctttgctcatgagagatgtcaggcttcctggaggcatcaggctttgagccctgctggggtccaactgacctgggaccaggtgtcgcgcagagatgtgcctcattctgtgcctccttctgtgcctcctaccatgttccctttaactgtgcctcagtgtgggttagggaacaattttgttattgtattaagtttattcagttaattcacttgaggaactaaccagtttttactttctgtctagaatgatgtacatgtagtagagtaagccataatgctcccaaagtgccttgttttctctgatacaaacatatttataaggacatattcctgtgggttcttgggtgtgtttgccacatcaagattttagggaaggggggtatatgtgtagtagggatgccgtttgaaaacaggcactcttcccctgaggatgggaaaggagctcttcagttggagatctaggcagtgggttaagccagacccctaaagtgaccctttcctcttctgccctattcttctcagaccctcagaaagacatccaatttttttaaatccctgtagctccaagcctggtctcatttgcttccctgccaggctcatcgtgtgtataccacatttgtgccccactgacctgaaggttccatgtaactgtatacacatgaatacttaaatgccaacatttaaaataatttgataaagtctttgtagccactcagccacctctggtgtttgtggtattgttttaatgggacaagagattagaaggaaatgacactaacagccacaggtggtggccagagctcaggaggggctccagtgtgggtgggcctaaagggcaggaggcttttgggtgtggaaagtgcattgtgtgcagaggtggagaaggctggaaaccatttcagtttaggaggagacccaggttggaggacctgcagacccagatacccagtccccttctcaccatgagaaagggggtgtgctggggcctcaggagacaatctgctggcaactgtttgcatcaggcaggagaggagtacaggctgaatgctgatgctgcgcccaacatctggccggcatcttgtctgcctctcagacccaagcaacttaccttaaatagaacgatttacaatggaatccgataaaaggtttaggctg

SEQ ID NO: 2006 - protein, 90 aa, Homo sapiens
MPVATCFQPSVKVFSCAGLRSSGNKRSGMLWAMTWPPSCLVALLLSTVTQKMTPLNLMRTTGPINSFCLLPTFFFFPSYLPSLMPTPTDP

SEQ ID NO: 2007 - DNA, 3848 bp, Homo sapiens
ggcagcccgcgaggcggtccgcgggagcacactctgtgcggagactgggcggccggccgacccttcctgtcgctgacggcgactgcgggaggccaggttgccttttgctaagcgatctctatgcctgggatgccctttattccaggaggcatcaagcctctaaagaatgtctcacctcctctgcccaaaaatgatgcctttctgtaggctggtgttgttgcctccctcccaggatccctttggtgagtatggtgttcaggatgcaccaccaccacctctagataccttcaggcaacacagcccagttttaacctctagtatccatgaccaaactatccctgacacatgaggacaggggcctcttctggctgtcaggagcaaagcctgaagacttggagctgcaggactggaagaacagtggagccccgtgggtctcacccttgggaccaaagaatgggcacctgctggagtccgggcagagctttctcagttgtattgctactccagacctcaccataggttggggtcccagtaggaaggctcagggtctgtgccagccctgtcggtgctgctcagaccttcatagcctctcttgtcattctttgttgccccttttctgtcaccagccaaccacatagccttgggaccagcctctctgggggaccagaagtagtgagagaaggaaggggataggcagctttgacaggtgctgctttcaattcctctgcaactcctcccccttttatttccccaatttaaacaaagattctgccaactgtggaaacttcagtccctcaggctggcagccatgccagtacctgcctgggggtggggggtgcctggcagccatgaagcaggctgaaaggcagaggggctccaggtcctgtttccagctcccctcactgcacatggtgaagctcgctccctccctccctcccttcccgcttttcccagagctaatacacaggtgctattattcagaaaaaaactggtcagctctagccaacagtgaggtttcttttcttctgccctaactattgtgtagcctcttatgctgaaatcggcttctgctggcttctccggctttcagagccctgaaacaaagagaaacaggatctgtccctacccagcacagcaaatggttgtagtaattgccaaagccctcataaagccctccggcttgaggagagagtgtatagtcatgggttctgcctctgtgcccttgctggccgcttctcctctgccttctttcctggaactcagggtgtggggactgagcctgtaggggacagcatgccgtcttgctgtggccactcccaagtgtgccctcttccctctttacacatcaggtgtctctggcacaggacttggcactaagctccatgctgagacaccaggctatgtgggcccccaccttgtttcccagcctgcaccttagaagccgaaggtgctttcatcagaaccctaaaatggtcgttgaaggcgcctgggccgcagcccagcagtagttggagaggcaggcagagggcagtggttctcccaaataggagacctggggcctggccaggccagggtttgggcctaatggctttgactaaattacccccatcctccttgcccggaaaagggagagctagagccactcactgtcattctgctctgaccttgaagggggcggtgttggcctggcttctggaatggactgagtccatcgtggaaagggctgggggcaggaggaggtggggaggggcactgcctgcggaaggtaggattagatcattagctcagtgacctcctagggtttcgatgtgctatgttctcatcctacagttggtttggtaatgatctgcaagtcccggagagcaacagcacagctctgcctgacgctctcattaaaatctatgcagccaagctcggcactttgtagcagccggccttgcgaagcctcctcagctcggggggccggggacccagtgagccgagaggccctctgggctccacttatgcatatgcaccaaaaaaaaaaaaaaaaaaaaaaggcttctttagacccagagccctttaagatgataaaggacccaatgcaggtaatcctgtttttggactcacgtaatgtagaatgcaaagtttagtgattatttaatctgggcctaagctagtgagagtatggaacaatggcccataaggactcctaagcgccgaagccaaggagcctcctcccttcctggttcaccccgcccaagggacctgcccccattcctgtggccctggggcccagcttccaatagtgtcagaagcaacttgtggctttgccttggttgtgagatgggtacattccaaaggagcagcctgggggagggggcaggctcagccagcccttggaggctcagagcagctggcccaggctccagctcgcctccagtggaagcccgagcgccctcagaaacgaccctggccaatgtcaacgcagagccgaggcggtgttgtcacggctaatgtgaaatctcttcccgtggcgcccatcctctgactctgcagtgccagcttggacagattgaggtctctgtggctttggtgaccctgcttaagcattcccaccgtgtcccagctctgctctaggactgcctcccactgcggcccctcacctgacttcagggtatggggagggagggagccagtgctccaaggccagggggctttgctcatgagagatgtcaggcttcctggaggcatcaggctttgagccctgctggggtccaactgacctgggaccaggtgtcgcgcagagatgtgcctcattctgtgcctccttctgtgcctcctaccatgttccctttaactgtgcctcagtgtgggttagggaacaattttgttattgtattaagtttattcagttaattcacttgaggaactaaccagtttttactttctgtctagaatgatgtacatgtagtagagtaagccataatgctcccaaagtgccttgttttctctgatacaaacatatttataaggacatattcctgtgggttcttgggtgtgtttgccacatcaagattttagggaaggggggtatatgtgtagtagggatgccgtttgaaaacaggcactcttcccctgaggatgggaaaggagctcttcagttggagatctaggcagtgggttaagccagacccctaaagtgaccctttcctcttctgccctattcttctcagaccctcagaaagacatccaatttttttaaatccctgtagctccaagcctggtctcatttgcttccctgccaggctcatcgtgtgtataccacatttgtgccccactgacctgaaggttccatgtaactgtatacacatgaatacttaaatgccaacatttaaaataatttgataaagtctttgtagccactcagccacctctggtgtttgtggtattgttttaatgggacaagagattagaaggaaatgacactaacagccacaggtggtggccagagctcaggaggggctccagtgtgggtgggcctaaagggcaggaggcttttgggtgtggaaagtgcattgtgtgcagaggtggagaaggctggaaaccatttcagtttaggaggagacccaggttggaggacctgcagacccagatacccagtccccttctcaccatgagaaagggggtgtgctggggcctcaggagacaatctgctggcaactgtttgcatcaggcaggagaggagtacaggctgaatgctgatgctgcgcccaacatctggccggcatcttgtctgcctctcagacccaagcaacttaccttaaatagaacgatttacaatggaatccgataaaaggtttaggctg

SEQ ID NO: 2008 - protein, 104 aa, Homo sapiens
MTKLSLTHEDRGLFWLSGAKPEDLELQDWKNSGAPWVSPLGPKNGHLLESGQSFLSCIATPDLTIGWGPSRKAQGLCQPCRCCSDLHSLSCHSLLPLFCHQPTT

SEQ ID NO: 2009 - DNA, 6102 bp, Homo sapiens
ggggaatcgcgtaatggcggacacaggcagggcgagcgcggctgggggcgtagcgcgctgagggggtccggccgtttggcagcccgcgaggcggtccgcgggagcacactctgtgcggagactgggcggccggccgacccttcctgtcgctgacggcgactgcgggaggccaggttgtttttcaccattcagaacattgcctgaagcaggtccaccatgccgttagtaacgaggaacatcgagccaaggcacctgtgccgtcagacgttgcctagcgttagaagcgagctggaatgcgtgaccaacatcaccctggcaaatgtcatccgacagctgggcagcctgagtaaatatgcagaggacatttttggagagctctttactcaggcaaatacctttgcctctcgggtaagctcccttgctgagagggtcgaccgactacaggttaaagtcactcagctggatcccaaggaagaagaagtgtcactgcaaggaatcaacacccgaaaagccttcagaagttccaccattcaagaccagaagctttttgacagaaactctctcccagtgcctgtcttagaaacatacaatacctgtgatactcctccccctctcaacaatcttaccccttacagggacgatggaaaagaggcactcaaattctacacagacccttcatacttctttgatctttggaaggagaagatgctgcaggacaccaaggatatcatgaaagagaagagaaagcataggaaagaaaagaaagataatccaaatcgagggaatgtaaacccacgtaaaatcaagacacgtaaggaagagtgggagaaaatgaagatggggcaagaatttgtggagtccaaagaaaagctggggacttctgggtatccacccactttggtgtaccagaatggcagcattggctgtgttgaaaacgtggatgcaagtagctatccgccaccaccacagtcagactctgcttcttcaccttctccttccttctccgaggacaacttgcctcctccaccagcagaattcagttacccagtggacaaccaaagaggatctggtttggctggacccaaaagatccagtgtggtcagcccaagccatccaccaccagctcctcctctaggctctccaccaggccctaaacccgggtttgctccaccacctgcccctccgccacctccgcctccaatgataggcatcccacctccaccaccgcctgtaggatttgggtctccagggacgcctccaccaccctcacccccatctttcccacctcaccctgattttgctgcccctccacctcctcctccaccaccagcagctgactacccaactctgccaccacctcccttgtcccagccaacaggaggagcacctcctcctccccctcctcctcctcctccggggccccctcctccccctttcactggtgcagatggccagcctgctataccaccaccgctttctgataccaccaagcccaagtcctccttgcctgccgtgagcgatgcccgtagcgacctgctttcagccatccgtcaaggttttcagctgcgcagggttgaggagcagcgggaacaagagaagcgggatgttgtgggcaatgacgtggccaccatcttgtctcgtcgcattgctgttgagtacagtgactcagaagatgactcctctgaatttgatgaggacgactggtccgattaactctttctgcctgctgcccaccttctttttctttccttcctacctgccttctttgatgccaaccccaacagacccgtagggggagaaaagggaggaaaaaagtaattttaaggggccaaagctttccctgaagcaaccaaagatatatccaagtgcttcctccaagtcaacatgtatttcctctccccattttcaggccctgtggggctcctgaggttcagtagctgggatgttccctctttccttcaagtgcctgttgcatattgaaaggaaggagaaatcccaaagcagattcctttgatcgggtttctgttggagatggggcttcccttaggagccatattcaactacagccttctaaaacctgtgccctcagccacttcgaatgccagccaccttctggttctaaaacggggagtggtctgaatgaacacagctgacccctttcccgcgcactgaaagggcagagtaggccgaagggtccaagggccagactgcctcaccctctgccctaatcagcagggtgggcctgccttttgctaagcgatctctatgcctgggatgccctttattccaggaggcatcaagcctctaaagaatgtctcacctcctctgcccaaaaatgatgcctttctgtaggctggtgttgttgcctccctcccaggatccctttggtgagtatggtgttcaggatgcaccaccaccacctctagataccttcaggcaacacagcccagttttaacctctagtatccatgaccaaactatccctgacacatgaggacaggggcctcttctggctgtcaggagcaaagcctgaagacttggagctgcaggactggaagaacagtggagccccgtgggtctcaccctttaaggatgctgaggcctagagatgggaagtgacttgctcaaggtcacacaattggatagtgacatagctagagcgcagagttcctgattccaagtcacctgtgctttctgggaccaaagaatgggcacctgctggagtccgggcagagctttctcagttgtattgctactccagacctcaccataggttggggtcccagtaggaaggctcagggtctgtgccagccctgtcggtgctgctcagaccttcatagcctctcttgtcattctttgttgccccttttctgtcaccagccaaccacatagccttgggaccagcctctctgggggaccagaagtagtgagagaaggaaggggataggcagctttgacaggtgctgctttcaattcctctgcaactcctcccccttttatttccccaatttaaacaaagattctgccaactgtggaaacttcagtccctcaggctggcagccatgccagtacctgcctgggggtggggggtgcctggcagccatgaagcaggctgaaaggcagaggggctccaggtcctgtttccagctcccctcactgcacatggtgaagctcgctccctccctccctcccttcccgcttttcccagagctaatacacaggtgctattattcagaaaaaaactggtcagctctagccaacagtgaggtttcttttcttctgccctaactattgtgtagcctcttatgctgaaatcggcttctgctggcttctccggctttcagagccctgaaacaaagagaaacaggatctgtccctacccagcacagcaaatggttgtagtaattgccaaagccctcataaagccctccggcttgaggagagagtgtatagtcatgggttctgcctctgtgcccttgctggccgcttctcctctgccttctttcctggaactcagggtgtggggactgagcctgtaggggacagcatgccgtcttgctgtggccactcccaagtgtgccctcttccctctttacacatcaggtgtctctggcacaggacttggcactaagctccatgctgagacaccaggctatgtgggcccccaccttgtttcccagcctgcaccttagaagccgaaggtgctttcatcagaaccctaaaatggtcgttgaaggcgcctgggccgcagcccagcagtagttggagaggcaggcagagggcagtggttctcccaaataggagacctggggcctggccaggccagggtttgggcctaatggctttgactaaattacccccatcctccttgcccggaaaagggagagctagagccactcactgtcattctgctctgaccttgaagggggcggtgttggcctggcttctggaatggactgagtccatcgtggaaagggctgggggcaggaggaggtggggaggggcactgcctgcggaaggtaggattagatcattagctcagtgacctcctagggtttcgatgtgctatgttctcatcctacagttggtttggtaatgatctgcaagtcccggagagcaacagcacagctctgcctgacgctctcattaaaatctatgcagccaagctcggcactttgtagcagccggccttgcgaagcctcctcagctcggggggccggggacccagtgagccgagaggccctctgggctccacttatgcatatgcaccaaaaaaaaaaaaaaaaaaaaaaggcttctttagacccagagccctttaagatgataaaggacccaatgcaggtaatcctgtttttggactcacgtaatgtagaatgcaaagtttagtgattatttaatctgggcctaagctagtgagagtatggaacaatggcccataaggactcctaagcgccgaagccaaggagcctcctcccttcctggttcaccccgcccaagggacctgcccccattcctgtggccctggggcccagcttccaatagtgtcagaagcaacttgtggctttgccttggttgtgagatgggtacattccaaaggagcagcctgggggagggggcaggctcagccagcccttggaggctcagagcagctggcccaggctccagctcgcctccagtggaagcccgagcgccctcagaaacgaccctggccaatgtcaacgcagagccgaggcggtgttgtcacggctaatgtgaaatctcttcccgtggcgcccatcctctgactctgcagtgccagcttggacagattgaggtctctgtggctttggtgaccctgcttaagcattcccaccgtgtcccagctctgctctaggactgcctcccactgcggcccctcacctgacttcagggtatggggagggagggagccagtgctccaaggccagggggctttgctcatgagagatgtcaggcttcctggaggcatcaggctttgagccctgctggggtccaactgacctgggaccaggtgtcgcgcagagatgtgcctcattctgtgcctccttctgtgcctcctaccatgttccctttaactgtgcctcagtgtgggttagggaacaattttgttattgtattaagtttattcagttaattcacttgaggaactaaccagtttttactttctgtctagaatgatgtacatgtagtagagtaagccataatgctcccaaagtgccttgttttctctgatacaaacatatttataaggacatattcctgtgggttcttgggtgtgtttgccacatcaagattttagggaaggggggtatatgtgtagtagggatgccgtttgaaaacaggcactcttcccctgaggatgggaaaggagctcttcagttggagatctaggcagtgggttaagccagacccctaaagtgaccctttcctcttctgccctattcttctcagaccctcagaaagacatccaatttttttaaatccctgtagctccaagcctggtctcatttgcttccctgccaggctcatcgtgtgtataccacatttgtgccccactgacctgaaggttccatgtaactgtatacacatgaatacttaaatgccaacatttaaaataatttgataaagtctttgtagccactcagccacctctggtgtttgtggtattgttttaatgggacaagagattagaaggaaatgacactaacagccacaggtggtggccagagctcaggaggggctccagtgtgggtgggcctaaagggcaggaggcttttgggtgtggaaagtgcattgtgtgcagaggtggagaaggctggaaaccatttcagtttaggaggagacccaggttggaggacctgcagacccagatacccagtccccttctcaccatgagaaagggggtgtgctggggcctcaggagacaatctgctggcaactgtttgcatcaggcaggagaggagtacaggctgaatgctgatgctgcgcccaacatctggccggcatcttgtctgcctctcagacccaagcaacttaccttaaatagaacgatttacaatggaatccgataaaaggtttaggctg

SEQ ID NO: 2010 - protein, 498 aa, Homo sapiens; identical to SEQ ID NO: 44

SEQ ID NO: 2011 - DNA, 1890 bp, Homo sapiens
tgaaaggcagaggggctccaggtcctgtttccagctcccctcactgcacatggtgaagctcgctccctccctccctcccttcccgcttttcccagagctaatacacaggtgctattattcagaaaaaaactggtcagctctagccaacagtgaggtttcttttcttctgccctaactattgtgtagcctcttatgctgaaatcggcttctgctggcttctccggctttcagagccctgaaacaaagagaaacaggatctgtccctacccagcacagcaaatggttgtagtaattgccaaagccctcataaagccctccggcttgaggagagagtgtatagtcatgggttctgcctctgtgcccttgctggccgcttctcctctgccttctttcctggaactcagggtgtggggactgagcctgtaggggacagcatgccgtcttgctgtggccactcccaagtgtgccctcttccctctttacacatcaggtgtctctggcacaggacttggcactaagctccatgctgagacaccaggctatgtgggcccccaccttgtttcccagcctgcaccttagaagccgaaggtgctttcatcagaaccctaaaatggtcgttgaaggcgcctgggccgcagcccagcagtagttggagaggcaggcagagggcagtggttctcccaaataggagacctggggcctggccaggccagggtttgggcctaatggctttgactaaattacccccatcctccttgcccggaaaagggagagctagagccactcactgtcattctgctctgaccttgaagggggcggtgttggcctggcttctggaatggactgagtccatcgtggaaagggctgggggcaggaggaggtggggaggggcactgcctgcggaaggtaggattagatcattagctcagtgacctcctagggtttcgatgtgctatgttctcatcctacagttggtttggtaatgatctgcaagtcccggagagcaacagcacagctctgcctgacgctctcattgaggtctctgtggctttggtgaccctgcttaagcattcccaccgtgtcccagctctgctctaggactgcctcccactgcggcccctcacctgacttcagggtatggggagggagggagccagtgctccaaggccagggggctttgctcatgagagatgtcaggcttcctggaggcatcaggctttgagccctgctggggtccaactgacctgggaccaggtgtcgcgcagagatgtgcctcattctgtgcctccttctgtgcctcctaccatgttccctttaactgtgcctcagtgtgggttagggaacaattttgttattgtattaagtttattcagttaattcacttgaggaactaaccagtttttactttctgtctagaatgatgtacatgtagtagagtaagccataatgctcccaaagtgccttgttttctctgatacaaacatatttataaggacatattcctgtgggttcttgggtgtgtttgccacatcaagattttagggaaggggggtatatgtgtagtagggatgccgtttgaaaacaggcactcttcccctgaggatgggaaaggagctcttcagttggagatctaggcagtgggttaagccagacccctaaagtgaccctttcctcttctgccctattcttctcagaccctcagaaagacatccaatttttttaaatccctgtagctccaagcctggtctcatttgcttccctgccaggctcatcgtgtgtataccacatttgtgccccactgacctgaaggttccatgtaactgtatacacatgaatacttaaatgccaacatttaaaataatttgataaagtctttgtagccactcagcc

SEQ ID NO: 2012 - protein, 47 aa, Homo sapiens; identical to SEQ ID NO: 2000

SEQ ID NO: 2013 - DNA, 1115 bp, Homo sapiens
gactcagaagatgactcctctgaatttgatgaggacgactggtccgattaactctttctgcctgctgcccaccttctttttctttccttcctacctgccttctttgatgccaaccccaacagacccgtagggggagaaaagggaggaaaaaagtaattttaaggggccaaagctttccctgaagcaaccaaagatatatccaagtgcttcctccaagtcaacatgtatttcctctccccattttcaggccctgtggggctcctgaggttcagtagctgggatgttccctctttccttcaagtgcctgttgcatattgaaaggaaggagaaatcccaaagcagattcctttgatcgggtttctgttggagatggggcttcccttaggagccatattcaactacagccttctaaaacctgtgccctcagccacttcgaatgccagccaccttctggttctaaaacggggagtggtctgaatgaacacagctgacccctttcccgcgcactgaaagggcagagtaggccgaagggtccaagggccagactgcctcaccctctgccctaatcagcagggtgggcctgccttttgctaagcgatctctatgcctgggatgccctttattccaggaggcatcaagcctctaaagaatgtctcacctcctctgcccaaaaatgatgcctttctgtaggctggtgttgttgcctccctcccaggatccctttggtgagtatggtgttcaggatgcaccaccaccacctctagataccttcaggcaacacagcccagttttaacctctagtatccatgaccaaactatccctgaggatgggaaaggagctcttcagttggagatctaggcagtgggttaagccagacccctaaagtgaccctttcctcttctgccctattcttctcagaccctcagaaagacatccaatttttttaaatccctgtagctccaagcctggtctcatttgcttccctgccaggctcatcgtgtgtataccacatttgtgccccactgacctgaaggttccatgtaactgtatacacatgaatacttaaatgccaacatttaaaataatttgataaagtctttgtagccactcagcc

SEQ ID NO: 2014 - protein, 69 aa, Homo sapiens
MSHLLCPKMMPFCRLVLLPPSQDPFGEYGVQDAPPPPLDTFRQHSPVLTSSIHDQTIPEDGKGALQLEI

SEQ ID NO: 2015 - DNA, 2674 bp, Homo sapiens
ggtttggctggacccaaaagatccagtgtggtcagcccaagccatccaccaccagctcctcctctaggctctccaccaggccctaaacccgggtttgctccaccacctgcccctccgccacctccgcctccaatgataggcatcccacctccaccaccgcctgtaggatttgggtctccagggacgcctccaccaccctcacccccatttttcccagagctaatacacaggtgctattattcagaaaaaaactggtcagctctagccaacagtgaggtttcttttcttctgccctaactattgtgtagcctcttatgctgaaatcggcttctgctggcttctccggctttcagagccctgaaacaaagagaaacaggatctgtccctacccagcacagcaaatggttgtagtaattgccaaagccctcataaagccctccggcttgaggagagagtgtatagtcatgggttctgcctctgtgcccttgctggccgcttctcctctgccttctttcctggaactcagggtgtggggactgagcctgtaggggacagcatgccgtcttgctgtggccactcccaagtgtgccctcttccctctttacacatcaggtgtctctggcacaggacttggcactaagctccatgctgagacaccaggctatgtgggcccccaccttgtttcccagcctgcaccttagaagccgaaggtgctttcatcagaaccctaaaatggtcgttgaaggcgcctgggccgcagcccagcagtagttggagaggcaggcagagggcagtggttctcccaaataggagacctggggcctggccaggccagggtttgggcctaatggctttgactaaattacccccatcctccttgcccggaaaagggagagctagagccactcactgtcattctgctctgaccttgaagggggcggtgttggcctggcttctggaatggactgagtccatcgtggaaagggctgggggcaggaggaggtggggaggggcactgcctgcggaaggtaggattagatcattagctcagtgacctcctagggtttcgatgtgctatgttctcatcctacagttggtttggtaatgatctgcaagtcccggagagcaacagcacagctctgcctgacgctctcattaaaatctatgcagccaagctcggcactttgtagcagccggccttgcgaagcctcctcagctcggggggccggggacccagtgagccgagaggccctctgggctccacttatgcatatgcaccaaaaaaaaaaaaaaaaaaaaaaggcttctttagacccagagccctttaagatgataaaggacccaatgcaggtaatcctgtttttggactcacgtaatgtagaatgcaaagtttagtgattatttaatctgggcctaagctagtgagagtatggaacaatggcccataaggactcctaagcgccgaagccaaggagcctcctcccttcctggttcaccccgcccaagggacctgcccccattcctgtggccctggggcccagcttccaatagtgtcagaagcaacttgtggctttgccttggttgtgagatgggtacattccaaaggagcagcctgggggagggggcaggctcagccagcccttggaggctcagagcagctggcccaggctccagctcgcctccagtggaagcccgagcgccctcagaaacgaccctggccaatgtcaacgcagagccgaggcggtgttgtcacggctaatgtgaaatctcttcccgtggcgcccatcctctgactctgcagtgccagcttggacagattgaggtctctgtggctttggtgaccctgcttaagcattcccaccgtgtcccagctctgctctaggactgcctcccactgcggcccctcacctgacttcagggtatggggagggagggagccagtgctccaaggccagggggctttgctcatgagagatgtcaggcttcctggaggcatcaggctttgagccctgctggggtccaactgacctgggaccaggtgtcgcgcagagatgtgcctcattctgtgcctccttctgtgcctcctaccatgttccctttaactgtgcctcagtgtgggttagggaacaattttgttattgtattaagtttattcagttaattcacttgaggaactaaccagtttttactttctgtctagaatgatgtacatgtagtagagtaagccataatgctcccaaagtgccttgttttctctgatacaaacatatttataaggacatattcctgtgggttcttgggtgtgtttgccacatcaagattttagggaaggggggtatatgtgtagtagggatgccgtttgaaaacaggcactcttcccctgaggatgggaaaggagctcttcagttggagatctaggcagtgggttaagccagacccctaaagtgaccctttcctcttctgccctattcttctcagaccctcagaaagacatccaatttttttaaatccctgtagctccaagcctggtctcatttgcttccctgccaggctcatcgtgtgtataccacatttgtgccccactgacctgaaggttccatgtaactgtatacacatgaatacttaaatgccaacatttaaaataatttgataaagtctttgtagccactcagcc

SEQ ID NO: 2016 - protein, 54 aa, Homo sapiens; identical to SEQ ID NO: 2004

SEQ ID NO: 2017 - DNA, 4514 bp, Homo sapiens
gatctggtttggctggacccaaaagatccagtgtggtcagcccaagccatccaccaccagctcctcctctaggctctccaccaggccctaaacccgggtttgctccaccacctgcccctccgccacctccgcctccaatgataggcatcccacctccaccaccgcctgtaggatttgggtctccagggacgcctccaccaccctcacccccatctttcccacctcaccctgattttgctgcccctccacctcctcctccaccaccaggccccctcctccccctttcactggtgcagatggccagcctgctataccaccaccgctttctgataccaccaagcccaagtcctccttgcctgccgtgagcgatgcccgtagcgacctgctttcagccatccgtcaaggttttcagctgcgcagggttgaggagcagcgggaacaagagaagcgggatgttgtgggcaatgacgtggccaccatcttgtctcgtcgcattgctgttgagtacagtgactcagaagatgactcctctgaatttgatgaggacgactggtccgattaactctttctgcctgctgcccaccttctttttctttccttcctacctgccttctttgatgccaaccccaacagacccgtagggggagaaaagggaggaaaaaagtaattttaaggggccaaagctttccctgaagcaaccaaagatatatccaagtgcttcctccaagtcaacatgtatttcctctccccattttcaggccctgtggggctcctgaggttcagtagctgggatgttccctctttccttcaagtgcctgttgcatattgaaaggaaggagaaatcccaaagcagattcctttgatcgggtttctgttggagatggggcttcccttaggagccatattcaactacagccttctaaaacctgtgccctcagccacttcgaatgccagccaccttctggttctaaaacggggagtggtctgaatgaacacagctgacccctttcccgcgcactgaaagggcagagtaggccgaagggtccaagggccagactgcctcaccctctgccctaatcagcagggtgggcctgccttttgctaagcgatctctatgcctgggatgccctttattccaggaggcatcaagcctctaaagaatgtctcacctcctctgcccaaaaatgatgcctttctgtaggctggtgttgttgcctccctcccaggatccctttggtgagtatggtgttcaggatgcaccaccaccacctctagataccttcaggcaacacagcccagttttaacctctagtatccatgaccaaactatccctgacacatgaggacaggggcctcttctggctgtcaggagcaaagcctgaagacttggagctgcaggactggaagaacagtggagccccgtgggtctcaccctttaaggatgctgaggcctagagatgggaagtgacttgctcaaggtcacacaattggatagtgacatagctagagcgcagagttcctgattccaagtcacctgtgctttctgggaccaaagaatgggcacctgctggagtccgggcagagctttctcagttgtattgctactccagacctcaccataggttggggtcccagtaggaaggctcagggtctgtgccagccctgtcggtgctgctcagaccttcatagcctctcttgtcattctttgttgccccttttctgtcaccagccaaccacatagccttgggaccagcctctctgggggaccagaagtagtgagagaaggaaggggataggcagctttgacaggtgctgctttcaattcctctgcaactcctcccccttttatttccccaatttaaacaaagattctgccaactgtggaaacttcagtccctcaggctggcagccatgccagtacctgcctgggggtggggggtgcctggcagccatgaagcaggctgaaaggcagaggggctccaggtcctgtttccagctcccctcactgcacatggtgaagctcgctccctccctccctcccttcccgcttttcccagagctaatacacaggtgctattattcagaaaaaaactggtcagctctagccaacagtgaggtttcttttcttctgccctaactattgtgtagcctcttatgctgaaatcggcttctgctggcttctccggctttcagagccctgaaacaaagagaaacaggatctgtccctacccagcacagcaaatggttgtagtaattgccaaagccctcataaagccctccggcttgaggagagagtgtatagtcatgggttctgcctctgtgcccttgctggccgcttctcctctgccttctttcctggaactcagggtgtggggactgagcctgtaggggacagcatgccgtcttgctgtggccactcccaagtgtgccctcttccctctttacacatcaggtgtctctggcacaggacttggcactaagctccatgctgagacaccaggctatgtgggcccccaccttgtttcccagcctgcaccttagaagccgaaggtgctttcatcagaaccctaaaatggtcgttgaaggcgcctgggccgcagcccagcagtagttggagaggcaggcagagggcagtggttctcccaaataggagacctggggcctggccaggccagggtttgggcctaatggctttgactaaattacccccatcctccttgcccggaaaagggagagctagagccactcactgtcattctgctctgaccttgaagggggcggtgttggcctggcttctggaatggactgagtccatcgtggaaagggctgggggcaggaggaggtggggaggggcactgcctgcggaaggtaggattagatcattagctcagtgacctcctagggtttcgatgtgctatgttctcatcctacagttggtttggtaatgatctgcaagtcccggagagcaacagcacagctctgcctgacgctctcattaaaatctatgcagccaagctcggcactttgtagcagccggccttgcgaagcctcctcagctcggggggccggggacccagtgagccgagaggccctctgggctccacttatgcatatgcaccaaaaaaaaaaaaaaaaaaaaaaggcttctttagacccagagccctttaagatgataaaggacccaatgcaggtaatcctgtttttggactcacgtaatgtagaatgcaaagtttagtgattatttaatctgggcctaagctagtgagagtatggaacaatggcccataaggactcctaagcgccgaagccaaggagcctcctcccttcctggttcaccccgcccaagggacctgcccccattcctgtggccctggggcccagcttccaatagtgtcagaagcaacttgtggctttgccttggttgtgagatgggtacattccaaaggagcagcctgggggagggggcaggctcagccagcccttggaggctcagagcagctggcccaggctccagctcgcctccagtggaagcccgagcgccctcagaaacgaccctggccaatgtcaacgcagagccgaggcggtgttgtcacggctaatgtgaaatctcttcccgtggcgcccatcctctgactctgcagtgccagcttggacagattgaggtctctgtggctttggtgaccctgcttaagcattcccaccgtgtcccagctctgctctaggactgcctcccactgcggcccctcacctgacttcagggtatggggagggagggagccagtgctccaaggccagggggctttgctcatgagagatgtcaggcttcctggaggcatcaggctttgagccctgctggggtccaactgacctgggaccaggtgtcgcgcagagatgtgcctcattctgtgcctccttctgtgcctcctaccatgttccctttaactgtgcctcagtgtgggttagggaacaattttgttattgtattaagtttattcagttaattcacttgaggaactaaccagtttttactttctgtctagaatgatgtacatgtagtagagtaagccataatgctcccaaagtgccttgttttctctgatacaaacatatttataaggacatattcctgtgggttcttgggtgtgtttgccacatcaagattttagggaaggggggtatatgtgtagtagggatgccgtttgaaaacaggcactcttcccctgaggatgggaaaggagctcttcagttggagatctaggcagtgggttaagccagacccctaaagtgaccctttcctcttctgccctattcttctcagaccctcagaaagacatccaatttttttaaatccctgtagctccaagcctggtctcatttgcttccctgccaggctcatcgtgtgtataccacatttgtgccccactgacctgaaggttccatgtaactgtatacacatgaatacttaaatgccaacatttaaaataatttgataaagtctttgtagccactcagcc

SEQ ID NO: 2018 - protein, 90 aa, Homo sapiens; identical to SEQ ID NO: 2006

SEQ ID NO: 2019 - DNA, 3411 bp, Homo sapiens
ggcagcccgcgaggcggtccgcgggagcacactctgtgcggagactgggcggccggccgacccttcctgtcgctgacggcgactgcgggaggccaggttgccttttgctaagcgatctctatgcctgggatgccctttattccaggaggcatcaagcctctaaagaatgtctcacctcctctgcccaaaaatgatgcctttctgtaggctggtgttgttgcctccctcccaggatccctttggtgagtatggtgttcaggatgcaccaccaccacctctagataccttcaggcaacacagcccagttttaacctctagtatccatgaccaaactatccctgacacatgaggacaggggcctcttctggctgtcaggagcaaagcctgaagacttggagctgcaggactggaagaacagtggagccccgtgggtctcacccttgggaccaaagaatgggcacctgctggagtccgggcagagctttctcagttgtattgctactccagacctcaccataggttggggtcccagtaggaaggctcagggtctgtgccagccctgtcggtgctgctcagaccttcatagcctctcttgtcattctttgttgccccttttctgtcaccagccaaccacatagccttgggaccagcctctctgggggaccagaagtagtgagagaaggaaggggataggcagctttgacaggtgctgctttcaattcctctgcaactcctcccccttttatttccccaatttaaacaaagattctgccaactgtggaaacttcagtccctcaggctggcagccatgccagtacctgcctgggggtggggggtgcctggcagccatgaagcaggctgaaaggcagaggggctccaggtcctgtttccagctcccctcactgcacatggtgaagctcgctccctccctccctcccttcccgcttttcccagagctaatacacaggtgctattattcagaaaaaaactggtcagctctagccaacagtgaggtttcttttcttctgccctaactattgtgtagcctcttatgctgaaatcggcttctgctggcttctccggctttcagagccctgaaacaaagagaaacaggatctgtccctacccagcacagcaaatggttgtagtaattgccaaagccctcataaagccctccggcttgaggagagagtgtatagtcatgggttctgcctctgtgcccttgctggccgcttctcctctgccttctttcctggaactcagggtgtggggactgagcctgtaggggacagcatgccgtcttgctgtggccactcccaagtgtgccctcttccctctttacacatcaggtgtctctggcacaggacttggcactaagctccatgctgagacaccaggctatgtgggcccccaccttgtttcccagcctgcaccttagaagccgaaggtgctttcatcagaaccctaaaatggtcgttgaaggcgcctgggccgcagcccagcagtagttggagaggcaggcagagggcagtggttctcccaaataggagacctggggcctggccaggccagggtttgggcctaatggctttgactaaattacccccatcctccttgcccggaaaagggagagctagagccactcactgtcattctgctctgaccttgaagggggcggtgttggcctggcttctggaatggactgagtccatcgtggaaagggctgggggcaggaggaggtggggaggggcactgcctgcggaaggtaggattagatcattagctcagtgacctcctagggtttcgatgtgctatgttctcatcctacagttggtttggtaatgatctgcaagtcccggagagcaacagcacagctctgcctgacgctctcattaaaatctatgcagccaagctcggcactttgtagcagccggccttgcgaagcctcctcagctcggggggccggggacccagtgagccgagaggccctctgggctccacttatgcatatgcaccaaaaaaaaaaaaaaaaaaaaaaggcttctttagacccagagccctttaagatgataaaggacccaatgcaggtaatcctgtttttggactcacgtaatgtagaatgcaaagtttagtgattatttaatctgggcctaagctagtgagagtatggaacaatggcccataaggactcctaagcgccgaagccaaggagcctcctcccttcctggttcaccccgcccaagggacctgcccccattcctgtggccctggggcccagcttccaatagtgtcagaagcaacttgtggctttgccttggttgtgagatgggtacattccaaaggagcagcctgggggagggggcaggctcagccagcccttggaggctcagagcagctggcccaggctccagctcgcctccagtggaagcccgagcgccctcagaaacgaccctggccaatgtcaacgcagagccgaggcggtgttgtcacggctaatgtgaaatctcttcccgtggcgcccatcctctgactctgcagtgccagcttggacagattgaggtctctgtggctttggtgaccctgcttaagcattcccaccgtgtcccagctctgctctaggactgcctcccactgcggcccctcacctgacttcagggtatggggagggagggagccagtgctccaaggccagggggctttgctcatgagagatgtcaggcttcctggaggcatcaggctttgagccctgctggggtccaactgacctgggaccaggtgtcgcgcagagatgtgcctcattctgtgcctccttctgtgcctcctaccatgttccctttaactgtgcctcagtgtgggttagggaacaattttgttattgtattaagtttattcagttaattcacttgaggaactaaccagtttttactttctgtctagaatgatgtacatgtagtagagtaagccataatgctcccaaagtgccttgttttctctgatacaaacatatttataaggacatattcctgtgggttcttgggtgtgtttgccacatcaagattttagggaaggggggtatatgtgtagtagggatgccgtttgaaaacaggcactcttcccctgaggatgggaaaggagctcttcagttggagatctaggcagtgggttaagccagacccctaaagtgaccctttcctcttctgccctattcttctcagaccctcagaaagacatccaatttttttaaatccctgtagctccaagcctggtctcatttgcttccctgccaggctcatcgtgtgtataccacatttgtgccccactgacctgaaggttccatgtaactgtatacacatgaatacttaaatgccaacatttaaaataatttgataaagtctttgtagccactcagcc

SEQ ID NO: 2020 - protein, 104 aa, Homo sapiens; identical to SEQ ID NO: 2008

SEQ ID NO: 2021 - DNA, 5665 bp, Homo sapiens
ggggaatcgcgtaatggcggacacaggcagggcgagcgcggctgggggcgtagcgcgctgagggggtccggccgtttggcagcccgcgaggcggtccgcgggagcacactctgtgcggagactgggcggccggccgacccttcctgtcgctgacggcgactgcgggaggccaggttgtttttcaccattcagaacattgcctgaagcaggtccaccatgccgttagtaacgaggaacatcgagccaaggcacctgtgccgtcagacgttgcctagcgttagaagcgagctggaatgcgtgaccaacatcaccctggcaaatgtcatccgacagctgggcagcctgagtaaatatgcagaggacatttttggagagctctttactcaggcaaatacctttgcctctcgggtaagctcccttgctgagagggtcgaccgactacaggttaaagtcactcagctggatcccaaggaagaagaagtgtcactgcaaggaatcaacacccgaaaagccttcagaagttccaccattcaagaccagaagctttttgacagaaactctctcccagtgcctgtcttagaaacatacaatacctgtgatactcctccccctctcaacaatcttaccccttacagggacgatggaaaagaggcactcaaattctacacagacccttcatacttctttgatctttggaaggagaagatgctgcaggacaccaaggatatcatgaaagagaagagaaagcataggaaagaaaagaaagataatccaaatcgagggaatgtaaacccacgtaaaatcaagacacgtaaggaagagtgggagaaaatgaagatggggcaagaatttgtggagtccaaagaaaagctggggacttctgggtatccacccactttggtgtaccagaatggcagcattggctgtgttgaaaacgtggatgcaagtagctatccgccaccaccacagtcagactctgcttcttcaccttctccttccttctccgaggacaacttgcctcctccaccagcagaattcagttacccagtggacaaccaaagaggatctggtttggctggacccaaaagatccagtgtggtcagcccaagccatccaccaccagctcctcctctaggctctccaccaggccctaaacccgggtttgctccaccacctgcccctccgccacctccgcctccaatgataggcatcccacctccaccaccgcctgtaggatttgggtctccagggacgcctccaccaccctcacccccatctttcccacctcaccctgattttgctgcccctccacctcctcctccaccaccagcagctgactacccaactctgccaccacctcccttgtcccagccaacaggaggagcacctcctcctccccctcctcctcctcctccggggccccctcctccccctttcactggtgcagatggccagcctgctataccaccaccgctttctgataccaccaagcccaagtcctccttgcctgccgtgagcgatgcccgtagcgacctgctttcagccatccgtcaaggttttcagctgcgcagggttgaggagcagcgggaacaagagaagcgggatgttgtgggcaatgacgtggccaccatcttgtctcgtcgcattgctgttgagtacagtgactcagaagatgactcctctgaatttgatgaggacgactggtccgattaactctttctgcctgctgcccaccttctttttctttccttcctacctgccttctttgatgccaaccccaacagacccgtagggggagaaaagggaggaaaaaagtaattttaaggggccaaagctttccctgaagcaaccaaagatatatccaagtgcttcctccaagtcaacatgtatttcctctccccattttcaggccctgtggggctcctgaggttcagtagctgggatgttccctctttccttcaagtgcctgttgcatattgaaaggaaggagaaatcccaaagcagattcctttgatcgggtttctgttggagatggggcttcccttaggagccatattcaactacagccttctaaaacctgtgccctcagccacttcgaatgccagccaccttctggttctaaaacggggagtggtctgaatgaacacagctgacccctttcccgcgcactgaaagggcagagtaggccgaagggtccaagggccagactgcctcaccctctgccctaatcagcagggtgggcctgccttttgctaagcgatctctatgcctgggatgccctttattccaggaggcatcaagcctctaaagaatgtctcacctcctctgcccaaaaatgatgcctttctgtaggctggtgttgttgcctccctcccaggatccctttggtgagtatggtgttcaggatgcaccaccaccacctctagataccttcaggcaacacagcccagttttaacctctagtatccatgaccaaactatccctgacacatgaggacaggggcctcttctggctgtcaggagcaaagcctgaagacttggagctgcaggactggaagaacagtggagccccgtgggtctcaccctttaaggatgctgaggcctagagatgggaagtgacttgctcaaggtcacacaattggatagtgacatagctagagcgcagagttcctgattccaagtcacctgtgctttctgggaccaaagaatgggcacctgctggagtccgggcagagctttctcagttgtattgctactccagacctcaccataggttggggtcccagtaggaaggctcagggtctgtgccagccctgtcggtgctgctcagaccttcatagcctctcttgtcattctttgttgccccttttctgtcaccagccaaccacatagccttgggaccagcctctctgggggaccagaagtagtgagagaaggaaggggataggcagctttgacaggtgctgctttcaattcctctgcaactcctcccccttttatttccccaatttaaacaaagattctgccaactgtggaaacttcagtccctcaggctggcagccatgccagtacctgcctgggggtggggggtgcctggcagccatgaagcaggctgaaaggcagaggggctccaggtcctgtttccagctcccctcactgcacatggtgaagctcgctccctccctccctcccttcccgcttttcccagagctaatacacaggtgctattattcagaaaaaaactggtcagctctagccaacagtgaggtttcttttcttctgccctaactattgtgtagcctcttatgctgaaatcggcttctgctggcttctccggctttcagagccctgaaacaaagagaaacaggatctgtccctacccagcacagcaaatggttgtagtaattgccaaagccctcataaagccctccggcttgaggagagagtgtatagtcatgggttctgcctctgtgcccttgctggccgcttctcctctgccttctttcctggaactcagggtgtggggactgagcctgtaggggacagcatgccgtcttgctgtggccactcccaagtgtgccctcttccctctttacacatcaggtgtctctggcacaggacttggcactaagctccatgctgagacaccaggctatgtgggcccccaccttgtttcccagcctgcaccttagaagccgaaggtgctttcatcagaaccctaaaatggtcgttgaaggcgcctgggccgcagcccagcagtagttggagaggcaggcagagggcagtggttctcccaaataggagacctggggcctggccaggccagggtttgggcctaatggctttgactaaattacccccatcctccttgcccggaaaagggagagctagagccactcactgtcattctgctctgaccttgaagggggcggtgttggcctggcttctggaatggactgagtccatcgtggaaagggctgggggcaggaggaggtggggaggggcactgcctgcggaaggtaggattagatcattagctcagtgacctcctagggtttcgatgtgctatgttctcatcctacagttggtttggtaatgatctgcaagtcccggagagcaacagcacagctctgcctgacgctctcattaaaatctatgcagccaagctcggcactttgtagcagccggccttgcgaagcctcctcagctcggggggccggggacccagtgagccgagaggccctctgggctccacttatgcatatgcaccaaaaaaaaaaaaaaaaaaaaaaggcttctttagacccagagccctttaagatgataaaggacccaatgcaggtaatcctgtttttggactcacgtaatgtagaatgcaaagtttagtgattatttaatctgggcctaagctagtgagagtatggaacaatggcccataaggactcctaagcgccgaagccaaggagcctcctcccttcctggttcaccccgcccaagggacctgcccccattcctgtggccctggggcccagcttccaatagtgtcagaagcaacttgtggctttgccttggttgtgagatgggtacattccaaaggagcagcctgggggagggggcaggctcagccagcccttggaggctcagagcagctggcccaggctccagctcgcctccagtggaagcccgagcgccctcagaaacgaccctggccaatgtcaacgcagagccgaggcggtgttgtcacggctaatgtgaaatctcttcccgtggcgcccatcctctgactctgcagtgccagcttggacagattgaggtctctgtggctttggtgaccctgcttaagcattcccaccgtgtcccagctctgctctaggactgcctcccactgcggcccctcacctgacttcagggtatggggagggagggagccagtgctccaaggccagggggctttgctcatgagagatgtcaggcttcctggaggcatcaggctttgagccctgctggggtccaactgacctgggaccaggtgtcgcgcagagatgtgcctcattctgtgcctccttctgtgcctcctaccatgttccctttaactgtgcctcagtgtgggttagggaacaattttgttattgtattaagtttattcagttaattcacttgaggaactaaccagtttttactttctgtctagaatgatgtacatgtagtagagtaagccataatgctcccaaagtgccttgttttctctgatacaaacatatttataaggacatattcctgtgggttcttgggtgtgtttgccacatcaagattttagggaaggggggtatatgtgtagtagggatgccgtttgaaaacaggcactcttcccctgaggatgggaaaggagctcttcagttggagatctaggcagtgggttaagccagacccctaaagtgaccctttcctcttctgccctattcttctcagaccctcagaaagacatccaatttttttaaatccctgtagctccaagcctggtctcatttgcttccctgccaggctcatcgtgtgtataccacatttgtgccccactgacctgaaggttccatgtaactgtatacacatgaatacttaaatgccaacatttaaaataatttgataaagtctttgtagccactcagcc

SEQ ID NO: 2022 - protein, 498 aa, Homo sapiens; identical to SEQ ID NO: 44

SEQ ID NO: 2023 - DNA, 667 bp, Homo sapiens
caggcagggcgagcgcggctgggggcgtagcgcgctgagggggtccggccgtttggcagcccgcgaggcggtccgcgggagcacactctgtgcggagactgggcggccggccgacccttcctgtcgctgacggcgactgcgggaggccaggttgtttttcaccattcagaacattgcctgaagcaggtccaccatgccgttagtaacgaggaacatcgagccaaggcacctgtgccgtcagacgttgcctagcgttagaagcgagctggaatgcgtgaccaacatcaccctggcaaatgtcatccgacagctgggcagcctgagtaaatatgcagaggacatttttggagagctctttactcaggcaaatacctttgcctctcgggtaagctcccttgctgagagggtcgaccgactacaggttaaagtcactcagctggatcccaaggaagaagaagtgtcactgcaaggaatcaacacccgaaaagccttcagaagttccaccaccctcacccccatctttcccacctcaccctgattttgctgcccctccacctcctcctccaccaccagcagctgactacccaactctgccaccacctcccttgtcccagccaacaggaggagcacctcctcctccccctcctcctcctcctccggggccccc

SEQ ID NO: 2024 - protein, 114 aa, Homo sapiens
MPLVTRNIEPRHLCRQTLPSVRSELECVTNITLANVIRQLGSLSKYAEDIFGELFTQANTFASRVSSLAERVDRLQVKVTQLDPKEEEVSLQGINTRKAFRSSTTLTPIFPTSP

SEQ ID NO: 2025 - DNA, 753 bp, Homo sapiens
ggggaatcgcgtaatggcggacacaggcagggcgagcgcggctgggggcgtagcgcgctgagggggtccggccgtttggcagcccgcgaggcggtccgcgggagcacactctgtgcggagactgggcggccggccgacccttcctgtcgctgacggcgactgcgggaggccaggttgtttttcaccattcagaacattgcctgaagcaggtccaccatgccgttagtaacgaggaacatcgagccaaggcacctgtgccgtcagacgttgcctagcgttagaagcgagctggaatgcgtgaccaacatcaccctggcaaatgtcatccgacagctgggcagcctgagtaaatatgcagaggacatttttggagagctctttactcaggcaaatacctttgcctctcgggtaagctcccttgctgagagggtcgaccgactacaggttaaagtcactcagctggatcccaaggaagaagaagtgtcactgcaaggaatcaacacccgaaaagccttcagaagttccaccattcaagaccagaagctttttgacagaaactctctcccagtgcctgtcttagaaacatacaatacctgtgatactcctccccctctcaacaatcttaccccttacagggacgatggaaaagaggcactcaaattctacacagacccttcatacttctttgatctttggaaggagaagatgctgcaggacaccaaggatatcatgaaagagaagagaaagcatagg

SEQ ID NO: 2026 - protein, 178 aa, Homo sapiens
MPLVTRNIEPRHLCRQTLPSVRSELECVTNITLANVIRQLGSLSKYAEDIFGELFTQANTFASRVSSLAERVDRLQVKVTQLDPKEEEVSLQGINTRKAFRSSTIQDQKLFDRNSLPVPVLETYNTCDTPPPLNNLTPYRDDGKEALKFYTDPSYFFDLWKEKMLQDTKDIMKEKRKH

SEQ ID NO: 2027 - DNA, 842 bp, Homo sapiens
gcgtaatggcggacacaggcagggcgagcgcggctgggggcgtagcgcgctgagggggtccggccgtttggcagcccgcgaggcggtccgcgggagcacactctgtgcggagactgggcggccggccgacccttcctgtcgctgacggcgactgcgggaggccaggttgtttttcaccattcagaacattgcctgaagcaggtccaccatgccgttagtaacgaggaacatcgagccaaggcacctgtgccgtcagacgttgcctagcgttagaagcgagctggaatgcgtgaccaacatcaccctggcaaatgtcatccgacagctgggcagcctgagtgagtgcctcagagagcctgtgctttgccctcaggggtcgttggtgctctttatttagtttccttctcctcccgcgttcctatttctcccccatctgccttccctaggtaatgcgaaaatgtatcctccctctcctccccaaagagaggctcccttttggtgtagcttcttctcttcaaccttctttatctaccaccaccctctaggttccctcctccctccccctccacctgcttcaacagaaatctgtgggaagggtggcaggaagggctgcagcaaaaactgcagacggaatgacagagcagaattctgtgtgtgtaaagtgggaggttcacagagcagtatcttgggtcggggaatgtgcctgtaattacacgagctgttcgatgtagcctgactttgttgaagcctcaaatgtgccaatagtttttatctacccaacacccccaccccttttcttcccaaagaggagtaaagcaaacatgccttcggagagattctga

SEQ ID NO: 2028 - protein, 83 aa, Homo sapiens
MYPPSPPQREAPFWCSFFSSTFFIYHHPLGSLLPPPPPASTEICGKGGRKGCSKNCRRNDRAEFCVCKVGGSQSSILGRGMCL

SEQ ID NO: 2029 - DNA, 4133 bp, Homo sapiens
acagtgaggctggggaaggggaagtgaatttaatgagaaacttggggttgtgagtgggggaaggatttgggtgtgggatgaaggtgcaggacagggctgggccgggccattggactcaggtatgcctaggcttggggtggagcttcaaggcagcgcgggctccagcccctggaagagccaccccccacccacctgagatttcccaaattccagctgccgctctagttgcttctgcaagcaaaggagcccttgtggtcagaggggcctctgaagcctgggccaggctctcccgccctctcagggcacacacacctccattcagcccaagccccgccctttgggggggctgggggccagggcgggctgcccccacgtcagtcgtcagttgggggccacctgacccaaaggctgggcgggcagtggggttgataagacctggaccccactggtcccacaaccgtgccggctgctgcccgtgctgccagaactatgagggtcctctctggcactagcctcatgctctgcagcctgctgctgctgctccaggccctgtgcagccctggcctcgccccccagtccagaggccatctctgccggacgcggcccacagacctggtgtttgttgtcgacagctctcgcagcgttcggcctgttgaatttgagaaagtgaaggtattcctgtcccaggtcatcgagtcgctggacgtggggcccaatgccacccgggtgggcatggtcaactatgccagcaccgtgaagcaggagttctcgctgcgggctcatgtctccaaggccgcactgctgcaggctgtgcgccgtatccagccgctgtccacaggcaccatgaccggcctggccatccagttcgctatcaccaaagccttcggcgatgcagagggtggtcgttccaggtcccctgacatcagcaaggtggtcatcgtggtgacagacgggaggccccaggacagcgtgcaggacgtgtctgcgcgggcccgggccagcggcgtcgagctgttcgccatcggagtgggcagcgtggacaaggccacgctgcggcagatcgccagcgagccgcaggacgaacacgtcgattacgtggagagctacagcgtcatcgagaagctgtccaggaagttccaggaggccttctgcgtggtgtcagacctgtgcgccacaggggaccatgactgtgagcaggtgtgcatcagctcccccggttcctacacctgcgcctgccacgagggcttcactctgaacagcgacggcaagacctgcaatgtctgcagtggtggtggtggcagctcggccactgacctggtcttcctcattgacggatccaagagtgtgaggccagagaactttgagctggtgaagaagttcatcagtcagatcgtggatacgctggacgtgtcagacaagctggcccaggtggggctggtgcagtactcaagctctgtgcgccaggagttccccctgggtcgcttccacaccaagaaggacatcaaggcggctgtgcggaatatgtcctacatggagaagggcacaatgactggggctgctctcaagtacctcattgacaattccttcactgtgtccagtggggctaggcccggggcccagaaggtgggcattgtcttcactgatggccggagccaggactacattaatgatgctgccaagaaggccaaagacctcggctttaagatgtttgctgtgggtgtgggcaatgccgtggaggatgagctgagggaaatagcctcagagcctgtggcagagcactacttctacacggctgacttcaagaccatcaaccagataggcaagaagttgcagaagaagatctgtgtggaggaagacccgtgtgcctgcgagtccctggtgaaattccaagccaaagtggaggggctgctgcaggccctgaccagtccactggaagctgtgagtaagcggctggccatcctggagaacacagttgtctaaggctgcctgtcaccactgtggcctctccaagcgtcctgcacgtgtccgccgtagctttaccattttagtgagggaagccagcccgggggtgggagggggtgtgtctgggtgtgcctattgagagcgtgtaatggcgtttgggagctcgtgtgtgtatgtgtgcgtgtgtgtatgtgtgcatgtgtgtgtgtgtgtgtgtgtgtgcacgtgcgcctgagggtgggcatgagtcttgccagaatgtgagtgtgagagtgataatgcaggggtgagtgtgagagggactgcgtttgcatttttataatcaaaagcttaatatattcccatcttttttagttaaccctttcttgactctgagtgctgtgaatttctttactgatttctctattctccggtgagaaacaattaaatgtgatttaacgtaagcagtgaatggggctagaggcagtgtggttatttggggaccagggaaaaggatggatgaagatgtggtgggaggggatggttggaaggatggtaacagtggtggtgacagtgatgacagtgaccacaccaaaaccagctggtgtttgtcctgccttttcagttacatattcatttagttgagaaaaaggcttcagagaaaaagggcaatgacaccagataggactcatttgttcattcattcattcgttcactcattcgttcaggtatcatgtacttacagggcaatggcggtggggggggatggtgctgtatgagacagacgtagttcctgccctaagagacatacagttgagcagggtgctcatgtcacccccaccagccagagggaccagccagaggaaaagagagtgggtttaggtcgtaccaggggtttgtgcctcctcttgatacctgggagcccacggggtgagtgtgtgtgtgagatgatgggaagggctccagcctgggcctgggctgccctaggtgcctctcccctcccgcccccaacatgccctgttggagttctgtttgtttcctgtgcacaggcggcatcacccccaacccaaagtccccaacgcagatggcagcagccccacctcagagactgcacaagagaaagactcctggccccatgttcccttcctccagccctatgtggggtctgcaggtcacaccctgagatctcggccacctcccccaggcccctgttggaccagtgctgctccggaatctccatctctgtcctctcagagggggagctttggtgattttctgaacctattcttgtttaatggagcatttttagtgttactactagattcacacttgagagcatgtctaaaaggcttttacaagaagctcagaccacaccgaaagatcttcctcggaggcagttcaaagaggcagaataacaacacgaacggtacccaagagctacatcagtacaacagcacaaatacacaagcgcgacttaactggggcacagccaccctcgcccccatgacctgactccacctcctacacagttcaccaaaccctttctctctgtccgtccctggggcaggagtttttctgctgtccaaggaggctccttgacacagccacctgagaagttatgactctgctcattcttcctttcttctgagattatccactcccctctcctccccacacaggtggggagggggagaggcagccatgttgatatggactgagaaggctcagcagtgtgtccccaaggaggaggagagggtcattagcggacgccatggcctgggagctggcgggcagaagcaacagatgtccctgatgagtggagtcagagatggggtggaagccctgcctgggaataggacctcgttcttccctgcccggtgggtggagtagtggcaggaccttgtcaccaggctctgatgaaggcagggaccagcttcttgggatctttcaatcccaaactcttgcccttcactcatcgcagttctccccacggctactccaggtcctcttgaaatccgtcctctccatggacttcccacatccctctctgctctaggtttgattaacagaaggttgtaaatgaaaaccagcatctcccgagggcagccatggtctactgacagatggcaagttactttgtaacctgtaattttgtttttttgaattttgtataaataaacaggactaaacta

SEQ ID NO: 2030 - protein, 496 aa, Homo sapiens [sequence omitted]

SEQ ID NO: 2031 - DNA, 4342 bp, Homo sapiens
aatccacctaagccgtgtccctagccctggccccgccctgatgttgccgtgtaactcagttcccgccgttttataggctaccgccccagccaggccccgccctctgatgtggccccgccccccgacgctgactttttctgtcttcactttagcgctggctccgcccctagccttggcccgcctcagcgcggactctcagtctctgcgcctgccacggcctcgtcccgctcagccctggccctgcccctggagccgactctctccgcctccgccccggtcccgccctggcactgactgtctccgtcttcgcccctgccctggccccgccccctgcctgctctggccccgccccgccgctctctccgtctccgcccctgccctggccccacccttgccccgccccggcgctgactctctccgtctccgcctccgcccccggctcctccccggccccgccccggcactgacattctatctctctcccgtctccgcctctgccccccccccggccccgcccctgccctgcgccggcgctggctccgtctgcgcctcagcctcggtcccgcctccagccctggccccgccccgccgctctccccttctccgcccctgccctggctccgcccccgcctgcccgcgcaccgcagaaggcctcctggaacttcctggacagcttctcgatgacgctgtagctctccacgtaatcgacgtgttcgtcctgcggctcgctggcgatctgccgcagcgtggccttgtccacgctgcccactccgatggcgaacagctcgacgccgctggcccgggcccgcgcagacacgtcctgcacgctgtcctggggcctcccgtctgtcaccacgatgaccacctgcgacacgcggggcggtgtgacaccgggctcccggaagcccacgggactgtccaggagaggaggctgaggcccggagaggcgggaggactgccgggtcgcacagccaggcggcacccgggggaagaggacccggctggccgaagaggagacccgtttcctctgactgagagacgtggctggggggctttccatctgcttcgcctccctcgggcaggcagctctgagatgcccggagggatgtgatgccccatcgccaaattggggtctctaaggtcagggccatgccttcccctcagactgaggcggctgagggcagggtcctcaggctgatggctgtgggagtcgtgccacgcccctcgtgcccccgggaggcccggccggggctgggtggggggatccggtggttccacatggtgcagttctgcgctttggccaccagatggcagccgaagctaagggatggggctgccgtctcccgtcttgctgtccttgtcccggtaagaccggggaccctggaccagggaaccgacggagggccactcccatgtggatgcccaagggaccaacccaagaaagatgccgcccttatcctcctccactccccggtatgatacatgcccctgccagagagggaaagaatctgcctgctcccctcccactaggctcctctggtctgtaccctggaaagaaagaggtggcggactctgtcactgagatccggcttcgtgaccccctgtctgcacccgccctgaggctagggcgctcccagctctgcccagtctgggttaggcatccagtcccgctttgctgcttctctgcttctgacttgggtctgtttctgattcctgggtcccatccttagccccaggtcctgacaccctgtcctgatgacaggcagttgagacaggccgtgtttagaaatgcagctccacaagctacaggtcaccttcctgagcctcagtgtcttcaactgtaaaaagggttgtggtgaggttgagtgagatgactcctggttagaagccagaaggggcaactattatttttaccatcattaccctgggctacctggggagtgactttgtacaatctcttcctctccaggggcctgggctcctggctctgaaaatctagctgtgactattcgctgccatcccgaggcccactgcctcctcgagtccctactcccctccctgcaacccagctttcagattgtccaccttgctgggtcctcccacaggtgaactccaggctgaacacctggagtctggtgccagctcccccagcgccgctgtgtcacctgctggaggagctctctcctcacttgcccaccccacgccaccacccccatctccttcaccctctccaccacctcaaccatcagcttcatctacagcaccccgtgctgaaacttgtagttggccccaagaccgacaggctgcctgatacgtcatttctctaaggggtggtaatggctgggattatatgctgttgtctctgtgaatgcttttcccacttattggctgagcaagttgcttaagcttcttatgcctcagtttcaccatctgtaaaatggggataccacctccgagcagaatcatgttcatttatccactgtgtgctagagagtggggtatggaggagggataagaaagaacctcccctgagctggggccctgagcagggaagtggcgactcgggctaacgaaggctgcagtggggaagtgctggagcctgtgggggtgccacaggaacagaggacacctggcttagcctcaggttctgtgctgagccctgaacatgacagtgaggatacaagtcctgggaaacgctcagccctctgcctggagccctcactgacagcacaggtggcagcacagcccttccatttctgagcccctgccctcggagaattatgaaattaaaaattatcaaatgccatgatgggaagccttatgcttttgaactcagtcctcagcagcacttggagaaggtgttatcattactcccattttacaggtgaggaaaccgagcaccagtgacatgacgtcacttgctcggggtggcacagctagtatggtggagcagggcgtgaacccaggcaggctggtggcggaggccacaccttcactcctcccataagcatctggcctgtctgcaatgtcttcaaggggctcagactggtcgggaaccaaggtcaactaaactgaaatgattctatgaaatggccacctcacggggcatcatgggaatcaaagtgtctgcaggcaaagctcataactccgagcgggagcctccaaacagcagcatcctagcagggtggcgtgcacgtaccttgctgatgtcaggggacctggaacgaccaccctctgcatcgccgaaggctttggtgatagcgaactggatggccaggccggtcatggtgcctgtggacagcggctggatacggcgcacagcctgcagcagtgcggccttggagacatgagcccgcagcgagaactcctgcttcacggtgctggcatagttgaccatgcccacccgggtggcattgggccccacgtccagcgactcgatgacctgggacaggaataccttcactttctcaaattcaacaggccgaacgctgcgagagctgtcgacaacaaacaccagggtcacacaagggccatccacggtgaccagcggtgagaaacgcaatgctgtcctcgtgccatgctggaggtgaacgaggagaacgtgagctggggtctcctcaccaactgctccccccaccccaacccccctgacggccagggctgtgtccagggctcagggcacaaggctccgttagctgggcagcagctggcccatgaaacagccctttcagctccacctctgaatggcagttctatgggctcctcggaagaacacaggcgccttctctgtgtcacttctccgctcattagcagagctgcagaaatacactacaggactcaaaattgagaacagtgtgtccggtatgagccagaaggaaaaaaaaatgcacgaaggggccttctgcaaggttgctcacaagtcaaacaggcagctgtgaagggctctgctgttccctcctcctgttttcacatccctcgggcttccagaaacttaaagccgttagtgtttcatgcaagagagagcatctgtgatccacggagaggcccctgggcagtgtggttcagtgggaagcacacaggactccctccccagtgctcccaggatcagctctttccctaaagagcaaacctggttatctcgcaatgacctagctaacacaaatgcaacatcagccggggcagcctgcccccttcactctttgcccaccatcagctgtttggcagtatccatatacgcctttaccagtatttatttaatctttttgtttaattcactctaaaccaactcacttcttaaaaatttctctgccttataagaaataatagccatgaaatcactggt

SEQ ID NO: 2032 - protein, 89 aa, Homo sapiens [sequence omitted]

SEQ ID NO: 2033 - DNA, 4730 bp, Homo sapiens
aatccacctaagccgtgtccctagccctggccccgccctgatgttgccgtgtaactcagttcccgccgttttataggctaccgccccagccaggccccgccctctgatgtggccccgccccccgacgctgactttttctgtcttcactttagcgctggctccgcccctagccttggcccgcctcagcgcggactctcagtctctgcgcctgccacggcctcgtcccgctcagccctggccctgcccctggagccgactctctccgcctccgccccggtcccgccctggcactgactgtctccgtcttcgcccctgccctggccccgccccctgcctgctctggccccgccccgccgctctctccgtctccgcccctgccctggccccacccttgccccgccccggcgctgactctctccgtctccgcctccgcccccggctcctccccggccccgccccggcactgacattctatctctctcccgtctccgcctctgccccccccccggccccgcccctgccctgcgccggcgctggctccgtctgcgcctcagcctcggtcccgcctccagccctggccccgccccgccgctctccccttctccgcccctgccctggctccgcccccgcctgcccgcgcaccgcagaaggcctcctggaacttcctggacagcttctcgatgacgctgtagctctccacgtaatcgacgtgttcgtcctgcggctcgctggcgatctgccgcagcgtggccttgtccacgctgcccactccgatggcgaacagctcgacgccgctggcccgggcccgcgcagacacgtcctgcacgctgtcctggggcctcccgtctgtcaccacgatgaccacctgcgacacgcggggcggtgtgacaccgggctcccggaagcccacgggactgtccaggagaggaggctgaggcccggagaggcgggaggactgccgggtcgcacagccaggcggcacccgggggaagaggacccggctggccgaagaggagacccgtttcctctgactgagagacgtggctggggggctttccatctgcttcgcctccctcgggcaggcagctctgagatgcccggagggatgtgatgccccatcgccaaattggggtctctaaggtcagggccatgccttcccctcagactgaggcggctgagggcagggtcctcaggctgatggctgtgggagtcgtgccacgcccctcgtgcccccgggaggcccggccggggctgggtggggggatccggtggttccacatggtgcagttctgcgctttggccaccagatggcagccgaagctaagggatggggctgccgtctcccgtcttgctgtccttgtcccggtaagaccggggaccctggaccagggaaccgacggagggccactcccatgtggatgcccaagggaccaacccaagaaagatgccgcccttatcctcctccactccccggtatgatacatgcccctgccagagagggaaagaatctgcctgctcccctcccactaggctcctctggtctgtaccctggaaagaaagaggtggcggactctgtcactgagatccggcttcgtgaccccctgtctgcacccgccctgaggctagggcgctcccagctctgcccagtctgggttaggcatccagtcccgctttgctgcttctctgcttctgacttgggtctgtttctgattcctgggtcccatccttagccccaggtcctgacaccctgtcctgatgacaggcagttgagacaggccgtgtttagaaatgcagctccacaagctacaggtcaccttcctgagcctcagtgtcttcaactgtaaaaagggttgtggtgaggttgagtgagatgactcctggttagaagccagaaggggcaactattatttttaccatcattaccctgggctacctggggagtgactttgtacaatctcttcctctccaggggcctgggctcctggctctgaaaatctagctgtgactattcgctgccatcccgaggcccactgcctcctcgagtccctactcccctccctgcaacccagctttcagattgtccaccttgctgggtcctcccacaggtgaactccaggctgaacacctggagtctggtgccagctcccccagcgccgctgtgtcacctgctggaggagctctctcctcacttgcccaccccacgccaccacccccatctccttcaccctctccaccacctcaaccatcagcttcatctacagcaccccgtgctgaaacttgtagttggccccaagaccgacaggctgcctgatacgtcatttctctaaggggtggtaatggctgggattatatgctgttgtctctgtgaatgcttttcccacttattggctgagcaagttgcttaagcttcttatgcctcagtttcaccatctgtaaaatggggataccacctccgagcagaatcatgttcatttatccactgtgtgctagagagtggggtatggaggagggataagaaagaacctcccctgagctggggccctgagcagggaagtggcgactcgggctaacgaaggctgcagtggggaagtgctggagcctgtgggggtgccacaggaacagaggacacctggcttagcctcaggttctgtgctgagccctgaacatgacagtgaggatacaagtcctgggaaacgctcagccctctgcctggagccctcactgacagcacaggtggcagcacagcccttccatttctgagcccctgccctcggagaattatgaaattaaaaattatcaaatgccatgatgggaagccttatgcttttgaactcagtcctcagcagcacttggagaaggtgttatcattactcccattttacaggtgaggaaaccgagcaccagtgacatgacgtcacttgctcggggtggcacagctagtatggtggagcagggcgtgaacccaggcaggctggtggcggaggccacaccttcactcctcccataagcatctggcctgtctgcaatgtcttcaaggggctcagactggtcgggaaccaaggtcaactaaactgaaatgattctatgaaatggccacctcacggggcatcatgggaatcaaagtgtctgcaggcaaagctcataactccgagcgggagcctccaaacagcagcatcctagcagggtggcgtgcacgtaccttgctgatgtcaggggacctggaacgaccaccctctgcatcgccgaaggctttggtgatagcgaactggatggccaggccggtcatggtgcctgtggacagcggctggatacggcgcacagcctgcagcagtgcggccttggagacatgagcccgcagcgagaactcctgcttcacggtgctggcatagttgaccatgcccacccgggtggcattgggccccacgtccagcgactcgatgacctgggacaggaataccttcactttctcaaattcaacaggccgaacgctgcgagagctgtcgacaacaaacaccagggtcacacaagggccatccacggtgaccagcggtgagaaacgcaatgctgtcctcgtgccatgctggaggtgaacgaggagaacgtgagctggggtctcctcaccaactgctccccccaccccaacccccctgacggccagggctgtgtccagggctcagggcacaaggctccgttagctgggcagcagctggcccatgaaacagccctttcagctccacctctgaatggcagttctatgggctcctcggaagaacacaggcgccttctctgtgtcacttctccgctcattagcagagctgcagaaatacactacaggactcaaaattgagaacagtgtgtccggtatgagccagaaggaaaaaaaaatgcacgaaggggccttctgcaaggttgctcacaagtcaaacaggcagctgtgaagggctctgctgttccctcctcctgttttcacatccctcgggcttccagaaacttaaagccgttagtgtttcatgcaagagagagcatctgtgatccacggagaggcccctgggcagtgtggttcagtgggaagcacacaggactccctccccagtgctcccaggatcagctctttccctaaagagcaaacctggttatctcgcaatgacctagctaacacaaatgcaacatcagccggggcagcctgcccccttcactctttgcccaccatcagctgtttggcagtatccatatacgcctttaccagtatttatttaatctttttgtttaattcactctaaaccaactcacttcttaaaaatttctctgccttataagaaataatagccatgaaatcactggtttgatgtacggtttatttatttattccaataaacactcattcaatataaaattcaaataaattcaaaactaattaaatttagctttttcatccacatatcactgaaaattttcttgttttctgccagtggcatgcacgacagactttgaggaatcctgtgaagtgaaacggctttagaatcaaagagagctgggcttgagtccccctctgtcacaggccagccatggtgacttccggtaaatccctcctttttctgcctgtttcatgtcagtagcattggaatcctaatgctaatgccacaggaaggttgtaaggaagaaatgcagtgaatgctacatcaagcgtattgggctttttgttttagttttttcctttttttttttttttt

SEQ ID NO: 2034 - protein, 89 aa, Homo sapiens [sequence omitted]

SEQ ID NO: 2035 - DNA, 931 bp, Homo sapiens
agaaggcctcctggaacttcctggacagcttctcgatgacgctgtagctctccacgtaatcgacgtgttcgtcctgcggctcgctggcgatctgccgcagcgtggccttgtccacgctgcccactccgatggcgaacagctcgacgccgctggcccgggcccgcgcagacacgtcctgcacgctgtcctggggcctcccgtctgtcaccacgatgaccacctgcgacacgcggggcggtgtgacaccgggctcccggaagcccacgggactgtccaggagaggaggctgaggcccggagaggcgggaggactgccgggtcgcacagccaggcggcacccgggggaagaggacccggctggccgaagaggagacccgtttcctctgactgagagacgtggctggggggctttccatctgcttcgcctccctcgggcaggcagctctgagatgcccggagggatgtgatgccccatcgccaaattggggtctctaagctatgaaatggccacctcacggggcatcatgggaatcaaagtgtctgcaggcaaagctcataactccgagcgggagcctccaaacagcagcatcctagcagggtggcgtgcacgtaccttgctgatgtcaggggacctggaacgaccaccctctgcatcgccgaaggctttggtgatagcgaactggatggccaggccggtcatggtgcctgtggacagcggctggatacggcgcacagcctgcagcagtgcggccttggagacatgagcccgcagcgagaactcctgcttcacggtgctggcatagttgaccatgcccacccgggtggcattgggccccacgtccagcgactcgatgacctgggacaggaataccttcactttctcaaattcaacaggccgaacgctgcgagagctgtcgacaacaaacaccagg

SEQ ID NO: 2036 - protein, 86 aa, Homo sapiens
MATSRGIMGIKVSAGKAHNSEREPPNSSILAGWRARTLLMSGDLERPPSASPKALVIANWMARPVMVPVDSGWIRRTACSSAALET

SEQ ID NO: 2037 - DNA, 2088 bp, Homo sapiens
agaaggcctcctggaacttcctggacagcttctcgatgacgctgtagctctccacgtaatcgacgtgttcgtcctgcggctcgctggcgatctgccgcagcgtggccttgtccacgctgcccactccgatggcgaacagctcgacgccgctggcccgggcccgcgcagacacgtcctgcacgctgtcctggggcctcccgtctgtcaccacgatgaccacctgcgacacgcggggcggtgtgacaccgggctcccggaagcccacgggactgtccaggagaggaggctgaggcccggagaggcgggaggactgccgggtcgcacagccaggcggcacccgggggaagaggacccggctggccgaagaggagacccgtttcctctgactgagagacgtggctggggggctttccatctgcttcgcctccctcgggcaggcagctctgagatgcccggagggatgtgatgccccatcgccaaattggggtctctaaggtcagggccatgccttcccctcagactgaggcggctgagggcagggtcctcaggctgatggctgtgggagtcgtgccacgcccctcgtgcccccgggaggcccggccggggctgggtggggggatccggtggttccacatggtgcagttctgcgctttggccaccagatggcagccgaagctaagggatggggctgccgtctcccgtcttgctgtccttgtcccggtaagaccggggaccctggaccagggaaccgacggagggccactcccatgtggatgcccaagggaccaacccaagaaagatgccgcccttatcctcctccactccccgctatgaaatggccacctcacggggcatcatgggaatcaaagtgtctgcaggcaaagctcataactccgagcgggagcctccaaacagcagcatcctagcagggtggcgtgcacgtaccttgctgatgtcaggggacctggaacgaccaccctctgcatcgccgaaggctttggtgatagcgaactggatggccaggccggtcatggtgcctgtggacagcggctggatacggcgcacagcctgcagcagtgcggccttggagacatgagcccgcagcgagaactcctgcttcacggtgctggcatagttgaccatgcccacccgggtggcattgggccccacgtccagcgactcgatgacctgggacaggaataccttcactttctcaaattcaacaggccgaacgctgcgagagctgtcgacaacaaacaccagggtcacacaagggccatccacggtgaccagcggtgagaaacgcaatgctgtcctcgtgccatgctggaggtgaacgaggagaacgtgagctggggtctcctcaccaactgctccccccaccccaacccccctgacggccagggctgtgtccagggctcagggcacaaggctccgttagctgggcagcagctggcccatgaaacagccctttcagctccacctctgaatggcagttctatgggctcctcggaagaacacaggcgccttctctgtgtcacttctccgctcattagcagagctgcagaaatacactacaggactcaaaattgagaacagtgtgtccggtatgagccagaaggaaaaaaaaatgcacgaaggggccttctgcaaggttgctcacaagtcaaacaggcagctgtgaagggctctgctgttccctcctcctgttttcacatccctcgggcttccagaaacttaaagccgttagtgtttcatgcaagagagagcatctgtgatccacggagaggcccctgggcagtgtggttcagtgggaagcacacaggactccctccccagtgctcccaggatcagctctttccctaaagagcaaacctggttatctcgcaatgacctagctaacacaaatgcaacatcagccggggcagcctgcccccttcactctttgcccaccatcagctgtttggcagtatccatatacgcctttaccagtatttatttaatctttttgtttaattcactctaaaccaactcacttcttaaaaatttctctgccttataagaaataatagccatgaaatcactggt

SEQ ID NO: 2038 - protein, 122 aa, Homo sapiens [sequence omitted]

SEQ ID NO: 2039 - DNA, 2476 bp, Homo sapiens
agaaggcctcctggaacttcctggacagcttctcgatgacgctgtagctctccacgtaatcgacgtgttcgtcctgcggctcgctggcgatctgccgcagcgtggccttgtccacgctgcccactccgatggcgaacagctcgacgccgctggcccgggcccgcgcagacacgtcctgcacgctgtcctggggcctcccgtctgtcaccacgatgaccacctgcgacacgcggggcggtgtgacaccgggctcccggaagcccacgggactgtccaggagaggaggctgaggcccggagaggcgggaggactgccgggtcgcacagccaggcggcacccgggggaagaggacccggctggccgaagaggagacccgtttcctctgactgagagacgtggctggggggctttccatctgcttcgcctccctcgggcaggcagctctgagatgcccggagggatgtgatgccccatcgccaaattggggtctctaaggtcagggccatgccttcccctcagactgaggcggctgagggcagggtcctcaggctgatggctgtgggagtcgtgccacgcccctcgtgcccccgggaggcccggccggggctgggtggggggatccggtggttccacatggtgcagttctgcgctttggccaccagatggcagccgaagctaagggatggggctgccgtctcccgtcttgctgtccttgtcccggtaagaccggggaccctggaccagggaaccgacggagggccactcccatgtggatgcccaagggaccaacccaagaaagatgccgcccttatcctcctccactccccgctatgaaatggccacctcacggggcatcatgggaatcaaagtgtctgcaggcaaagctcataactccgagcgggagcctccaaacagcagcatcctagcagggtggcgtgcacgtaccttgctgatgtcaggggacctggaacgaccaccctctgcatcgccgaaggctttggtgatagcgaactggatggccaggccggtcatggtgcctgtggacagcggctggatacggcgcacagcctgcagcagtgcggccttggagacatgagcccgcagcgagaactcctgcttcacggtgctggcatagttgaccatgcccacccgggtggcattgggccccacgtccagcgactcgatgacctgggacaggaataccttcactttctcaaattcaacaggccgaacgctgcgagagctgtcgacaacaaacaccagggtcacacaagggccatccacggtgaccagcggtgagaaacgcaatgctgtcctcgtgccatgctggaggtgaacgaggagaacgtgagctggggtctcctcaccaactgctccccccaccccaacccccctgacggccagggctgtgtccagggctcagggcacaaggctccgttagctgggcagcagctggcccatgaaacagccctttcagctccacctctgaatggcagttctatgggctcctcggaagaacacaggcgccttctctgtgtcacttctccgctcattagcagagctgcagaaatacactacaggactcaaaattgagaacagtgtgtccggtatgagccagaaggaaaaaaaaatgcacgaaggggccttctgcaaggttgctcacaagtcaaacaggcagctgtgaagggctctgctgttccctcctcctgttttcacatccctcgggcttccagaaacttaaagccgttagtgtttcatgcaagagagagcatctgtgatccacggagaggcccctgggcagtgtggttcagtgggaagcacacaggactccctccccagtgctcccaggatcagctctttccctaaagagcaaacctggttatctcgcaatgacctagctaacacaaatgcaacatcagccggggcagcctgcccccttcactctttgcccaccatcagctgtttggcagtatccatatacgcctttaccagtatttatttaatctttttgtttaattcactctaaaccaactcacttcttaaaaatttctctgccttataagaaataatagccatgaaatcactggtttgatgtacggtttatttatttattccaataaacactcattcaatataaaattcaaataaattcaaaactaattaaatttagctttttcatccacatatcactgaaaattttcttgttttctgccagtggcatgcacgacagactttgaggaatcctgtgaagtgaaacggctttagaatcaaagagagctgggcttgagtccccctctgtcacaggccagccatggtgacttccggtaaatccctcctttttctgcctgtttcatgtcagtagcattggaatcctaatgctaatgccacaggaaggttgtaaggaagaaatgcagtgaatgctacatcaagcgtattgggctttttgttttagttttttcctttttttttttttttt

SEQ ID NO: 2040 - protein, 122 aa, Homo sapiens [sequence omitted]

SEQ ID NO: 2041 - DNA, 1321 bp, Homo sapiens
gtaatcgacgtgttcgtcctgcggctcgctggcgatctgccgcagcgtggccttgtccacgctgcccactccgatggcgaacagctcgacgccgctggcccgggcccgcgcagacacgtcctgcacgctgtcctggggcctcccgtctgtcaccacgatgaccacctgcgacacgcggggcggtgtgacaccgggctcccggaagcccacgggactgtccaggagaggaggctgaggcccggagaggcgggaggactgccgggtcgcacagccaggcggcacccgggggaagaggacccggctggccgaagaggagacccgtttcctctgactgagagacgtggctggggggctttccatctgcttcgcctccctcgggcaggcagctctgagatgcccggagggatgtgatgccccatcgccaaattggggtctctaaggtcagggccatgccttcccctcagactgaggcggctgagggcagggtcctcaggctgatggctgtgggagtcgtgccacgcccctcgtgcccccgggaggcccggccggggctgggtggggggatccggtggttccacatggtgcagttctgcgctttggccaccagatggcagccgaagctaagggatggggctgccgtctcccgtcttgctgtccttgtcccggtaagaccggggaccctggaccagggaaccgacggagggccactcccatgtggatgcccaagggaccaacccaagaaagatgccgcccttatcctcctccactccccggtgaggaaaccgagcaccagtgacatgacgtcacttgctcggggtggcacagctagtatggtggagcagggcgtgaacccaggcaggctggtggcggaggccacaccttcactcctcccataagcatctggcctgtctgcaatgtcttcaaggggctcagactggtcgggaaccaaggtcaactaaactgaaatgattctatgaaatggccacctcacggggcatcatgggaatcaaagtgtctgcaggcaaagctcataactccgagcgggagcctccaaacagcagcatcctagcagggtggcgtgcacgtaccttgctgatgtcaggggacctggaacgaccaccctctgcatcgccgaaggctttggtgatagcgaactggatggccaggccggtcatggtgcctgtggacagcggctggatacggcgcacagcctgcagcagtgcggccttggagacatgagcccgcagcgagaactcctgcttcacggtgctggcatagttgaccatgcccacccgggtggcattgggccccacgtccagcg

SEQ ID NO: 2042 - protein, 161 aa, Homo sapiens
MPHRQIGVSKVRAMPSPQTEAAEGRVLRLMAVGVVPRPSCPREARPGLGGGIRWFHMVQFCALATRWQPKLRDGAAVSRLAVLVPVRPGTLDQGTDGGPLPCGCPRDQPKKDAALILLHSPVRKPSTSDMTSLARGGTASMVEQGVNPGRLVAEATPSLLP

SEQ ID NO: 2043 - DNA, 947 bp, Homo sapiens
ccaacaatgcttggtttatttcaatcagctctgacacttgtttagacgattggccattctaaagttggtgagtttgtcaagcaactatcgacttgatcagttcagccaagcaactgacaaatcaaaaacccacttgtcagttcagtaaaataatttggtcaaacaacagtctattgcattgatttataaatagttgtcagttcacatagcaatttaatcaagtaatcattaattagttaccccctatatataaatatatgtaatcaatttcttcaaatagcttgcttacatgataatcaattagccaaccatgagtcatttagaatagtgataaatagaatacacagaatagtgatgaaattcaatttaaaaaatcacgttagcctccaaaccatttaattcaaatgaacccatcaaaatccaatgctcacctattcagttgctctgtggtcagtgtggctgcataacagtggattccatgaaaggagtcattttagtgatgagctgccagtccattcccaggccaggctgtcgctggccatccattcagtcgattcagtcataggcgaatctgttctgcccgaggcttgtggtcaagcaaaaattcagccctgaaatcaggcacatctgttcgttggactaaacccacaggttagttcagtcaaagcaggcaacccccttgtgggcactgaccctgccactggggtcatggcggttgtggcagctggggaggtttggccccaacagccctcctgtgcctgcttccctgtgtgtcggggtcctccagggagctgacccagaggtggaggccacggaggcagggtctctggggactgtcggggggtacagagggagaaggctctgcaagagctccctggcaatacccccttgtgtaattgctttgtgtgcgacagggaggaagtttcaataaagcagcaacaagcttc

SEQ ID NO: 2044 - protein, 63 aa, Homo sapiens [sequence omitted]

SEQ ID NO: 2045 - DNA, 1322 bp, Homo sapiens
aggtggtcctgccgtcctacgaggaagccctgtctttgccatcgaagaccccagaggggggcccagcaccacccccatactcagaggtgtgaccctcgccaggccccagccccagtgctgggaggggtggagctgcctcataatctgcttttttgctttggtggcccctgtggcctgggtgggccctcccgcccctccctggcaggacaatctgcttgtgtctccctcgctggcctgctcctcctgcagggcctgtgagctgctcacaactgggtcaacgctttaggctgagtcactcctcgggtctctccataattcagcccaacaatgcttggtttatttcaatcagctctgacacttgtttagacgattggccattctaaagttggtgagtttgtcaagcaactatcgacttgatcagttcagccaagcaactgacaaatcaaaaacccacttgtcattcttcaaatagcttgcttacatgataatcaattagccaaccatgagtcatttagaatagtgataaatagaatacacagaatagtgatgaaattcaatttaaaaaatcacgttagcctccaaaccatttaattcaaatgaacccatcaactggatgccaactctggcgaatgtaggacctctgagtggctgtataattgttaattcaaatgaaattcatttaaacagttgacaaactgtcattcaacaattagctccaggaaataacagttatttcatcataaaacagtcccttcaaacacacaattgttctgctgaagagttgtcatcaacaatccaatgctcacctattcagttgctctgtggtcagtgtggctgcataacagtggattccatgaaaggagtcattttagtgatgagctgccagtccattcccaggccaggctgtcgctggccatccattcagtcgattcagtcataggcgaatctgttctgcccgaggcttgtggtcaagcaaaaattcagccctgaaatcaggcacatctgttcgttggactaaacccacaggttagttcagtcaaagcaggcaacccccttgtgggcactgaccctgccactggggtcatggcggttgtggcagctggggaggtttggccccaacagccctcctgtgcctgcttccctgtgtgtcggggtcctccagggagctgacccagaggtggaggccacggaggcagggtctctggggactgtcggggggtacagagggagaaggctctgcaagagctccctggcaatacccccttgtgtaattgctttgtgtgcgacagggaggaagtttcaataaagcagcaacaagcttc

SEQ ID NO: 2046 - protein, 63 aa, Homo sapiens [sequence omitted]

SEQ ID NO: 2047 - DNA, 1974 bp, Homo sapiens
caatactgcacatgctgttttgtaatctgcttcagaaaacaacatatcggaagcaattttgaagaaaacatgtcccaccatcagctctgtttcgagatgggcagggctgtctcaggaggtagtgagcttccaggcagtgtgggcagtcaagcaggagctgtgggactattgccagggaaattggagggtgggctagaagccccccaaatccccttgctatgtggtatctgtggggcaatgaaaagggcaatacctggaatattctggactggctggtgaggaacccccaaccagaatgagaggtccgagcaggagcagctggatgctggcttctggagagagtggtggctcctgcctggcatatgtcctaggcctgctggagcgtgagaaggacgctcagcaaagcacagcctgacctgggcctttttccaggtctacatgttcaagtgcgtgtggcggtgctacagattgatcaagtgcatgaactcggtggaggagaagagaaactccaagatgctccagaaggtggtcctgccgtcctacgaggaagccctgtctttgccatcgaagaccccagaggggggcccagcaccacccccatactcagaggtgtgaccctcgccaggccccagccccagtgctgggaggggtggagctgcctcataatctgcttttttgctttggtggcccctgtggcctgggtgggccctcccgcccctccctggcaggacaatctgcttgtgtctccctcgctggcctgctcctcctgcagggcctgtgagctgctcacaactgggtcaacgctttaggctgagtcactcctcgggtctctccataattcagcccaacaatgcttggtttatttcaatcagctctgacacttgtttagacgattggccattctaaagttggtgagtttgtcaagcaactatcgacttgatcagttcagccaagcaactgacaaatcaaaaacccacttgtcagttcagtaaaataatttggtcaaacaacagtctattgcattgatttataaatagttgtcagttcacatagcaatttaatcaagtaatcattaattagttaccccctatatataaatatatgtaatcaatttcttcaaatagcttgcttacatgataatcaattagccaaccatgagtcatttagaatagtgataaatagaatacacagaatagtgatgaaattcaatttaaaaaatcacgttagcctccaaaccatttaattcaaatgaacccatcaactggatgccaactctggcgaatgtaggacctctgagtggctgtataattgttaattcaaatgaaattcatttaaacagttgacaaactgtcattcaacaattagctccaggaaataacagttatttcatcataaaacagtcccttcaaacacacaattgttctgctgaagagttgtcatcaacaatccaatgctcacctattcagttgctctgtggtcagtgtggctgcataacagtggattccatgaaaggagtcattttagtgatgagctgccagtccattcccaggccaggctgtcgctggccatccattcagtcgattcagtcataggcgaatctgttctgcccgaggcttgtggtcaagcaaaaattcagccctgaaatcaggcacatctgttcgttggactaaacccacaggttagttcagtcaaagcaggcaacccccttgtgggcactgaccctgccactggggtcatggcggttgtggcagctggggaggtttggccccaacagccctcctgtgcctgcttccctgtgtgtcggggtcctccagggagctgacccagaggtggaggccacggaggcagggtctctggggactgtcggggggtacagagggagaaggctctgcaagagctccctggcaatacccccttgtgtaattgctttgtgtgcgacagggaggaagtttcaataaagcagcaacaagcttc

SEQ ID NO: 2048 - protein, 58 aa, Homo sapiens
MFKCVWRCYRLIKCMNSVEEKRNSKMLQKVVLPSYEEALSLPSKTPEGGPAPPPYSEV

SEQ ID NO: 2049 - DNA, 2064 bp, Homo sapiens
cggcagcaccatggacccccgcttgtccactgtccgccagacctgctgctgcttcaatgtccgcatcgcaaccaccgccctggccatctaccatgtgctgacctgatctccagcttcctgctcatcaccatgctcttcatcatcagcctgagcctactgatcggcgtagtcaagaaccgggagaagtacctgctgcccttcctgtccctgcaaatcatggactatctcctgtgcctgctcaccctgctgggctcctacattgagctgcccgcctacctcaagttggcctcccggagccgtgctagctcctccaagttccccctgatgacgctgcagctgctggacttctgcctgagcatcctgaccctctgcagctcctacatggaagtgcccacctatctcaacttcaagtccatgaaccacatgaattacctccccagccaggaggatatgcctcataaccagttcatcaagatgatgatcatcttttccatcgccttcatcactgtccttatcttcaaggtctacatgttcaagtgcgtgtggcggtgctacagattgatcaagtgcatgaactcggtggaggagaagagaaactccaagatgctccagaaggtggtcctgccgtcctacgaggaagccctgtctttgccatcgaagaccccagaggggggcccagcaccacccccatactcagaggtgtgaccctcgccaggccccagccccagtgctgggaggggtggagctgcctcataatctgcttttttgctttggtggcccctgtggcctgggtgggccctcccgcccctccctggcaggacaatctgcttgtgtctccctcgctggcctgctcctcctgcagggcctgtgagctgctcacaactgggtcaacgctttaggctgagtcactcctcgggtctctccataattcagcccaacaatgcttggtttatttcaatcagctctgacacttgtttagacgattggccattctaaagttggtgagtttgtcaagcaactatcgacttgatcagttcagccaagcaactgacaaatcaaaaacccacttgtcagttcagtaaaataatttggtcaaacaacagtctattgcattgatttataaatagttgtcagttcacatagcaatttaatcaagtaatcattaattagttaccccctatatataaatatatgtaatcaatttcttcaaatagcttgcttacatgataatcaattagccaaccatgagtcatttagaatagtgataaatagaatacacagaatagtgatgaaattcaatttaaaaaatcacgttagcctccaaaccatttaattcaaatgaacccatcaactggatgccaactctggcgaatgtaggacctctgagtggctgtataattgttaattcaaatgaaattcatttaaacagttgacaaactgtcattcaacaattagctccaggaaataacagttatttcatcataaaacagtcccttcaaacacacaattgttctgctgaagagttgtcatcaacaatccaatgctcacctattcagttgctctgtggtcagtgtggctgcataacagtggattccatgaaaggagtcattttagtgatgagctgccagtccattcccaggccaggctgtcgctggccatccattcagtcgattcagtcataggcgaatctgttctgcccgaggcttgtggtcaagcaaaaattcagccctgaaatcaggcacatctgttcgttggactaaacccacaggttagttcagtcaaagcaggcaacccccttgtgggcactgaccctgccactggggtcatggcggttgtggcagctggggaggtttggccccaacagccctcctgtgcctgcttccctgtgtgtcggggtcctccagggagctgacccagaggtggaggccacggaggcagggtctctggggactgtcggggggtacagagggagaaggctctgcaagagctccctggcaatacccccttgtgtaattgctttgtgtgcgacagggaggaagtttcaataaagcagcaacaagcttc

SEQ ID NO: 2050 - protein, 191 aa, Homo sapiens [sequence omitted]

SEQ ID NO: 2051 - DNA, 2916 bp, Homo sapiens
agtgtctcagaggaggggacggcagcaccatggacccccgcttgtccactgtccgccagacctgctgctgcttcaatgtccgcatcgcaaccaccgccctggccatctaccatgtgatcatgagcgtcttgttgttcatcgagcactcagtagaggtggcccatggcaaggcgtcctgcaagctctcccagatgggctacctcaggatcggtaggtccaggggacgccggtggagtggcggggggaggaggacagggagggccctggccagggatagccaggctagtgttggaggcactgccacctctccatggacgatggatgacctctggcaagtgtcttcctttcttggggcctcagctgtttcatccgcaaatggggatgttccacctgaccccacccacatctgcaggtggtgagagcagatggaatggcactttgcaaatccccaccagctggtaaaggtgatagcctcactcttctgcttaaagccgtcagtggctgctcatcacactagaataaaatggaaactcctcaccataggatccagcctctgcccacctctctgacagcatctccctgcgattctccaccccacaccttgctccagccacactgacctcaccaaccctgtccctgtctcaggccgattcctcattgctctcaggccactccccagggatgccttcctcagcctcaccctggctgaagtggaccccagcctgcacctccagcccagcaccctctgtcgcatcctcctgtgctatgtgtgatgttctgcttttgtctttgtactcactccagactcaggactgcaagagggcagggcctgggctttcctgtgcatcctcatgtccccaaaccagtggttccccaagtgtggtcctgggagcctggctggggtcccaggggcacccctgagcacctccctgctctccttgcctttcagctgacctgatctccagcttcctgctcatcaccatgctcttcatcatcagcctgagcctactgatcggcgtagtcaagaaccgggagaagtacctgctgcccttcctgtccctgcaaatcatggactatctcctgtgcctgctcaccctgctgggctcctacattgagctgcccgcctacctcaagttggcctcccggagccgtgctagctcctccaagttccccctgatgacgctgcagctgctggacttctgcctgagcatcctgaccctctgcagctcctacatggaagtgcccacctatctcaacttcaagtccatgaaccacatgaattacctccccagccaggaggatatgcctcataaccagttcatcaagatgatgatcatcttttccatcgccttcatcactgtccttatcttcaaggtctacatgttcaagtgcgtgtggcggtgctacagattgatcaagtgcatgaactcggtggaggagaagagaaactccaagatgctccagaaggtggtcctgccgtcctacgaggaagccctgtctttgccatcgaagaccccagaggggggcccagcaccacccccatactcagaggtgtgaccctcgccaggccccagccccagtgctgggaggggtggagctgcctcataatctgcttttttgctttggtggcccctgtggcctgggtgggccctcccgcccctccctggcaggacaatctgcttgtgtctccctcgctggcctgctcctcctgcagggcctgtgagctgctcacaactgggtcaacgctttaggctgagtcactcctcgggtctctccataattcagcccaacaatgcttggtttatttcaatcagctctgacacttgtttagacgattggccattctaaagttggtgagtttgtcaagcaactatcgacttgatcagttcagccaagcaactgacaaatcaaaaacccacttgtcagttcagtaaaataatttggtcaaacaacagtctattgcattgatttataaatagttgtcagttcacatagcaatttaatcaagtaatcattaattagttaccccctatatataaatatatgtaatcaatttcttcaaatagcttgcttacatgataatcaattagccaaccatgagtcatttagaatagtgataaatagaatacacagaatagtgatgaaattcaatttaaaaaatcacgttagcctccaaaccatttaattcaaatgaacccatcaactggatgccaactctggcgaatgtaggacctctgagtggctgtataattgttaattcaaatgaaattcatttaaacagttgacaaactgtcattcaacaattagctccaggaaataacagttatttcatcataaaacagtcccttcaaacacacaattgttctgctgaagagttgtcatcaacaatccaatgctcacctattcagttgctctgtggtcagtgtggctgcataacagtggattccatgaaaggagtcattttagtgatgagctgccagtccattcccaggccaggctgtcgctggccatccattcagtcgattcagtcataggcgaatctgttctgcccgaggcttgtggtcaagcaaaaattcagccctgaaatcaggcacatctgttcgttggactaaacccacaggttagttcagtcaaagcaggcaacccccttgtgggcactgaccctgccactggggtcatggcggttgtggcagctggggaggtttggccccaacagccctcctgtgcctgcttccctgtgtgtcggggtcctccagggagctgacccagaggtggaggccacggaggcagggtctctggggactgtcggggggtacagagggagaaggctctgcaagagctccctggcaatacccccttgtgtaattgctttgtgtgcgacagggaggaagtttcaataaagcagcaacaagcttc

SEQ ID NO: 2052 - protein, 191 aa, Homo sapiens [sequence omitted]

SEQ ID NO: 2053 - DNA, 765 bp, Homo sapiens
tctttccccttcagtgtctcagaggaggggacggcagcaccatggacccccgcttgtccactgtccgccagacctgctgctgcttcaatgtccgcatcgcaaccaccgccctggccatctaccatgtgatcatgagcgtcttgttgttcatcgagcactcagtagaggtggcccatggcaaggcgtcctgcaagctctcccagatgggctacctcaggatcgctgacctgatctccagcttcctgctcatcaccatgctcttcatcatcagcctgagcctactgatcggcgtagtcaagaaccgggagaagtacctgctgcccttcctgtccctgcaaatcatggactatctcctgtgcctgctcaccctgctgggctcataggcgaatctgttctgcccgaggcttgtggtcaagcaaaaattcagccctgaaatcaggcacatctgttcgttggactaaacccacaggttagttcagtcaaagcaggcaacccccttgtgggcactgaccctgccactggggtcatggcggttgtggcagctggggaggtttggccccaacagccctcctgtgcctgcttccctgtgtgtcggggtcctccagggagctgacccagaggtggaggccacggaggcagggtctctggggactgtcggggggtacagagggagaaggctctgcaagagctccctggcaatacccccttgtgtaattgctttgtgtgcgacagggaggaagtttcaataaagcagcaacaagcttc

SEQ ID NO: 2054 - protein, 113 aa, Homo sapiens
MDPRLSTVRQTCCCFNVRIATTALAIYHVIMSVLLFIEHSVEVAHGKASCKLSQMGYLRIADLISSFLLITMLFIISLSLLIGVVKNREKYLLPFLSLQIMDYLLCLLTLLGS

SEQ ID NO: 2055 - DNA, 1519 bp, Homo sapiens
agcttccccttctctgccctgctccaggcaccaggctctttccccttcagtgtctcagaggaggggacggcagcaccatggacccccgcttgtccactgtccgccagacctgctgctgcttcaatgtccgcatcgcaaccaccgccctggccatctaccatgtgatcatgagcgtcttgttgttcatcgagcactcagtagaggtggcccatggcaaggcgtcctgcaagctctcccagatgggctacctcaggatcgctgacctgatctccagacaatctgcttgtgtctccctcgctggcctgctcctcctgcagggcctgtgagctgctcacaactgggtcaacgctttaggctgagtcactcctcgggtctctccataattcagcccaacaatgcttggtttatttcaatcagctctgacacttgtttagacgattggccattctaaagttggtgagtttgtcaagcaactatcgacttgatcagttcagccaagcaactgacaaatcaaaaacccacttgtcagttcagtaaaataatttggtcaaacaacagtctattgcattgatttataaatagttgtcagttcacatagcaatttaatcaagtaatcattaattagttaccccctatatataaatatatgtaatcaatttcttcaaatagcttgcttacatgataatcaattagccaaccatgagtcatttagaatagtgataaatagaatacacagaatagtgatgaaattcaatttaaaaaatcacgttagcctccaaaccatttaattcaaatgaacccatcaactggatgccaactctggcgaatgtaggacctctgagtggctgtataattgttaattcaaatgaaattcatttaaacagttgacaaactgtcattcaacaattagctccaggaaataacagttatttcatcataaaacagtcccttcaaacacacaattgttctgctgaagagttgtcatcaacaatccaatgctcacctattcagttgctctgtggtcagtgtggctgcataacagtggattccatgaaaggagtcattttagtgatgagctgccagtccattcccaggccaggctgtcgctggccatccattcagtcgattcagtcataggcgaatctgttctgcccgaggcttgtggtcaagcaaaaattcagccctgaaatcaggcacatctgttcgttggactaaacccacaggttagttcagtcaaagcaggcaacccccttgtgggcactgaccctgccactggggtcatggcggttgtggcagctggggaggtttggccccaacagccctcctgtgcctgcttccctgtgtgtcggggtcctccagggagctgacccagaggtggaggccacggaggcagggtctctggggactgtcggggggtacagagggagaaggctctgcaagagctccctggcaatacccccttgtgtaattgctttgtgtgcgacagggaggaagtttcaataaagcagcaacaagcttc

SEQ ID NO: 2056 - protein, 82 aa, Homo sapiens
MDPRLSTVRQTCCCFNVRIATTALAIYHVIMSVLLFIEHSVEVAHGKASCKLSQMGYLRIADLISRQSACVSLAGLLLLQGL

SEQ ID NO: 2057 - DNA, 2239 bp, Homo sapiens
ggagggcagccagcagcttccccttctctgccctgctccaggcaccaggctctttccccttcagtgtctcagaggaggggacggcagcaccatggacccccgcttgtccactgtccgccagacctgctgctgcttcaatgtccgcatcgcaaccaccgccctggccatctaccatgtgatcatgagcgtcttgttgttcatcgagcactcagtagaggtggcccatggcaaggcgtcctgcaagctctcccagatgggctacctcaggatcgctgacctgatctccagcttcctgctcatcaccatgctcttcatcatcagcctgagcctactgatcggcgtagtcaagaaccgggagaagtacctgctgcccttcctgtccctgcaaatcatggactatctcctgtgcctgctcaccctgctgggctcctacattgagctgcccgcctacctcaagttggcctcccggagccgtgctagctcctccaagttccccctgatgacgctgcagctgctggacttctgcctgagcatcctgaccctctgcagctcctacatggaagtgcccacctatctcaacttcaagtccatgaaccacatgaattacctccccagccaggaggatatgcctcataaccagttcatcaagatgatgatcatcttttccatcgccttcatcactgtccttatcttcaaggtctacatgttcaagtgcgtgtggcggtgctacagattgatcaagtgcatgaactcggtggaggagaagagaaactccaagatgctccagaaggtggtcctgccgtcctacgaggaagccctgtctttgccatcgaagaccccagaggggggcccagcaccacccccatactcagaggtgtgaccctcgccaggccccagccccagtgctgggaggggtggagctgcctcataatctgcttttttgctttggtggcccctgtggcctgggtgggccctcccgcccctccctggcaggacaatctgcttgtgtctccctcgctggcctgctcctcctgcagggcctgtgagctgctcacaactgggtcaacgctttaggctgagtcactcctcgggtctctccataattcagcccaacaatgcttggtttatttcaatcagctctgacacttgtttagacgattggccattctaaagttggtgagtttgtcaagcaactatcgacttgatcagttcagccaagcaactgacaaatcaaaaacccacttgtcagttcagtaaaataatttggtcaaacaacagtctattgcattgatttataaatagttgtcagttcacatagcaatttaatcaagtaatcattaattagttaccccctatatataaatatatgtaatcaatttcttcaaatagcttgcttacatgataatcaattagccaaccatgagtcatttagaatagtgataaatagaatacacagaatagtgatgaaattcaatttaaaaaatcacgttagcctccaaaccatttaattcaaatgaacccatcaactggatgccaactctggcgaatgtaggacctctgagtggctgtataattgttaattcaaatgaaattcatttaaacagttgacaaactgtcattcaacaattagctccaggaaataacagttatttcatcataaaacagtcccttcaaacacacaattgttctgctgaagagttgtcatcaacaatccaatgctcacctattcagttgctctgtggtcagtgtggctgcataacagtggattccatgaaaggagtcattttagtgatgagctgccagtccattcccaggccaggctgtcgctggccatccattcagtcgattcagtcataggcgaatctgttctgcccgaggcttgtggtcaagcaaaaattcagccctgaaatcaggcacatctgttcgttggactaaacccacaggttagttcagtcaaagcaggcaacccccttgtgggcactgaccctgccactggggtcatggcggttgtggcagctggggaggtttggccccaacagccctcctgtgcctgcttccctgtgtgtcggggtcctccagggagctgacccagaggtggaggccacggaggcagggtctctggggactgtcggggggtacagagggagaaggctctgcaagagctccctggcaatacccccttgtgtaattgctttgtgtgcgacagggaggaagtttcaataaagcagcaacaagcttc

SEQ ID NO: 2058 - protein, 262 aa, Homo sapiens; identical to SEQ ID NO: 48

SEQ ID NO: 2059 - DNA, 1011 bp, Homo sapiens
caatactgcacatgctgttttgtaatctgcttcagaaaacaacatatcggaagcaattttgaagaaaacatgtcccaccatcagctctgtttcgagatgggcagggctgtctcaggaggtagtgagcttccaggcagtgtgggcagtcaagcaggagctgtgggactattgccagggaaattggagggtgggctagaagccccccaaatccccttgctatgtggtatctgtggggcaatgaaaagggcaatacctggaatattctggactggctggtgaggaacccccaaccagaatgagaggtccgagcaggagcagctggatgctggcttctggagagagtggtggctcctgcctggcatatgtcctaggcctgctggagcgtgagaaggacgctcagcaaagcacagcctgacctgggcctttttccaggtctacatgttcaagtgcgtgtggcggtgctacagattgatcaagtgcatgaactcggtggaggagaagagaaactccaagatgctccagaaggtggtcctgccgtcctacgaggaagccctgtctttgccatcgaagaccccagaggggggcccagcaccacccccatactcagaggtgtgaccctcgccaggccccagccccagtgctgggaggggtggagctgcctcataatctgcttttttgctttggtggcccctgtggcctgggtgggccctcccgcccctccctggcaggacaatctgcttgtgtctccctcgctggcctgctcctcctgcagggcctgtgagctgctcacaactgggtcaacgctttaggctgagtcactcctcgggtctctccataattcagcccaacaatgcttggtttatttcaatcagctctgacacttgtttagacgattggccattctaaagttggtgagtttgtcaagcaactatcgacttgatcagttcagccaagcaactgacaaatcaaaaacccacttgtcagttcagtaaaataatttggtcaaacaac

SEQ ID NO: 2060 - protein, 58 aa, Homo sapiens; identical to SEQ ID NO: 2048

SEQ ID NO: 2061 - DNA, 1101 bp, Homo sapiens
cggcagcaccatggacccccgcttgtccactgtccgccagacctgctgctgcttcaatgtccgcatcgcaaccaccgccctggccatctaccatgtgctgacctgatctccagcttcctgctcatcaccatgctcttcatcatcagcctgagcctactgatcggcgtagtcaagaaccgggagaagtacctgctgcccttcctgtccctgcaaatcatggactatctcctgtgcctgctcaccctgctgggctcctacattgagctgcccgcctacctcaagttggcctcccggagccgtgctagctcctccaagttccccctgatgacgctgcagctgctggacttctgcctgagcatcctgaccctctgcagctcctacatggaagtgcccacctatctcaacttcaagtccatgaaccacatgaattacctccccagccaggaggatatgcctcataaccagttcatcaagatgatgatcatcttttccatcgccttcatcactgtccttatcttcaaggtctacatgttcaagtgcgtgtggcggtgctacagattgatcaagtgcatgaactcggtggaggagaagagaaactccaagatgctccagaaggtggtcctgccgtcctacgaggaagccctgtctttgccatcgaagaccccagaggggggcccagcaccacccccatactcagaggtgtgaccctcgccaggccccagccccagtgctgggaggggtggagctgcctcataatctgcttttttgctttggtggcccctgtggcctgggtgggccctcccgcccctccctggcaggacaatctgcttgtgtctccctcgctggcctgctcctcctgcagggcctgtgagctgctcacaactgggtcaacgctttaggctgagtcactcctcgggtctctccataattcagcccaacaatgcttggtttatttcaatcagctctgacacttgtttagacgattggccattctaaagttggtgagtttgtcaagcaactatcgacttgatcagttcagccaagcaactgacaaatcaaaaacccacttgtcagttcagtaaaataatttggtcaaacaac

SEQ ID NO: 2062 - protein, 191 aa, Homo sapiens [sequence omitted]

SEQ ID NO: 2063 - DNA, 1276 bp, Homo sapiens
ggagggcagccagcagcttccccttctctgccctgctccaggcaccaggctctttccccttcagtgtctcagaggaggggacggcagcaccatggacccccgcttgtccactgtccgccagacctgctgctgcttcaatgtccgcatcgcaaccaccgccctggccatctaccatgtgatcatgagcgtcttgttgttcatcgagcactcagtagaggtggcccatggcaaggcgtcctgcaagctctcccagatgggctacctcaggatcgctgacctgatctccagcttcctgctcatcaccatgctcttcatcatcagcctgagcctactgatcggcgtagtcaagaaccgggagaagtacctgctgcccttcctgtccctgcaaatcatggactatctcctgtgcctgctcaccctgctgggctcctacattgagctgcccgcctacctcaagttggcctcccggagccgtgctagctcctccaagttccccctgatgacgctgcagctgctggacttctgcctgagcatcctgaccctctgcagctcctacatggaagtgcccacctatctcaacttcaagtccatgaaccacatgaattacctccccagccaggaggatatgcctcataaccagttcatcaagatgatgatcatcttttccatcgccttcatcactgtccttatcttcaaggtctacatgttcaagtgcgtgtggcggtgctacagattgatcaagtgcatgaactcggtggaggagaagagaaactccaagatgctccagaaggtggtcctgccgtcctacgaggaagccctgtctttgccatcgaagaccccagaggggggcccagcaccacccccatactcagaggtgtgaccctcgccaggccccagccccagtgctgggaggggtggagctgcctcataatctgcttttttgctttggtggcccctgtggcctgggtgggccctcccgcccctccctggcaggacaatctgcttgtgtctccctcgctggcctgctcctcctgcagggcctgtgagctgctcacaactgggtcaacgctttaggctgagtcactcctcgggtctctccataattcagcccaacaatgcttggtttatttcaatcagctctgacacttgtttagacgattggccattctaaagttggtgagtttgtcaagcaactatcgacttgatcagttcagccaagcaactgacaaatcaaaaacccacttgtcagttcagtaaaataatttggtcaaacaac

SEQ ID NO: 2064 - protein, 262 aa, Homo sapiens; identical to SEQ ID NO: 48

SEQ ID NO: 2065 - DNA, 3556 bp, Homo sapiens
gtggggccgggaagccgcggccgacgagagcccgggcgactgccccagctgggcagtgctgctctgcgctgcgccgcgctcggggctcgctctccttgctccgcgctccccgccagccgccccggggcaggaggcgcgcctgacggacggcccgctagacaaaggaggcgcggctcggcggggccagcgcgcggacggacggaccatggactcggagcgcgggcggccggccccagccttggggaccggacactcccgggcccggccctaggcgcccggccccgccgcccggcgcgcccagcggggaggacgtggagcccgcgcggcgcgagcaggcggcggccgcggagcaagaagggcgccgcggcgtgcggcccgcgcagcccccggagccatgggcaagtgcagcgggcgctgcacgctggtcgccttctgctgcctgcagctggtggctgcgctggagcggcagatctttgacttcctgggctaccagtgggctcccatcctagccaacttcctgcacatcatggcagtcatcctgggcatctttggcaccgtgcagtaccgctcccggtacctcatcctgtatgcagcctggctggtgctctgggttggctggaatgcatttatcatctgcttctacttggaggttggacagctgtcccaggaccgggacttcatcatgaccttcaacacatccctgcaccgctcctggtggatggagaatgggccaggctgcctggtgacacctgttctgaactcccgcctggctctggaggaccaccatgtcatctctgtcactggctgcctgcttgactacccctacattgaagccctcagcagcgccctgcagatcttcctggcactgttcggcttcgtgttcgcctgctacgtgagcaaagtgttcctggaggaggaggacagctttgacttcatcggcggctttgactcctacggataccaggcgccccagaagacgtcgcatttacagctgcagcctctgtacacgtcggggtagcctctgccccgcgcccaccccggcgcctcgccctgggctgaccgcagctgccgcgagctcgggccaaggcgcaggcgtgtccccctggtggcccgcgcgctcactgcagcctgtgcccaaccccgcgtctgcatctggagatgcggacttggacgtggacttggacttggacttggatttgagcttggctcttcgcagcccggacttcggaggagtggggcggggcgggggaggggcaccacgggttttttgttttttgtttgtttgtttttaatctcagccttggcgtgagctggggccttcctctcttctccagcctctccctttcactcttcacccagcatcctgcccccctgtccaaaaacagcaggacatcagacccatcccatcccaccacactcactcaccagctctggggaaagctactgtgaactaggagcaggattcctgggttctaatcgcaggtccatcactgactgtgacgtctagcaaagcccttgccctctctgagcctcggtttccgcacctcaagtaattaatcccttagcaaatggactcttttagacttctcatttaactcaattccctgagctagactgggattaaaattctcattttgcagtacattaaaactgaggcccagagatgtgatttgcttgaggccacacagctagatttttggtggaagtgggccttgaacacagtgtactttctgcagtttctgactgtaaaacccagtgtctgctctctgagttccatttccaagcccccctccatcttggacctatgtggtctccaccatattcacacaccaccaccaccacttgccaatgcctctcttaaagcaatatacccattcgttctcttattgggaactggatggatgaagccccaaattcagccccacccacagagaagccttcctacactcagcctctgtccacccttggcaaatctttcaagctctctcctccaggaaagtggggccccaactcagtcactccacccccttccaggtccctgaggctggttctactgtatccccatcacctccacaactccactcacccctgacggctccatccacctcaccagttggaaggcttgtggtttcagagaggagcaatgctggtcagcgctgcccagactccagtgtttacagatcaccagcatttacaaccaatccaatggccagaagcctcctctaacaagcccagaaggagttctgaaggggcagatgggggtgtgagtagtcggggagtcgggattgccagcaccctcacccttccttgggggcaagtagaggtgagaacactttccccacctccctccacagacactcctgaggacgctgcatcccacgcactgcctggtgcgtccatagagagaggatcaggtctcagcatttcatctgtgaaagaggcatggccctgggttagaaaggagggcaggagacatggaggaactggggggcacccagatggtgcagatggtttgcacacctgagcctgtctgtggtgaccattccgctcctctcccactaccctccaatctatcattccctactctctaaggccaaaatatcctgagcaaggctggcaaccccaccccaccatcccaaatgcaagcagccaggcccaggagttcctctggcccccacaggcatggagctcccagctggtgggtacagcttgagaggggggcagctccctcaggctaagctactgcccttcactgggccagccctgcctccagccctcacctctctcaccccaactctcccccaagcccctttctactcaacgggtgtagccactggtgctttgaagccttttgtttttataagatggtttttgcaaggggaccaggttctcttttcactgggaccttgcaaggaggggagtgctctcctggtttctgtgcaggcgggttgattaaagatggtgttttcttctctatcttcctgtcctgcccattgggtctatagaactttctaagtgagaagtccctgcatgagggcaggcaggaatgatttgatgttgatgttatcaaatattcctggggtggccaggcacggtggctcatgcctgtaatcccaacacttttgaaggctgaggtgggcagatcacgcgaggtcaggagtttgagaccagcctggccaacatgatgaaaccctgtctctactaaaaatacaaaaattaggcagggccgggaggctgaggaaggagaatcacttgaacttgggatgcagaggtggagtgagctcagatggcgccactctaccccagcctgggtgatagagcaagactccatctcaaaacaataaaaaagaaacaaatcctggggcactggcctgtaactctgactgggtgtgtagctttaggcaactcactctccctctctatactcatccaaaaaaaaaaaaaaaaaaaagcagaggtcaaacaaaatcagtgggttcccaaatgtggcttcataatcccttagagatcttcctacttattttcctgataaaatgcattttaagtttatgctttc

SEQ ID NO: 2066 - protein, 207 aa, Homo sapiens
MGKCSGRCTLVAFCCLQLVAALERQIFDFLGYQWAPILANFLHIMAVILGIFGTVQYRSRYLILYAAWLVLWVGWNAFIICFYLEVGQLSQDRDFIMTFNTSLHRSWWMENGPGCLVTPVLNSRLALEDHHVISVTGCLLDYPYIEALSSALQIFLALFGFVFACYVSKVFLEEEDSFDFIGGFDSYGYQAPQKTSHLQLQPLYTSG

SEQ ID NO: 2067 - DNA, 2975 bp, Homo sapiens
gtggggccgggaagccgcggccgacgagagcccgggcgactgccccagctgggcagtgctgctctgcgctgcgccgcgctcggggctcgctctccttgctccgcgctccccgccagccgccccggggcaggaggcgcgcctgacggacggcccgctagacaaaggaggcgcggctcggcggggccagcgcgcggacggacggaccatggactcggagcgcgggcggccggccccagccttggggaccggacactcccgggcccggccctaggcgcccggccccgccgcccggcgcgcccagcggggaggacgtggagcccgcgcggcgcgagcaggcggcggccgcggagcaagaagggcgccgcggcgtgcggcccgcgcagcccccggagccatgggcaagtgcagcgggcgctgcacgctggtcgccttctgctgcctgcagctggtggctgcgctggagcggcagatctttgacttcctgggctaccagtgggctcccatcctagccaacttcctgcacatcatggcagtcatcctgggcatctttggcaccgtgcagtaccgctcccggtacctcatcctgtatgcagcctggctggtgctctgggttggctggaatgcatttatcatctgcttctacttggaggttggacagctgtcccaggaccgggacttcatcatgaccttcaacacatccctgcaccgctcctggtggatggagaatgggccaggctgcctggtgacacctgttctgaactcccgcctggctctggaggaccaccatgtcatctctgtcactggctgcctgcttgactacccctacattgaagccctcagcagcgccctgcagatcttcctggcactgttcggcttcgtgttcgcctgctacgtgagcaaagtgttcctggaggaggaggacagctttgacttcatcggcggctttgactcctacggataccaggcgccccagaagacgtcgcatttacagctgcagcctctgtacacgtcggggtagcctctgccccgcgcccaccccggcgcctcgccctgggctgaccgcagctgccgcgagctcgggccaaggcgcaggcgtgtccccctggtggcccgcgcgctcactgcagcctgtgcccaaccccgcgtctgcatctggagatgcggacttggacgtggacttggacttggacttggatttgagcttggctcttcgcagcccggacttcggaggagtggggcggggcgggggaggggcaccacgggttttttgttttttgtttgtttgtttttaatctcagccttggcgtgagctggggccttcctctcttctccagcctctccctttcactcttcacccagcatcctgcccccctgtccaaaaacagcaggacatcagacccatcccatcccaccacactcactcaccagctctggggaaagctactgtgaactaggagcaggattcctgggttctaatcgcaggtccatcactgactgtgacgtctagcaaagcccttgccctctctgagcctcggtttccgcacctcaagtaattaatcccttagcaaatggactcttttagacttctcatttaactcaattccctgagctagactgggattaaaattctcattttgcagtacattaaaactgaggcccagagatgtgatttgcttgaggccacacagctagatttttggtggaagtgggccttgaacacagtgtactttctgcagtttctgactgtaaaacccagtgtctgctctctgagttccatttccaagcccccctccatcttggacctatgtggtctccaccatattcacacaccaccaccaccacttgccaatgcctctcttaaagcaatatacccattcgttctcttattgggaactggatggatgaagccccaaattcagccccacccacagagaagccttcctacactcagcctctgtccacccttggcaaatctttcaagctctctcctccaggaaagtggggccccaactcagtcactccacccccttccaggtccctgaggctggttctactgtatccccatcacctccacaactccactcacccctgacggctccatccacctcaccagttggaaggcttgtggtttcagagaggagcaatgctggtcagcgctgcccagactccagtgtttacagatcaccagcatttacaaccaatccaatggccagaagcctcctctaacaagcccagaaggagttctgaaggggcagatgggggtgtgagtagtcggggagtcgggattgccagcaccctcacccttccttgggggcaagtagaggtgagaacactttccccacctccctccacagacactcctgaggacgctgcatcccacgcactgcctggtgcgtccatagagagaggatcaggtctcagcatttcatctgtgaaagaggcatggccctgggttagaaaggagggcaggagacatggaggaactggggggcacccagatggtgcagatggtttgcacacctgagcctgtctgtggtgaccattccgctcctctcccactaccctccaatctatcattccctactctctaaggccaaaatatcctgagcaaggctggcaaccccaccccaccatcccaaatgcaagcagccaggcccaggagttcctctggcccccacaggcatggagctcccagctggtgggtacagcttgagaggggggcagctccctcaggctaagctactgcccttcactgggccagccctgcctccagccctcacctctctcaccccaactctcccccaagcccctttctactcaacgggtgtagccactggtgctttgaagccttttgtttttataagatggtttttgcaaggggaccaggttctcttttcactgggaccttgcaaggaggggagtgctctcctggtttctgtgcaggcgggttgattaaagatggtgttttcttctct

SEQ ID NO: 2068 - protein, 207 aa, Homo sapiens; identical to SEQ ID NO: 2066

SEQ ID NO: 2069 - DNA, 682 bp, Homo sapiens
gtgagccactgtgcccagctgcaaacagtctttatgtgggtatcaatgtcagtctcaccattgctcataagtggtgagagtaagagcaatgctccattttcttcttgatctcaaagggaagttgttatctcagcatcgagtgacaagagactgtatatgggagagattcagtgaagatatggactggaagactccaaggccgcttgtctttgagacctcagactgcataagtgatgccaaatgttggatgtccaggctagcaccctcccttcagatgaccattgctagcaagaaacaggaggcggtggccatattccaaaaaccacttctgtcccatttcaccaggatgactaaggcaagctccctgtggcctctaaaaaccacctgccagatttcagggactgtttttttttttctttttcttttttcctgttttctaatgcaggcccaatgtgacaaatttgttggttgggattttttttttttttttgtaactggcttgtatgatattttctttctgtatttctctatatcattttgtattaaaagccaaatagatgcctttttacaagagccatgtggattggatttattgctgtcttttttttgaggcttgattgctataaatcagaatagagcatgatgtggccacagaatacaattcatttaaacttccaagaag

SEQ ID NO: 2070 - protein, 173 aa, Homo sapiens
MLHFLLDLKGKLLSQHRVTRDCIWERFSEDMDWKTPRPLVFETSDCISDAKCWMSRLAPSLQMTIASKKQEAVAIFQKPLLSHFTRMTKASSLWPLKTTCQISGTVFFFLFLFSCFLMQAQCDKFVGWDFFFFFVTGLYDIFFLYFSISFCIKSQIDAFLQEPCGLDLLLSFF

SEQ ID NO: 2071 - DNA, 814 bp, Homo sapiens
ctctgtgttcctagtttctaaaagccagaacatggttcagtaaatgtaaggtaagtaaataattgttgcttccatttcctttaaaaagccatgcctctgtcctacccccagctctaagaggacttacccttgcttttcatgataccttacaggtttgtttatgtgtgggataccacaagcaggagaatattgtataagctgcccggccatgctggctccatcaatgaagtggctttccaccctgatgagcccatcattatctcagcatcgagtgacaagagactgtatatgggagagattcagtgaagatatggactggaagactccaaggccgcttgtctttgagacctcagactgcataagtgatgccaaatgttggatgtccaggctagcaccctcccttcagatgaccattgctagcaagaaacaggaggcggtggccatattccaaaaaccacttctgtcccatttcaccaggatgactaaggcaagctccctgtggcctctaaaaaccacctgccagatttcagggactgtttttttttttctttttcttttttcctgttttctaatgcaggcccaatgtgacaaatttgttggttgggattttttttttttttttgtaactggcttgtatgatattttctttctgtatttctctatatcattttgtattaaaagccaaatagatgcctttttacaagagccatgtggattggatttattgctgtcttttttttgaggcttgattgctataaatcagaatagagcatgatgtggccacagaatacaattcatttaaacttccaagaag

SEQ ID NO: 2072 - protein, 193 aa, Homo sapiens
MCGIPQAGEYCISCPAMLAPSMKWLSTLMSPSLSQHRVTRDCIWERFSEDMDWKTPRPLVFETSDCISDAKCWMSRLAPSLQMTIASKKQEAVAIFQKPLLSHFTRMTKASSLWPLKTTCQISGTVFFFLFLFSCFLMQAQCDKFVGWDFFFFFVTGLYDIFFLYFSISFCIKSQIDAFLQEPCGLDLLLSFF

SEQ ID NO: 2073 - DNA, 1374 bp, Homo sapiens
caaatatgtaacagagatagaatcaatgtttactttttctgatttttggtatggtacagtgcttttttgatttatttgaccttttatatattttatatatatctgaccttgtccagtcttagactatcaggtgcccatatgagggaaattaggaaagggcgatgtaagtttggcttttataagttcattgtcacagtagttcctggtatttagtttgtcacattgaagctttgctggatgtgactaagctggcagagaaatcttgcaaaatatctttttgaaattagtatcacacccaactgcattctgttgcaaattaccaacattgtgtgtgacatttttccttcctgccccctcagctagccccagttattgggatttagatgtgttttcctgcttgaaaaagaaaagagccttaacaggtagcagtatgtcaagttggactttgcccaccgaggaaacagcatctgccattgattgacatgatactaatttcagctgggtgcccaggaggcctctggccgatagttgttttggttggtttgtttatttggatttgttttgcagttcgtgtctgggatgtccggccatttgcccccaaagagagatgtgtaaagatatttcaaggaaatgtgcacaactttgaaaagaaccttctgagatgttcttggtcacctgatggaagcaaaatagcagctggctcagccgacaggtttgtttatgtgtgggataccacaagcaggagaatattgtataagctgcccggccatgctggctccatcaatgaagtggctttccaccctgatgagcccatcattatctcagcatcgagtgacaagagactgtatatgggagagattcagtgaagatatggactggaagactccaaggccgcttgtctttgagacctcagactgcataagtgatgccaaatgttggatgtccaggctagcaccctcccttcagatgaccattgctagcaagaaacaggaggcggtggccatattccaaaaaccacttctgtcccatttcaccaggatgactaaggcaagctccctgtggcctctaaaaaccacctgccagatttcagggactgtttttttttttctttttcttttttcctgttttctaatgcaggcccaatgtgacaaatttgttggttgggattttttttttttttttgtaactggcttgtatgatattttctttctgtatttctctatatcattttgtattaaaagccaaatagatgcctttttacaagagccatgtggattggatttattgctgtcttttttttgaggcttgattgctataaatcagaatagagcatgatgtggccacagaatacaattcatttaaacttccaagaag

SEQ ID NO: 2074 - protein, 193 aa, Homo sapiens; identical to SEQ ID NO: 2072

SEQ ID NO: 2075 - DNA, 2038 bp, Homo sapiens
catagatagatagatagccaggaatatgtcggtgcttttcgaagctcttattccccaaattgtctccttccccagcccttcctcccaaggtttttggtttgtatttttgccccaactgtttttccttgcccccaggaaccagaggctaataatgtcctttcctttaaatgttttcaagggaagttccaagttaggcaaaataaatgtaagtcctttgggctcatccttcagagagccaccagacaggtaaaaataaacaatttttattgtttattctttgacaataagaaataggccccctttgcttcctcagtactaggaaaccatactgggaatatgggttatcttcaaagctgttgctgagcaggagacagagccagcacaagttaaaacactacaaagcccttttactgggactcagggagttttttgtttcctttttcctcattaagggtttgccgggttactataaacttttgattagttttgagagttccaacagttgattctgacagattttgctggttaatttgctgctttcgtggagggacaagcttttgtcattgtttattatactattttcactgacataccctctatttttttaaatgtgggttgcagcctactaatgaattagtctctacggtttgaaaaaattgtctgatatccttgttgttctaaaaaatatatgaactaagtagttaggggaattccattctaagagtatgttgatttaactctgttcacttcaacaaagaagtctgaaaatataaccgaagttttgtttcaccagccttcaaatgtcttggcaaaattgagcacactgcttaccatgtgtgttattaggatatccaggagttagtgatataggatcccaattatagatgtgttcatgtccacaaagtcctcgtacttaagggatatttgtactgtgcaattgcttcttagaatgatgttgctgatagactgtcttgtcctttgcttcagctttgggacatccggaagaaagcagccatccagacatttcagaacacgtaccaggtgttagctgtgaccttcaatgacacaagtgatcagattatttctggtggaatagacaatgatatcaaggtctgggacctgcgccagaacaagctaacctacaccatgagaggccatgcagattcagtgactggcctgagtttaagttctgaaggctcttatcttttgtccaatgcaatggacaatacagttcgtgtctgggatgtccggccatttgcccccaaagagagatgtgtaaagatatttcaaggaaatgtgcacaactttgaaaagaaccttctgagatgttcttggtcacctgatggaagcaaaatagcagctggctcagccgacaggtttgtttatgtgtgggataccacaagcaggagaatattgtataagctgcccggccatgctggctccatcaatgaagtggctttccaccctgatgagcccatcattatctcagcatcgagtgacaagagactgtatatgggagagattcagtgaagatatggactggaagactccaaggccgcttgtctttgagacctcagactgcataagtgatgccaaatgttggatgtccaggctagcaccctcccttcagatgaccattgctagcaagaaacaggaggcggtggccatattccaaaaaccacttctgtcccatttcaccaggatgactaaggcaagctccctgtggcctctaaaaaccacctgccagatttcagggactgtttttttttttctttttcttttttcctgttttctaatgcaggcccaatgtgacaaatttgttggttgggattttttttttttttttgtaactggcttgtatgatattttctttctgtatttctctatatcattttgtattaaaagccaaatagatgcctttttacaagagccatgtggattggatttattgctgtcttttttttgaggcttgattgctataaatcagaatagagcatgatgtggccacagaatacaattcatttaaacttccaagaag

SEQ ID NO: 2076 - protein, 193 aa, Homo sapiens; identical to SEQ ID NO: 2072

SEQ ID NO: 2077 - DNA, 1683 bp, Homo sapiens
aagctggaagttgtggaggaaggactaatttggaaccaattgcgtggcgcctgagagcggcagcgcggtcagtggcggcgctgaagagaccggttgccgccatgatagaacagcagaagcgtaagggcccagagttgccgctggttccagtcaagcggcagcggcatgagttgctgttgggagcggggtctggcccaggagccgggcagcagcaggcgacgccgggagccttgctgcaagcgggacctccaagatgttcctcccttcaagccccaatcatgctgctctctggacatgaaggggaagtctactgctgcaagttccaccccaacggatccaccttagcatctgcaggatttgaccgactgatattactgtggaatgtctatggtgactgtgataactatgccacactgaagggacacagtggagcagtgatggaattgcattacaacacagatggcagtatgcttttctcagcatccacagataaaaccgtggctgtgtgggatagtgaaacaggtgagagggttaaaaggctaaagggacatacttcctttgtgaattcctgttatccagccaggagaggccctcagcttgtctgcactggcagtgacgatggcacagttaagctttgggacatccggaagaaagcagccatccagacatttcagaacacgtaccaggtgttagctgtgaccttcaatgacacaagtgatcagattatttctggtggaatagacaatgatatcaaggtctgggacctgcgccagaacaagctaacctacaccatgagaggccatgcagattcagtgactggcctgagtttaagttctgaaggctcttatcttttgtccaatgcaatggacaatacagttcgtgtctgggatgtccggccatttgcccccaaagagagatgtgtaaagatatttcaaggaaatgtgcacaactttgaaaagaaccttctgagatgttcttggtcacctgatggaagcaaaatagcagctggctcagccgacaggtttgtttatgtgtgggataccacaagcaggagaatattgtataagctgcccggccatgctggctccatcaatgaagtggctttccaccctgatgagcccatcattatctcagcatcgagtgacaagagactgtatatgggagagattcagtgaagatatggactggaagactccaaggccgcttgtctttgagacctcagactgcataagtgatgccaaatgttggatgtccaggctagcaccctcccttcagatgaccattgctagcaagaaacaggaggcggtggccatattccaaaaaccacttctgtcccatttcaccaggatgactaaggcaagctccctgtggcctctaaaaaccacctgccagatttcagggactgtttttttttttctttttcttttttcctgttttctaatgcaggcccaatgtgacaaatttgttggttgggattttttttttttttttgtaactggcttgtatgatattttctttctgtatttctctatatcattttgtattaaaagccaaatagatgcctttttacaagagccatgtggattggatttattgctgtcttttttttgaggcttgattgctataaatcagaatagagcatgatgtggccacagaatacaattcatttaaacttccaagaag

SEQ ID NO: 2078 - protein, 357 aa, Homo sapiens; identical to SEQ ID NO: 50

SEQ ID NO: 2079 - DNA, 668 bp, Homo sapiens
gagacggggtttcaccgcattggtcagggtggtcacgaactcctgacgtccagtaatccacccgcctcagcctcccaaagtgctgggattacaggtgtgagccactgtgcccagctgcaaacagtctttatgtgggtatcaatgtcagtctcaccattgctcataagtggtgagagtaagagcaatgctccattttcttcttgatctcaaagggaagttgttatctcagcatcgagtgacaagagactgtatatgggagagattcagtgaagatatggactggaagactccaaggccgcttgtctttgagacctcagactgcataagtgatgccaaatgttggatgtccaggctagcaccctcccttcagatgaccattgctagcaagaaacaggaggcggtggccatattccaaaaaccacttctgtcccatttcaccaggatgactaaggcaagctccctgtggcctctaaaaaccacctgccagatttcagggactgtttttttttttctttttcttttttcctgttttctaatgcaggcccaatgtgacaaatttgttggttgggattttttttttttttttgtaactggcttgtatgatattttctttctgtatttctctatatcattttgtattaaaagccaaatagatgcctttttacaag

SEQ ID NO: 2080 - protein, 160 aa, Homo sapiens
MLHFLLDLKGKLLSQHRVTRDCIWERFSEDMDWKTPRPLVFETSDCISDAKCWMSRLAPSLQMTIASKKQEAVAIFQKPLLSHFTRMTKASSLWPLKTTCQISGTVFFFLFLFSCFLMQAQCDKFVGWDFFFFFVTGLYDIFFLYFSISFCIKSQIDAFL

SEQ ID NO: 2081 - DNA, 742 bp, Homo sapiens
ccccattgctcaagaggtgagtccatgtcttattcaaactctgtgttcctagtttctaaaagccagaacatggttcagtaaatgtaaggtaagtaaataattgttgcttccatttcctttaaaaagccatgcctctgtcctacccccagctctaagaggacttacccttgcttttcatgataccttacaggtttgtttatgtgtgggataccacaagcaggagaatattgtataagctgcccggccatgctggctccatcaatgaagtggctttccaccctgatgagcccatcattatctcagcatcgagtgacaagagactgtatatgggagagattcagtgaagatatggactggaagactccaaggccgcttgtctttgagacctcagactgcataagtgatgccaaatgttggatgtccaggctagcaccctcccttcagatgaccattgctagcaagaaacaggaggcggtggccatattccaaaaaccacttctgtcccatttcaccaggatgactaaggcaagctccctgtggcctctaaaaaccacctgccagatttcagggactgtttttttttttctttttcttttttcctgttttctaatgcaggcccaatgtgacaaatttgttggttgggattttttttttttttttgtaactggcttgtatgatattttctttctgtatttctctatatcattttgtattaaaagccaaatagatgcctttttacaag

SEQ ID NO: 2082 - protein, 180 aa, Homo sapiens
MCGIPQAGEYCISCPAMLAPSMKWLSTLMSPSLSQHRVTRDCIWERFSEDMDWKTPRPLVFETSDCISDAKCWMSRLAPSLQMTIASKKQEAVAIFQKPLLSHFTRMTKASSLWPLKTTCQISGTVFFFLFLFSCFLMQAQCDKFVGWDFFFFFVTGLYDIFFLYFSISFCIKSQIDAFL

SEQ ID NO: 2083 - DNA, 1264 bp, Homo sapiens
caaatatgtaacagagatagaatcaatgtttactttttctgatttttggtatggtacagtgcttttttgatttatttgaccttttatatattttatatatatctgaccttgtccagtcttagactatcaggtgcccatatgagggaaattaggaaagggcgatgtaagtttggcttttataagttcattgtcacagtagttcctggtatttagtttgtcacattgaagctttgctggatgtgactaagctggcagagaaatcttgcaaaatatctttttgaaattagtatcacacccaactgcattctgttgcaaattaccaacattgtgtgtgacatttttccttcctgccccctcagctagccccagttattgggatttagatgtgttttcctgcttgaaaaagaaaagagccttaacaggtagcagtatgtcaagttggactttgcccaccgaggaaacagcatctgccattgattgacatgatactaatttcagctgggtgcccaggaggcctctggccgatagttgttttggttggtttgtttatttggatttgttttgcagttcgtgtctgggatgtccggccatttgcccccaaagagagatgtgtaaagatatttcaaggaaatgtgcacaactttgaaaagaaccttctgagatgttcttggtcacctgatggaagcaaaatagcagctggctcagccgacaggtttgtttatgtgtgggataccacaagcaggagaatattgtataagctgcccggccatgctggctccatcaatgaagtggctttccaccctgatgagcccatcattatctcagcatcgagtgacaagagactgtatatgggagagattcagtgaagatatggactggaagactccaaggccgcttgtctttgagacctcagactgcataagtgatgccaaatgttggatgtccaggctagcaccctcccttcagatgaccattgctagcaagaaacaggaggcggtggccatattccaaaaaccacttctgtcccatttcaccaggatgactaaggcaagctccctgtggcctctaaaaaccacctgccagatttcagggactgtttttttttttctttttcttttttcctgttttctaatgcaggcccaatgtgacaaatttgttggttgggattttttttttttttttgtaactggcttgtatgatattttctttctgtatttctctatatcattttgtattaaaagccaaatagatgcctttttacaag

SEQ ID NO: 2084 - protein, 180 aa, Homo sapiens; identical to SEQ ID NO: 2082

SEQ ID NO: 2085 - DNA, 1928 bp, Homo sapiens
catagatagatagatagccaggaatatgtcggtgcttttcgaagctcttattccccaaattgtctccttccccagcccttcctcccaaggtttttggtttgtatttttgccccaactgtttttccttgcccccaggaaccagaggctaataatgtcctttcctttaaatgttttcaagggaagttccaagttaggcaaaataaatgtaagtcctttgggctcatccttcagagagccaccagacaggtaaaaataaacaatttttattgtttattctttgacaataagaaataggccccctttgcttcctcagtactaggaaaccatactgggaatatgggttatcttcaaagctgttgctgagcaggagacagagccagcacaagttaaaacactacaaagcccttttactgggactcagggagttttttgtttcctttttcctcattaagggtttgccgggttactataaacttttgattagttttgagagttccaacagttgattctgacagattttgctggttaatttgctgctttcgtggagggacaagcttttgtcattgtttattatactattttcactgacataccctctatttttttaaatgtgggttgcagcctactaatgaattagtctctacggtttgaaaaaattgtctgatatccttgttgttctaaaaaatatatgaactaagtagttaggggaattccattctaagagtatgttgatttaactctgttcacttcaacaaagaagtctgaaaatataaccgaagttttgtttcaccagccttcaaatgtcttggcaaaattgagcacactgcttaccatgtgtgttattaggatatccaggagttagtgatataggatcccaattatagatgtgttcatgtccacaaagtcctcgtacttaagggatatttgtactgtgcaattgcttcttagaatgatgttgctgatagactgtcttgtcctttgcttcagctttgggacatccggaagaaagcagccatccagacatttcagaacacgtaccaggtgttagctgtgaccttcaatgacacaagtgatcagattatttctggtggaatagacaatgatatcaaggtctgggacctgcgccagaacaagctaacctacaccatgagaggccatgcagattcagtgactggcctgagtttaagttctgaaggctcttatcttttgtccaatgcaatggacaatacagttcgtgtctgggatgtccggccatttgcccccaaagagagatgtgtaaagatatttcaaggaaatgtgcacaactttgaaaagaaccttctgagatgttcttggtcacctgatggaagcaaaatagcagctggctcagccgacaggtttgtttatgtgtgggataccacaagcaggagaatattgtataagctgcccggccatgctggctccatcaatgaagtggctttccaccctgatgagcccatcattatctcagcatcgagtgacaagagactgtatatgggagagattcagtgaagatatggactggaagactccaaggccgcttgtctttgagacctcagactgcataagtgatgccaaatgttggatgtccaggctagcaccctcccttcagatgaccattgctagcaagaaacaggaggcggtggccatattccaaaaaccacttctgtcccatttcaccaggatgactaaggcaagctccctgtggcctctaaaaaccacctgccagatttcagggactgtttttttttttctttttcttttttcctgttttctaatgcaggcccaatgtgacaaatttgttggttgggattttttttttttttttgtaactggcttgtatgatattttctttctgtatttctctatatcattttgtattaaaagccaaatagatgcctttttacaag

SEQ ID NO: 2086 - protein, 180 aa, Homo sapiens; identical to SEQ ID NO: 2082

SEQ ID NO: 2087 - DNA, 1573 bp, Homo sapiens
aagctggaagttgtggaggaaggactaatttggaaccaattgcgtggcgcctgagagcggcagcgcggtcagtggcggcgctgaagagaccggttgccgccatgatagaacagcagaagcgtaagggcccagagttgccgctggttccagtcaagcggcagcggcatgagttgctgttgggagcggggtctggcccaggagccgggcagcagcaggcgacgccgggagccttgctgcaagcgggacctccaagatgttcctcccttcaagccccaatcatgctgctctctggacatgaaggggaagtctactgctgcaagttccaccccaacggatccaccttagcatctgcaggatttgaccgactgatattactgtggaatgtctatggtgactgtgataactatgccacactgaagggacacagtggagcagtgatggaattgcattacaacacagatggcagtatgcttttctcagcatccacagataaaaccgtggctgtgtgggatagtgaaacaggtgagagggttaaaaggctaaagggacatacttcctttgtgaattcctgttatccagccaggagaggccctcagcttgtctgcactggcagtgacgatggcacagttaagctttgggacatccggaagaaagcagccatccagacatttcagaacacgtaccaggtgttagctgtgaccttcaatgacacaagtgatcagattatttctggtggaatagacaatgatatcaaggtctgggacctgcgccagaacaagctaacctacaccatgagaggccatgcagattcagtgactggcctgagtttaagttctgaaggctcttatcttttgtccaatgcaatggacaatacagttcgtgtctgggatgtccggccatttgcccccaaagagagatgtgtaaagatatttcaaggaaatgtgcacaactttgaaaagaaccttctgagatgttcttggtcacctgatggaagcaaaatagcagctggctcagccgacaggtttgtttatgtgtgggataccacaagcaggagaatattgtataagctgcccggccatgctggctccatcaatgaagtggctttccaccctgatgagcccatcattatctcagcatcgagtgacaagagactgtatatgggagagattcagtgaagatatggactggaagactccaaggccgcttgtctttgagacctcagactgcataagtgatgccaaatgttggatgtccaggctagcaccctcccttcagatgaccattgctagcaagaaacaggaggcggtggccatattccaaaaaccacttctgtcccatttcaccaggatgactaaggcaagctccctgtggcctctaaaaaccacctgccagatttcagggactgtttttttttttctttttcttttttcctgttttctaatgcaggcccaatgtgacaaatttgttggttgggattttttttttttttttgtaactggcttgtatgatattttctttctgtatttctctatatcattttgtattaaaagccaaatagatgcctttttacaag

SEQ ID NO: 2088 - protein, 357 aa, Homo sapiens; identical to SEQ ID NO: 50

SEQ ID NO: 2089 - DNA, 981 bp, Homo sapiens
atcagttatacagaagtactactttgggacacagtcttcaggagagcctagatgagctcataaaatctcagcagttcactcaacttgcccttcaagttttacttcagtttgataaggctataaagtcatcattggctcagaggattaggaacagagttgatttcaggggctctctaaatacatacagattgtgccatatgccacgcatggtggctcatgcccgtcatcccagcactttgggaggtgaaggcaggaggattgcttgacgcgaggagttcaagaccagccttaacaacataggaagacactgtctctacaaaaaaaaaaaaaaaaaattaattgagaaaaacaaaaagattctgtgataatatgtagacttttgtgaaaattatggcctgtgatgataaaaatactggctctaatactatagaatgaataaggaaaaaatcacatttttatgacatcttctgttattattcatcacttttgaagagaaatgtagaagtttttttttatttattctagcattgcagaaagtacattgtgttatttcagtatttcagtagtatttcagtagtattcagatattaggttagcaaacactataaatattttatataccagacacttcctgtcccttctcaggtctctgtttgaatacagtactaaaaagttcatctggatcagcagcctaggctcccaccctgccatgagttgggttaccttttagatttcctggatgagtatgaagttaactgtagcctaattatactagacactctgaaaaaggtttttgtgtgatgtctgcaggaaaaactttcttttcttccctgtggtgtttcccatttcagaagcttgtattcaaacatgccagtcatgcttatatttttagttattcttatttctccaccccattgctcaagaggtgagtccatgtcttattcaaactctgtgttcctagtttctaaaagccagaacatg

SEQ ID NO: 2090 - protein, 42 aa, Homo sapiens
MSAGKTFFSSLWCFPFQKLVFKHASHAYIFSYSYFSTPLLKR

SEQ ID NO: 2091 - DNA, 865 bp, Homo sapiens
ccctgacattttgtaacaaaaacaatacctgacattcattgggtacttaataaatatttgttgaattaatggacatctttaccttttaactatattctcaatggcaaactttcacgcatagctttgcctttttatgcctgtctgactccaaggattgataatacttttttcatactcaaataaaatgacatcactgaaattccactataggtatagcttcagttacaacggctatagctactgcttacaatagatgtttatacacatttaatctagcattaaaaaaatattttttccttaatttttttgataagacaggatcttgctgtgttgcccaggctggtctcaaatccagacctaagacgatccacgcacctcggcctcccaaagtgttgggagtacaggcatgagccaccactcccagcctagacaagctgatttctcttggccccttcccattctagaattcagtattccttctgcctgttaattcaatggaaaagttggctcaagtgagtattaggttagcaaacactataaatattttatataccagacacttcctgtcccttctcaggtctctgtttgaatacagtactaaaaagttcatctggatcagcagcctaggctcccaccctgccatgagttgggttaccttttagatttcctggatgagtatgaagttaactgtagcctaattatactagacactctgaaaaaggtttttgtgtgatgtctgcaggaaaaactttcttttcttccctgtggtgtttcccatttcagaagcttgtattcaaacatgccagtcatgcttatatttttagttattcttatttctccaccccattgctcaagaggtgagtcc

SEQ ID NO: 2092 - protein, 55 aa, Homo sapiens
MEKLAQVSIRLANTINILYTRHFLSLLRSLFEYSTKKFIWISSLGSHPAMSWVTF

SEQ ID NO: 2093 - DNA, 930 bp, Homo sapiens
aagctggaagttgtggaggaaggactaatttggaaccaattgcgtggcgcctgagagcggcagcgcggtcagtggcggcgctgaagagaccggttgccgccatgatagaacagcagaagcgtaagggcccagagttgccgctggttccagtcaagcggcagcggcatgagttgctgttgggagcggggtctggcccaggagccgggcagcagcaggcgacgccgggagccttgctgcaagcgggacctccaagatgttcctcccttcaagccccaatcatgctgctctctggacatgaaggggaagtctactgctgcaagttccaccccaacggatccaccttagcatctgcaggatttgaccgactgatattactgtggaatgtctatggtgactgtgataactatgccacactgaagggacacagtggagcagtgatggaattgcattacaacacagatggcagtatgcttttctcagcatccacagataaaaccgtggctgtgtgggatagtgaaacaggtgagagggttaaaaggctaaagggacatacttcctttgtgaattcctgttatccagccaggagaggccctcagcttgtctgcactggcagtgacgatggcacagttaagctttgggacatccggaagaaagcagccatccagacatttcagaacacgtaccaggtgttagctgtgaccttcaatgacacaagtgatcagattatttctggtggaatagacaatgatatcaaggtctgggacctgcgccagaacaagctaacctacaccatgagaggccatgcagattcagtgactggcctgagtttaagttctgaaggctcttatcttttgtccaatgcaatggacaatacaggcatcagtttctacattgataagaagattggactttacctttaagacccatctc

SEQ ID NO: 2094 - protein, 272 aa, Homo sapiens
MIEQQKRKGPELPLVPVKRQRHELLLGAGSGPGAGQQQATPGALLQAGPPRCSSLQAPIMLLSGHEGEVYCCKFHPNGSTLASAGFDRLILLWNVYGDCDNYATLKGHSGAVMELHYNTDGSMLFSASTDKTVAVWDSETGERVKRLKGHTSFVNSCYPARRGPQLVCTGSDDGTVKLWDIRKKAAIQTFQNTYQVLAVTFNDTSDQIISGGIDNDIKVWDLRQNKLTYTMRGHADSVTGLSLSSEGSYLLSNAMDNTGISFYIDKKIGLYL

SEQ ID NO: 2095 - DNA, 855 bp, Homo sapiens
agtggcggcgctgaagagaccggttgccgccatgatagaacagcagaagcgtaagggcccagagttgccgctggttccagtcaagcggcagcggcatgagttgctgttgggagcggggtctggcccaggagccgggcagcagcaggcgacgccgggagccttgctgcaagcgggacctccaagatgttcctcccttcaagccccaatcatgctgctctctggacatgaaggggaagtctactgctgcaagttccaccccaacggatccaccttagcatctgcaggatttgaccgactgatatgtgaggcatagtttttgaatctggaataatttttcctgccagatagtgatttttttttttaaatcttgggtgccacagaaggtatcactctatgttggcaacataacaggctgcatggctaatatgctaaaattggggcatgaacatgctgaatgatcttgggtgtagaacttggagtccatggggtaaatacagaagccattattttactagttggaaagtgagttgttctggtttgagaatgtcttcctcatagaggcaaatctccagctaatttaccaaggcacttagcaatctagacataacaggttaatggcagtaatgaggagagaaataacttttattttcccaaaggtataaggtcctcttaattcacacccagaatcctagctagcatatgggaaggaaggaatcctaaagtggtaactcccttaaataatctacctgtacatcattaggatctactaccagatttccatttttgagaaataagaatttctcatacccatttttgagaagtaagtagaaaaagtcgttttatttatactccagc

SEQ ID NO: 2096 - protein, 93 aa, Homo sapiens
MIEQQKRKGPELPLVPVKRQRHELLLGAGSGPGAGQQQATPGALLQAGPPRCSSLQAPIMLLSGHEGEVYCCKFHPNGSTLASAGFDRLICEA

SEQ ID NO: 2097 - DNA, 1611 bp, Homo sapiens
gcgctgggtcttgtgggtggaaacgcgctggctgactggggtcggcgtttagttcagcgcagcgactcggggacctggagctgacgcctagacacttgtattagctttaatagaagagaaatggaggagccatagaatattaaggatgaattcaggaaggcctgagaccatggaaaacttgcctgctctctacactattttccaaggagaggttgctatggtgacagactatggggcctttatcaaaatcccaggctgtcggaagcaaggtctggtccatcgaactcatatgtcatcctgtcgggtggataagccctctgagatagtagatgttggagataaagtgtgggtgaagcttattggccgagagatgaaaaatgatagaataaaagtatccctctccatgaaggttgtcaatcaagggactgggaaagaccttgatcccaacaatgttatcattgagcaagaagagaggcggaggcgatccttccaggattacactgggcagaagatcacccttgaggctgtcttgaacactacctgcaagaagtgtggctgtaaaggccactttgcaaaagattgtttcatgcaaccaggtgggactaaatactctctgatacctgatgaggaagaggaaaaggaagaggcaaagtcagcagagtttgagaagcctgaccctacaaggaatccttctagaaaaagaaagaaggagaagaagaaaaagaaacatagagataggaagtcatctgactctgacagctcagactctgagagtgatacaggcaagagggcaaggcacacatcaaaagacagcaaggcagcaaagaagaagaaaaagaagaagaagcacaagaagaagcacaaggagtgagagtataaagagtgtagggggtggttgagagtaagaaaccaggagccttgtgccttgagactcctggaaagactcaatagtgagaatatagcctcccaccccattaacttcgctcccatgggagatggcttcccctcatgcaacaggcaggtttgggagttagaggtcaaaagcagctgcctgaatgagttgttgtttccttatcactcctggtccctttgcaagtgaaccctgcagctcacccattcattcacccaacttccttcattcagcaggaggtcctattaccctctccagctgccactgccagagctggattcctgtaaaggagtccaggctagagccacagagactgttgtggaggtgagttcggctgtagttagagtgattggacccttcctattggtctgtcctgggccaactggtgggtgatctctgctgcatccaacatgggagcagagactggcagcaggaggggggaacatggtgagaagtggtgctcacttttcccattcctcctaacatagttctactatgctagaagtggcatccagcggccacagctagaaaacagtctgcagtgtgacttaacttgtgtattgcattccagcagaccactgaaccagacagcgaagccaagatcattgttctactttgtatttactactgtgtgaatcagttgattctacttcaggtccttgcttaaattcctgtcactaaatggaaatgtgtttggtttt

SEQ ID NO: 2098 - protein, 241 aa, Homo sapiens; identical to SEQ ID NO: 52

SEQ ID NO: 2099 - DNA, 2724 bp, Homo sapiens
gcgctgggtcttgtgggtggaaacgcgctggctgactggggtcggcgtttagttcagcgcagcgactcggggacctggagctgacgcctagacacttgtattagctttaatagaagagaaatggaggagccatagaatattaaggatgaattcaggaaggcctgagaccatggaaaacttgcctgctctctacactattttccaaggagaggttgctatggtgacagactatggggcctttatcaaaatcccaggctgtcggaagcaaggtctggtccatcgaactcatatgtcatcctgtcgggtggataagccctctgagatagtagatgttggagataaagtgtgggtgaagcttattggccgagagatgaaaaatgatagaataaaagtatccctctccatgaaggttgtcaatcaagggactgggaaagaccttgatcccaacaatgttatcattgagcaagaagagaggcggaggcgatccttccaggattacactgggcagaagatcacccttgaggctgtcttgaacactacctgcaagaagtgtggctgtaaaggccactttgcaaaagattgtttcatgcaaccaggtgggactaaatactctctgatacctgatgaggaagaggaaaaggaagaggcaaagtcagcagagtttgagaagcctgaccctacaaggaatccttctagaaaaagaaagaaggagaagaagaaaaagaaacatagagataggaagtcatctgactctgacagctcagactctgagagtgatacaggcaagagggcaaggcacacatcaaaagacagcaaggcagcaaagaagaagaaaaagaagaagaagcacaagaagaagcacaaggagtgagagtataaagagtgtagggggtggttgagagtaagaaaccaggagccttgtgccttgagactcctggaaagactcaatagtgagaatatagcctcccaccccattaacttcgctcccatgggagatggcttcccctcatgcaacaggcaggtttgggagttagaggtcaaaagcagctgcctgaatgagttgttgtttccttatcactcctggtccctttgcaagtgaaccctgcagctcacccattcattcacccaacttccttcattcagcaggaggtcctattaccctctccagctgccactgccagagctggattcctgtaaaggagtccaggctagagccacagagactgttgtggaggtgagttcggctgtagttagagtgattggacccttcctattggtctgtcctgggccaactggtgggtgatctctgctgcatccaacatgggagcagagactggcagcaggaggggggaacatggtgagaagtggtgctcacttttcccattcctcctaacatagttctactatgctagaagtggcatccagcggccacagctagaaaacagtctgcagtgtgacttaacttgtgtattgcattccagcagaccactgaaccagacagcgaagccaagatcattgttctactttgtatttactactgtgtgaatcagttgattctacttcaggtccttgcttaaattcctgtcactaaatggaaatgtgtttggttttaaacttactgagttatttttcctataatccttcttcctgggtaacttacagacttaaagtcactgagcctgcattagctgacaaaaacatttaatatgttaccttagaccttggagagatgcccagcagaggtacagagccaaaggcactagcagatcactgccttcttgggagatcacttataagccctcccttttgtaatgatcagatgccctcttccctcagagttgattagagaagcagtaagaatttgtagtcataagtactagcctggtgcacaggtcagcagtcctcttggccagtggtcattttctcccaccaccatggtacaagcctgggttctgtgccctgaacctgaattctggaaagggagagactacagcatttcacagagaacagccagacccaagagctttcagtgtaggatgggcctgaagtgacagttcaatagccaaacctggggaagccccatcactgactgaactaggtcatttgaccatggagggggggcagtgtaaaggcaacgtgtaggtacagctcttttattattaaatgtgtaaggtgatcagctgattaacaggctccgagactgtccatttcagtctcccatccagtgcttcttcctcagtaaccttcaggccgttatttctgcccactctctgacacacaggataaaccaagactcccagagttatgttaccaaaggcaaaaaggcaactgggtggccttggctctgctttattgacctcagagcaccctatgagtgcagttaaaaaaaaaaaaaaaaaaccacatacaccatgggaactggaactggatcccggtcagtggcacctgaccccagaagaattcgtggatttgtacaaaatgcagaggaagaaatgaggcaatgtggtgctgagtcgaggggtagccgattggcagagtagtagtcagcaacagtgcagtcaggtcatgcctctttctcataagtgcgagtgcaaactgcagtgccgtgggtgagtgtctggaaggaaagacagagtgagatggggggtggagccaggaacaccattgcgagcattctaccctcccttcctcctgataattgtcacttgagtacctactatgtgc

SEQ ID NO: 2100 - protein, 241 aa, Homo sapiens; identical to SEQ ID NO: 52

SEQ ID NO: 2101 - DNA, 454 bp, Homo sapiens
cttgtgggtggaaacgcgctggctgactggggtcggcgtttagttcagcgcagcgactcggggacctggagctgacgcctagacacttgtattagctttaatagaagagaaatggaggagccatagaatattaaggatgaattcaggaaggcctgagaccatggaaaacttgcctgctctctacactattttccaaggagaggttgctatggtgacagactatggggcctttatcaaaatcccaggctgtcggaagcaaggtctggtccatcgaactcatatgtcatcctgtcgggtggataagccctctgagatagtagatgttggagataaagtgtgggtgaagcttattggccgagagatgaaaaatgatagaataaaagtatccctctccatgaaggttgtcaatcaagggactgggaaagaccttgatcccaacaatgttatcattgag

SEQ ID NO: 2102 - protein, 105 aa, Homo sapiens
MNSGRPETMENLPALYTIFQGEVAMVTDYGAFIKIPGCRKQGLVHRTHMSSCRVDKPSEIVDVGDKVWVKLIGREMKNDRIKVSLSMKVVNQGTGKDLDPNNVII

SEQ ID NO: 2103 - DNA, 1355 bp, Homo sapiens
cttgtgggtggaaacgcgctggctgactggggtcggcgtttagttcagcgcagcgactcggggacctggagctgacgcctagacacttgtattagctttaatagaagagaaatggaggagccatagaatattaaggatgaattcaggaaggcctgagaccatggaaaacttgcctgctctctacactattttccaaggagaggttgctatggtgacagactatggggcctttatcaaaatcccaggctgtcggaagcaaggtctggtccatcgaactcatatgtcatcctgtcgggtggataagccctctgagatagtagatgttggagataaagtgtgggtgaagcttattggccgagagatgaaaaatgatagaataaaagtatccctctccatgaaggttgtcaatcaagggactgggaaagaccttgatcccaacaatgttatcattgagagaagaagaaaaagaaacatagagataggaagtcatctgactctgacagctcagactctgagagtgatacaggcaagagggcaaggcacacatcaaaagacagcaaggcagcaaagaagaagaaaaagaagaagaagcacaagaagaagcacaaggagtgagagtataaagagtgtagggggtggttgagagtaagaaaccaggagccttgtgccttgagactcctggaaagactcaatagtgagaatatagcctcccaccccattaacttcgctcccatgggagatggcttcccctcatgcaacaggcaggtttgggagttagaggtcaaaagcagctgcctgaatgagttgttgtttccttatcactcctggtccctttgcaagtgaaccctgcagctcacccattcattcacccaacttccttcattcagcaggaggtcctattaccctctccagctgccactgccagagctggattcctgtaaaggagtccaggctagagccacagagactgttgtggaggtgagttcggctgtagttagagtgattggacccttcctattggtctgtcctgggccaactggtgggtgatctctgctgcatccaacatgggagcagagactggcagcaggaggggggaacatggtgagaagtggtgctcacttttcccattcctcctaacatagttctactatgctagaagtggcatccagcggccacagctagaaaacagtctgcagtgtgacttaacttgtgtattgcattccagcagaccactgaaccagacagcgaagccaagatcattgttctactttgtatttactactgtgtgaatcagttgattctacttcaggtccttgcttaaattcctgtcactaaatggaaatgtgtttggtttt

SEQ ID NO: 2104 - protein, 168 aa, Homo sapiens
MNSGRPETMENLPALYTIFQGEVAMVTDYGAFIKIPGCRKQGLVHRTHMSSCRVDKPSEIVDVGDKVWVKLIGREMKNDRIKVSLSMKVVNQGTGKDLDPNNVIIERRRKRNIEIGSHLTLTAQTLRVIQARGQGTHQKTARQQRRRKRRRSTRRSTRSESIKSVGGG

SEQ ID NO: 2105 - DNA, 2468 bp, Homo sapiens
cttgtgggtggaaacgcgctggctgactggggtcggcgtttagttcagcgcagcgactcggggacctggagctgacgcctagacacttgtattagctttaatagaagagaaatggaggagccatagaatattaaggatgaattcaggaaggcctgagaccatggaaaacttgcctgctctctacactattttccaaggagaggttgctatggtgacagactatggggcctttatcaaaatcccaggctgtcggaagcaaggtctggtccatcgaactcatatgtcatcctgtcgggtggataagccctctgagatagtagatgttggagataaagtgtgggtgaagcttattggccgagagatgaaaaatgatagaataaaagtatccctctccatgaaggttgtcaatcaagggactgggaaagaccttgatcccaacaatgttatcattgagagaagaagaaaaagaaacatagagataggaagtcatctgactctgacagctcagactctgagagtgatacaggcaagagggcaaggcacacatcaaaagacagcaaggcagcaaagaagaagaaaaagaagaagaagcacaagaagaagcacaaggagtgagagtataaagagtgtagggggtggttgagagtaagaaaccaggagccttgtgccttgagactcctggaaagactcaatagtgagaatatagcctcccaccccattaacttcgctcccatgggagatggcttcccctcatgcaacaggcaggtttgggagttagaggtcaaaagcagctgcctgaatgagttgttgtttccttatcactcctggtccctttgcaagtgaaccctgcagctcacccattcattcacccaacttccttcattcagcaggaggtcctattaccctctccagctgccactgccagagctggattcctgtaaaggagtccaggctagagccacagagactgttgtggaggtgagttcggctgtagttagagtgattggacccttcctattggtctgtcctgggccaactggtgggtgatctctgctgcatccaacatgggagcagagactggcagcaggaggggggaacatggtgagaagtggtgctcacttttcccattcctcctaacatagttctactatgctagaagtggcatccagcggccacagctagaaaacagtctgcagtgtgacttaacttgtgtattgcattccagcagaccactgaaccagacagcgaagccaagatcattgttctactttgtatttactactgtgtgaatcagttgattctacttcaggtccttgcttaaattcctgtcactaaatggaaatgtgtttggttttaaacttactgagttatttttcctataatccttcttcctgggtaacttacagacttaaagtcactgagcctgcattagctgacaaaaacatttaatatgttaccttagaccttggagagatgcccagcagaggtacagagccaaaggcactagcagatcactgccttcttgggagatcacttataagccctcccttttgtaatgatcagatgccctcttccctcagagttgattagagaagcagtaagaatttgtagtcataagtactagcctggtgcacaggtcagcagtcctcttggccagtggtcattttctcccaccaccatggtacaagcctgggttctgtgccctgaacctgaattctggaaagggagagactacagcatttcacagagaacagccagacccaagagctttcagtgtaggatgggcctgaagtgacagttcaatagccaaacctggggaagccccatcactgactgaactaggtcatttgaccatggagggggggcagtgtaaaggcaacgtgtaggtacagctcttttattattaaatgtgtaaggtgatcagctgattaacaggctccgagactgtccatttcagtctcccatccagtgcttcttcctcagtaaccttcaggccgttatttctgcccactctctgacacacaggataaaccaagactcccagagttatgttaccaaaggcaaaaaggcaactgggtggccttggctctgctttattgacctcagagcaccctatgagtgcagttaaaaaaaaaaaaaaaaaaccacatacaccatgggaactggaactggatcccggtcagtggcacctgaccccagaagaattcgtggatttgtacaaaatgcagaggaagaaatgaggcaatgtggtgctgagtcgaggggtagccgattggcagagtagtagtcagcaacagtgcagtcaggtcatgcctctttctcataagtgcgagtgcaaactgcagtgccgtgggtgagtgtctggaaggaaagacagagtgagatggggggtggagccaggaacaccattgcgagcattctaccctcccttcctcctgataattgtcacttgagtacctactatgtgc

SEQ ID NO: 2106 - protein, 168 aa, Homo sapiens; identical to SEQ ID NO: 2104

SEQ ID NO: 2107 - DNA, 554 bp, Homo sapiens
aaacgcgctggctgactggggtcggcgtttagttcagcgcagcgactcggggacctggagctgacgcctagacacttgtattagctttaatagaagagaaatggaggagccatagaatattaaggatgaattcaggaaggcctgagaccatggaaaacttgcctgctctctacactattttccaaggagaggtatattcttttgtgctttgaaaacccaccatttatgttaaaatagattaagggtgacaactgggtttgttgttcctgtccacttaagtctgtcttgagcattacagcttaaatgggaagggccagcggaacatctggcaatcacatgtgccttctctaagctccagatatttaagtgcgtagttgacatcgtcattggaataccagcatgtgtaatttatgttttaaaatgaatttattttttcactgctgtggtttgaatgtgtcccctaaaaagcatgttttggaaacttaatctccagtgcatcaacgttgggaggtaggacctagtaggaggtatttagttcttgagggctccaccct

SEQ ID NO: 2108 - protein, 44 aa, Homo sapiens
ALQLKWEGPAEHLAITCAFSKLQIFKCVVDIVIGIPACVIYVLK

SEQ ID NO: 2109 - DNA, 1727 bp, Homo sapiens
acgcgctggctgactggggtcggcgtttagttcagcgcagcgactcggggacctggagctgacgcctagtacgtatgaggaagaacggggtgggtggctgcctgagtctggaggcgacgcctcggttgtgcagtctgaacctgcccttctcagctgagggtgctgacagcaaggggtgggaggcgggccccgagtccccagctgtggacacttgtattagctttaatagaagagaaatggaggagccatagaatattaaggatgaattcaggaaggcctgagaccatggaaaacttgcctgctctctacactattttccaaggagaggttgctatggtgacagactatggggcctttatcaaaatcccaggctgtcggaagcaaggtctggtccatcgaactcatatgtcatcctgtcgggtggataagccctctgagatagtagatgttggagataaagtgtgggtgaagcttattggccgagagatgaaaaatgatagaataaaagtatccctctccatgaaggttgtcaatcaagggactgggaaagaccttgatcccaacaatgttatcattgagcaagaagagaggcggaggcgatccttccaggattacactgggcagaagatcacccttgaggctgtcttgaacactacctgcaagaagtgtggctgtaaaggccactttgcaaaagattgtttcatgcaaccaggtgggactaaatactctctgatacctgatgaggaagaggaaaaggaagaggcaaagtcagcagagtttgagaagcctgaccctacaaggaatccttctagaaaaagaaagaaggagaagaagaaaaagaaacatagagataggaagtcatctgactctgacagctcagactctgagagtgatacaggcaagagggcaaggcacacatcaaaagacagcaaggcagcaaagaagaagaaaaagaagaagaagcacaagaagaagcacaaggagtgagagtataaagagtgtagggggtggttgagagtaagaaaccaggagccttgtgccttgagactcctggaaagactcaatagtgagaatatagcctcccaccccattaacttcgctcccatgggagatggcttcccctcatgcaacaggcaggtttgggagttagaggtcaaaagcagctgcctgaatgagttgttgtttccttatcactcctggtccctttgcaagtgaaccctgcagctcacccattcattcacccaacttccttcattcagcaggaggtcctattaccctctccagctgccactgccagagctggattcctgtaaaggagtccaggctagagccacagagactgttgtggaggtgagttcggctgtagttagagtgattggacccttcctattggtctgtcctgggccaactggtgggtgatctctgctgcatccaacatgggagcagagactggcagcaggaggggggaacatggtgagaagtggtgctcacttttcccattcctcctaacatagttctactatgctagaagtggcatccagcggccacagctagaaaacagtctgcagtgtgacttaacttgtgtattgcattccagcagaccactgaaccagacagcgaagccaagatcattgttctactttgtatttactactgtgtgaatcagttgattctacttcaggtccttgcttaaattcctgtcactaaatggaaatgtgtttggtttt

SEQ ID NO: 2110 - protein, 241 aa, Homo sapiens; identical to SEQ ID NO: 52

SEQ ID NO: 2111 - DNA, 2840 bp, Homo sapiens
acgcgctggctgactggggtcggcgtttagttcagcgcagcgactcggggacctggagctgacgcctagtacgtatgaggaagaacggggtgggtggctgcctgagtctggaggcgacgcctcggttgtgcagtctgaacctgcccttctcagctgagggtgctgacagcaaggggtgggaggcgggccccgagtccccagctgtggacacttgtattagctttaatagaagagaaatggaggagccatagaatattaaggatgaattcaggaaggcctgagaccatggaaaacttgcctgctctctacactattttccaaggagaggttgctatggtgacagactatggggcctttatcaaaatcccaggctgtcggaagcaaggtctggtccatcgaactcatatgtcatcctgtcgggtggataagccctctgagatagtagatgttggagataaagtgtgggtgaagcttattggccgagagatgaaaaatgatagaataaaagtatccctctccatgaaggttgtcaatcaagggactgggaaagaccttgatcccaacaatgttatcattgagcaagaagagaggcggaggcgatccttccaggattacactgggcagaagatcacccttgaggctgtcttgaacactacctgcaagaagtgtggctgtaaaggccactttgcaaaagattgtttcatgcaaccaggtgggactaaatactctctgatacctgatgaggaagaggaaaaggaagaggcaaagtcagcagagtttgagaagcctgaccctacaaggaatccttctagaaaaagaaagaaggagaagaagaaaaagaaacatagagataggaagtcatctgactctgacagctcagactctgagagtgatacaggcaagagggcaaggcacacatcaaaagacagcaaggcagcaaagaagaagaaaaagaagaagaagcacaagaagaagcacaaggagtgagagtataaagagtgtagggggtggttgagagtaagaaaccaggagccttgtgccttgagactcctggaaagactcaatagtgagaatatagcctcccaccccattaacttcgctcccatgggagatggcttcccctcatgcaacaggcaggtttgggagttagaggtcaaaagcagctgcctgaatgagttgttgtttccttatcactcctggtccctttgcaagtgaaccctgcagctcacccattcattcacccaacttccttcattcagcaggaggtcctattaccctctccagctgccactgccagagctggattcctgtaaaggagtccaggctagagccacagagactgttgtggaggtgagttcggctgtagttagagtgattggacccttcctattggtctgtcctgggccaactggtgggtgatctctgctgcatccaacatgggagcagagactggcagcaggaggggggaacatggtgagaagtggtgctcacttttcccattcctcctaacatagttctactatgctagaagtggcatccagcggccacagctagaaaacagtctgcagtgtgacttaacttgtgtattgcattccagcagaccactgaaccagacagcgaagccaagatcattgttctactttgtatttactactgtgtgaatcagttgattctacttcaggtccttgcttaaattcctgtcactaaatggaaatgtgtttggttttaaacttactgagttatttttcctataatccttcttcctgggtaacttacagacttaaagtcactgagcctgcattagctgacaaaaacatttaatatgttaccttagaccttggagagatgcccagcagaggtacagagccaaaggcactagcagatcactgccttcttgggagatcacttataagccctcccttttgtaatgatcagatgccctcttccctcagagttgattagagaagcagtaagaatttgtagtcataagtactagcctggtgcacaggtcagcagtcctcttggccagtggtcattttctcccaccaccatggtacaagcctgggttctgtgccctgaacctgaattctggaaagggagagactacagcatttcacagagaacagccagacccaagagctttcagtgtaggatgggcctgaagtgacagttcaatagccaaacctggggaagccccatcactgactgaactaggtcatttgaccatggagggggggcagtgtaaaggcaacgtgtaggtacagctcttttattattaaatgtgtaaggtgatcagctgattaacaggctccgagactgtccatttcagtctcccatccagtgcttcttcctcagtaaccttcaggccgttatttctgcccactctctgacacacaggataaaccaagactcccagagttatgttaccaaaggcaaaaaggcaactgggtggccttggctctgctttattgacctcagagcaccctatgagtgcagttaaaaaaaaaaaaaaaaaaccacatacaccatgggaactggaactggatcccggtcagtggcacctgaccccagaagaattcgtggatttgtacaaaatgcagaggaagaaatgaggcaatgtggtgctgagtcgaggggtagccgattggcagagtagtagtcagcaacagtgcagtcaggtcatgcctctttctcataagtgcgagtgcaaactgcagtgccgtgggtgagtgtctggaaggaaagacagagtgagatggggggtggagccaggaacaccattgcgagcattctaccctcccttcctcctgataattgtcacttgagtacctactatgtgc

SEQ ID NO: 2112 - protein, 241 aa, Homo sapiens; identical to SEQ ID NO: 52

SEQ ID NO: 2113 - DNA, 1399 bp, Homo sapiens
ctggggtcggcgtttagttcagcgcagcgactcggggacctggagctgacgcctagacacttgtattagctttaatagaagagaaatggaggagccatagaatattaaggatgaattcaggaaggcctgagaccatggaaaacttgcctgctctctacactattttccaaggagagttatggtgaagctgaaacagtgctcaagatgaagcagctaattgaagacactgaaaagaataaagtttatgttgctatggtgacagactatggggcctttatcaaaatcccaggctgtcggaagcaaggtctggtccatcgaactcatatgtcatcctgtcgggtggataagccctctgagatagtagatgttggagataaagtgtgggtgaagcttattggccgagagatgaaaaatgatagaataaaagtatccctctccatgaaggttgtcaatcaagggactgggaaagaccttgatcccaacaatgttatcattgagagaagaagaaaaagaaacatagagataggaagtcatctgactctgacagctcagactctgagagtgatacaggcaagagggcaaggcacacatcaaaagacagcaaggcagcaaagaagaagaaaaagaagaagaagcacaagaagaagcacaaggagtgagagtataaagagtgtagggggtggttgagagtaagaaaccaggagccttgtgccttgagactcctggaaagactcaatagtgagaatatagcctcccaccccattaacttcgctcccatgggagatggcttcccctcatgcaacaggcaggtttgggagttagaggtcaaaagcagctgcctgaatgagttgttgtttccttatcactcctggtccctttgcaagtgaaccctgcagctcacccattcattcacccaacttccttcattcagcaggaggtcctattaccctctccagctgccactgccagagctggattcctgtaaaggagtccaggctagagccacagagactgttgtggaggtgagttcggctgtagttagagtgattggacccttcctattggtctgtcctgggccaactggtgggtgatctctgctgcatccaacatgggagcagagactggcagcaggaggggggaacatggtgagaagtggtgctcacttttcccattcctcctaacatagttctactatgctagaagtggcatccagcggccacagctagaaaacagtctgcagtgtgacttaacttgtgtattgcattccagcagaccactgaaccagacagcgaagccaagatcattgttctactttgtatttactactgtgtgaatcagttgattctacttcaggtccttgcttaaattcctgtcactaaatggaaatgtgtttggtttt

SEQ ID NO: 2114 - protein, 160 aa, Homo sapiens
MKQLIEDTEKNKVYVAMVTDYGAFIKIPGCRKQGLVHRTHMSSCRVDKPSEIVDVGDKVWVKLIGREMKNDRIKVSLSMKVVNQGTGKDLDPNNVIIERRRKRNIEIGSHLTLTAQTLRVIQARGQGTHQKTARQQRRRKRRRSTRRSTRSESIKSVGGG

SEQ ID NO: 2115 - DNA, 2512 bp, Homo sapiens
ctggggtcggcgtttagttcagcgcagcgactcggggacctggagctgacgcctagacacttgtattagctttaatagaagagaaatggaggagccatagaatattaaggatgaattcaggaaggcctgagaccatggaaaacttgcctgctctctacactattttccaaggagagttatggtgaagctgaaacagtgctcaagatgaagcagctaattgaagacactgaaaagaataaagtttatgttgctatggtgacagactatggggcctttatcaaaatcccaggctgtcggaagcaaggtctggtccatcgaactcatatgtcatcctgtcgggtggataagccctctgagatagtagatgttggagataaagtgtgggtgaagcttattggccgagagatgaaaaatgatagaataaaagtatccctctccatgaaggttgtcaatcaagggactgggaaagaccttgatcccaacaatgttatcattgagagaagaagaaaaagaaacatagagataggaagtcatctgactctgacagctcagactctgagagtgatacaggcaagagggcaaggcacacatcaaaagacagcaaggcagcaaagaagaagaaaaagaagaagaagcacaagaagaagcacaaggagtgagagtataaagagtgtagggggtggttgagagtaagaaaccaggagccttgtgccttgagactcctggaaagactcaatagtgagaatatagcctcccaccccattaacttcgctcccatgggagatggcttcccctcatgcaacaggcaggtttgggagttagaggtcaaaagcagctgcctgaatgagttgttgtttccttatcactcctggtccctttgcaagtgaaccctgcagctcacccattcattcacccaacttccttcattcagcaggaggtcctattaccctctccagctgccactgccagagctggattcctgtaaaggagtccaggctagagccacagagactgttgtggaggtgagttcggctgtagttagagtgattggacccttcctattggtctgtcctgggccaactggtgggtgatctctgctgcatccaacatgggagcagagactggcagcaggaggggggaacatggtgagaagtggtgctcacttttcccattcctcctaacatagttctactatgctagaagtggcatccagcggccacagctagaaaacagtctgcagtgtgacttaacttgtgtattgcattccagcagaccactgaaccagacagcgaagccaagatcattgttctactttgtatttactactgtgtgaatcagttgattctacttcaggtccttgcttaaattcctgtcactaaatggaaatgtgtttggttttaaacttactgagttatttttcctataatccttcttcctgggtaacttacagacttaaagtcactgagcctgcattagctgacaaaaacatttaatatgttaccttagaccttggagagatgcccagcagaggtacagagccaaaggcactagcagatcactgccttcttgggagatcacttataagccctcccttttgtaatgatcagatgccctcttccctcagagttgattagagaagcagtaagaatttgtagtcataagtactagcctggtgcacaggtcagcagtcctcttggccagtggtcattttctcccaccaccatggtacaagcctgggttctgtgccctgaacctgaattctggaaagggagagactacagcatttcacagagaacagccagacccaagagctttcagtgtaggatgggcctgaagtgacagttcaatagccaaacctggggaagccccatcactgactgaactaggtcatttgaccatggagggggggcagtgtaaaggcaacgtgtaggtacagctcttttattattaaatgtgtaaggtgatcagctgattaacaggctccgagactgtccatttcagtctcccatccagtgcttcttcctcagtaaccttcaggccgttatttctgcccactctctgacacacaggataaaccaagactcccagagttatgttaccaaaggcaaaaaggcaactgggtggccttggctctgctttattgacctcagagcaccctatgagtgcagttaaaaaaaaaaaaaaaaaaccacatacaccatgggaactggaactggatcccggtcagtggcacctgaccccagaagaattcgtggatttgtacaaaatgcagaggaagaaatgaggcaatgtggtgctgagtcgaggggtagccgattggcagagtagtagtcagcaacagtgcagtcaggtcatgcctctttctcataagtgcgagtgcaaactgcagtgccgtgggtgagtgtctggaaggaaagacagagtgagatggggggtggagccaggaacaccattgcgagcattctaccctcccttcctcctgataattgtcacttgagtacctactatgtgc

SEQ ID NO: 2116 - protein, 160 aa, Homo sapiens; identical to SEQ ID NO: 2114

SEQ ID NO: 2117 - DNA, 532 bp, Homo sapiens
agcgcagcgactcggggacctggagctgacgcctaacggactctcgctctgtcgcccaggctggagtacaatggtacgatcttggttcactgcaagctccacctcccaggttcatgccattctcctgcctcagcctgccgagtagctgggattacaggacacttgtattagctttaatagaagagaaatggaggagccatagaatattaaggatgaattcaggaaggcctgagaccatggaaaacttgcctgctctctacactattttccaaggagaggttgctatggtgacagactatggggcctttatcaaaatcccaggctgtcggaagcaaggtctggtccatcgaactcatatgtcatcctgtcgggtggataagccctctgagatagtagatgttggagataaagtgtgggtgaagcttattggccgagagatgaaaaatgatagaataaaagtatccctctccatgaaggttgtcaatcaagggactgggaaagaccttgatcccaacaatgttatcattgagta

SEQ ID NO: 2118 - protein, 138 aa, Homo sapiens
MPFSCLSLPSSWDYRTLVLALIEEKWRSHRILRMNSGRPETMENLPALYTIFQGEVAMVTDYGAFIKIPGCRKQGLVHRTHMSSCRVDKPSEIVDVGDKVWVKLIGREMKNDRIKVSLSMKVVNQGTGKDLDPNNVII

SEQ ID NO: 2119 - DNA, 513 bp, Homo sapiens
tagtacgtatgaggaagaacggggtgggtggctgcctgagtctggaggcgacgcctcggttgtgcagtctgaacctgcccttctcagctgagggtgctgacagcaaggggtgggaggcgggccccgagtccccagctgtggacacttgtattagctttaatagaagagaaatggaggagccatagaatattaaggatgaattcaggaaggcctgagaccatggaaaacttgcctgctctctacactattttccaaggagaggttgctatggtgacagactatggggcctttatcaaaatcccaggctgtcggaagcaaggtctggtccatcgaactcatatgtcatcctgtcgggtggataagccctctgagatagtagatgttggagataaagtgtgggtgaagcttattggccgagagatgaaaaatgatagaataaaagtatccctctccatgaaggttgtcaatcaagggactgggaaagaccttgatcccaacaatgttatcattgag

SEQ ID NO: 2120 - protein, 105 aa, Homo sapiens; identical to SEQ ID NO: 2102

SEQ ID NO: 2121 - DNA, 1488 bp, Homo sapiens
gcctcggttgtgcagtctgaacctgcccttctcagctgagggtgctgacagcaaggggtgggaggcgggccccgagtccccagctgtggttgctatggtgacagactatggggcctttatcaaaatcccaggctgtcggaagcaaggtctggtccatcgaactcatatgtcatcctgtcgggtggataagccctctgagatagtagatgttggagataaagtgtgggtgaagcttattggccgagagatgaaaaatgatagaataaaagtatccctctccatgaaggttgtcaatcaagggactgggaaagaccttgatcccaacaatgttatcattgagcaagaagagaggcggaggcgatccttccaggattacactgggcagaagatcacccttgaggctgtcttgaacactacctgcaagaagtgtggctgtaaaggccactttgcaaaagattgtttcatgcaaccaggtgggactaaatactctctgatacctgatgaggaagaggaaaaggaagaggcaaagtcagcagagtttgagaagcctgaccctacaaggaatccttctagaaaaagaaagaaggagaagaagaaaaagaaacatagagataggaagtcatctgactctgacagctcagactctgagagtgatacaggcaagagggcaaggcacacatcaaaagacagcaaggcagcaaagaagaagaaaaagaagaagaagcacaagaagaagcacaaggagtgagagtataaagagtgtagggggtggttgagagtaagaaaccaggagccttgtgccttgagactcctggaaagactcaatagtgagaatatagcctcccaccccattaacttcgctcccatgggagatggcttcccctcatgcaacaggcaggtttgggagttagaggtcaaaagcagctgcctgaatgagttgttgtttccttatcactcctggtccctttgcaagtgaaccctgcagctcacccattcattcacccaacttccttcattcagcaggaggtcctattaccctctccagctgccactgccagagctggattcctgtaaaggagtccaggctagagccacagagactgttgtggaggtgagttcggctgtagttagagtgattggacccttcctattggtctgtcctgggccaactggtgggtgatctctgctgcatccaacatgggagcagagactggcagcaggaggggggaacatggtgagaagtggtgctcacttttcccattcctcctaacatagttctactatgctagaagtggcatccagcggccacagctagaaaacagtctgcagtgtgacttaacttgtgtattgcattccagcagaccactgaaccagacagcgaagccaagatcattgttctactttgtatttactactgtgtgaatcagttgattctacttcaggtccttgcttaaattcctgtcactaaatggaaatgtgtttggtttt

SEQ ID NO: 2122 - protein, 217 aa, Homo sapiens
MVTDYGAFIKIPGCRKQGLVHRTHMSSCRVDKPSEIVDVGDKVWVKLIGREMKNDRIKVSLSMKVVNQGTGKDLDPNNVIIEQEERRRRSFQDYTGQKITLEAVLNTTCKKCGCKGHFAKDCFMQPGGTKYSLIPDEEEEKEEAKSAEFEKPDPTRNPSRKRKKEKKKKKHRDRKSSDSDSSDSESDTGKRARHTSKDSKAAKKKKKKKKHKKKHKE

SEQ ID NO: 2123 - DNA, 2601 bp, Homo sapiens
gcctcggttgtgcagtctgaacctgcccttctcagctgagggtgctgacagcaaggggtgggaggcgggccccgagtccccagctgtggttgctatggtgacagactatggggcctttatcaaaatcccaggctgtcggaagcaaggtctggtccatcgaactcatatgtcatcctgtcgggtggataagccctctgagatagtagatgttggagataaagtgtgggtgaagcttattggccgagagatgaaaaatgatagaataaaagtatccctctccatgaaggttgtcaatcaagggactgggaaagaccttgatcccaacaatgttatcattgagcaagaagagaggcggaggcgatccttccaggattacactgggcagaagatcacccttgaggctgtcttgaacactacctgcaagaagtgtggctgtaaaggccactttgcaaaagattgtttcatgcaaccaggtgggactaaatactctctgatacctgatgaggaagaggaaaaggaagaggcaaagtcagcagagtttgagaagcctgaccctacaaggaatccttctagaaaaagaaagaaggagaagaagaaaaagaaacatagagataggaagtcatctgactctgacagctcagactctgagagtgatacaggcaagagggcaaggcacacatcaaaagacagcaaggcagcaaagaagaagaaaaagaagaagaagcacaagaagaagcacaaggagtgagagtataaagagtgtagggggtggttgagagtaagaaaccaggagccttgtgccttgagactcctggaaagactcaatagtgagaatatagcctcccaccccattaacttcgctcccatgggagatggcttcccctcatgcaacaggcaggtttgggagttagaggtcaaaagcagctgcctgaatgagttgttgtttccttatcactcctggtccctttgcaagtgaaccctgcagctcacccattcattcacccaacttccttcattcagcaggaggtcctattaccctctccagctgccactgccagagctggattcctgtaaaggagtccaggctagagccacagagactgttgtggaggtgagttcggctgtagttagagtgattggacccttcctattggtctgtcctgggccaactggtgggtgatctctgctgcatccaacatgggagcagagactggcagcaggaggggggaacatggtgagaagtggtgctcacttttcccattcctcctaacatagttctactatgctagaagtggcatccagcggccacagctagaaaacagtctgcagtgtgacttaacttgtgtattgcattccagcagaccactgaaccagacagcgaagccaagatcattgttctactttgtatttactactgtgtgaatcagttgattctacttcaggtccttgcttaaattcctgtcactaaatggaaatgtgtttggttttaaacttactgagttatttttcctataatccttcttcctgggtaacttacagacttaaagtcactgagcctgcattagctgacaaaaacatttaatatgttaccttagaccttggagagatgcccagcagaggtacagagccaaaggcactagcagatcactgccttcttgggagatcacttataagccctcccttttgtaatgatcagatgccctcttccctcagagttgattagagaagcagtaagaatttgtagtcataagtactagcctggtgcacaggtcagcagtcctcttggccagtggtcattttctcccaccaccatggtacaagcctgggttctgtgccctgaacctgaattctggaaagggagagactacagcatttcacagagaacagccagacccaagagctttcagtgtaggatgggcctgaagtgacagttcaatagccaaacctggggaagccccatcactgactgaactaggtcatttgaccatggagggggggcagtgtaaaggcaacgtgtaggtacagctcttttattattaaatgtgtaaggtgatcagctgattaacaggctccgagactgtccatttcagtctcccatccagtgcttcttcctcagtaaccttcaggccgttatttctgcccactctctgacacacaggataaaccaagactcccagagttatgttaccaaaggcaaaaaggcaactgggtggccttggctctgctttattgacctcagagcaccctatgagtgcagttaaaaaaaaaaaaaaaaaaccacatacaccatgggaactggaactggatcccggtcagtggcacctgaccccagaagaattcgtggatttgtacaaaatgcagaggaagaaatgaggcaatgtggtgctgagtcgaggggtagccgattggcagagtagtagtcagcaacagtgcagtcaggtcatgcctctttctcataagtgcgagtgcaaactgcagtgccgtgggtgagtgtctggaaggaaagacagagtgagatggggggtggagccaggaacaccattgcgagcattctaccctcccttcctcctgataattgtcacttgagtacctactatgtgc

SEQ ID NO: 2124 - protein, 217 aa, Homo sapiens; identical to SEQ ID NO: 2122

SEQ ID NO: 2125 - DNA, 439 bp, Homo sapiens
ccagaaaagggtccatccacaaggagagaaacgtggaaagggcagaggcttcaccctacctttacagccacacttcttgcaggtagtgttcaagacagcctcaagggtgatcttctgcccagtgtaatcctggaaggatcgcctccgcctctcttcttgcctataatgaaaaagataccgactgccggcccccttaagagatatggccagagatactacaaggatgacatatgagttcgatggaccagacctgggcacaagaagaagaaataacgtaaagcagagggcatatctggtatttatactctaaactggataagaaggtagctctctcctggataaacatgaccagtctagaagcgttagcagtgaaaaactggaaacaacttaaaatgattatgtggtacatctgaatgacagaataaagccattaaatgtt

SEQ ID NO: 2126 - protein, 35 aa, Homo sapiens
MARDTTRMTYEFDGPDLGTRRRNNVKQRAYLVFIL

SEQ ID NO: 2127 - DNA, 749 bp, Homo sapiens
agcccgggcagggagccgccgtcggagcccttgcacgcctgctctcttgtagcttctctcagcctagcccagcatcactatggtggacgctttcctgggcacctggaagctagtggacagcaagaatttcgatgactacatgaagtcactcggtgtgggttttgctaccaggcaggtggccagcatgaccaagcctaccacaatcatcgaaaagaatggggacattctcaccctaaaaacacacagcaccttcaagaacacagagatcagctttaagttgggggtggagttcgatgagacaacagcagatgacaggaaggtcaagtccattgtgacactggatggagggaaacttgttcacctgcagaaatgggacgggcaagagaccacacttgtgcgggagctaattgatggaaaactcatcctgacactcacccacggcactgcagtttgcactcgcacttatgagaaagaggcatgacctgactgcactgttgctgactactactctgccaatcggctacccctcgactcagcaccacattgcctcatttcttcctctgcattttgtacaaatccacgaattcttctggggtcaggtgccactgaccgggatccagttccagttcccatggtgtagtgttcaagacagcctcaagggtgatcttctgcccagtgtaatcctggaaggatcgcctccgcctctcttcttgcctataatgaaaaagataccgactgccggccccctt

SEQ ID NO: 2128 - protein, 133 aa, Homo sapiens [sequence omitted]

SEQ ID NO: 2129 - DNA, 2653 bp, Homo sapiens
ccttgcacgcctgctctcttgtagcttctctcagcctagcccagcatcactatggtggacgctttcctgggcacctggaagctagtggacagcaagaatttcgatgactacatgaagtcactcgctcatatactcataaccttccccctaccctcaggtgtgggttttgctaccaggcaggtggccagcatgaccaagcctaccacaatcatcgaaaagaatggggacattctcaccctaaaaacacacagcaccttcaagaacacagagatcagctttaagttgggggtggagttcgatgagacaacagcagatgacaggaaggtcaagtccattgtgacactggatggagggaaacttgttcacctgcagaaatgggacgggcaagagaccacacttgtgcgggagctaattgatggaaaactcatcctgacactcacccacggcactgcagtttgcactcgcacttatgagaaagaggcatgacctgactgcactgttgctgactactactctgccaatcggctacccctcgactcagcaccacattgcctcatttcttcctctgcattttgtacaaatccacgaattcttctggggtcaggtgccactgaccgggatccagttccagttcccatggtgtatgtggttttttttttttttttttaactgcactcatagggtgctctgaggtcaataaagcagagccaaggccacccagttgcctttttgcctttggtaacataactctgggagtcttggtttatcctgtgtgtcagagagtgggcagaaataacggcctgaaggttactgaggaagaagcactggatgggagactgaaatggacagtctcggagcctgttaatcagctgatcaccttacacatttaataataaaagagctgtacctacacgttgcctttacactgccccccctccatggtcaaatgacctagttcagtcagtgatggggcttccccaggtttggctattgaactgtcacttcaggcccatcctacactgaaagctcttgggtctggctgttctctgtgaaatgctgtagtctctccctttccagaattcaggttcagggcacagaacccaggcttgtaccatggtggtgggagaaaatgaccactggccaagaggactgctgacctgtgcaccaggctagtacttatgactacaaattcttactgcttctctaatcaactctgagggaagagggcatctgatcattacaaaagggagggcttataagtgatctcccaagaaggcagtgatctgctagtgcctttggctctgtacctctgctgggcatctctccaaggtctaaggtaacatattaaatgtttttgtcagctaatgcaggctcagtgactttaagtctgtaagttacccaggaagaaggattataggaaaaataactcagtaagtttaaaaccaaacacatttccatttagtgacaggaatttaagcaaggacctgaagtagaatcaactgattcacacagtagtaaatacaaagtagaacaatgatcttggcttcgctgtctggttcagtggtctgctggaatgcaatacacaagttaagtcacactgcagactgttttctagctgtggccgctggatgccacttctagcatagtagaactatgttaggaggaatgggaaaagtgagcaccacttctcaccatgttcccccctcctgctgccagtctctgctcccatgttggatgcagcagagatcacccaccagttggcccaggacagaccaataggaagggtccaatcactctaactacagccgaactcacctccacaacagtctctgtggctctagcctggactcctttacaggaatccagctctggcagtggcagctggagagggtaataggacctcctgctgaatgaaggaagttgggtgaatgaatgggtgagctgcagggttcacttgcaaagggaccaggagtgataaggaaacaacaactcattcaggcagctgcttttgacctctaactcccaaacctgcctgttgcatgaggggaagccatctcccatgggagcgaagttaatggggtgggaggctatattctcactattgagtctttccaggagtctcaaggcacaaggctcctggtttcttactctcaaccaccccctacactctttatactctcactccttgtgcttcttcttgtgcttcttcttctttttcttcttctttgctgccttgctgtcttttgatgtgtgccttgccctcttgcctgtatcactctcagagtctgagctgtcagagtcagatgacttcctatctctatgtttctttttcttcttctcctgaaaagaaaattttaaaaatcaacactgtatgtgtatatttgcttttaacaatcatagcacataattggccaggtgcagtggctcacacctgtaatcctagtactttgggaagccgaggtgggaggaatgcttgaggccaggagttcaagatcaacctggctaacatagcaagatctcatctctaaaaagagaaaaaaagaaaaattatagcacacaatcaataggggaccacttaattttcttttagacagtctcgctctgttgcccaggctagagtgcagtgcagtggcacgatcacagctcactgcaa

SEQ ID NO: 2130 - protein, 144 aa, Homo sapiens
MVDAFLGTWKLVDSKNFDDYMKSLAHILITFPLPSGVGFATRQVASMTKPTTIIEKNGDILTLKTHSTFKNTEISFKLGVEFDETTADDRKVKSIVTLDGGKLVHLQKWDGQETTLVRELIDGKLILTLTHGTAVCTRTYEKEA

SEQ ID NO: 2131 - DNA, 2648 bp, Homo sapiens
agcccgggcagggagccgccgtcggagcccttgcacgcctgctctcttgtagcttctctcagcctagcccagcatcactatggtggacgctttcctgggcacctggaagctagtggacagcaagaatttcgatgactacatgaagtcactcggtgtgggttttgctaccaggcaggtggccagcatgaccaagcctaccacaatcatcgaaaagaatggggacattctcaccctaaaaacacacagcaccttcaagaacacagagatcagctttaagttgggggtggagttcgatgagacaacagcagatgacaggaaggtcaagtccattgtgacactggatggagggaaacttgttcacctgcagaaatgggacgggcaagagaccacacttgtgcgggagctaattgatggaaaactcatcctgacactcacccacggcactgcagtttgcactcgcacttatgagaaagaggcatgacctgactgcactgttgctgactactactctgccaatcggctacccctcgactcagcaccacattgcctcatttcttcctctgcattttgtacaaatccacgaattcttctggggtcaggtgccactgaccgggatccagttccagttcccatggtgtatgtggttttttttttttttttttaactgcactcatagggtgctctgaggtcaataaagcagagccaaggccacccagttgcctttttgcctttggtaacataactctgggagtcttggtttatcctgtgtgtcagagagtgggcagaaataacggcctgaaggttactgaggaagaagcactggatgggagactgaaatggacagtctcggagcctgttaatcagctgatcaccttacacatttaataataaaagagctgtacctacacgttgcctttacactgccccccctccatggtcaaatgacctagttcagtcagtgatggggcttccccaggtttggctattgaactgtcacttcaggcccatcctacactgaaagctcttgggtctggctgttctctgtgaaatgctgtagtctctccctttccagaattcaggttcagggcacagaacccaggcttgtaccatggtggtgggagaaaatgaccactggccaagaggactgctgacctgtgcaccaggctagtacttatgactacaaattcttactgcttctctaatcaactctgagggaagagggcatctgatcattacaaaagggagggcttataagtgatctcccaagaaggcagtgatctgctagtgcctttggctctgtacctctgctgggcatctctccaaggtctaaggtaacatattaaatgtttttgtcagctaatgcaggctcagtgactttaagtctgtaagttacccaggaagaaggattataggaaaaataactcagtaagtttaaaaccaaacacatttccatttagtgacaggaatttaagcaaggacctgaagtagaatcaactgattcacacagtagtaaatacaaagtagaacaatgatcttggcttcgctgtctggttcagtggtctgctggaatgcaatacacaagttaagtcacactgcagactgttttctagctgtggccgctggatgccacttctagcatagtagaactatgttaggaggaatgggaaaagtgagcaccacttctcaccatgttcccccctcctgctgccagtctctgctcccatgttggatgcagcagagatcacccaccagttggcccaggacagaccaataggaagggtccaatcactctaactacagccgaactcacctccacaacagtctctgtggctctagcctggactcctttacaggaatccagctctggcagtggcagctggagagggtaataggacctcctgctgaatgaaggaagttgggtgaatgaatgggtgagctgcagggttcacttgcaaagggaccaggagtgataaggaaacaacaactcattcaggcagctgcttttgacctctaactcccaaacctgcctgttgcatgaggggaagccatctcccatgggagcgaagttaatggggtgggaggctatattctcactattgagtctttccaggagtctcaaggcacaaggctcctggtttcttactctcaaccaccccctacactctttatactctcactccttgtgcttcttcttgtgcttcttcttctttttcttcttctttgctgccttgctgtcttttgatgtgtgccttgccctcttgcctgtatcactctcagagtctgagctgtcagagtcagatgacttcctatctctatgtttctttttcttcttctcctgaaaagaaaattttaaaaatcaacactgtatgtgtatatttgcttttaacaatcatagcacataattggccaggtgcagtggctcacacctgtaatcctagtactttgggaagccgaggtgggaggaatgcttgaggccaggagttcaagatcaacctggctaacatagcaagatctcatctctaaaaagagaaaaaaagaaaaattatagcacacaatcaataggggaccacttaattttcttttagacagtctcgctctgttgcccaggctagagtgcagtgcagtggcacgatcacagctcactgcaa

SEQ ID NO: 2132 - protein, 133 aa, Homo sapiens [sequence omitted]

SEQ ID NO: 2133 - DNA, 2715 bp, Homo sapiens
agcccgggcagggagccgccgtcggagcccttgcacgcctgctctcttgtagcttctctcagcctagcccagcatcactatggtggacgctttcctgggcacctggaagctagtggacagcaagaatttcgatgactacatgaagtcactcggtgtgggttttgctaccaggcaggtggccagcatgaccaagcctaccacaatcatcgaaaagaatggggacattctcaccctaaaaacacacagcaccttcaagaacacagagatcagctttaagttgggggtggagttcgatgagacaacagcagatgacaggaaggtcaagcacagagccaggatgttcttctgacctcagtatctactccagctccagctgggtgaccctgtgcaagtccattgtgacactggatggagggaaacttgttcacctgcagaaatgggacgggcaagagaccacacttgtgcgggagctaattgatggaaaactcatcctgacactcacccacggcactgcagtttgcactcgcacttatgagaaagaggcatgacctgactgcactgttgctgactactactctgccaatcggctacccctcgactcagcaccacattgcctcatttcttcctctgcattttgtacaaatccacgaattcttctggggtcaggtgccactgaccgggatccagttccagttcccatggtgtatgtggttttttttttttttttttaactgcactcatagggtgctctgaggtcaataaagcagagccaaggccacccagttgcctttttgcctttggtaacataactctgggagtcttggtttatcctgtgtgtcagagagtgggcagaaataacggcctgaaggttactgaggaagaagcactggatgggagactgaaatggacagtctcggagcctgttaatcagctgatcaccttacacatttaataataaaagagctgtacctacacgttgcctttacactgccccccctccatggtcaaatgacctagttcagtcagtgatggggcttccccaggtttggctattgaactgtcacttcaggcccatcctacactgaaagctcttgggtctggctgttctctgtgaaatgctgtagtctctccctttccagaattcaggttcagggcacagaacccaggcttgtaccatggtggtgggagaaaatgaccactggccaagaggactgctgacctgtgcaccaggctagtacttatgactacaaattcttactgcttctctaatcaactctgagggaagagggcatctgatcattacaaaagggagggcttataagtgatctcccaagaaggcagtgatctgctagtgcctttggctctgtacctctgctgggcatctctccaaggtctaaggtaacatattaaatgtttttgtcagctaatgcaggctcagtgactttaagtctgtaagttacccaggaagaaggattataggaaaaataactcagtaagtttaaaaccaaacacatttccatttagtgacaggaatttaagcaaggacctgaagtagaatcaactgattcacacagtagtaaatacaaagtagaacaatgatcttggcttcgctgtctggttcagtggtctgctggaatgcaatacacaagttaagtcacactgcagactgttttctagctgtggccgctggatgccacttctagcatagtagaactatgttaggaggaatgggaaaagtgagcaccacttctcaccatgttcccccctcctgctgccagtctctgctcccatgttggatgcagcagagatcacccaccagttggcccaggacagaccaataggaagggtccaatcactctaactacagccgaactcacctccacaacagtctctgtggctctagcctggactcctttacaggaatccagctctggcagtggcagctggagagggtaataggacctcctgctgaatgaaggaagttgggtgaatgaatgggtgagctgcagggttcacttgcaaagggaccaggagtgataaggaaacaacaactcattcaggcagctgcttttgacctctaactcccaaacctgcctgttgcatgaggggaagccatctcccatgggagcgaagttaatggggtgggaggctatattctcactattgagtctttccaggagtctcaaggcacaaggctcctggtttcttactctcaaccaccccctacactctttatactctcactccttgtgcttcttcttgtgcttcttcttctttttcttcttctttgctgccttgctgtcttttgatgtgtgccttgccctcttgcctgtatcactctcagagtctgagctgtcagagtcagatgacttcctatctctatgtttctttttcttcttctcctgaaaagaaaattttaaaaatcaacactgtatgtgtatatttgcttttaacaatcatagcacataattggccaggtgcagtggctcacacctgtaatcctagtactttgggaagccgaggtgggaggaatgcttgaggccaggagttcaagatcaacctggctaacatagcaagatctcatctctaaaaagagaaaaaaagaaaaattatagcacacaatcaataggggaccacttaattttcttttagacagtctcgctctgttgcccaggctagagtgcagtgcagtggcacgatcacagctcactgcaa

SEQ ID NO: 2134 - protein, 89 aa, Homo sapiens
MVDAFLGTWKLVDSKNFDDYMKSLGVGFATRQVASMTKPTTIIEKNGDILTLKTHSTFKNTEISFKLGVEFDETTADDRKVKHRARMFF

SEQ ID NO: 2135 - DNA, 2771 bp, Homo sapiens
agggactcgggggccaggcactggcgctgacgcaggctagcagggcgccactggctggtccccacccacctcggtgggttgggggatgggcgcaccagcccctcctgggtgagccctagcctggggcttcctatttcgggagccgggggcgtgggccacgtctcctcatgtgatgcgagggctatttaaagcggcagcccgggcagggagccgccgtcggagcccttgcacgcctgctctcttgtagcttctctcagcctagcccagcatcactatggtggacgctttcctgggcacctggaagctagtggacagcaagaatttcgatgactacatgaagtcactcggtgtgggttttgctaccaggcaggtggccagcatgaccaagcctaccacaatcatcgaaaagaatggggacattctcaccctaaaaacacacagcaccttcaagaacacagagatcagctttaagttgggggtggagttcgatgagacaacagcagatgacaggaaggtcaagtccattgtgacactggatggagggaaacttgttcacctgcagaaatgggacgggcaagagaccacacttgagaaagaggcatgacctgactgcactgttgctgactactactctgccaatcggctacccctcgactcagcaccacattgcctcatttcttcctctgcattttgtacaaatccacgaattcttctggggtcaggtgccactgaccgggatccagttccagttcccatggtgtatgtggttttttttttttttttttaactgcactcatagggtgctctgaggtcaataaagcagagccaaggccacccagttgcctttttgcctttggtaacataactctgggagtcttggtttatcctgtgtgtcagagagtgggcagaaataacggcctgaaggttactgaggaagaagcactggatgggagactgaaatggacagtctcggagcctgttaatcagctgatcaccttacacatttaataataaaagagctgtacctacacgttgcctttacactgccccccctccatggtcaaatgacctagttcagtcagtgatggggcttccccaggtttggctattgaactgtcacttcaggcccatcctacactgaaagctcttgggtctggctgttctctgtgaaatgctgtagtctctccctttccagaattcaggttcagggcacagaacccaggcttgtaccatggtggtgggagaaaatgaccactggccaagaggactgctgacctgtgcaccaggctagtacttatgactacaaattcttactgcttctctaatcaactctgagggaagagggcatctgatcattacaaaagggagggcttataagtgatctcccaagaaggcagtgatctgctagtgcctttggctctgtacctctgctgggcatctctccaaggtctaaggtaacatattaaatgtttttgtcagctaatgcaggctcagtgactttaagtctgtaagttacccaggaagaaggattataggaaaaataactcagtaagtttaaaaccaaacacatttccatttagtgacaggaatttaagcaaggacctgaagtagaatcaactgattcacacagtagtaaatacaaagtagaacaatgatcttggcttcgctgtctggttcagtggtctgctggaatgcaatacacaagttaagtcacactgcagactgttttctagctgtggccgctggatgccacttctagcatagtagaactatgttaggaggaatgggaaaagtgagcaccacttctcaccatgttcccccctcctgctgccagtctctgctcccatgttggatgcagcagagatcacccaccagttggcccaggacagaccaataggaagggtccaatcactctaactacagccgaactcacctccacaacagtctctgtggctctagcctggactcctttacaggaatccagctctggcagtggcagctggagagggtaataggacctcctgctgaatgaaggaagttgggtgaatgaatgggtgagctgcagggttcacttgcaaagggaccaggagtgataaggaaacaacaactcattcaggcagctgcttttgacctctaactcccaaacctgcctgttgcatgaggggaagccatctcccatgggagcgaagttaatggggtgggaggctatattctcactattgagtctttccaggagtctcaaggcacaaggctcctggtttcttactctcaaccaccccctacactctttatactctcactccttgtgcttcttcttgtgcttcttcttctttttcttcttctttgctgccttgctgtcttttgatgtgtgccttgccctcttgcctgtatcactctcagagtctgagctgtcagagtcagatgacttcctatctctatgtttctttttcttcttctcctgaaaagaaaattttaaaaatcaacactgtatgtgtatatttgcttttaacaatcatagcacataattggccaggtgcagtggctcacacctgtaatcctagtactttgggaagccgaggtgggaggaatgcttgaggccaggagttcaagatcaacctggctaacatagcaagatctcatctctaaaaagagaaaaaaagaaaaattatagcacacaatcaataggggaccacttaattttcttttagacagtctcgctctgttgcccaggctagagtgcagtgcagtggcacgatcacagctcactgcaa

SEQ ID NO: 2136 - protein, 109 aa, Homo sapiens
MVDAFLGTWKLVDSKNFDDYMKSLGVGFATRQVASMTKPTTIIEKNGDILTLKTHSTFKNTEISFKLGVEFDETTADDRKVKSIVTLDGGKLVHLQKWDGQETTLEKEA

SEQ ID NO: 2137 - DNA, 2685 bp, Homo sapiens
gtgttggctttgtacttgcttcctggaacacatctggcctcagactcctgaggccaagacacactccctgccagccaccctgccatggcttgccagctctcctcacccagggacaacagtgggcatctgtccacaccaaccaggctcgtcaggtctccgggagctgcttgaatccttccacaatcttgggtgtgggttttgctaccaggcaggtggccagcatgaccaagcctaccacaatcatcgaaaagaatggggacattctcaccctaaaaacacacagcaccttcaagaacacagagatcagctttaagttgggggtggagttcgatgagacaacagcagatgacaggaaggtcaagtccattgtgacactggatggagggaaacttgttcacctgcagaaatgggacgggcaagagaccacacttgtgcgggagctaattgatggaaaactcatcctgacactcacccacggcactgcagtttgcactcgcacttatgagaaagaggcatgacctgactgcactgttgctgactactactctgccaatcggctacccctcgactcagcaccacattgcctcatttcttcctctgcattttgtacaaatccacgaattcttctggggtcaggtgccactgaccgggatccagttccagttcccatggtgtatgtggttttttttttttttttttaactgcactcatagggtgctctgaggtcaataaagcagagccaaggccacccagttgcctttttgcctttggtaacataactctgggagtcttggtttatcctgtgtgtcagagagtgggcagaaataacggcctgaaggttactgaggaagaagcactggatgggagactgaaatggacagtctcggagcctgttaatcagctgatcaccttacacatttaataataaaagagctgtacctacacgttgcctttacactgccccccctccatggtcaaatgacctagttcagtcagtgatggggcttccccaggtttggctattgaactgtcacttcaggcccatcctacactgaaagctcttgggtctggctgttctctgtgaaatgctgtagtctctccctttccagaattcaggttcagggcacagaacccaggcttgtaccatggtggtgggagaaaatgaccactggccaagaggactgctgacctgtgcaccaggctagtacttatgactacaaattcttactgcttctctaatcaactctgagggaagagggcatctgatcattacaaaagggagggcttataagtgatctcccaagaaggcagtgatctgctagtgcctttggctctgtacctctgctgggcatctctccaaggtctaaggtaacatattaaatgtttttgtcagctaatgcaggctcagtgactttaagtctgtaagttacccaggaagaaggattataggaaaaataactcagtaagtttaaaaccaaacacatttccatttagtgacaggaatttaagcaaggacctgaagtagaatcaactgattcacacagtagtaaatacaaagtagaacaatgatcttggcttcgctgtctggttcagtggtctgctggaatgcaatacacaagttaagtcacactgcagactgttttctagctgtggccgctggatgccacttctagcatagtagaactatgttaggaggaatgggaaaagtgagcaccacttctcaccatgttcccccctcctgctgccagtctctgctcccatgttggatgcagcagagatcacccaccagttggcccaggacagaccaataggaagggtccaatcactctaactacagccgaactcacctccacaacagtctctgtggctctagcctggactcctttacaggaatccagctctggcagtggcagctggagagggtaataggacctcctgctgaatgaaggaagttgggtgaatgaatgggtgagctgcagggttcacttgcaaagggaccaggagtgataaggaaacaacaactcattcaggcagctgcttttgacctctaactcccaaacctgcctgttgcatgaggggaagccatctcccatgggagcgaagttaatggggtgggaggctatattctcactattgagtctttccaggagtctcaaggcacaaggctcctggtttcttactctcaaccaccccctacactctttatactctcactccttgtgcttcttcttgtgcttcttcttctttttcttcttctttgctgccttgctgtcttttgatgtgtgccttgccctcttgcctgtatcactctcagagtctgagctgtcagagtcagatgacttcctatctctatgtttctttttcttcttctcctgaaaagaaaattttaaaaatcaacactgtatgtgtatatttgcttttaacaatcatagcacataattggccaggtgcagtggctcacacctgtaatcctagtactttgggaagccgaggtgggaggaatgcttgaggccaggagttcaagatcaacctggctaacatagcaagatctcatctctaaaaagagaaaaaaagaaaaattatagcacacaatcaataggggaccacttaattttcttttagacagtctcgctctgttgcccaggctagagtgcagtgcagtggcacgatcacagctcactgcaa

SEQ ID NO: 2138 - protein, 98 aa, Homo sapiens [sequence omitted]

SEQ ID NO: 2139 - DNA, 2363 bp, Homo sapiens
ccttgcacgcctgctctcttgtagcttctctcagcctagcccagcatcactatggtggacgctttcctgggcacctggaagctagtggacagcaagaatttcgatgactacatgaagtcactcgctcatatactcataaccttccccctaccctcaggtgtgggttttgctaccaggcaggtggccagcatgaccaagcctaccacaatcatcgaaaagaatggggacattctcaccctaaaaacacacagcaccttcaagaacacagagatcagctttaagttgggggtggagttcgatgagacaacagcagatgacaggaaggtcaagtccattgtgacactggatggagggaaacttgttcacctgcagaaatgggacgggcaagagaccacacttgtgcgggagctaattgatggaaaactcatcctgacactcacccacggcactgcagtttgcactcgcacttatgagaaagaggcatgacctgactgcactgttgctgactactactctgccaatcggctacccctcgactcagcaccacattgcctcatttcttcctctgcattttgtacaaatccacgaattcttctggggtcaggtgccactgaccgggatccagttccagttcccatggtgtatgtggttttttttttttttttttaactgcactcatagggtgctctgaggtcaataaagcagagccaaggccacccagttgcctttttgcctttggtaacataactctgggagtcttggtttatcctgtgtgtcagagagtgggcagaaataacggcctgaaggttactgaggaagaagcactggatgggagactgaaatggacagtctcggagcctgttaatcagctgatcaccttacacatttaataataaaagagctgtacctacacgttgcctttacactgccccccctccatggtcaaatgacctagttcagtcagtgatggggcttccccaggtttggctattgaactgtcacttcaggcccatcctacactgaaagctcttgggtctggctgttctctgtgaaatgctgtagtctctccctttccagaattcaggttcagggcacagaacccaggcttgtaccatggtggtgggagaaaatgaccactggccaagaggactgctgacctgtgcaccaggctagtacttatgactacaaattcttactgcttctctaatcaactctgagggaagagggcatctgatcattacaaaagggagggcttataagtgatctcccaagaaggcagtgatctgctagtgcctttggctctgtacctctgctgggcatctctccaaggtctaaggtaacatattaaatgtttttgtcagctaatgcaggctcagtgactttaagtctgtaagttacccaggaagaaggattataggaaaaataactcagtaagtttaaaaccaaacacatttccatttagtgacaggaatttaagcaaggacctgaagtagaatcaactgattcacacagtagtaaatacaaagtagaacaatgatcttggcttcgctgtctggttcagtggtctgctggaatgcaatacacaagttaagtcacactgcagactgttttctagctgtggccgctggatgccacttctagcatagtagaactatgttaggaggaatgggaaaagtgagcaccacttctcaccatgttcccccctcctgctgccagtctctgctcccatgttggatgcagcagagatcacccaccagttggcccaggacagaccaataggaagggtccaatcactctaactacagccgaactcacctccacaacagtctctgtggctctagcctggactcctttacaggaatccagctctggcagtggcagctggagagggtaataggacctcctgctgaatgaaggaagttgggtgaatgaatgggtgagctgcagggttcacttgcaaagggaccaggagtgataaggaaacaacaactcattcaggcagctgcttttgacctctaactcccaaacctgcctgttgcatgaggggaagccatctcccatgggagcgaagttaatggggtgggaggctatattctcactattgagtctttccaggagtctcaaggcacaaggctcctggtttcttactctcaaccaccccctacactctttatactctcactccttgtgcttcttcttgtgcttcttcttctttttcttcttctttgctgccttgctgtcttttgatgtgtgccttgccctcttgcctgtatcactctcagagtctgagctgtcagagtcagatgacttcctatctctatgtttctttttcttcttctcctgaaaagaaaattttaaaaatc

SEQ ID NO: 2140 - protein, 144 aa, Homo sapiens; identical to SEQ ID NO: 2130

SEQ ID NO: 2141 - DNA, 2358 bp, Homo sapiens
agcccgggcagggagccgccgtcggagcccttgcacgcctgctctcttgtagcttctctcagcctagcccagcatcactatggtggacgctttcctgggcacctggaagctagtggacagcaagaatttcgatgactacatgaagtcactcggtgtgggttttgctaccaggcaggtggccagcatgaccaagcctaccacaatcatcgaaaagaatggggacattctcaccctaaaaacacacagcaccttcaagaacacagagatcagctttaagttgggggtggagttcgatgagacaacagcagatgacaggaaggtcaagtccattgtgacactggatggagggaaacttgttcacctgcagaaatgggacgggcaagagaccacacttgtgcgggagctaattgatggaaaactcatcctgacactcacccacggcactgcagtttgcactcgcacttatgagaaagaggcatgacctgactgcactgttgctgactactactctgccaatcggctacccctcgactcagcaccacattgcctcatttcttcctctgcattttgtacaaatccacgaattcttctggggtcaggtgccactgaccgggatccagttccagttcccatggtgtatgtggttttttttttttttttttaactgcactcatagggtgctctgaggtcaataaagcagagccaaggccacccagttgcctttttgcctttggtaacataactctgggagtcttggtttatcctgtgtgtcagagagtgggcagaaataacggcctgaaggttactgaggaagaagcactggatgggagactgaaatggacagtctcggagcctgttaatcagctgatcaccttacacatttaataataaaagagctgtacctacacgttgcctttacactgccccccctccatggtcaaatgacctagttcagtcagtgatggggcttccccaggtttggctattgaactgtcacttcaggcccatcctacactgaaagctcttgggtctggctgttctctgtgaaatgctgtagtctctccctttccagaattcaggttcagggcacagaacccaggcttgtaccatggtggtgggagaaaatgaccactggccaagaggactgctgacctgtgcaccaggctagtacttatgactacaaattcttactgcttctctaatcaactctgagggaagagggcatctgatcattacaaaagggagggcttataagtgatctcccaagaaggcagtgatctgctagtgcctttggctctgtacctctgctgggcatctctccaaggtctaaggtaacatattaaatgtttttgtcagctaatgcaggctcagtgactttaagtctgtaagttacccaggaagaaggattataggaaaaataactcagtaagtttaaaaccaaacacatttccatttagtgacaggaatttaagcaaggacctgaagtagaatcaactgattcacacagtagtaaatacaaagtagaacaatgatcttggcttcgctgtctggttcagtggtctgctggaatgcaatacacaagttaagtcacactgcagactgttttctagctgtggccgctggatgccacttctagcatagtagaactatgttaggaggaatgggaaaagtgagcaccacttctcaccatgttcccccctcctgctgccagtctctgctcccatgttggatgcagcagagatcacccaccagttggcccaggacagaccaataggaagggtccaatcactctaactacagccgaactcacctccacaacagtctctgtggctctagcctggactcctttacaggaatccagctctggcagtggcagctggagagggtaataggacctcctgctgaatgaaggaagttgggtgaatgaatgggtgagctgcagggttcacttgcaaagggaccaggagtgataaggaaacaacaactcattcaggcagctgcttttgacctctaactcccaaacctgcctgttgcatgaggggaagccatctcccatgggagcgaagttaatggggtgggaggctatattctcactattgagtctttccaggagtctcaaggcacaaggctcctggtttcttactctcaaccaccccctacactctttatactctcactccttgtgcttcttcttgtgcttcttcttctttttcttcttctttgctgccttgctgtcttttgatgtgtgccttgccctcttgcctgtatcactctcagagtctgagctgtcagagtcagatgacttcctatctctatgtttctttttcttcttctcctgaaaagaaaattttaaaaatc

SEQ ID NO: 2142 - protein, 133 aa, Homo sapiens [sequence omitted]

SEQ ID NO: 2143 - DNA, 2425 bp, Homo sapiens
agcccgggcagggagccgccgtcggagcccttgcacgcctgctctcttgtagcttctctcagcctagcccagcatcactatggtggacgctttcctgggcacctggaagctagtggacagcaagaatttcgatgactacatgaagtcactcggtgtgggttttgctaccaggcaggtggccagcatgaccaagcctaccacaatcatcgaaaagaatggggacattctcaccctaaaaacacacagcaccttcaagaacacagagatcagctttaagttgggggtggagttcgatgagacaacagcagatgacaggaaggtcaagcacagagccaggatgttcttctgacctcagtatctactccagctccagctgggtgaccctgtgcaagtccattgtgacactggatggagggaaacttgttcacctgcagaaatgggacgggcaagagaccacacttgtgcgggagctaattgatggaaaactcatcctgacactcacccacggcactgcagtttgcactcgcacttatgagaaagaggcatgacctgactgcactgttgctgactactactctgccaatcggctacccctcgactcagcaccacattgcctcatttcttcctctgcattttgtacaaatccacgaattcttctggggtcaggtgccactgaccgggatccagttccagttcccatggtgtatgtggttttttttttttttttttaactgcactcatagggtgctctgaggtcaataaagcagagccaaggccacccagttgcctttttgcctttggtaacataactctgggagtcttggtttatcctgtgtgtcagagagtgggcagaaataacggcctgaaggttactgaggaagaagcactggatgggagactgaaatggacagtctcggagcctgttaatcagctgatcaccttacacatttaataataaaagagctgtacctacacgttgcctttacactgccccccctccatggtcaaatgacctagttcagtcagtgatggggcttccccaggtttggctattgaactgtcacttcaggcccatcctacactgaaagctcttgggtctggctgttctctgtgaaatgctgtagtctctccctttccagaattcaggttcagggcacagaacccaggcttgtaccatggtggtgggagaaaatgaccactggccaagaggactgctgacctgtgcaccaggctagtacttatgactacaaattcttactgcttctctaatcaactctgagggaagagggcatctgatcattacaaaagggagggcttataagtgatctcccaagaaggcagtgatctgctagtgcctttggctctgtacctctgctgggcatctctccaaggtctaaggtaacatattaaatgtttttgtcagctaatgcaggctcagtgactttaagtctgtaagttacccaggaagaaggattataggaaaaataactcagtaagtttaaaaccaaacacatttccatttagtgacaggaatttaagcaaggacctgaagtagaatcaactgattcacacagtagtaaatacaaagtagaacaatgatcttggcttcgctgtctggttcagtggtctgctggaatgcaatacacaagttaagtcacactgcagactgttttctagctgtggccgctggatgccacttctagcatagtagaactatgttaggaggaatgggaaaagtgagcaccacttctcaccatgttcccccctcctgctgccagtctctgctcccatgttggatgcagcagagatcacccaccagttggcccaggacagaccaataggaagggtccaatcactctaactacagccgaactcacctccacaacagtctctgtggctctagcctggactcctttacaggaatccagctctggcagtggcagctggagagggtaataggacctcctgctgaatgaaggaagttgggtgaatgaatgggtgagctgcagggttcacttgcaaagggaccaggagtgataaggaaacaacaactcattcaggcagctgcttttgacctctaactcccaaacctgcctgttgcatgaggggaagccatctcccatgggagcgaagttaatggggtgggaggctatattctcactattgagtctttccaggagtctcaaggcacaaggctcctggtttcttactctcaaccaccccctacactctttatactctcactccttgtgcttcttcttgtgcttcttcttctttttcttcttctttgctgccttgctgtcttttgatgtgtgccttgccctcttgcctgtatcactctcagagtctgagctgtcagagtcagatgacttcctatctctatgtttctttttcttcttctcctgaaaagaaaattttaaaaatc

SEQ ID NO: 2144 - protein, 89 aa, Homo sapiens; identical to SEQ ID NO: 2134

SEQ ID NO: 2145 - DNA, 2481 bp, Homo sapiens
agggactcgggggccaggcactggcgctgacgcaggctagcagggcgccactggctggtccccacccacctcggtgggttgggggatgggcgcaccagcccctcctgggtgagccctagcctggggcttcctatttcgggagccgggggcgtgggccacgtctcctcatgtgatgcgagggctatttaaagcggcagcccgggcagggagccgccgtcggagcccttgcacgcctgctctcttgtagcttctctcagcctagcccagcatcactatggtggacgctttcctgggcacctggaagctagtggacagcaagaatttcgatgactacatgaagtcactcggtgtgggttttgctaccaggcaggtggccagcatgaccaagcctaccacaatcatcgaaaagaatggggacattctcaccctaaaaacacacagcaccttcaagaacacagagatcagctttaagttgggggtggagttcgatgagacaacagcagatgacaggaaggtcaagtccattgtgacactggatggagggaaacttgttcacctgcagaaatgggacgggcaagagaccacacttgagaaagaggcatgacctgactgcactgttgctgactactactctgccaatcggctacccctcgactcagcaccacattgcctcatttcttcctctgcattttgtacaaatccacgaattcttctggggtcaggtgccactgaccgggatccagttccagttcccatggtgtatgtggttttttttttttttttttaactgcactcatagggtgctctgaggtcaataaagcagagccaaggccacccagttgcctttttgcctttggtaacataactctgggagtcttggtttatcctgtgtgtcagagagtgggcagaaataacggcctgaaggttactgaggaagaagcactggatgggagactgaaatggacagtctcggagcctgttaatcagctgatcaccttacacatttaataataaaagagctgtacctacacgttgcctttacactgccccccctccatggtcaaatgacctagttcagtcagtgatggggcttccccaggtttggctattgaactgtcacttcaggcccatcctacactgaaagctcttgggtctggctgttctctgtgaaatgctgtagtctctccctttccagaattcaggttcagggcacagaacccaggcttgtaccatggtggtgggagaaaatgaccactggccaagaggactgctgacctgtgcaccaggctagtacttatgactacaaattcttactgcttctctaatcaactctgagggaagagggcatctgatcattacaaaagggagggcttataagtgatctcccaagaaggcagtgatctgctagtgcctttggctctgtacctctgctgggcatctctccaaggtctaaggtaacatattaaatgtttttgtcagctaatgcaggctcagtgactttaagtctgtaagttacccaggaagaaggattataggaaaaataactcagtaagtttaaaaccaaacacatttccatttagtgacaggaatttaagcaaggacctgaagtagaatcaactgattcacacagtagtaaatacaaagtagaacaatgatcttggcttcgctgtctggttcagtggtctgctggaatgcaatacacaagttaagtcacactgcagactgttttctagctgtggccgctggatgccacttctagcatagtagaactatgttaggaggaatgggaaaagtgagcaccacttctcaccatgttcccccctcctgctgccagtctctgctcccatgttggatgcagcagagatcacccaccagttggcccaggacagaccaataggaagggtccaatcactctaactacagccgaactcacctccacaacagtctctgtggctctagcctggactcctttacaggaatccagctctggcagtggcagctggagagggtaataggacctcctgctgaatgaaggaagttgggtgaatgaatgggtgagctgcagggttcacttgcaaagggaccaggagtgataaggaaacaacaactcattcaggcagctgcttttgacctctaactcccaaacctgcctgttgcatgaggggaagccatctcccatgggagcgaagttaatggggtgggaggctatattctcactattgagtctttccaggagtctcaaggcacaaggctcctggtttcttactctcaaccaccccctacactctttatactctcactccttgtgcttcttcttgtgcttcttcttctttttcttcttctttgctgccttgctgtcttttgatgtgtgccttgccctcttgcctgtatcactctcagagtctgagctgtcagagtcagatgacttcctatctctatgtttctttttcttcttctcctgaaaagaaaattttaaaaatc

SEQ ID NO: 2146 - protein, 109 aa, Homo sapiens; identical to SEQ ID NO: 2136

SEQ ID NO: 2147 - DNA, 2395 bp, Homo sapiens
gtgttggctttgtacttgcttcctggaacacatctggcctcagactcctgaggccaagacacactccctgccagccaccctgccatggcttgccagctctcctcacccagggacaacagtgggcatctgtccacaccaaccaggctcgtcaggtctccgggagctgcttgaatccttccacaatcttgggtgtgggttttgctaccaggcaggtggccagcatgaccaagcctaccacaatcatcgaaaagaatggggacattctcaccctaaaaacacacagcaccttcaagaacacagagatcagctttaagttgggggtggagttcgatgagacaacagcagatgacaggaaggtcaagtccattgtgacactggatggagggaaacttgttcacctgcagaaatgggacgggcaagagaccacacttgtgcgggagctaattgatggaaaactcatcctgacactcacccacggcactgcagtttgcactcgcacttatgagaaagaggcatgacctgactgcactgttgctgactactactctgccaatcggctacccctcgactcagcaccacattgcctcatttcttcctctgcattttgtacaaatccacgaattcttctggggtcaggtgccactgaccgggatccagttccagttcccatggtgtatgtggttttttttttttttttttaactgcactcatagggtgctctgaggtcaataaagcagagccaaggccacccagttgcctttttgcctttggtaacataactctgggagtcttggtttatcctgtgtgtcagagagtgggcagaaataacggcctgaaggttactgaggaagaagcactggatgggagactgaaatggacagtctcggagcctgttaatcagctgatcaccttacacatttaataataaaagagctgtacctacacgttgcctttacactgccccccctccatggtcaaatgacctagttcagtcagtgatggggcttccccaggtttggctattgaactgtcacttcaggcccatcctacactgaaagctcttgggtctggctgttctctgtgaaatgctgtagtctctccctttccagaattcaggttcagggcacagaacccaggcttgtaccatggtggtgggagaaaatgaccactggccaagaggactgctgacctgtgcaccaggctagtacttatgactacaaattcttactgcttctctaatcaactctgagggaagagggcatctgatcattacaaaagggagggcttataagtgatctcccaagaaggcagtgatctgctagtgcctttggctctgtacctctgctgggcatctctccaaggtctaaggtaacatattaaatgtttttgtcagctaatgcaggctcagtgactttaagtctgtaagttacccaggaagaaggattataggaaaaataactcagtaagtttaaaaccaaacacatttccatttagtgacaggaatttaagcaaggacctgaagtagaatcaactgattcacacagtagtaaatacaaagtagaacaatgatcttggcttcgctgtctggttcagtggtctgctggaatgcaatacacaagttaagtcacactgcagactgttttctagctgtggccgctggatgccacttctagcatagtagaactatgttaggaggaatgggaaaagtgagcaccacttctcaccatgttcccccctcctgctgccagtctctgctcccatgttggatgcagcagagatcacccaccagttggcccaggacagaccaataggaagggtccaatcactctaactacagccgaactcacctccacaacagtctctgtggctctagcctggactcctttacaggaatccagctctggcagtggcagctggagagggtaataggacctcctgctgaatgaaggaagttgggtgaatgaatgggtgagctgcagggttcacttgcaaagggaccaggagtgataaggaaacaacaactcattcaggcagctgcttttgacctctaactcccaaacctgcctgttgcatgaggggaagccatctcccatgggagcgaagttaatggggtgggaggctatattctcactattgagtctttccaggagtctcaaggcacaaggctcctggtttcttactctcaaccaccccctacactctttatactctcactccttgtgcttcttcttgtgcttcttcttctttttcttcttctttgctgccttgctgtcttttgatgtgtgccttgccctcttgcctgtatcactctcagagtctgagctgtcagagtcagatgacttcctatctctatgtttctttttcttcttctcctgaaaagaaaattttaaaaatc

SEQ ID NO: 2148 - protein, 98 aa, Homo sapiens [sequence omitted]

SEQ ID NO: 2149 - DNA, 745 bp, Homo sapiens
ccttgcacgcctgctctcttgtagcttctctcagcctagcccagcatcactatggtggacgctttcctgggcacctggaagctagtggacagcaagaatttcgatgactacatgaagtcactcgctcatatactcataaccttccccctaccctcaggtgtgggttttgctaccaggcaggtggccagcatgaccaagcctaccacaatcatcgaaaagaatggggacattctcaccctaaaaacacacagcaccttcaagaacacagagatcagctttaagttgggggtggagttcgatgagacaacagcagatgacaggaaggtcaagtccattgtgacactggatggagggaaacttgttcacctgcagaaatgggacgggcaagagaccacacttgtgcgggagctaattgatggaaaactcatcctgacactcacccacggcactgcagtttgcactcgcacttatgagaaagaggcatgacctgactgcactgttgctgactactactctgccaatcggctacccctcgactcagcaccacattgcctcatttcttcctctgcattttgtacaaatccacgaattcttctggggtcaggtgccactgaccgggatccagttccagttcccatggtgtatgtggttttttttttttttttttaactgcactcatagggtgctctgaggtcaataaagcagagccaaggccacccagttgcctttttgcctttggtaacat

SEQ ID NO: 2150 - protein, 144 aa, Homo sapiens; identical to SEQ ID NO: 2130

SEQ ID NO: 2151 - DNA, 740 bp, Homo sapiens
agcccgggcagggagccgccgtcggagcccttgcacgcctgctctcttgtagcttctctcagcctagcccagcatcactatggtggacgctttcctgggcacctggaagctagtggacagcaagaatttcgatgactacatgaagtcactcggtgtgggttttgctaccaggcaggtggccagcatgaccaagcctaccacaatcatcgaaaagaatggggacattctcaccctaaaaacacacagcaccttcaagaacacagagatcagctttaagttgggggtggagttcgatgagacaacagcagatgacaggaaggtcaagtccattgtgacactggatggagggaaacttgttcacctgcagaaatgggacgggcaagagaccacacttgtgcgggagctaattgatggaaaactcatcctgacactcacccacggcactgcagtttgcactcgcacttatgagaaagaggcatgacctgactgcactgttgctgactactactctgccaatcggctacccctcgactcagcaccacattgcctcatttcttcctctgcattttgtacaaatccacgaattcttctggggtcaggtgccactgaccgggatccagttccagttcccatggtgtatgtggttttttttttttttttttaactgcactcatagggtgctctgaggtcaataaagcagagccaaggccacccagttgcctttttgcctttggtaacat

SEQ ID NO: 2152 - protein, 133 aa, Homo sapiens [sequence omitted]

SEQ ID NO: 2153 - DNA, 807 bp, Homo sapiens
agcccgggcagggagccgccgtcggagcccttgcacgcctgctctcttgtagcttctctcagcctagcccagcatcactatggtggacgctttcctgggcacctggaagctagtggacagcaagaatttcgatgactacatgaagtcactcggtgtgggttttgctaccaggcaggtggccagcatgaccaagcctaccacaatcatcgaaaagaatggggacattctcaccctaaaaacacacagcaccttcaagaacacagagatcagctttaagttgggggtggagttcgatgagacaacagcagatgacaggaaggtcaagcacagagccaggatgttcttctgacctcagtatctactccagctccagctgggtgaccctgtgcaagtccattgtgacactggatggagggaaacttgttcacctgcagaaatgggacgggcaagagaccacacttgtgcgggagctaattgatggaaaactcatcctgacactcacccacggcactgcagtttgcactcgcacttatgagaaagaggcatgacctgactgcactgttgctgactactactctgccaatcggctacccctcgactcagcaccacattgcctcatttcttcctctgcattttgtacaaatccacgaattcttctggggtcaggtgccactgaccgggatccagttccagttcccatggtgtatgtggttttttttttttttttttaactgcactcatagggtgctctgaggtcaataaagcagagccaaggccacccagttgcctttttgcctttggtaacat

SEQ ID NO: 2154 - protein, 89 aa, Homo sapiens; identical to SEQ ID NO: 2134

SEQ ID NO: 2155 - DNA, 501 bp, Homo sapiens
ctgggactataggcacacgccaccacacctggcctcattggacttttaaagcaaaatccatgaagtaggtgttactgtattattttctctttttaaaaaggtgaacaagttgaagctctgaggagctcactcattaattcagcagttaataaagcacctactttgtgccaggccctgctttggagagagacaacagggaacaagacacacattcacctctgggcagccagacataaaactagcgtggtgcctctaaagggagtcctgtcctgtcctgacctgagggcccaatgtagacttctcaaaggaagtgagatccagatgtggatataacatctggcaggcagcaagaccagcgcctgccaagaacagcatctccccagccctcatcctatggtgaggtcactgttctatgtttccacggcaaccacaggctgggaagatggagaagaggagagatgagtaaccagaagccagccaatgagatgagctgcagcaccg

SEQ ID NO: 2156 - protein, 38 aa, Homo sapiens
GPNVDFSKEVRSRCGYNIWQAARPAPAKNSISPALILW

SEQ ID NO: 2157 - DNA, 2149 bp, Homo sapiens
tactttagcctttgctctgaaatcccatgcacgctttgtgaggaaggacagccttggttggggggtgtttatggggagagcagagtggatggtgcgtatgtgaatacctctccccagatgctcccccaatcccaagctctcattatcttatatgcatattcataagggatggccctgctctgtaaatgggtcagaagcaggaaatagaggccagtacagacagcgaagcccaagggataggagggctcaaagccggcacacatctgagtcctcatggacgggaggatgatgagaagcatgaggctgagagaggaggagtcacccggacccagccacacagcgtcctgcctctgcggctctgccccctgcatcctgtgcagctgctgccccgccagccgcaactccaccgtgagccgcctcatcttcacgttcttcctcttcctgggggtgctggtgtccatcattatgctgagcccgggcgtggagagtcagctctacaagctgccctgggtgtgtgaggagggggccgggatccccaccgtcctgcagggccacatcgactgtggctccctgcttggctaccgcgctgtctaccgcatgtgcttcgccacggcggccttcttcttctttttcaccctgctcatgctctgcgtgagcagcagccgggacccccgggctgccatccagaatgggttttggttctttaagttcctgatcctggtgggcctcaccgtgggtgccttctacattcctgacggctccttcaccaacatctggttctacttcggcgtcgtgggctccttcctcttcatcctcatccagctggtgctgctcatcgactttgcgcactcctggaaccagcggtggctgggcaaggccgaggagtgcgattcccgtgcctggtacgcaggcctcttcttcttcactctcctcttctacttgctgtcgatcgcggccgtggcgctgatgttcatgtactacactgagcccagcggctgccacgagggcaaggtcttcatcagcctcaacctcaccttctgtgtctgcgtgtccatcgctgctgtcctgcccaaggtccaggacgcccagcccaactcgggtctgctgcaggcctcggtcatcaccctctacaccatgtttgtcacctggtcagccctatccagtatccctgaacagaaatgcaacccccatttgccaacccagctgggcaacgagacagttgtggcaggccccgagggctatgagacccagtggtgggatgccccgagcattgtgggcctcatcatcttcctcctgtgcaccctcttcatcagtctgcgctcctcagaccaccggcaggtgaacagcctgatgcagaccgaggagtgcccacctatgctagacgccacacagcagcagcagcaggtggcagcctgtgagggccgggcctttgacaacgagcaggacggcgtcacctacagctactccttcttccacttctgcctggtgctggcctcactgcacgtcatgatgacgctcaccaactggtacaagcccggtgagacccggaagatgatcagcacgtggaccgccgtgtgggtgaagatctgtgccagctgggcagggctgctcctctacctgtggaccctggtagccccactcctcctgcgcaaccgcgacttcagctgaggcagcctcacagcctgccatctggtgcctcctgccacctggtgcctctcggctcagtgacagccaacctgccccctccccacaccaatcagccaggctgagcccccacccctgccccagctccaggacctgcccctgagccgggccttctagtcgtagtgccttcagggtccgaggagcatcaggctcctgcagagccccatccccccgccacacccacacggtggagctgcctcttccttcccctcctccctgttgcccatactcagcatctcggatgaaagggctcccttgtcctcaggctccacgggagcggggctgctggagagagcggggaactcccaccacagtggggcatccggcactgaagccctggtgttcctggtcacgtcccccaggggaccctgcccacttcctggacttcgtgccttactgagtctctaagactttttctaataaacaagccagtgcgtgtaccatg

SEQ ID NO: 2158 - protein, 464 aa, Homo sapiens
MDGRMMRSMRLREEESPGPSHTASCLCGSAPCILCSCCPASRNSTVSRLIFTFFLFLGVLVSIIMLSPGVESQLYKLPWVCEEGAGIPTVLQGHIDCGSLLGYRAVYRMCFATAAFFFFFTLLMLCVSSSRDPRAAIQNGFWFFKFLILVGLTVGAFYIPDGSFTNIWFYFGVVGSFLFILIQLVLLIDFAHSWNQRWLGKAEECDSRAWYAGLFFFTLLFYLLSIAAVALMFMYYTEPSGCHEGKVFISLNLTFCVCVSIAAVLPKVQDAQPNSGLLQASVITLYTMFVTWSALSSIPEQKCNPHLPTQLGNETVVAGPEGYETQWWDAPSIVGLIIFLLCTLFISLRSSDHRQVNSLMQTEECPPMLDATQQQQQVAACEGRAFDNEQDGVTYSYSFFHFCLVLASLHVMMTLTNWYKPGETRKMISTWTAVWVKICASWAGLLLYLWTLVAPLLLRNRDFS

SEQ ID NO: 2159 - DNA, 1999 bp, Homo sapiens
cgagcgccgccggaaagcgtcgagcggcttcggtaggtggggcggggccggggcggggccggggccggggaggggccaggcccggcacccggatcccgaggtccgcgccccgcgcccggcgccgggcgcccgaagccgggagccgccgccatgggggcctgcctgggagcctgctccctgctcagctgcgcgtcctgcctctgcggctctgccccctgcatcctgtgcagctgctgccccgccagccgcaactccaccgtgagccgcctcatcttcacgttcttcctcttcctgggggtgctggtgtccatcattatgctgagcccgggcgtggagagtcagctctacaagctgccctgggtgtgtgaggagggggccgggatccccaccgtcctgcagggccacatcgactgtggctccctgcttggctaccgcgctgtctaccgcatgtgcttcgccacggcggccttcttcttctttttcaccctgctcatgctctgcgtgagcagcagccgggacccccgggctgccatccagaatgggttttggttctttaagttcctgatcctggtgggcctcaccgtgggtgccttctacattcctgacggctccttcaccaacatctggttctacttcggcgtcgtgggctccttcctcttcatcctcatccagctggtgctgctcatcgactttgcgcactcctggaaccagcggtggctgggcaaggccgaggagtgcgattcccgtgcctggtacgcaggcctcttcttcttcactctcctcttctacttgctgtcgatcgcggccgtggcgctgatgttcatgtactacactgagcccagcggctgccacgagggcaaggtcttcatcagcctcaacctcaccttctgtgtctgcgtgtccatcgctgctgtcctgcccaaggtccaggacgcccagcccaactcgggtctgctgcaggcctcggtcatcaccctctacaccatgtttgtcacctggtcagccctatccagtatccctgaacagaaatgcaacccccatttgccaacccagctgggcaacgagacagttgtggcaggccccgagggctatgagacccagtggtgggatgccccgagcattgtgggcctcatcatcttcctcctgtgcaccctcttcatcagtctgcgctcctcagaccaccggcaggtgaacagcctgatgcagaccgaggagtgcccacctatgctagacgccacacagcagcagcagcaggtggcagcctgtgagggccgggcctttgacaacgagcaggacggcgtcacctacagctactccttcttccacttctgcctggtgctggcctcactgcacgtcatgatgacgctcaccaactggtacaagcccggtgagacccggaagatgatcagcacgtggaccgccgtgtgggtgaagatctgtgccagctgggcagggctgctcctctacctgtggaccctggtagccccactcctcctgcgcaaccgcgacttcagctgaggcagcctcacagcctgccatctggtgcctcctgccacctggtgcctctcggctcagtgacagccaacctgccccctccccacaccaatcagccaggctgagcccccacccctgccccagctccaggacctgcccctgagccgggccttctagtcgtagtgccttcagggtccgaggagcatcaggctcctgcagagccccatccccccgccacacccacacggtggagctgcctcttccttcccctcctccctgttgcccatactcagcatctcggatgaaagggctcccttgtcctcaggctccacgggagcggggctgctggagagagcggggaactcccaccacagtggggcatccggcactgaagccctggtgttcctggtcacgtcccccaggggaccctgcccacttcctggacttcgtgccttactgagtctctaagactttttctaataaacaagccagtgcgtgtaccatg

SEQ ID NO: 2160 - protein, 455 aa, Homo sapiens; identical to SEQ ID NO: 56

SEQ ID NO: 2161 - DNA, 1623 bp, Homo sapiens
acccggatcccgaggtccgcgccccgcgcccggcgccgggcgcccgaagccgggagccgccgccatgggggcctgcctgggagcctgctccctgctcagctgcgcgtcctgcctctgcggctctgccccctgcatcctgtgcagctgctgccccgccagccgcaactccaccgtgagccgcctcatcttcacgttcttcctcttcctgggggtgctggtgtccatcattatgctgagcccgggcgtggagagtcagctctacaagctgccctgggtgtgtgaggagggggccgggatccccaccgtcctgcagggccacatcgactgtggctccctgcttggctaccgcgctgtctaccgcatgtgcttcgccacggcggccttcttcttctttttcaccctgctcatgctctgcgtgagcagcagccgggacccccgggctgccatccagaatgggttttggttctttaagttcctgatcctggtgggcctcaccgtgggtgccttctacattcctgacggctccttcaccaacatctggttctacttcggcgtcgtgggctccttcctcttcatcctcatccagctggtgctgctcatcgactttgcgcactcctggaaccagcggtggctgggcaaggccgaggagtgcgattcccgtgcctggtacgcaggcctcttcttcttcactctcctcttctacttgctgtcgatcgcggccgtggcgctgatgttcatgtactacactgagcccagcggctgccacgagggcaaggtcttcatcagcctcaacctcaccttctgtgtctgcgtgtccatcgctgctgtcctgcccaaggtccaggacgcccagcccaactcgggtctgctgcaggcctcggtcatcaccctctacaccatgtttgtcacctggtcagccctatccagtatccctgaacagaaatgcaacccccatttgccaacccagctgggcaacgagacagttgtggcaggccccgagggctatgagacccagtggtgggatgccccgagcattgtgggcctcatcatcttcctcctgtgcaccctcttcatcagggctgctcctctacctgtggaccctggtagccccactcctcctgcgcaaccgcgacttcagctgaggcagcctcacagcctgccatctggtgcctcctgccacctggtgcctctcggctcagtgacagccaacctgccccctccccacaccaatcagccaggctgagcccccacccctgccccagctccaggacctgcccctgagccgggccttctagtcgtagtgccttcagggtccgaggagcatcaggctcctgcagagccccatccccccgccacacccacacggtggagctgcctcttccttcccctcctccctgttgcccatactcagcatctcggatgaaagggctcccttgtcctcaggctccacgggagcggggctgctggagagagcggggaactcccaccacagtggggcatccggcactgaagccctggtgttcctggtcacgtcccccaggggaccctgcccacttcctggacttcgtgccttactgagtctctaagactttttctaataaacaagccagtgcgtgtaccatg

SEQ ID NO: 2162 - protein, 392 aa, Homo sapiens
MGACLGACSLLSCASCLCGSAPCILCSCCPASRNSTVSRLIFTFFLFLGVLVSIIMLSPGVESQLYKLPWVCEEGAGIPTVLQGHIDCGSLLGYRAVYRMCFATAAFFFFFTLLMLCVSSSRDPRAAIQNGFWFFKFLILVGLTVGAFYIPDGSFTNIWFYFGVVGSFLFILIQLVLLIDFAHSWNQRWLGKAEECDSRAWYAGLFFFTLLFYLLSIAAVALMFMYYTEPSGCHEGKVFISLNLTFCVCVSIAAVLPKVQDAQPNSGLLQASVITLYTMFVTWSALSSIPEQKCNPHLPTQLGNETVVAGPEGYETQWWDAPSIVGLIIFLLCTLFIRAAPLPVDPGSPTPPAQPRLQLRQPHSLPSGASCHLVPLGSVTANLPPPHTNQPG

SEQ ID NO: 2163 - DNA, 2812 bp, Homo sapiens
tcgtatttgtctggttcctgtctgtgtccgtcgttcgtccgactgtctttgtccgtctgctgtcttctgtccgtctgcccgtccgcccgtccgtccctcagtctctctgcggtccctttaccgtcctcagtctggctcgcgctgcctctcaggcacttccccagctcgccccggatcatctgggccccagcgcggagactgggatgggagcggagggagccccggactttcttagctgccctcgagtgaggcgggtgcgggtcgtcacggaccaccgggcggaactctgggttgggagagcaggaatcgagggaggttcgggtgtgcgcggggagtgcccggtcgcgggttcgggacctgtggggaggccaacctctgttctgtagctgcagccgcagaggggaggggctccagcaagaccccggctgggaggcccgttctcccttccctttccccagcccccctctcctttcctcttcccctcattaaatctgaggttcattcaggcagccccctccccctctggccccacacaaagaggccctgagagggagaaggggctgcagcggctgctgaatctcgggactcgctttcctttgtccctgacgggttgtgtgtgtgtgtgtgtgtgtgtgtgtgtgtgtgagagagagagagagagagaggagggggtgtaggggagagctgagggtctagagatttactttacagcctttttctgagaatgagatcagcatagacagcacagagaggcaagagagcctctcgcctcattaggcctccatttttcgtgtgtgtgtgtgcgtgtgcatgtgcgtgtgcaggaggaggaatcaagctggtgcctgaaatccctcccagcccaaagaattcaaggtttgggccaggtctctgccaacaagggtttgcttcctggtgagggaggcagagcttccacagtggacctgatttccatcggttgcacctgcattggaactgggctgaaggtgaactgggctgaaggcgtcctgcctctgcggctctgccccctgcatcctgtgcagctgctgccccgccagccgcaactccaccgtgagccgcctcatcttcacgttcttcctcttcctgggggtgctggtgtccatcattatgctgagcccgggcgtggagagtcagctctacaagctgccctgggtgtgtgaggagggggccgggatccccaccgtcctgcagggccacatcgactgtggctccctgcttggctaccgcgctgtctaccgcatgtgcttcgccacggcggccttcttcttctttttcaccctgctcatgctctgcgtgagcagcagccgggacccccgggctgccatccagaatgggttttggttctttaagttcctgatcctggtgggcctcaccgtgggtgccttctacattcctgacggctccttcaccaacatctggttctacttcggcgtcgtgggctccttcctcttcatcctcatccagctggtgctgctcatcgactttgcgcactcctggaaccagcggtggctgggcaaggccgaggagtgcgattcccgtgcctggtacgcaggcctcttcttcttcactctcctcttctacttgctgtcgatcgcggccgtggcgctgatgttcatgtactacactgagcccagcggctgccacgagggcaaggtcttcatcagcctcaacctcaccttctgtgtctgcgtgtccatcgctgctgtcctgcccaaggtccaggacgcccagcccaactcgggtctgctgcaggcctcggtcatcaccctctacaccatgtttgtcacctggtcagccctatccagtatccctgaacagaaatgcaacccccatttgccaacccagctgggcaacgagacagttgtggcaggccccgagggctatgagacccagtggtgggatgccccgagcattgtgggcctcatcatcttcctcctgtgcaccctcttcatcagtctgcgctcctcagaccaccggcaggtgaacagcctgatgcagaccgaggagtgcccacctatgctagacgccacacagcagcagcagcaggtggcagcctgtgagggccgggcctttgacaacgagcaggacggcgtcacctacagctactccttcttccacttctgcctggtgctggcctcactgcacgtcatgatgacgctcaccaactggtacaagcccggtgagacccggaagatgatcagcacgtggaccgccgtgtgggtgaagatctgtgccagctgggcagggctgctcctctacctgtggaccctggtagccccactcctcctgcgcaaccgcgacttcagctgaggcagcctcacagcctgccatctggtgcctcctgccacctggtgcctctcggctcagtgacagccaacctgccccctccccacaccaatcagccaggctgagcccccacccctgccccagctccaggacctgcccctgagccgggccttctagtcgtagtgccttcagggtccgaggagcatcaggctcctgcagagccccatccccccgccacacccacacggtggagctgcctcttccttcccctcctccctgttgcccatactcagcatctcggatgaaagggctcccttgtcctcaggctccacgggagcggggctgctggagagagcggggaactcccaccacagtggggcatccggcactgaagccctggtgttcctggtcacgtcccccaggggaccctgcccacttcctggacttcgtgccttactgagtctctaagactttttctaataaacaagccagtgcgtgtaccatg

SEQ ID NO: 2164 - protein, 400 aa, Homo sapiens
MLSPGVESQLYKLPWVCEEGAGIPTVLQGHIDCGSLLGYRAVYRMCFATAAFFFFFTLLMLCVSSSRDPRAAIQNGFWFFKFLILVGLTVGAFYIPDGSFTNIWFYFGVVGSFLFILIQLVLLIDFAHSWNQRWLGKAEECDSRAWYAGLFFFTLLFYLLSIAAVALMFMYYTEPSGCHEGKVFISLNLTFCVCVSIAAVLPKVQDAQPNSGLLQASVITLYTMFVTWSALSSIPEQKCNPHLPTQLGNETVVAGPEGYETQWWDAPSIVGLIIFLLCTLFISLRSSDHRQVNSLMQTEECPPMLDATQQQQQVAACEGRAFDNEQDGVTYSYSFFHFCLVLASLHVMMTLTNWYKPGETRKMISTWTAVWVKICASWAGLLLYLWTLVAPLLLRNRDFS

SEQ ID NO: 2165 - DNA, 2055 bp, Homo sapiens
gggaggcagagcttccacagtggacctgatttccatcggttgcacctggtgaggcacaggccctgctgggctggcctgggggtggagatgttgaggggcagcctgccagccctgtgtgccttggtcaccccatctggcagttgacagtaacagggcctttctcacaatgctgttgggagatgaggcacagttcctggcatatcgtgagtgctccttgtgggaattattgctaacatcaaggaaaggcgtcctgcctctgcggctctgccccctgcatcctgtgcagctgctgccccgccagccgcaactccaccgtgagccgcctcatcttcacgttcttcctcttcctgggggtgctggtgtccatcattatgctgagcccgggcgtggagagtcagctctacaagctgccctgggtgtgtgaggagggggccgggatccccaccgtcctgcagggccacatcgactgtggctccctgcttggctaccgcgctgtctaccgcatgtgcttcgccacggcggccttcttcttctttttcaccctgctcatgctctgcgtgagcagcagccgggacccccgggctgccatccagaatgggttttggttctttaagttcctgatcctggtgggcctcaccgtgggtgccttctacattcctgacggctccttcaccaacatctggttctacttcggcgtcgtgggctccttcctcttcatcctcatccagctggtgctgctcatcgactttgcgcactcctggaaccagcggtggctgggcaaggccgaggagtgcgattcccgtgcctggtacgcaggcctcttcttcttcactctcctcttctacttgctgtcgatcgcggccgtggcgctgatgttcatgtactacactgagcccagcggctgccacgagggcaaggtcttcatcagcctcaacctcaccttctgtgtctgcgtgtccatcgctgctgtcctgcccaaggtccaggacgcccagcccaactcgggtctgctgcaggcctcggtcatcaccctctacaccatgtttgtcacctggtcagccctatccagtatccctgaacagaaatgcaacccccatttgccaacccagctgggcaacgagacagttgtggcaggccccgagggctatgagacccagtggtgggatgccccgagcattgtgggcctcatcatcttcctcctgtgcaccctcttcatcagtctgcgctcctcagaccaccggcaggtgaacagcctgatgcagaccgaggagtgcccacctatgctagacgccacacagcagcagcagcaggtggcagcctgtgagggccgggcctttgacaacgagcaggacggcgtcacctacagctactccttcttccacttctgcctggtgctggcctcactgcacgtcatgatgacgctcaccaactggtacaagcccggtgagacccggaagatgatcagcacgtggaccgccgtgtgggtgaagatctgtgccagctgggcagggctgctcctctacctgtggaccctggtagccccactcctcctgcgcaaccgcgacttcagctgaggcagcctcacagcctgccatctggtgcctcctgccacctggtgcctctcggctcagtgacagccaacctgccccctccccacaccaatcagccaggctgagcccccacccctgccccagctccaggacctgcccctgagccgggccttctagtcgtagtgccttcagggtccgaggagcatcaggctcctgcagagccccatccccccgccacacccacacggtggagctgcctcttccttcccctcctccctgttgcccatactcagcatctcggatgaaagggctcccttgtcctcaggctccacgggagcggggctgctggagagagcggggaactcccaccacagtggggcatccggcactgaagccctggtgttcctggtcacgtcccccaggggaccctgcccacttcctggacttcgtgccttactgagtctctaagactttttctaataaacaagccagtgcgtgtaccatg

SEQ ID NO: 2166 - protein, 400 aa, Homo sapiens; identical to SEQ ID NO: 2164

SEQ ID NO: 2167 - DNA, 2111 bp, Homo sapiens
cacttccctccccacagccccccatgcctcctgccaagtccgcctactgttggtgaaggagccgtcaggaatgtagaaggcacccacgcctcagaaactattgcgctgtctaaagcagtggttcccaaagtgttctccacccaccacctacatcagaaccatctgagatgcttgggaaaacagagattctgtggcccctctcccatggaatagagcctcaaggtggagtctgagaatctgcatttctacaaactccccagggaatctcatctttatacacactaaaatgtgtataaggcacctacggtgatgcccacgtccccctgggtctgtgctaggctgtaaaacactgagatgaagggaagagttaggagccccaacctgggcttaagcactaagagggagaagagcatcccctaggccagtgtccagggggcgataatgattaataagattttccaaggagactgtggcctaagagaaagaagaatccccccaagaggctcaagccctcctcccctcatttccaacctcagatcatcagtgcacccaaacaccctgcctcctcttctggataagctgtgaccccaagcctgggccctctatcctggagccactgacgcccctcgctggaggccgccctgcctcccctggggcactcaccttgtagagctgactctccacgcccgggctcagcataatgatggacaccagcacccccaggaagaggaagaacgtgaagatgaggcggctcacggtggagttgcggctggcggggcagcagctgcacaggatgcagggggcagagccgcagaggcaggacgcctgcgggagggcactgtcactcttccctctccccttcaccgcccaagcgcgcacctctcaccacctgcccagaggtcggcgcatctgtgctgcgctaggcaggagcacactgttccccagacaccagcccattgaactttcaggtccgagagggaggctgggtcatatagggctacacagccagtaaccacagaacccagattcaaacctgggtctatctccagtgatactgtggcttgaaagcgagagctagccgaggtcacgctgtttctttcttacagggagggagagtagtttaaaaaaaaaaatcacaaggccagctgtcaccgattaccttcgtgaccttatacaactcactcaacctctctgtgcctcagtgtcctcttctgtaacatagtggtatgtactcctcacaaagcagttgtgagagtgaaacagaaattccacattgtagcccccttgggctccctttccccttccccacttaatttttccccgcgggacttctgccatcagcgaggctttatgttttgtcggcctccgctttccagcggggcaggaatttttgcgttttgttcattgtggtattcctagaaattcgaacagtgtctgtcacacagcaggagcttacaggctatctgttgaaggaatatgaagtgtttggcatagtaccagtcacatgttaagacctcagaaaacagcaagtgcagaataaacaccagttggataaacggaatgattttcggctctgaggctataccagcactagacagcaggtggcggtctaaccctttccctctccagggtcctctgccccagttgcggtcagcccttcccctggcctggctgaaatcattcaggggctggtgatgacacactatgccacacctgaaaaggagactcaccctcctgggagcccagtccacagcccagcctttaaagaaacaggccccacatccagatacctctggtaaactttatcttcccccaaacagcccctactcctcacccagggatttaagagcctggagagcaacagacataggccttgccttcctggagcttacacaagcaggaaaaacactaaacaaatcatgactcacatcgtgacaagcgctaagaaggacacgtacccactgccagaaaagtgctaatgcagcctaggtttgattgagggtggcatgtcagggaagccctccttgaagaagtgacttttaagctgagagcaggccaggtgcagtggctcacacctgtaataccagcattttgggaggccaaggcaggag

SEQ ID NO: 2168 - protein, 103 aa, Homo sapiens
MMDTSTPRKRKNVKMRRLTVELRLAGQQLHRMQGAEPQRQDACGRALSLFPLPFTAQARTSHHLPRGRRICAALGRSTLFPRHQPIELSGPRGRLGHIGLHSQ

SEQ ID NO: 2169 - DNA, 1028 bp, Homo sapiens
ccttgttgcggtggcctcaagagtcaggaatcgagactcacctggtgtgacaaataaacctggactcagcaatgtcgaaagaaaccagccggcgacccaggggaaaggatcctcacacaccacagtgaccaggcaactctgtgcacagaccgaggaaggaaacgcctgggagccagcaaagtatttccttggtggttgggacagaccaagccatatccccaacatctagaagagggcctggtacacaggaagtgctcaagaggtatttgctggataaatactgattgctgtgtgacctgggacacagacatcgccttctctgggcttcagcttttcttactgggatatgaggctctgaccagaagggaggttcccagcctttctgctaaagacccctgaagactacctaagccccctgaagctgccggtgtgctgagatctcaaaccacaaagcaccactgtactcacaaggggctccagcggtactttctgaagaacacgcagttcctctgggagctcctgcccattattccagatggtcttggattggaaatgtgaaattgcaccttcctacactacttccagaggtgtctaggaatcaccactcagggactgcccctaatgttctactgatttgcataaaaacaaaaatgacaacaataataactacaataatagctaatgtctgagagatatctacaggccaggcatggagtgtttacaaataggatctcaatcctgagaataactccaatagtaggtcttattatctccatttaatatttgagaggcagagagaggttagggcacctcctaaagacacccagcatgaagccgtgagagcctgactataacctggggaggctgacctgggagcccacacactcaggccgtgcctctgtgatgacagccctagccccaggacccaggttcctacaagaagtcccacccactaaggggccgggcttcaggccagggggggtcaggcaggctcacctggaccttgggcaggacagcagcgatggaca

SEQ ID NO: 2170 - protein, 40 aa, Homo sapiens
MTALAPGPRFLQEVPPTKGPGFRPGGVRQAHLDLGQDSSD

SEQ ID NO: 2171 - DNA, 929 bp, Homo sapiens
attgtggtcatttagtgtcacaaatttggtcatttggttaaagttaaaattgagagtaggaggtcataaagccaggattgaagtggcaaggtcaaggagctaaatgacagtaataaggtcaggggccacccctaagttacaggatcaaaggtcagaatcaagggtagcggtcaggactaaggtcaggagctccagggtcccaagttcagaggctaggattgaggtcccagaattaggatcacaaggttggagaccaggagtcaggtcatgatctcatggactaacactgggctcaagatgggaatcgaggtcaggagctatgtccacggtcacaaggccgggtgttaaaaatgtcagagatggactggagttacagggtaagagccagagttgaagtcaggggtcataactgggacataaggccaggggccaagatggaagtcaccagactgggcaccaggctcatggggaagatggtgtgttccaggcccggtgagacccggaagatgatcagcacgtggaccgccgtgtgggtgaagatctgtgccagctgggcagggctgctcctctacctgtggaccctggtagccccactcctcctgcgcaaccgcgacttcagctgaggcagcctcacagcctgccatctggtgcctccccgccacacccacacggtggagctgcctcttccttcccctcctccctgttgcccatactcagcatctcggatgaaagggctcccttgtcctcaggctccacgggagcggggctgctggagagagcggggaactcccaccacagtggggcatccggcactgaagccctggtgttcctggtcacgtcccccaggggaccctgcccacttcctggacttcgtgccttactgagtctctaagactttttctaataaacaagccagtgcgtgtaccatg

SEQ ID NO: 2172 - protein, 90 aa, Homo sapiens [sequence omitted]

SEQ ID NO: 2173 - DNA, 799 bp, Homo sapiens
attgtggtcatttagtgtcacaaatttggtcatttggttaaagttaaaattgagagtaggaggtcataaagccaggattgaagtggcaaggtcaaggagctaaatgacagtaataaggtcaggggccacccctaagttacaggatcaaaggtcagaatcaagggtagcggtcaggactaaggtcaggagctccagggtcccaagttcagaggctaggattgaggtcccagaattaggatcacaaggttggagaccaggagtcaggtcatgatctcatggactaacactgggctcaagatgggaatcgaggtcaggagctatgtccacggtcacaaggccgggtgttaaaaatgtcagagatggactggagttacagggtaagagccagagttgaagtcaggggtcataactgggacataaggccaggggccaagatggaagtcaccagactgggcaccaggctcatggggaagatggtgtgttccaggcccggtgagacccggaagatgatcagcacgtggaccgccgtgtgggtgaagatctgtgccagctgggcagggctgctcctctacctgtggaccctggtagccccactcctcctgcgcaaccgcgacttcagctgaggcagcctcacagctgctggagagagcggggaactcccaccacagtggggcatccggcactgaagccctggtgttcctggtcacgtcccccaggggaccctgcccacttcctggacttcgtgccttactgagtctctaagactttttctaataaacaagccagtgcgtgtaccatg

SEQ ID NO: 2174 - protein, 90 aa, Homo sapiens [sequence omitted]

SEQ ID NO: 2175 - DNA, 443 bp, Homo sapiens
gaagatgatcagcacgtggaccgccgtgtgggtgaagatctgtgccagctgggcagggctgctcctctacctgtggaccctggtagccccactcctcctgcgcaaccgcgacttcagctgaggcagcctcacagcctgccatctggtgcctcctgccacctggtgcctctcggctcagtgacagccaacctctgcctcttccttcccctcctccctgttgcccatactcagcatctcggatgaaagggctcccttgtcctcaggctccacgggagcggggctgctggagagagcggggaactcccaccacagtggggcatccggcactgaagccctggtgttcctggtcacgtcccccaggggaccctgcccacttcctggacttcgtgccttactgagtctctaagactttttctaataaacaagccagtgcgtgtaccatg

SEQ ID NO: 2176 - protein, 52 aa, Homo sapiens
MKGLPCPQAPRERGCWRERGTPTTVGHPALKPWCSWSRPPGDPAHFLDFVPY

SEQ ID NO: 2177 - DNA, 508 bp, Homo sapiens
tgcacaagtttggggaggaatcataactgatgcattctgtcaccttccactccctggggactggcagagagcagacatctgtaaatgtttgctgttgttgaagtacattggaacatgcccccgaaccaccaggatccaggatctgctgagcagccagagggcgtttaagtcagtgccactgacttgcagtgtggccctgggcaaggggtagaactcttctggcctggcttttctcattagtaaaataaggggtagttttaggcaatttgacagctaacgtctgtttcctgtcttggcccaatggcccttaggagctctggtccaggtcctcacagaagaagagtctgtggtggtctctttgagaatgcctctttccctctggtctcaatggcctactactggcccaagtgccctcccaccacacacacacacacacacacacacagattcacacacacatgcatgcatgcacatatgcacacacgtgcacatagcatgtgtacacaca

SEQ ID NO: 2178 - protein, 68 aa, Homo sapiens
MALRSSGPGPHRRRVCGGLFENASFPLVSMAYYWPKCPPTTHTHTHTHRFTHTCMHAHMHTRAHSMCT

SEQ ID NO: 2179 - DNA, 1476 bp, Homo sapiens
acatatctctcaccatgtcacatgcactggctctgctagcttccacctgggctccaactgccagacccccccagagcttcacacaagctatcgctgactgccggtgcatgttggaaatgggccacagggctgggcatgatatgagctgcctggacattggagggggcttccccggaatggagggctccgggcccaagtttgaggagggataattctaatgcctacctgcagggtgcctcggggatgaaaggactgatgcaggtaaggcgttggcacaggcgctggcacatcaacacgtgctggatgagttaacctcttcctgctgtccctccaccccattccagttggcgagagtgatcagtgctgccctggcccaggacctccctgaggagcgtggtgtcaaggtcatcgcagagcctggctgcttctatgtggagtctgtctgcatggccgctgtcaacatcattgccaagagggctgtgctggagcccggtgggtgggccaggatggcactgggtggggatgccactgtccaggtgtccccaggccctggaggagaggaagggcagagggttgggctctgtcccaggagctgggggtcagagtagtgactgagcactccccaggaggcagccggaagctggtgtattatctcaaagatggccactatggctccttccgcctctgctaccgagagcctgtcccaagggttcccatcgtggtgaaggtaagggggccactccagccccgagtctagtcccttaccttgaggtgccttgtgcctcccctactgggaacagtggctgtgctggaccccagaggcaggtcctggcctgctgcttagaacacatgtggacacgtacatgatgtgtgctcacagatcagagcgtgtgcagcagctggatatgtaggcctcctcaggcaaaggggcgatcaccagaacacaaaggcgtgggttgttttccaaaatattgaagttcttctccctggtggcttaagagccattccttcttcctggtggttaaagagctattcccccgagtccaccaggggcctccctgccgacactcttgctgctcagtccctcccacgatctggcaacaaagcttcaatacctgaccctgtagggccaacaggatcttcctccagctctgcagcagttgtctcctaatgtgatgggttggtgtccgggccacactgctttgtaaatatcttgactgtttctcccggccagtgaacgtcttggtgtgtgcacacatttggtcatgtatgtgacgtgtgtttgcatgcatgtgcgagtgtgtacgtgtgtgaagtgtttctgggtgtgtgtcttcgtgtgtgtatttgcctctcttctcatcggaaggagtgagttctggatgtggaggaaccagtaggagaccctgtgtttgtttggttcccacaatagttttcaattttagttgcccatattaaaaaatctagacatatttc

SEQ ID NO: 2180 - protein, 65 aa, Homo sapiens
MSHALALLASTWAPTARPPQSFTQAIADCRCMLEMGHRAGHDMSCLDIGGGFPGMEGSGPKFEEG

SEQ ID NO: 2181 - DNA, 1190 bp, Homo sapiens
atgtcacatgcactggctctgctagcttccacctgggctccaactgccagacccccccagagcttcacacaagctatcgctgactgccggtgcatgttggaaatgggccacagggctgggcatgatatgagctgcctggacattggagggggcttccccggaatggagggctccgggcccaagtttgaggagttggcgagagtgatcagtgctgccctggcccaggacctccctgaggagcgtggtgtcaaggtcatcgcagagcctggctgcttctatgtggagtctgtctgcatggccgctgtcaacatcattgccaagagggctgtgctggagcccggaggcagccggaagctggtgtattatctcaaagatggccactatggctccttccgcctctgctaccgagagcctgtcccaagggttcccatcgtggtgaaggtaagggggccactccagccccgagtctagtcccttaccttgaggtgccttgtgcctcccctactgggaacagtggctgtgctggaccccagaggcaggtcctggcctgctgcttagaacacatgtggacacgtacatgatgtgtgctcacagatcagagcgtgtgcagcagctggatatgtaggcctcctcaggcaaaggggcgatcaccagaacacaaaggcgtgggttgttttccaaaatattgaagttcttctccctggtggcttaagagccattccttcttcctggtggttaaagagctattcccccgagtccaccaggggcctccctgccgacactcttgctgctcagtccctcccacgatctggcaacaaagcttcaatacctgaccctgtagggccaacaggatcttcctccagctctgcagcagttgtctcctaatgtgatgggttggtgtccgggccacactgctttgtaaatatcttgactgtttctcccggccagtgaacgtcttggtgtgtgcacacatttggtcatgtatgtgacgtgtgtttgcatgcatgtgcgagtgtgtacgtgtgtgaagtgtttctgggtgtgtgtcttcgtgtgtgtatttgcctctcttctcatcggaaggagtgagttctggatgtggaggaaccagtaggagaccctgtgtttgtttggttcccacaatagttttcaattttagttgcccatattaaaaaatctagacatatttc

SEQ ID NO: 2182 - protein, 156 aa, Homo sapiens
MSHALALLASTWAPTARPPQSFTQAIADCRCMLEMGHRAGHDMSCLDIGGGFPGMEGSGPKFEELARVISAALAQDLPEERGVKVIAEPGCFYVESVCMAAVNIIAKRAVLEPGGSRKLVYYLKDGHYGSFRLCYREPVPRVPIVVKVRGPLQPRV

SEQ ID NO: 2183 - DNA, 1131 bp, Homo sapiens
actggctctgctagcttccacctgggctccaactgccagacccccccagagcttcacacaagctatcgctgactgccggtgcatgttggaaatgggccacagggctgggcatgatatgagctgcctggacattggagggggcttccccggaatggagggctccgggcccaagtttgaggagggataattctaatgcctacctgcagggtgcctcggggatgaaaggactgatgcagcagttgagaacaacaagcaataacaaccatacgaagaatctagcaaactcagactttacttctccttttcgtggtcctggaaacagctcagaataaagtggatctggacctctacagaagagagggagctccagattccaggcctcagcagttgagctggttcaccttggaatctgactctgacaagcaaaaggaagcagagtctgatcatctttccagcacctgccaggagaacaggcagtggcagtgtgaccaagaaccatgcctggtggatccagacatgatcaaagccatcaaccagggcaactatgggtgagaggccctagaggcaccctcagtgggcacacatgcatactcatgcatgtatacacgcatgctgtgctgtggggcacgtccagcaggccactcctacacccagatttgactgtgtgtgcgctcagccactgtgcgtctctcccacccacatgcacccacgccaaggaccctgagcctcggcagatctgtgacttccttccgtcccctctccttcagctggcaggctgggaaccacagcgccttctggggcatgaccctggatgagggcattcgctaccgcctgggcaccatccgcccatcttcctcggtcatgaacatgcatgaaatttatgtaagtccatccttccccacaatgctgccatctccccatggctcagaacctcagggatgctggccctgtgccctgctcctccaagggcctggaccatcccctactacaaggctgtgtgtccctggacaagttactccccttctctgggcctctgttccctgcttccacaggatgtgctgtgctggaagaactgatgctcagattgaatttcgtggtcttggcatcagctcccccctgatctctccagcc

SEQ ID NO: 2184 - protein, 37 aa, Homo sapiens
MKGLMQQLRTTSNNNHTKNLANSDFTSPFRGPGNSSE

SEQ ID NO: 2185 - DNA, 3451 bp, Homo sapiens
atgatctcaggagatgtgtatgggttcagcttgacaaggggtggacttaccatggttaatactgagtgtcaacttgattggattaaagatgcaaagtattgatcctgggtgtgtctgtgagggtgttgccaaagaagattaacatttgggtcagcgggctggagaaggcagacccacccttaatctggtgggcaccatctaatcagctgccagcgaatatacagcaggaagaaaaaggtgaaaaggcaagactggcctagcctcccagcctacatctttctcccatgctggatgcttcctgcccttgaacatcagactccaagttcttcagttttgagacttggactggctctccttgctcctcaagcttgcagacagcctattgtgggaccttgtgatcatgttttagcacctcttacgaatgagtgtctgagcagccaaaaaataaataatgaatcatccaggcaaaggggaagaaaaatggacttggccagagatggggaagaacgtacgcaaaaagatgaggtcgttcagattggaagttggattggagggcggaccaaaggagaagctgctgaagtagatgttaaagatggagagaagtggacggcagagacatagaggaggaaaagtcagcaagacccgagatgtgtatggagagttagagtgtgggaagtgtgacatgtaactgaatcggatgatggcaactttcactgggcagtgaaaggtcaggttggtggtaaaagtcatgagttgactttggggcatcttgatatagtcacttccaatatcatgtgtttcaacaagcccgtgttccttcctggtcagttcccccagctagagtgtgttttacatcccgcagcattgtatgagaactgctagaatatcactcaccacttcccatagagattctgtttgttcatctgcttgtcccactgtgtgccttacacatagtaggtgctcttggaatgtgtgtgagatggattaacatgagaagtgcttctctgcatgatttcaccattgaagtgttgaaagcaactagcactcctccttcctgacctccaggcttccacccagctgtggggactgctgtggtggaagggcctagtctgaatctggacaggggaggtgcctgcaaatattttcgtgcctgcaaatatttttgtgcctcgggacagatggatgtccagtttactgtctgcttcctcagtggttctagaggtaattgcatcctgctgtgtacagttaggtcgtggaggagacaggcaccttctctcgtctttctggaaggtaaccagaggtctttcccctttcctatcatggcagctgctcagtcgcaggctccagatgtctgcttcagaattcaagaacaccttcctgagctgggaaacagatccaaggaaatatcagccagaggcttcattttatcatctgtggaaatgcaagatgttagagcacctaggagggtcttaacgtgcaaaacactgtcttgaggctgcctgcagaacagagggtcatctgctttcattagattctcaagggagcctcaacaggctacacctgaaccccaggtttggggcatctctccagccctcccagctctgacatcatcatcaccattaacagctgaaatgtgtgaggtggttgggatgtaccaacaaccctcccaagagtcccatatctacctgacctcatttgaccttcacagcaacccagtgactcagctgctatttggcccacgttttacaaacctgagtcagtgtgctttacctcagtgacccaagaacccaggtgctagagtcaggcctgcatccaaatcaggggtgggatcagtggtgtgccctgaacaaatcattatcctcttttttgttttattttttggagacagagtctcactctgtcacccaggctggagtgcagtggtacagtctcagctcacagcaaccactctctcctgggttcaagtgattctcctgtctcagcctcccaagtagctggggactacaggtgcgtgccaccacgctcagctaatttttgtgttttagtagagacagggtttcaccatgttgcctaggctggtctcgaactcctgagctcaggtgatccacctgccccggcctcccaaagcactaggattacaggcgtgagcaccccacccagctcattaccctcttttaacttcaattttctcatccacaaaatgagggcaataatctcctttcttccccactagccatgttcatgaaagtacttatttgcccattttaaaatatgtagcaatgtgccccagaaaggctggggcatgagtcctgcttggggtggagcagggaaggcctgctctgccccactggggtgtcctcagatgaaagtgggtgtgggctgactttctctgagctccctgtggagtcacacggggaactgggttgagtcacagcacaagggcactcacatgccccaccccgaggaggtccctgttctgacagaagccctgagccgtgactgtggactgacacccactgcctctgtgaccttgggtgggttacataacctcccacatgagaaggaggcggaggcacccgggcttgtggcctgagctaacctgggtagtgggagccctatctgtgaattgccaagggactgccatggggactggtgagaacacagctctgcaaggcccttttgatttgttttaacctttaacttttcaaaaatttcaaatttaaaggatgcatgacacagttgaagtttatcacaaatggactcacgagtgtgtctcctcagctcccaactcccggactcctgacctccaaggccaatacttcgaattctgttaggcatttcttctagcatttatctcaatagttccaaataacaagctcgtgatgcgatttcacaacccttgcttcaaatgtcatgtattgactttccatatgagggatggtccttgtttctgttatatctccctgcttcctcttttcagttctctgaatatatgttttaaaaatttaggctggacgcggtggctcacgcctgtaatcctagccctttgggaggccggggcaggcagatcacctgagatcaggagtttgagagcagcctggccaacatggtggaaccccttccctacaaaaatacaaaaattagccgggcatggtggcatacgcctgtagtcacagctactcttcaggctgaggcaggagaattgcttgaaccgggaggtggaggtttcagtgagccaatattgcgccattgcactctagcctgggtgatagagccagactctgtctcaacaaaacccaagggcggaggttgcagtgagccaaaatcatgccactgcactccagcctgggcgacagtgtgagaccctgtcttaaaacagagcaaacaaacaaacaaaaaaaaaaaaaagagagaaagaaaatgggagaagggggctgttccatgaaagggc

SEQ ID NO: 2186 - protein, 109 aa, Homo sapiens
MLPALEHQTPSSSVLRLGLALLAPQACRQPIVGPCDHVLAPLTNECLSSQKINNESSRQRGRKMDLARDGEERTQKDEVVQIGSWIGGRTKGEAAEVDVKDGEKWTAET

SEQ ID NO: 2187 - DNA, 541 bp, Homo sapiens
tggcaactttcactgggcagtgaaaggtcagttgagaacaacaagcaataacaaccatacgaagaatctagcaaactcagactttacttctccttttcgtggtcctggaaacagctcagaataaagtggatctggacctctacagaagagagggagctccagattccagataggatttcactgtgttgtccaagctggagtgcagtggctcaatcacaggtcatggcagcctcgacctcctggggttcaggtgatcctcccatctcagcctcccgagtagctggggctacaggtcttttgctccacgtgatattgactatgatcatctggagggtccgtggttccagtgacttagcatcaaagacggcctaacacacacgtctggtgcctctgctgggatggctgaagcagccggaggctggccagctactcaggaggcggaggcaaaggatcgcttgaacccagaggcagaggttgcagtgagccgagattgcaccattgtactacagcctgggcaacagagcgagaccctgtctcaaag

SEQ ID NO: 2188 - protein, 49 aa, Homo sapiens
MAASTSWGSGDPPISASRVAGATGLLLHVILTMIIWRVRGSSDLASKTA

SEQ ID NO: 2189 - DNA, 2492 bp, Homo sapiens
tcccgcagcattgtatgagaactgctagaatatcactcaccacttcccatagagattctgtttgttcatctgcttgtcccactgtgtgccttacacatagtaggtgctcttggaatgtgtgtgagatggattaacatgagaagtgcttctctgcatgatttcaccattgaagtgttgaaagcaactagcactcctccttcctgacctccaggcttccacccagctgtggggactgctgtggtggaagggcctagtctgaatctggacaggggaggtgcctgcaaatattttcgtgcctgcaaatatttttgtgcctcgggacagatggatgtccagtttactgtctgcttcctcagtggttctagagctgctcagtcgcaggctccagatgtctgcttcagaattcaagaacaccttcctgagctgggaaacagatccaaggaaatatcagccagaggcttcattttatcatctgtggaaatgcaagatgttagagcacctaggagggtcttaacgtgcaaaacactgtcttgaggctgcctgcagaacagagggtcatctgctttcattagattctcaagggagcctcaacaggctacacctgaaccccaggtttggggcatctctccagccctcccagctctgacatcatcatcaccattaacagctgaaatgtgtgaggtggttgggatgtaccaacaaccctcccaagagtcccatatctacctgacctcatttgaccttcacagcaacccagtgactcagctgctatttggcccacgttttacaaacctgagtcagtgtgctttacctcagtgacccaagaacccaggtgctagagtcaggcctgcatccaaatcaggggtgggatcagtggtgtgccctgaacaaatcattatcctcttttttgttttattttttggagacagagtctcactctgtcacccaggctggagtgcagtggtacagtctcagctcacagcaaccactctctcctgggttcaagtgattctcctgtctcagcctcccaagtagctggggactacaggtgcgtgccaccacgctcagctaatttttgtgttttagtagagacagggtttcaccatgttgcctaggctggtctcgaactcctgagctcaggtgatccacctgccccggcctcccaaagcactaggattacaggcgtgagcaccccacccagctcattaccctcttttaacttcaattttctcatccacaaaatgagggcaataatctcctttcttccccactagccatgttcatgaaagtacttatttgcccattttaaaatatgtagcaatgtgccccagaaaggctggggcatgagtcctgcttggggtggagcagggaaggcctgctctgccccactggggtgtcctcagatgaaagtgggtgtgggctgactttctctgagctccctgtggagtcacacggggaactgggttgagtcacagcacaagggcactcacatgccccaccccgaggaggtccctgttctgacagaagccctgagccgtgactgtggactgacacccactgcctctgtgaccttgggtgggttacataacctcccacatgagaaggaggcggaggcacccgggcttgtggcctgagctaacctgggtagtgggagccctatctgtgaattgccaagggactgccatggggactggtgagaacacagctctgcaaggcccttttgatttgttttaacctttaacttttcaaaaatttcaaatttaaaggatgcatgacacagttgaagtttatcacaaatggactcacgagtgtgtctcctcagctcccaactcccggactcctgacctccaaggccaatacttcgaattctgttaggcatttcttctagcatttatctcaatagttccaaataacaagctcgtgatgcgatttcacaacccttgcttcaaatgtcatgtattgactttccatatgagggatggtccttgtttctgttatatctccctgcttcctcttttcagttctctgaatatatgttttaaaaatttaggctggacgcggtggctcacgcctgtaatcctagccctttgggaggccggggcaggcagatcacctgagatcaggagtttgagagcagcctggccaacatggtggaaccccttccctacaaaaatacaaaaattagccgggcatggtggcatacgcctgtagtcacagctactcttcaggctgaggcaggagaattgcttgaaccgggaggtggaggtttcagtgagccaatattgcgccattgcactctagcctgggtgatagagccagactctgtctcaacaaaacccaagggcggaggttgcagtgagccaaaatcatgccactgcactccagcctgggcgacagtgtgagaccctgtcttaaaacagagcaaacaaacaaacaaaaaaaaaaaaaagagagaaagaaaatgggagaagggggctgttccatgaaagggc

SEQ ID NO: 2190 - protein, 69 aa, Homo sapiens
MDVQFTVCFLSGSRAAQSQAPDVCFRIQEHLPELGNRSKEISARGFILSSVEMQDVRAPRRVLTCKTLS

SEQ ID NO: 2191 - DNA, 2264 bp, Homo sapiens
ggcttctcattcgtcagcctgtgactgtggagtttgaattgggtggcggttgactgtagagccgctctctctcactggcacagcgaggttttgctcagcccttgtctcgggaccgcaggtacgtgcctggcgacttcttcgggtggtccccgtccgccctcctcgtccctacccagtttcttgcttccctgccccatctccgccgctccccgcagcctccgccgagcgccatggctcctaggaagggcagtagtcgggtggccaagaccaactccttacggaggcggaagctcgcctcctttctgaaagacttcgaccgtgaagtggaaatacgaatcaagcaaattgagtcagacaggcagaacctcctcaaggaggtggataacctctacaacatcgagatcctgcggctccccaaggctctgcgcgagatgaactggcttgactacttcgcccttggaggaaacaaacaggccctggaagaggcggcaacagctgacctggatatcaccgaaataaacaaactaacagcagaagctattcagacacccctgaaatctgccaaaacacgaaaggtaatacaggtagatgaaatgatagtggaagaggaagaagaagaagaaaatgaacgtaagaatcttcaaactgcaagagtcaaaaggtgtcctccatccaagaagagaactcagtccatacaaggaaaaggaaaagggaaaaggtcaagccgtgctaacactgttaccccagccgtgggccgattggaggtgtccatggtcaaaccaactccaggcctgacacccaggtttgactcaagggtcttcaagacccctggcctgcgtactccagcagcaggagagcggatttacaacatctcagggaatggcagccctcttgctgacagcaaagagatcttcctcactgtgccagtgggcggcggagagagcctgcgattattggccagtgacttgcagaggcacagtattgcccagctggatccagaggccttgggaaacattaagaagctctccaaccgtctcgcccaaatctgcagcagcatacggacccacaaatgagacaccaaagttgacaggatggacttttaatgggcacttctgggaccctgaagagacttcttcccttcaggcttattgtttgagtgtgaagttccagagcaaggagccatgttcctctaagggaattcaggaattcagacgtgctagtcccacaccagttaggtagagctgtctgttcaccctcccatcccagctgatcccagtcactgcttgctggggccatgccatggaagcttcccatcagtctcccagctgaatcctccctgctctctgagctgctgccttttgcctcctgcaactcaacatcctcttcaccctgccctgcctgcagttgagggggcgaagaagaaccctgtgttctcaggaagactgcctccaccaccgctacccagagaacctctgcatctggcatttctgctctctatgcttgagaccgggaggtttaggctcagataagtgagctctgggccatgagagggtaggtccagaaggtggggggaactgtacagatcagcagagcaggacagttggcagcagtgacctcagtagggaacatgtccgtctaccctctcgcactcatgacacctccccctaccagccctcctcttcctcctcctcctcctcctgtgggaggtggtcagtgggacttagggatctttcacctgctgtgcccagtagttctgaagtctgcttgtggagcagtgttttatgtttatccctgtttactgaagaccaaatactggtttggagacaacttccatgtcttgctcttctacctccctagttagtggaaatttggataagggaactgtagggcccagattctggaggttttatgtcattggccacagaataactgtctctaagctatccatggtccagtggtccctgccaagtctgtagacttcagagagcacttctctcttatggggttcatgggaacaggggtgggtgtgacttgcttggtggcctcattccatgtgtgcctgtgcctggggcatggactttgttaagcagagtcagcagtgaggtcctcattctccagccagcctctctgccctggagaatcatgtgctatgttctaagaatttgagaactagagtcctcatccccaggcttgaaggcacatggctttctcatgtagggctctctgtggtatttgttattattttgcaacaagaccattttagt

SEQ ID NO: 2192 - protein, 280 aa, Homo sapiens; identical to SEQ ID NO: 60

SEQ ID NO: 2193 - DNA, 2426 bp, Homo sapiens
ggcttctcattcgtcagcctgtgactgtggagtttgaattgggtggcggttgactgtagagccgctctctctcactggcacagcgaggttttgctcagcccttgtctcgggaccgcaggtacgtgcctggcgacttcttcgggtggtccccgtccgccctcctcgtccctacccagtttcttgcttccctgccccatctccgccgctccccgcagcctccgccgagcgccatggctcctaggaagggcagtagtcgggtggccaagaccaactccttacggaggcggaagctcgcctcctttctgaaagacttcgaccgtgaagtggaaatacgaatcaagcaaattgagtcagacaggcagaacctcctcaaggaggtggataacctctacaacatcgagatcctgcggctccccaaggctctgcgcgagatgaactggcttgactacttcgcccttggaggaaacaaacaggccctggaagaggcggcaacagctgacctggatatcaccgaaataaacaaactaacagcagaagctattcagacacccctgaaatctgccaaaacacgaaaggtaatacaggtagatgaaatgatagtggaagaggaagaagaagaagaaaatgaacgtaagaatcttcaaactgcaagagtcaaaaggtgtcctccatccaagaagagaactcagtccatacaaggaaaaggaaaagggaaaaggtcaagccgtgctaacactgttaccccagccgtgggccgattggaggtgtccatggtcaaaccaactccaggcctgacacccaggtttgactcaagggtcttcaagacccctggcctgcgtactccagcagcaggagagcggatttacaacatctcagggaatggcagccctcttgctgacagcaaagagatcttcctcactgtgccagtgggcggcggagagagcctgcgattattggccagtgacttgcagaggcacagtattgcccagctggatccagaggccttgggaaacattaagaagctctccaaccgtctcgcccaaatctgcagcagcatacggacccacaaatgagacaccaaagttgacaggatggacttttaatgggcacttctgggaccctgaagagacttcttcccttcaggcttattgtttgagtgtgaagttccagagcaaggagccatgttcctctaagggaattcaggaattcagacgtgctagtcccacaccagttaggtagagctgtctgttcaccctcccatcccagctgatcccagtcactgcttgctggggccatgccatggaagcttcccatcagtctcccagctgaatcctccctgctctctgagctgctgccttttgcctcctgcaactcaacatcctcttcaccctgccctgcctgcagttgagggggcgaagaagaaccctgtgttctcaggaagactgcctccaccaccgctacccagagaacctctgcatctggcatttctgctctctatgcttgagaccgggaggtttaggctcagataagtgagctctgggccatgagagggtaggtccagaaggtggggggaactgtacagatcagcagagcaggacagttggcagcagtgacctcagtagggaacatgtccgtctaccctctcgcactcatgacacctccccctaccagccctcctcttcctcctcctcctcctcctgtgggaggtggtcagtgggacttagggatctttcacctgctgtgcccagtagttctgaagtctgcttgtggagcagtgttttatgtttatccctgtttactgaagaccaaatactggtttggagacaacttccatgtcttgctcttctacctccctagttagtggaaatttggataagggaactgtagggcccagattctggaggttttatgtcattggccacagaataactgtctctaagctatccatggtccagtggtccctgccaagtctgtagacttcagagagcacttctctcttatggggttcatgggaacaggggtgggtgtgacttgcttggtggcctcattccatgtgtgcctgtgcctggggcatggactttgttaagcagagtcagcagtgaggtcctcattctccagccagcctctctgccctggagaatcatgtgctatgttctaagaatttgagaactagagtcctcatccccaggcttgaaggcacatggctttctcatgtagggctctctgtggtatttgttattattttgcaacaagaccattttagtaaaacagtcctgttcaagttgtattcttttaagttcttttattctcctttccctgagatttttgtatatattgttctgagtaatggtatctttgagctgattgttctaatcagagctggtacctactttcaataaattctggttttgtgttttcttttgtaa

SEQ ID NO: 2194 - protein, 280 aa, Homo sapiens; identical to SEQ ID NO: 60

SEQ ID NO: 2195 - DNA, 609 bp, Homo sapiens
ttcgtcagcctgtgactgtggagtttgaattgggtggcggttgactgtagagccgctctctctcactggcacagcgaggttttgctcagcccttgtctcgggaccgcaggtacgtgcctggcgacttcttcgggtggtccccgtccgccctcctcgtccctacccagtttcttgcttccctgccccatctccgccgctccccgcagcctccgccgagcgccatggctcctaggaagggcagtagtcgggtggccaagaccaactccttacggaggcggaagctcgcctcctttctgaaagacttcgaccgtgaagtggaaatacgaatcaagcaaattgagtcagacaggcagaacctcctcaaggaggtggataacctctacaacatcgagatcctgcggctccccaaggctctgcgcgagatgaactggcttgactacttcgcccttggaggaaacaaacaggccctggaagaggcggcaacagctgacctggatatcaccgaaataaacaaactaacagcagaagctattcagacacccctgaaatctgccaaaagtgagtacctttcaaaactccttgttgtacagaaagaactgaggctcaggt

SEQ ID NO: 2196 - protein, 128 aa, Homo sapiens
MAPRKGSSRVAKTNSLRRRKLASFLKDFDREVEIRIKQIESDRQNLLKEVDNLYNIEILRLPKALREMNWLDYFALGGNKQALEEAATADLDITEINKLTAEAIQTPLKSAKSEYLSKLLVVQKELRL

SEQ ID NO: 2197 - DNA, 1711 bp, Homo sapiens
cctgtgactgtggagtttgaattgggtggcggttgactgtagagccgctctctctcactggcacagcgaggttttgctcagcccttgtctcgggaccgcagcctccgccgagcgccatggctcctaggaagggcagtagtcgggtggccaagaccaactccttacggaggcggaagctcgcctcctttctgaaagacttcgaccgtgaagtggaaatacgaatcaagcaaattgagtcagacaggcagaacctcctcaaggaggtggataacctctacaacatcgagatcctgcggctccccaaggctctgcgcgagatgaactggcttgactacttcgcccttggaggaaacaaacaggccctggaagaggcggcaacagctgacctggatatcaccgaaataaacaaactaacagcagaagctattcagacacccctgaaatctgccaaaacacgaaaggtaatacaggtagatgaaatgatagtggaagaggaagaagaagaagaaaatgaacgtaagaatcttcaaactgcaagagtcaaaaggtgtcctccatccaagaagagaactcagtccatacaaggaaaaggaaaagggaaaaggtcaagccgtgctaacactgttaccccagccgtgggccgattggaggtgtccatggtcaaaccaactccaggcctgacacccaggtttgactcaagggtcttcaagacccctggcctgcgtactccagcagcaggagagcggatttacaacatctcagggaatggcagccctcttgctgacagcaaagagatcttcctcactgtgccagtgggcggcggagagagcctgcgattattggccagtgacttgcagaggcacagtattgcccagctggatccagaggccttgggaaacattaagaagctctccaaccgtctcgcccaaatctgcagcagcatacggacccacaaatgagacaccaaagttgacaggatggacttttaatgggcacttctgggaccctgaagagacttcttcccttcaggcttattgtttgagtgtgaagttccagagcaaggagccatgttcctctaagggaattcaggaattcagacgtgctagtcccacaccagttaggtagagctgtctgttcaccctcccatcccagctgatcccagtcactgcttgctggggccatgccatggaagcttcccatcagtctcccagctgaatcctccctgctctctgagctgctgccttttgcctcctgcaactcaacatcctcttcaccctgccctgcctgcagttgagggggcgaagaagaaccctgtgttctcaggaagactgcctccaccaccgctacccagagaacctctgcatctggcatttctgctctctatgcttgagaccgggaggtttaggctcagataagtgagctctgggccatgagagggtaggtccagaaggtggggggaactgtacagatcagcagagcaggacagttggcagcagtgacctcagtagggaacatgtccgtctaccctctcgcactcatgacacctccccctaccagccctcctcttcctcctcctcctcctcctgtgggaggtggtcagtgggacttagggatctttcacctgctgtgcccagtagttctgaagtctgcttgtggagcagtgttttatgtttatccctgtttactgaagaccaaatactggtttggagac

SEQ ID NO: 2198 - protein, 280 aa, Homo sapiens; identical to SEQ ID NO: 60

SEQ ID NO: 2199 - DNA, 2150 bp, Homo sapiens
cctgtgactgtggagtttgaattgggtggcggttgactgtagagccgctctctctcactggcacagcgaggttttgctcagcccttgtctcgggaccgcagcctccgccgagcgccatggctcctaggaagggcagtagtcgggtggccaagaccaactccttacggaggcggaagctcgcctcctttctgaaagacttcgaccgtgaagtggaaatacgaatcaagcaaattgagtcagacaggcagaacctcctcaaggaggtggataacctctacaacatcgagatcctgcggctccccaaggctctgcgcgagatgaactggcttgactacttcgcccttggaggaaacaaacaggccctggaagaggcggcaacagctgacctggatatcaccgaaataaacaaactaacagcagaagctattcagacacccctgaaatctgccaaaacacgaaaggtaatacaggtagatgaaatgatagtggaagaggaagaagaagaagaaaatgaacgtaagaatcttcaaactgcaagagtcaaaaggtgtcctccatccaagaagagaactcagtccatacaaggaaaaggaaaagggaaaaggtcaagccgtgctaacactgttaccccagccgtgggccgattggaggtgtccatggtcaaaccaactccaggcctgacacccaggtttgactcaagggtcttcaagacccctggcctgcgtactccagcagcaggagagcggatttacaacatctcagggaatggcagccctcttgctgacagcaaagagatcttcctcactgtgccagtgggcggcggagagagcctgcgattattggccagtgacttgcagaggcacagtattgcccagctggatccagaggccttgggaaacattaagaagctctccaaccgtctcgcccaaatctgcagcagcatacggacccacaaatgagacaccaaagttgacaggatggacttttaatgggcacttctgggaccctgaagagacttcttcccttcaggcttattgtttgagtgtgaagttccagagcaaggagccatgttcctctaagggaattcaggaattcagacgtgctagtcccacaccagttaggtagagctgtctgttcaccctcccatcccagctgatcccagtcactgcttgctggggccatgccatggaagcttcccatcagtctcccagctgaatcctccctgctctctgagctgctgccttttgcctcctgcaactcaacatcctcttcaccctgccctgcctgcagttgagggggcgaagaagaaccctgtgttctcaggaagactgcctccaccaccgctacccagagaacctctgcatctggcatttctgctctctatgcttgagaccgggaggtttaggctcagataagtgagctctgggccatgagagggtaggtccagaaggtggggggaactgtacagatcagcagagcaggacagttggcagcagtgacctcagtagggaacatgtccgtctaccctctcgcactcatgacacctccccctaccagccctcctcttcctcctcctcctcctcctgtgggaggtggtcagtgggacttagggatctttcacctgctgtgcccagtagttctgaagtctgcttgtggagcagtgttttatgtttatccctgtttactgaagaccaaatactggtttggagacaacttccatgtcttgctcttctacctccctagttagtggaaatttggataagggaactgtagggcccagattctggaggttttatgtcattggccacagaataactgtctctaagctatccatggtccagtggtccctgccaagtctgtagacttcagagagcacttctctcttatggggttcatgggaacaggggtgggtgtgacttgcttggtggcctcattccatgtgtgcctgtgcctggggcatggactttgttaagcagagtcagcagtgaggtcctcattctccagccagcctctctgccctggagaatcatgtgctatgttctaagaatttgagaactagagtcctcatccccaggcttgaaggcacatggctttctcatgtagggctctctgtggtatttgttattattttgcaacaagaccattttagt

SEQ ID NO: 2200 - protein, 280 aa, Homo sapiens; identical to SEQ ID NO: 60

SEQ ID NO: 2201 - DNA, 2312 bp, Homo sapiens
cctgtgactgtggagtttgaattgggtggcggttgactgtagagccgctctctctcactggcacagcgaggttttgctcagcccttgtctcgggaccgcagcctccgccgagcgccatggctcctaggaagggcagtagtcgggtggccaagaccaactccttacggaggcggaagctcgcctcctttctgaaagacttcgaccgtgaagtggaaatacgaatcaagcaaattgagtcagacaggcagaacctcctcaaggaggtggataacctctacaacatcgagatcctgcggctccccaaggctctgcgcgagatgaactggcttgactacttcgcccttggaggaaacaaacaggccctggaagaggcggcaacagctgacctggatatcaccgaaataaacaaactaacagcagaagctattcagacacccctgaaatctgccaaaacacgaaaggtaatacaggtagatgaaatgatagtggaagaggaagaagaagaagaaaatgaacgtaagaatcttcaaactgcaagagtcaaaaggtgtcctccatccaagaagagaactcagtccatacaaggaaaaggaaaagggaaaaggtcaagccgtgctaacactgttaccccagccgtgggccgattggaggtgtccatggtcaaaccaactccaggcctgacacccaggtttgactcaagggtcttcaagacccctggcctgcgtactccagcagcaggagagcggatttacaacatctcagggaatggcagccctcttgctgacagcaaagagatcttcctcactgtgccagtgggcggcggagagagcctgcgattattggccagtgacttgcagaggcacagtattgcccagctggatccagaggccttgggaaacattaagaagctctccaaccgtctcgcccaaatctgcagcagcatacggacccacaaatgagacaccaaagttgacaggatggacttttaatgggcacttctgggaccctgaagagacttcttcccttcaggcttattgtttgagtgtgaagttccagagcaaggagccatgttcctctaagggaattcaggaattcagacgtgctagtcccacaccagttaggtagagctgtctgttcaccctcccatcccagctgatcccagtcactgcttgctggggccatgccatggaagcttcccatcagtctcccagctgaatcctccctgctctctgagctgctgccttttgcctcctgcaactcaacatcctcttcaccctgccctgcctgcagttgagggggcgaagaagaaccctgtgttctcaggaagactgcctccaccaccgctacccagagaacctctgcatctggcatttctgctctctatgcttgagaccgggaggtttaggctcagataagtgagctctgggccatgagagggtaggtccagaaggtggggggaactgtacagatcagcagagcaggacagttggcagcagtgacctcagtagggaacatgtccgtctaccctctcgcactcatgacacctccccctaccagccctcctcttcctcctcctcctcctcctgtgggaggtggtcagtgggacttagggatctttcacctgctgtgcccagtagttctgaagtctgcttgtggagcagtgttttatgtttatccctgtttactgaagaccaaatactggtttggagacaacttccatgtcttgctcttctacctccctagttagtggaaatttggataagggaactgtagggcccagattctggaggttttatgtcattggccacagaataactgtctctaagctatccatggtccagtggtccctgccaagtctgtagacttcagagagcacttctctcttatggggttcatgggaacaggggtgggtgtgacttgcttggtggcctcattccatgtgtgcctgtgcctggggcatggactttgttaagcagagtcagcagtgaggtcctcattctccagccagcctctctgccctggagaatcatgtgctatgttctaagaatttgagaactagagtcctcatccccaggcttgaaggcacatggctttctcatgtagggctctctgtggtatttgttattattttgcaacaagaccattttagtaaaacagtcctgttcaagttgtattcttttaagttcttttattctcctttccctgagatttttgtatatattgttctgagtaatggtatctttgagctgattgttctaatcagagctggtacctactttcaataaattctggttttgtgttttcttttgtaa

SEQ ID NO: 2202 - protein, 280 aa, Homo sapiens; identical to SEQ ID NO: 60

SEQ ID NO: 2203 - DNA, 465 bp, Homo sapiens
acgtgctagtcccacaccagttaggtagagctgtctgttcaccctcccatcccagaggggtgggtgtgacttgcttggtggcctcattccatgtgtgcctgtgcctggggcatggactttgttaagcagagtcagcagtgaggtcctcattctccagccagcctctctgccctggagaatcatgtgctatgttctaagaatttgagaactagagtcctcatccccaggcttgaaggcacatggctttctcatgtagggctctctgtggtatttgttattattttgcaacaagaccattttagtaaaacagtcctgttcaagttgtattcttttaagttcttttattctcctttccctgagatttttgtatatattgttctgagtaatggtatctttgagctgattgttctaatcagagctggtacctactttcaataaattctggttttgtgttttcttttgtaa

SEQ ID NO: 2204 - protein, 40 aa, Homo sapiens [sequence omitted]

SEQ ID NO: 2205 - DNA, 2258 bp, Homo sapiens
tcctaagaagcactttctgccagcattgttcaacaaaggcagcctcagaagcgggtgaatgcctcatgataaagtatgtgacaaagactgtggctactgctggggaagctgccggaggaccaggccagtgggagctgagctagattatctctgaagcgccctgggaggaggatgagatccgcagggaccgagtggaaccccagagcgtgtccctgtcgtggcgggagcccatccctgccggagcccctggggccaatgacacggagtacgagatccgatactacgagaagggtcagagtgagcagacttactccatggtgaagacaggggcgcccacagtcaccgtcaccaacctgaagccggctacccgctacgtctttcagatccgggccgcttccccggggccatcctgggaggcccagagttttaaccccagcattgaagtacagaccctgggggaggctgcctcagggtccagggaccagagccccgccattgtcgtcaccgtagtgaccatctcggccctcctcgtcctgggctccgtgatgagtgtgctggccatttggaggaggccctgcagctatggcaaaggaggaggggatgcccatgatgaagaggagctgtatttccacttcaaagtcccaacacgtcgcacattcctggacccccagagctgtggggacctgctgcaggctgtgcatctgttcgccaaggaactggatgcgaaaagcgtcacgctggagaggagccttggaggagggcggtttggggagctgtgctgtggctgcttgcagctccccggtcgccaggagctgctcgtagccgtgcatatgctgagggacagcgcctccgactcacagaggctcggcttcctggccgaggccctcacgctgggccagtttgaccatagccacatcgtgcggctggagggcgttgttacccgaggaagcaccttgatgattgtcaccgagtacatgagccatggggccctggacggcttcctcaggcggcacgaggggcagctggtggctgggcaactgatggggttgctgcctgggctggcatcagccatgaagtatctgtcagagatgggctacgttcaccggggcctggcagctcgccatgtgctggtcagcagcgaccttgtctgcaagatctctggcttcgggcggggcccccgggaccgatcagaggctgtctacaccactatgagtggccggagcccagcgctatgggccgctcccgagacacttcagtttggccacttcagctctgccagtgacgtgtggagcttcggcatcatcatgtgggaggtgatggcctttggggagcggccttactgggacatgtctggccaagacgtgatcaaggctgtggaggatggcttccggctgccaccccccaggaactgtcctaaccttctgcaccgactaatgctcgactgctggcagaaggacccaggtgagcggcccaggttctcccagatccacagcatcctgagcaagatggtgcaggacccagagccccccaagtgtgccctgactacctgtcccaggcctcccaccccactagcggaccgtgccttctccaccttcccctcctttggctctgtgggcgcgtggctggaggccctggacctgtgccgctacaaggacagcttcgcggctgctggctatgggagcctggaggccgtggccgagatgactgcccaggacctggtgagcctaggcatctctttggctgaacatcgagaggccctcctcagcgggatcagcgccctgcaggcacgagtgctccagctgcagggccagggggtgcaggataataaaaacttgtctgtgatatggtgcctctttgagtggcagttgcttgatcattgtatagctggtgtggaagggcttctgcccccttcctcgaggacaggggtgtccagaatctgcgtctgagatctctctgcatagagggatttactgtcccacagctctggaggctggaagccaagatcaagatgtgcgcaaggttgtttcctgctgagagctgtgaggggagcttctgctctgggcctctctccccggcttgcctgtggccatcttcccactctctcttcgcatcatcttccctctatgccattgagtgtaagatgtcctaccaagaaagaaacatcacagccaactatgttgtgccatccaactgaaagatgcatcccagtttcagagatgttaacatgtacgtcttcaataaatgagatgccgcgcatc

SEQ ID NO: 2206 - protein, 543 aa, Homo sapiens
MVKTGAPTVTVTNLKPATRYVFQIRAASPGPSWEAQSFNPSIEVQTLGEAASGSRDQSPAIVVTVVTISALLVLGSVMSVLAIWRRPCSYGKGGGDAHDEEELYFHFKVPTRRTFLDPQSCGDLLQAVHLFAKELDAKSVTLERSLGGGRFGELCCGCLQLPGRQELLVAVHMLRDSASDSQRLGFLAEALTLGQFDHSHIVRLEGVVTRGSTLMIVTEYMSHGALDGFLRRHEGQLVAGQLMGLLPGLASAMKYLSEMGYVHRGLAARHVLVSSDLVCKISGFGRGPRDRSEAVYTTMSGRSPALWAAPETLQFGHFSSASDVWSFGIIMWEVMAFGERPYWDMSGQDVIKAVEDGFRLPPPRNCPNLLHRLMLDCWQKDPGERPRFSQIHSILSKMVQDPEPPKCALTTCPRPPTPLADRAFSTFPSFGSVGAWLEALDLCRYKDSFAAAGYGSLEAVAEMTAQDLVSLGISLAEHREALLSGISALQARVLQLQGQGVQDNKNLSVIWCLFEWQLLDHCIAGVEGLLPPSSRTGVSRICV

SEQ ID NO: 2207 - DNA, 2090 bp, Homo sapiens
agcggtgagactccgccccccgctggctctggggtctgggggcattgctcagcggtgctaggctggcgcggcttgagccgccgccggactgacagctcggtctgcggaccatggagacctgcgccggtccacacccgctgcgcctcttcctctgccggatgcagctctgtctcgcgctgcttttgggaccctggcggcctgggaccgccgaggaagttatcctcctggattccaaagcctcccaggccgagctgggctggactgcactgccaagtaatgggtgggaggagatcagcggcgtggatgaacacgaccgtcccatccgcacgtaccaagtgtgcaatgtgctggagcccaaccaggacaactggctgcagactggctggataagccgtggccgcgggcagcgcatcttcgtggaactgcagttcacactccgtgactgcagcagcatccctggcgccgcgggtacctgcaaggagaccttcaacgtctactacctggaaactgaggccgacctgggccgtgggcgtccccgcctaggcggcagccggccccgcaaaatcgacacgatcgcggcggacgagagcttcacgcagggcgacctgggtgagcgcaagatgaagctgaacacagaggtgcgcgagatcggaccgctcagccggcggggtttccacctggcctttcaggacgtgggcgcatgcgtggcgcttgtctcggtgcgcgtctactacaagcagtgccgcgccaccgtgcggggcctggccacgttcccagccaccgcagccgagagcgccttctccacactggtggaagtggccggaacgtgcgtggcgcactcggaaggggagcctggcagccccccacgcatgcactgcggcgccgacggcgagtggctggtgcctgtgggccgctgcagctgcagcgcgggattccaggagcgtggtgacttctgcgaaggtatccagttggctgggggccgtggggtgggagtgtagagcgtaggtggcaattgagagagagtgtgccctagaggaaagaggcgggtgtggggtcggggggcggtggagaagccttggactctggagcccaaggagagccctgaagtcttgtggagtttccagtgagtccagtcagggccaatgagtgaacttactagatgaaattgactggctaaggaggcattagggatctatatcttaggcaccttgcacaggccttctcgtttatttattttcatggcaataaaggaagtcattgtttttttttttttttaaaataaggagtctctcttgctctgttgcccaggctggagtgcactggcttgatcttggctaactgcaacttccacctcctgggttcaagcaattctcctgcctcagcctcctgagtagctgggattataggcgtgcaccaccatgcccagctaatttttgtatttttagtagagacggggtttcaccatgttggccaggctggtctcaaactcctgacctcaagtgatccacctacctaggccttccagagtgctgggattataggcgtgagccaccgtgcctggcctaaaggaagtcattcttatctctatttcacagatgaagaaacagagcctcagagagattagtacctcacttgcaaagttaggaaatggggagctaggatttgaattcaggcttgcccaactcacattctatgacatcatgaggtctcctcagtgcataaggaagaactctacagcagcccaatcttcaggctagtgggattggttgcattacagagaggaatctcccagtcacggaccaaatacttgcaagttagaggctggcaggggggatttttatgctggagagagggattgggaagttgcactagatgattacgaagatcacatcccactctctgaactacaatcactgtgctccctgggggagatccttcatgttgagggttttgctgggttctcaggctagtgggggcattaggaacagacctctcattctctctcttgcctgtggctttggatacagagggtgatgatggggttattaatgtgtgtacttaatatagaaagatcaaggtatgctttttct

SEQ ID NO: 2208 - protein, 295 aa, Homo sapiens; identical to SEQ ID NO: 62

SEQ ID NO: 2209 - DNA, 2408 bp, Homo sapiens
cctctctcccgcgctccggaaggcctgcgtccccgctccccagccaggcgccaccacctgccgcccaggcagccaggcgactcttctttcgcgggtcacgcggcctgactcaggcccctgctcctgtggccccgaaactcgccgttcgctgggccttgcgttgcactcggcgtgcagttccccctcggctcgcggccacttggtccgcgccgcctgcgtcctgtgtgccgagcccgcccgcactgcggggacaggccgggcgccgcccacgccgcgctctgccgggcgcacagtctgcctgggaagcgcgcggccgggcgggcggccatggcgcggcacgctgggaggtagcgcggcggctgcaggagcgcacagtcggccatggcccggcggcggcgccgcgcctgcatcgctctgttcctggtgctgctcttcgccttcggcaccctcatgggtctgcgcacgctcaaggctccggacggactcccggcgctgggcccgggcctggagctggcgccctttgagcgacgcccagagggggcccccgcgcccgctgccagggccccggcagcccctgccgcgccgcccccgccgccgccgccgccccgcaccgcggaccctggcggctcccctgggccggcacccgcggaggccgagcccgcccccgtgcagagcctgcgcgtctactcggacctgcacgccttctactactcgtggtacgggagcccgcggcgcgagggccactacattcactgggaccacgtcatggtgccgcactgggaccccaagatctcggccagctacccccgcggccgccacagccccccagacgacttgggctccagcttctacccggagctggggccctacagctcccgggaccccgaagtgctgcgggagcatatgacccagctcaaggaagccgccatcggcgtcctggtcctgtcctggtacccacctggcatggctgatgataacggggagccctcagatgacctggtgcccgccattctggacaccgcccatcagtacagcatccaggtggccttccacatccaaccctacaagggccgggatgacatcactgtacatgacaacatcaagtacatcattgacacaactggaaagctgtgaagaacttttgtgatgccaacaacctcatgttcatccccagtgtggggcctggctacatagacaccagcattcggccctggaacaaccacaatacgcgcaacagggtcaatggcaagtactatgagacggccctgcaggcggccctgacagtgaggcccgagatcgtttccattacctccttcaatgagtggcacgagggcacccagattgagaaggccattcccaagaagacacccacccgcctgtatttggactacctgcctcaccagcccagcctgtacctggagctgacacgccgctgggcggagcacttcatcaaagagaaggagcagtggctcatgtgaggggcctgtaaatgggcgtgaggtgctgatgtccttgccttgctggaagatgtcaccatgtggggttcagctgaggttgtagccactcactcgttcccaggtcagaggtcagcagatgggtgtttctgggtgggccgtcaggcatgggcctgtgcaacacagagcccgttcctcaggcgagtggtgctgaggtgctctgtggtgatgggaacggcagaggctggcaggtgactgaacttagcccagggcagctccacatcctgggaacactttcatgtaaccccttctagttttgaactctgcagcaggctggtgctgtgtagtggccacccagtcaccacccttggaagggtgtcagggtctgggctcgcatgcaccctgctcccttctgccagcctgcatcctctcctcaggcctccttcccacatcatctgtcttctctaagttagggaaccatatttgagactttcaaaaagggaacttctaggtttaagctcctcccagtagattcctgaacccaattatcaggaaatcatcctgagcactcacaggttcatttaacactcactcatcaagcaccttcctatgtgctaggtgctggggaaaacttgaccaaggaagagttcctgtcctgaagcttccaggacccagctttccttttctggtgtggccttgtagctagtgcctgggcacaggtgtttttctttttgcagttttacctagtgctgggagttcagttctttttcctctagaaaaatacctctgtgctccagagcctaatttttcccagatgcatatttagctctagggagaggactaggaggaaatccccctccctttagctgcctgaactgactgaggcccactcactagagccatgttcagtgctactgtgattagtagtaattaaatatgaactggtattctcaa

SEQ ID NO: 2210 - protein, 250 aa, Homo sapiens; identical to SEQ ID NO: 65

SEQ ID NO: 2211 - DNA, 2021 bp, Homo sapiens
gtgcagagcctgcgcgtctactcggacctgcacgccttctactactcgtggtacgggagcccgcggcgcgagggccactacattcactgggaccacgtcatggtgccgcactgggaccccaagatctcggccagctacccccgcggccgccacagccccccagacgacttgggctccagcttctacccggagctggggccctacagctcccgggaccccgaagtgctgcgggagcatatgacccagctcaaggaagccgccatcggcgtcctggtcctgtcctggtacccacctggcatggctgatgataacggggagccctcagatgacctggtgcccgccattctggacaccgcccatcagtacagcatccaggtggccttccacatccaaccctacaagggccgggatgacatcactgtacatgacaacatcaagtacatcattgacacgtatggctcccatggtgcattttaccgctataagaacagcatgggcaagagcctcccactcttttatatctacgactcatacctgacgtcccctgaggcctgggcccacctcctgacaccaaacgggccccattcgatccgcaacacgccctacgatggggtcttcatagcgctgctggtggaggagggccacacccacgatatcctggccgccggatttgacggcatgtacacctactttgcctccaatggtttctcctttggttcttcccatcagaactggaaagctgtgaagaacttttgtgatgccaacaacctcatgttcatccccagtgtggggcctggctacatagacaccagcattcggccctggaacaaccacaatacgcgcaacagggtcaatggcaagtactatgagacggccctgcaggcggccctgacagtgaggcccgagatcgtttccattacctccttcaatgagtggcacgagggcacccagattgagaaggccattcccaagaagacacccacccgcctgtatttggactacctgcctcaccagcccagcctgtacctggagctgacacgccgctgggcggagcacttcatcaaagagaaggagcagtggctcatgtgaggggcctgtaaatgggcgtgaggtgctgatgtccttgccttgctggaagatgtcaccatgtggggttcagctgaggttgtagccactcactcgttcccaggtcagaggtcagcagatgggtgtttctgggtgggccgtcaggcatgggcctgtgcaacacagagcccgttcctcaggcgagtggtgctgaggtgctctgtggtgatgggaacggcagaggctggcaggtgactgaacttagcccagggcagctccacatcctgggaacactttcatgtaaccccttctagttttgaactctgcagcaggctggtgctgtgtagtggccacccagtcaccacccttggaagggtgtcagggtctgggctcgcatgcaccctgctcccttctgccagcctgcatcctctcctcaggcctccttcccacatcatctgtcttctctaagttagggaaccatatttgagactttcaaaaagggaacttctaggtttaagctcctcccagtagattcctgaacccaattatcaggaaatcatcctgagcactcacaggttcatttaacactcactcatcaagcaccttcctatgtgctaggtgctggggaaaacttgaccaaggaagagttcctgtcctgaagcttccaggacccagctttccttttctggtgtggccttgtagctagtgcctgggcacaggtgtttttctttttgcagttttacctagtgctgggagttcagttctttttcctctagaaaaatacctctgtgctccagagcctaatttttcccagatgcatatttagctctagggagaggactaggaggaaatccccctccctttagctgcctgaactgactgaggcccactcactagagccatgttcagtgctactgtgattagtagtaattaaatatgaactggtattctcaagt

SEQ ID NO: 2212 - protein, 329 aa, Homo sapiens
MVPHWDPKISASYPRGRHSPPDDLGSSFYPELGPYSSRDPEVLREHMTQLKEAAIGVLVLSWYPPGMADDNGEPSDDLVPAILDTAHQYSIQVAFHIQPYKGRDDITVHDNIKYIIDTYGSHGAFYRYKNSMGKSLPLFYIYDSYLTSPEAWAHLLTPNGPHSIRNTPYDGVFIALLVEEGHTHDILAAGFDGMYTYFASNGFSFGSSHQNWKAVKNFCDANNLMFIPSVGPGYIDTSIRPWNNHNTRNRVNGKYYETALQAALTVRPEIVSITSFNEWHEGTQIEKAIPKKTPTRLYLDYLPHQPSLYLELTRRWAEHFIKEKEQWLM

SEQ ID NO: 2213 - DNA, 5055 bp, Homo sapiens
gtgcagagcctgcgcgtctactcggacctgcacgccttctactactcgtggtacgggagcccgcggcgcgagggccactacattcactgggaccacgtcatggtgccgcactgggaccccaagatctcggccagctacccccgcggccgccacagccccccagacgacttgggctccagcttctacccggagctggggccctacagctcccgggaccccgaagtgctgcgggagcatatgacccagctcaaggaagccgccatcggcgtcctggtcctgtcctggtacccacctggcatggctgatgataacggggagccctcagatgacctggtgcccgccattctggacaccgcccatcagtacagcatccaggtggccttccacatccaaccctacaagggccgggatgacatcactgtacatgacaacatcaagtacatcattgacacgtatggctcccatggtgcattttaccgctataagaacagcatgggcaagagcctcccactcttttatatctacgactcatacctgacgtcccctgaggcctgggcccacctcctgacaccaaacgggccccattcgatccgcaacacgccctacgatggggtcttcatagcgctgctggtggaggagggccacacccacgatatcctggccgccggatttgacggcatgtacacctactttgcctccaatggtttctcctttggttcttcccatcagaactggaaagctgtgaagaacttttgtgatgccaacaacctcatgttcatccccagtgtggggcctggctacatagacaccagcattcggccctggaacaaccacaatacgcgcaacagggtcaatggcaagtactatgagacggccctgcaggcggccctgacagtgaggcccgagatcgtttccattacctccttcaatgagtggcacgagggcacccagattgagaaggccattcccaagaagacacccacccgcctgtatttggactacctgcctcaccagcccagcctgtacctggagctgacacgccgctgggcggagcacttcatcaaagagaaggagcagtggctcatgtgaggggcctgtaaatgggcgtgaggtgctgatgtccttgccttgctggaagatgtcaccatgtggggttcagctgaggttgtagccactcactcgttcccaggtcagaggtcagcagatgggtgtttctgggtgggccgtcaggcatgggcctgtgcaacacagagcccgttcctcaggcgagtggtgctgaggtgctctgtggtgatgggaacggcagaggctggcaggtgactgaacttagcccagggcagctccacatcctgggaacactttcatgtaaccccttctagttttgaactctgcagcaggctggtgctgtgtagtggccacccagtcaccacccttggaagggtgtcagggtctgggctcgcatgcaccctgctcccttctgccagcctgcatcctctcctcaggcctccttcccacatcatctgtcttctctaagttagggaaccatatttgagactttcaaaaagggaacttctaggtttaagctcctcccagtagattcctgaacccaattatcaggaaatcatcctgagcactcacaggttcatttaacactcactcatcaagcaccttcctatgtgctaggtgctggggaaaacttgaccaaggaagagttcctgtcctgaagcttccaggacccagctttccttttctggtgtggccttgtagctagtgcctgggcacaggtgtttttctttttgcagttttacctagtgctgggagttcagttctttttcctctagaaaaatacctctgtgctccagagcctaatttttcccagatgcatatttagctctagggagaggactaggaggaaatccccctccctttagctgcctgaactgactgaggcccactcactagagccatgttcagtgctactgtgattagtagtaattaaatatgaactggtattctcaagtaagcattccttttgctctctttaagacctcacagattctgaccttagattctgtgacaaactgatacaggagctgggctggctatggctttaccacaacaagtaggtttgcttaagaaattactaaacaatggctgggcgtggtggctcactcctgtaatcccagcactttgggaggccgagatgggcggatcacgaggtcaggagatcgagaccatcctggctaacagggtgaaaccacgtctctactaaaaatacaaaaaaattagccaggcgtagtggtgggcgcctgtagtcccagctacttgggaggctgaggcaggagaatggcgtgaacccgggaggcggagcttgcagtgagccgagatcacgccactgcactccagcctgggcgacagagcgagactccgtctcaaaaaaaaaaaagttactaaacaaggctgggcgtggtggctcacacctgtaatcccagcactttgggaggccaaggaaggtggatcacctgaggtcaggagttcgagaccagcctggccaacatggtgaaaccccatccctactaaaaatacaaaaattagctgggcgtgggtgcctgtaatcccagctacttctgaggctgaggcaggagaaccgcttgaacctgggaggcggaggttgcagtgagccaatgtggcaccactggactccagcctgggcaagagcaagactgtctcaaaacaaaaacaacaaacaaacaaacaaaaagaaaacacaaaaaacattactaaacaagatttctagagggaattaacaaaccagtgcttatttaccaataaactaatacgctaattgcaggaaccctgattaaagcaggcccctgttaacacaagattcttaggatatacttggaaacaggtgcattggaaaccactgtactgagaagtttatgggctcaagactgaattggaagctaggcgtggtcgctcatgcctgtaatcccagcactctgggaggctgaggtggaaggatgagttcaggagttcgagaccagcctgggcaacacagagagacgtgtctttaaaaaagtaaaaaatgggctgagtgccttggctcatgcctgtaatcccagcactttgggaagccaaggcgggtggatcacttcaggccaggagttcaagaacagcctgaccaacatggcaaaactccatctctactaaaaataccaaaaaaattagcagggtgtggtggtgcacacctgtagtcccagctactcaggaggctgatgtgtgagaatcacttgaacctgggaggcggagtttgcagcgagccaagatcgtgccactgcactccagtgtgggcaacagagattctgtctcaaaaaaaaaaaaaaaagactgaatcagaattttgggaactagggtacaagagggaaggggaggaaggaggaaatagaccccagtggtcacctcaaggacacccagccccagttaggtaactgatattaagccccaccagagagatgagcaggcctggccacctggctttggggcttagctggggaaaccaaggcaggcagggacagctgaaagggttggatgttgacctgtagtaatttacagaaggtagcaacactggcttcatttaacacacacacaatctgaaaaatactaaacatgggaaggccagggggcagaggcagccattctcacacactgctaacagcagtgtaacttgactcagttcttttgaaggctaatccatactgagagccataaatacttcctacactttgacctactctcctaaggaaataattcaaaagaagaaaaacaaaccatttacaaatatgtttaatagcagcatttctttaaagaaaaacaaagttcaaatgcccaataataattatgtttaacacttggtacacatataaatagacaaaaggctgcggagaacactggatttaaataaaggtgttatgggtataattaactataatttattttatgaataaataagaaaaaagtccctggctataaaggatagtggaggtttatttcccaatattcttccatttggactgaacccctgccaactaagcagacatcccactattacaccaaaaagactgctctccctgcgagcaattacaatacatgacaccactaggcccaatggctcagagggaagagtggcctgtggctcttcaatctttatccaaacctggttctagcttcaggagcctttggtcacctgagactttttatttattaatttttatgagacggagtattgctatgttgcccaggctgattctgaactcctgggctcaagcagttctcccgcctgggcctcccagaatgttgggattacaggcatgagccaccacacgcagccacctgagactttttaaacagcaccagcacttctggctggtttgaaccttaaatgccaccacccaccagagaggaggctctcactagattctaaatctgttatttaattacttttcaattgaaaaacaaaacagacagaagaaacttattagaataaggccacctaggaatgttcttaacttttccattcagcttttggctgatatatgaaaatacaaataaatacatcctttccccaggtgcaaggctaaaccagcagctccaagggcttggtctacagtgctcagaaagacacactgccttaaaagtcaggctagtgccctagctccggtggcctctgcaaatgaggccttgacagtcgtcagtggacagacacatagtatccagcaccaggtcttgggccttcctgcttcccagagtttcacaggtaggacgcatgtgaggggagcagtccgtacttctgttggaggatggctgtagtactttccagggcactgaggaggaaacaggacagttaccagtctgacttctcagaagtcccgagcccaccagaggctggtgagcagggacatcgaaactggctagccttgttaagccctgttcatcaacccttgatgaaaccttttgaatcctaagaaagccaggaaacttagtcccactgcaact

SEQ ID NO: 2214 - protein, 329 aa, Homo sapiens; identical to SEQ ID NO: 2212

SEQ ID NO: 2215 - DNA, 1927 bp, Homo sapiens
gtctactcggacctgcacgccttctactactcgtggtacgggagcccgcggcgcgagggccactacattcactgggaccacgtcatggtgccgcactgggaccccaagatctcggccagctacccccgcggccgccacagccccccagacgacttgggctccagcttctacccggagctggggccctacagctcccgggaccccgaagtgctgcgggagcatatgacccagctcaaggaagccgccatcggcgtcctggtcctgtcctggtacccacctggcatggctgatgataacggggagccctcagatgacctggtgcccgccattctggacaccgcccatcagtacagcatccaggtatggctcccatggtgcattttaccgctataagaacagcatgggcaagagcctcccactcttttatatctacgactcatacctgacgtcccctgaggcctgggcccacctcctgacaccaaacgggccccattcgatccgcaacacgccctacgatggggtcttcatagcgctgctggtggaggagggccacacccacgatatcctggccgccggatttgacggcatgtacacctactttgcctccaatggtttctcctttggttcttcccatcagaactggaaagctgtgaagaacttttgtgatgccaacaacctcatgttcatccccagtgtggggcctggctacatagacaccagcattcggccctggaacaaccacaatacgcgcaacagggtcaatggcaagtactatgagacggccctgcaggcggccctgacagtgaggcccgagatcgtttccattacctccttcaatgagtggcacgagggcacccagattgagaaggccattcccaagaagacacccacccgcctgtatttggactacctgcctcaccagcccagcctgtacctggagctgacacgccgctgggcggagcacttcatcaaagagaaggagcagtggctcatgtgaggggcctgtaaatgggcgtgaggtgctgatgtccttgccttgctggaagatgtcaccatgtggggttcagctgaggttgtagccactcactcgttcccaggtcagaggtcagcagatgggtgtttctgggtgggccgtcaggcatgggcctgtgcaacacagagcccgttcctcaggcgagtggtgctgaggtgctctgtggtgatgggaacggcagaggctggcaggtgactgaacttagcccagggcagctccacatcctgggaacactttcatgtaaccccttctagttttgaactctgcagcaggctggtgctgtgtagtggccacccagtcaccacccttggaagggtgtcagggtctgggctcgcatgcaccctgctcccttctgccagcctgcatcctctcctcaggcctccttcccacatcatctgtcttctctaagttagggaaccatatttgagactttcaaaaagggaacttctaggtttaagctcctcccagtagattcctgaacccaattatcaggaaatcatcctgagcactcacaggttcatttaacactcactcatcaagcaccttcctatgtgctaggtgctggggaaaacttgaccaaggaagagttcctgtcctgaagcttccaggacccagctttccttttctggtgtggccttgtagctagtgcctgggcacaggtgtttttctttttgcagttttacctagtgctgggagttcagttctttttcctctagaaaaatacctctgtgctccagagcctaatttttcccagatgcatatttagctctagggagaggactaggaggaaatccccctccctttagctgcctgaactgactgaggcccactcactagagccatgttcagtgctactgtgattagtagtaattaaatatgaactggtattctcaa

SEQ ID NO: 2216 - protein, 235 aa, Homo sapiens; identical to SEQ ID NO: 67

SEQ ID NO: 2217 - DNA, 4963 bp, Homo sapiens
gtctactcggacctgcacgccttctactactcgtggtacgggagcccgcggcgcgagggccactacattcactgggaccacgtcatggtgccgcactgggaccccaagatctcggccagctacccccgcggccgccacagccccccagacgacttgggctccagcttctacccggagctggggccctacagctcccgggaccccgaagtgctgcgggagcatatgacccagctcaaggaagccgccatcggcgtcctggtcctgtcctggtacccacctggcatggctgatgataacggggagccctcagatgacctggtgcccgccattctggacaccgcccatcagtacagcatccaggtatggctcccatggtgcattttaccgctataagaacagcatgggcaagagcctcccactcttttatatctacgactcatacctgacgtcccctgaggcctgggcccacctcctgacaccaaacgggccccattcgatccgcaacacgccctacgatggggtcttcatagcgctgctggtggaggagggccacacccacgatatcctggccgccggatttgacggcatgtacacctactttgcctccaatggtttctcctttggttcttcccatcagaactggaaagctgtgaagaacttttgtgatgccaacaacctcatgttcatccccagtgtggggcctggctacatagacaccagcattcggccctggaacaaccacaatacgcgcaacagggtcaatggcaagtactatgagacggccctgcaggcggccctgacagtgaggcccgagatcgtttccattacctccttcaatgagtggcacgagggcacccagattgagaaggccattcccaagaagacacccacccgcctgtatttggactacctgcctcaccagcccagcctgtacctggagctgacacgccgctgggcggagcacttcatcaaagagaaggagcagtggctcatgtgaggggcctgtaaatgggcgtgaggtgctgatgtccttgccttgctggaagatgtcaccatgtggggttcagctgaggttgtagccactcactcgttcccaggtcagaggtcagcagatgggtgtttctgggtgggccgtcaggcatgggcctgtgcaacacagagcccgttcctcaggcgagtggtgctgaggtgctctgtggtgatgggaacggcagaggctggcaggtgactgaacttagcccagggcagctccacatcctgggaacactttcatgtaaccccttctagttttgaactctgcagcaggctggtgctgtgtagtggccacccagtcaccacccttggaagggtgtcagggtctgggctcgcatgcaccctgctcccttctgccagcctgcatcctctcctcaggcctccttcccacatcatctgtcttctctaagttagggaaccatatttgagactttcaaaaagggaacttctaggtttaagctcctcccagtagattcctgaacccaattatcaggaaatcatcctgagcactcacaggttcatttaacactcactcatcaagcaccttcctatgtgctaggtgctggggaaaacttgaccaaggaagagttcctgtcctgaagcttccaggacccagctttccttttctggtgtggccttgtagctagtgcctgggcacaggtgtttttctttttgcagttttacctagtgctgggagttcagttctttttcctctagaaaaatacctctgtgctccagagcctaatttttcccagatgcatatttagctctagggagaggactaggaggaaatccccctccctttagctgcctgaactgactgaggcccactcactagagccatgttcagtgctactgtgattagtagtaattaaatatgaactggtattctcaagtaagcattccttttgctctctttaagacctcacagattctgaccttagattctgtgacaaactgatacaggagctgggctggctatggctttaccacaacaagtaggtttgcttaagaaattactaaacaatggctgggcgtggtggctcactcctgtaatcccagcactttgggaggccgagatgggcggatcacgaggtcaggagatcgagaccatcctggctaacagggtgaaaccacgtctctactaaaaatacaaaaaaattagccaggcgtagtggtgggcgcctgtagtcccagctacttgggaggctgaggcaggagaatggcgtgaacccgggaggcggagcttgcagtgagccgagatcacgccactgcactccagcctgggcgacagagcgagactccgtctcaaaaaaaaaaaagttactaaacaaggctgggcgtggtggctcacacctgtaatcccagcactttgggaggccaaggaaggtggatcacctgaggtcaggagttcgagaccagcctggccaacatggtgaaaccccatccctactaaaaatacaaaaattagctgggcgtgggtgcctgtaatcccagctacttctgaggctgaggcaggagaaccgcttgaacctgggaggcggaggttgcagtgagccaatgtggcaccactggactccagcctgggcaagagcaagactgtctcaaaacaaaaacaacaaacaaacaaacaaaaagaaaacacaaaaaacattactaaacaagatttctagagggaattaacaaaccagtgcttatttaccaataaactaatacgctaattgcaggaaccctgattaaagcaggcccctgttaacacaagattcttaggatatacttggaaacaggtgcattggaaaccactgtactgagaagtttatgggctcaagactgaattggaagctaggcgtggtcgctcatgcctgtaatcccagcactctgggaggctgaggtggaaggatgagttcaggagttcgagaccagcctgggcaacacagagagacgtgtctttaaaaaagtaaaaaatgggctgagtgccttggctcatgcctgtaatcccagcactttgggaagccaaggcgggtggatcacttcaggccaggagttcaagaacagcctgaccaacatggcaaaactccatctctactaaaaataccaaaaaaattagcagggtgtggtggtgcacacctgtagtcccagctactcaggaggctgatgtgtgagaatcacttgaacctgggaggcggagtttgcagcgagccaagatcgtgccactgcactccagtgtgggcaacagagattctgtctcaaaaaaaaaaaaaaaagactgaatcagaattttgggaactagggtacaagagggaaggggaggaaggaggaaatagaccccagtggtcacctcaaggacacccagccccagttaggtaactgatattaagccccaccagagagatgagcaggcctggccacctggctttggggcttagctggggaaaccaaggcaggcagggacagctgaaagggttggatgttgacctgtagtaatttacagaaggtagcaacactggcttcatttaacacacacacaatctgaaaaatactaaacatgggaaggccagggggcagaggcagccattctcacacactgctaacagcagtgtaacttgactcagttcttttgaaggctaatccatactgagagccataaatacttcctacactttgacctactctcctaaggaaataattcaaaagaagaaaaacaaaccatttacaaatatgtttaatagcagcatttctttaaagaaaaacaaagttcaaatgcccaataataattatgtttaacacttggtacacatataaatagacaaaaggctgcggagaacactggatttaaataaaggtgttatgggtataattaactataatttattttatgaataaataagaaaaaagtccctggctataaaggatagtggaggtttatttcccaatattcttccatttggactgaacccctgccaactaagcagacatcccactattacaccaaaaagactgctctccctgcgagcaattacaatacatgacaccactaggcccaatggctcagagggaagagtggcctgtggctcttcaatctttatccaaacctggttctagcttcaggagcctttggtcacctgagactttttatttattaatttttatgagacggagtattgctatgttgcccaggctgattctgaactcctgggctcaagcagttctcccgcctgggcctcccagaatgttgggattacaggcatgagccaccacacgcagccacctgagactttttaaacagcaccagcacttctggctggtttgaaccttaaatgccaccacccaccagagaggaggctctcactagattctaaatctgttatttaattacttttcaattgaaaaacaaaacagacagaagaaacttattagaataaggccacctaggaatgttcttaacttttccattcagcttttggctgatatatgaaaatacaaataaatacatcctttccccaggtgcaaggctaaaccagcagctccaagggcttggtctacagtgctcagaaagacacactgccttaaaagtcaggctagtgccctagctccggtggcctctgcaaatgaggccttgacagtcgtcagtggacagacacatagtatccagcaccaggtcttgggccttcctgcttcccagagtttcacaggtaggacgcatgtgaggggagcagtccgtacttctgttggaggatggctgtagtactttccagggcactgaggaggaaacaggacagttaccagtctgacttctcagaagtcccgagcccaccagaggctggtgagcagggacatcgaaactggctagccttgttaagccctgttcatcaacccttgatgaaaccttttgaatcctaagaaagccaggaaacttagtcccactgcaact

SEQ ID NO: 2218 - protein, 235 aa, Homo sapiens; identical to SEQ ID NO: 67

SEQ ID NO: 2219 - DNA, 1926 bp, Homo sapiens
agtctaaagcctggctcccttccggcctggcgcgctacggttcccgcaggcgctccgcttcagcaccgcgggcgtggacagctccggggcgcgaggctctgggactcatctgcaggaagtgaacctggcaggaggcttgcttcaggtttttaggaaccatttttgcaattggagatgtttgtgaggaaaaaaatctctgttgaggggggtactgtgtgtctctgaagtggcctctgtgttgcgtctcaggcgtcctggtcctgtcctggtacccacctggcatggctgatgataacggggagccctcagatgacctggtgcccgccattctggacaccgcccatcagtacagcatccaggtatggctcccatggtgcattttaccgctataagaacagcatgggcaagagcctcccactcttttatatctacgactcatacctgacgtcccctgaggcctgggcccacctcctgacaccaaacgggccccattcgatccgcaacacgccctacgatggggtcttcatagcgctgctggtggaggagggccacacccacgatatcctggccgccggatttgacggcatgtacacctactttgcctccaatggtttctcctttggttcttcccatcagaactggaaagctgtgaagaacttttgtgatgccaacaacctcatgttcatccccagtgtggggcctggctacatagacaccagcattcggccctggaacaaccacaatacgcgcaacagggtcaatggcaagtactatgagacggccctgcaggcggccctgacagtgaggcccgagatcgtttccattacctccttcaatgagtggcacgagggcacccagattgagaaggccattcccaagaagacacccacccgcctgtatttggactacctgcctcaccagcccagcctgtacctggagctgacacgccgctgggcggagcacttcatcaaagagaaggagcagtggctcatgtgaggggcctgtaaatgggcgtgaggtgctgatgtccttgccttgctggaagatgtcaccatgtggggttcagctgaggttgtagccactcactcgttcccaggtcagaggtcagcagatgggtgtttctgggtgggccgtcaggcatgggcctgtgcaacacagagcccgttcctcaggcgagtggtgctgaggtgctctgtggtgatgggaacggcagaggctggcaggtgactgaacttagcccagggcagctccacatcctgggaacactttcatgtaaccccttctagttttgaactctgcagcaggctggtgctgtgtagtggccacccagtcaccacccttggaagggtgtcagggtctgggctcgcatgcaccctgctcccttctgccagcctgcatcctctcctcaggcctccttcccacatcatctgtcttctctaagttagggaaccatatttgagactttcaaaaagggaacttctaggtttaagctcctcccagtagattcctgaacccaattatcaggaaatcatcctgagcactcacaggttcatttaacactcactcatcaagcaccttcctatgtgctaggtgctggggaaaacttgaccaaggaagagttcctgtcctgaagcttccaggacccagctttccttttctggtgtggccttgtagctagtgcctgggcacaggtgtttttctttttgcagttttacctagtgctgggagttcagttctttttcctctagaaaaatacctctgtgctccagagcctaatttttcccagatgcatatttagctctagggagaggactaggaggaaatccccctccctttagctgcctgaactgactgaggcccactcactagagccatgttcagtgctactgtgattagtagtaattaaatatgaactggtattctcaa

SEQ ID NO: 2220 - protein, 235 aa, Homo sapiens; identical to SEQ ID NO: 67

SEQ ID NO: 2221 - DNA, 4962 bp, Homo sapiens
agtctaaagcctggctcccttccggcctggcgcgctacggttcccgcaggcgctccgcttcagcaccgcgggcgtggacagctccggggcgcgaggctctgggactcatctgcaggaagtgaacctggcaggaggcttgcttcaggtttttaggaaccatttttgcaattggagatgtttgtgaggaaaaaaatctctgttgaggggggtactgtgtgtctctgaagtggcctctgtgttgcgtctcaggcgtcctggtcctgtcctggtacccacctggcatggctgatgataacggggagccctcagatgacctggtgcccgccattctggacaccgcccatcagtacagcatccaggtatggctcccatggtgcattttaccgctataagaacagcatgggcaagagcctcccactcttttatatctacgactcatacctgacgtcccctgaggcctgggcccacctcctgacaccaaacgggccccattcgatccgcaacacgccctacgatggggtcttcatagcgctgctggtggaggagggccacacccacgatatcctggccgccggatttgacggcatgtacacctactttgcctccaatggtttctcctttggttcttcccatcagaactggaaagctgtgaagaacttttgtgatgccaacaacctcatgttcatccccagtgtggggcctggctacatagacaccagcattcggccctggaacaaccacaatacgcgcaacagggtcaatggcaagtactatgagacggccctgcaggcggccctgacagtgaggcccgagatcgtttccattacctccttcaatgagtggcacgagggcacccagattgagaaggccattcccaagaagacacccacccgcctgtatttggactacctgcctcaccagcccagcctgtacctggagctgacacgccgctgggcggagcacttcatcaaagagaaggagcagtggctcatgtgaggggcctgtaaatgggcgtgaggtgctgatgtccttgccttgctggaagatgtcaccatgtggggttcagctgaggttgtagccactcactcgttcccaggtcagaggtcagcagatgggtgtttctgggtgggccgtcaggcatgggcctgtgcaacacagagcccgttcctcaggcgagtggtgctgaggtgctctgtggtgatgggaacggcagaggctggcaggtgactgaacttagcccagggcagctccacatcctgggaacactttcatgtaaccccttctagttttgaactctgcagcaggctggtgctgtgtagtggccacccagtcaccacccttggaagggtgtcagggtctgggctcgcatgcaccctgctcccttctgccagcctgcatcctctcctcaggcctccttcccacatcatctgtcttctctaagttagggaaccatatttgagactttcaaaaagggaacttctaggtttaagctcctcccagtagattcctgaacccaattatcaggaaatcatcctgagcactcacaggttcatttaacactcactcatcaagcaccttcctatgtgctaggtgctggggaaaacttgaccaaggaagagttcctgtcctgaagcttccaggacccagctttccttttctggtgtggccttgtagctagtgcctgggcacaggtgtttttctttttgcagttttacctagtgctgggagttcagttctttttcctctagaaaaatacctctgtgctccagagcctaatttttcccagatgcatatttagctctagggagaggactaggaggaaatccccctccctttagctgcctgaactgactgaggcccactcactagagccatgttcagtgctactgtgattagtagtaattaaatatgaactggtattctcaagtaagcattccttttgctctctttaagacctcacagattctgaccttagattctgtgacaaactgatacaggagctgggctggctatggctttaccacaacaagtaggtttgcttaagaaattactaaacaatggctgggcgtggtggctcactcctgtaatcccagcactttgggaggccgagatgggcggatcacgaggtcaggagatcgagaccatcctggctaacagggtgaaaccacgtctctactaaaaatacaaaaaaattagccaggcgtagtggtgggcgcctgtagtcccagctacttgggaggctgaggcaggagaatggcgtgaacccgggaggcggagcttgcagtgagccgagatcacgccactgcactccagcctgggcgacagagcgagactccgtctcaaaaaaaaaaaagttactaaacaaggctgggcgtggtggctcacacctgtaatcccagcactttgggaggccaaggaaggtggatcacctgaggtcaggagttcgagaccagcctggccaacatggtgaaaccccatccctactaaaaatacaaaaattagctgggcgtgggtgcctgtaatcccagctacttctgaggctgaggcaggagaaccgcttgaacctgggaggcggaggttgcagtgagccaatgtggcaccactggactccagcctgggcaagagcaagactgtctcaaaacaaaaacaacaaacaaacaaacaaaaagaaaacacaaaaaacattactaaacaagatttctagagggaattaacaaaccagtgcttatttaccaataaactaatacgctaattgcaggaaccctgattaaagcaggcccctgttaacacaagattcttaggatatacttggaaacaggtgcattggaaaccactgtactgagaagtttatgggctcaagactgaattggaagctaggcgtggtcgctcatgcctgtaatcccagcactctgggaggctgaggtggaaggatgagttcaggagttcgagaccagcctgggcaacacagagagacgtgtctttaaaaaagtaaaaaatgggctgagtgccttggctcatgcctgtaatcccagcactttgggaagccaaggcgggtggatcacttcaggccaggagttcaagaacagcctgaccaacatggcaaaactccatctctactaaaaataccaaaaaaattagcagggtgtggtggtgcacacctgtagtcccagctactcaggaggctgatgtgtgagaatcacttgaacctgggaggcggagtttgcagcgagccaagatcgtgccactgcactccagtgtgggcaacagagattctgtctcaaaaaaaaaaaaaaaagactgaatcagaattttgggaactagggtacaagagggaaggggaggaaggaggaaatagaccccagtggtcacctcaaggacacccagccccagttaggtaactgatattaagccccaccagagagatgagcaggcctggccacctggctttggggcttagctggggaaaccaaggcaggcagggacagctgaaagggttggatgttgacctgtagtaatttacagaaggtagcaacactggcttcatttaacacacacacaatctgaaaaatactaaacatgggaaggccagggggcagaggcagccattctcacacactgctaacagcagtgtaacttgactcagttcttttgaaggctaatccatactgagagccataaatacttcctacactttgacctactctcctaaggaaataattcaaaagaagaaaaacaaaccatttacaaatatgtttaatagcagcatttctttaaagaaaaacaaagttcaaatgcccaataataattatgtttaacacttggtacacatataaatagacaaaaggctgcggagaacactggatttaaataaaggtgttatgggtataattaactataatttattttatgaataaataagaaaaaagtccctggctataaaggatagtggaggtttatttcccaatattcttccatttggactgaacccctgccaactaagcagacatcccactattacaccaaaaagactgctctccctgcgagcaattacaatacatgacaccactaggcccaatggctcagagggaagagtggcctgtggctcttcaatctttatccaaacctggttctagcttcaggagcctttggtcacctgagactttttatttattaatttttatgagacggagtattgctatgttgcccaggctgattctgaactcctgggctcaagcagttctcccgcctgggcctcccagaatgttgggattacaggcatgagccaccacacgcagccacctgagactttttaaacagcaccagcacttctggctggtttgaaccttaaatgccaccacccaccagagaggaggctctcactagattctaaatctgttatttaattacttttcaattgaaaaacaaaacagacagaagaaacttattagaataaggccacctaggaatgttcttaacttttccattcagcttttggctgatatatgaaaatacaaataaatacatcctttccccaggtgcaaggctaaaccagcagctccaagggcttggtctacagtgctcagaaagacacactgccttaaaagtcaggctagtgccctagctccggtggcctctgcaaatgaggccttgacagtcgtcagtggacagacacatagtatccagcaccaggtcttgggccttcctgcttcccagagtttcacaggtaggacgcatgtgaggggagcagtccgtacttctgttggaggatggctgtagtactttccagggcactgaggaggaaacaggacagttaccagtctgacttctcagaagtcccgagcccaccagaggctggtgagcagggacatcgaaactggctagccttgttaagccctgttcatcaacccttgatgaaaccttttgaatcctaagaaagccaggaaacttagtcccactgcaact

SEQ ID NO: 2222 - protein, 235 aa, Homo sapiens; identical to SEQ ID NO: 67

SEQ ID NO: 2223 - DNA, 779 bp, Homo sapiens
gtatggctcccatggtgcattttaccgctataagaacagcatgggcaagagcctcccactcttttatatctacgactcatacctgacgtcccctgaggcctgggcccacctcctgacaccaaacgggccccattcgatccgcaacacgccctacgatggggtcttcatagcgctgctggtggaggagggccacacccacgatatcctggccgccggatttgacggcatgtacacctactttgcctccaatggtttctcctttggttcttcccatcagaactggaaagctgtgaagaacttttgtgatgccaacaacctcatgttcatccccagtgtggggcctggctacatagacaccagcattcggccctggaacaaccacaatacgcgcaacagggtcaatggcaagtactatgagacggccctgcaggcggccctgacagtgaggcccgagatcgtttccattacctccttcaatgagtggcacgagggcacccagattgagaaggccattcccaagaagacacccacccgcctgtatttggactacctgcctcaccagcccagcctgtacctggagctgacacgccgctgggcggagcacttcatcaaagagaaggagcagtggctcatgtgaggggcctgtaaatgggcgtgaggtgctgatgtccttgccttgctggaagatgtcaccatgtggggttcagctgaggttgtagccatcactagagccatgttcagtgctactgtgattagtagtaattaaatatgaactggta

SEQ ID NO: 2224 - protein, 198 aa, Homo sapiens
MGKSLPLFYIYDSYLTSPEAWAHLLTPNGPHSIRNTPYDGVFIALLVEEGHTHDILAAGFDGMYTYFASNGFSFGSSHQNWKAVKNFCDANNLMFIPSVGPGYIDTSIRPWNNHNTRNRVNGKYYETALQAALTVRPEIVSITSFNEWHEGTQIEKAIPKKTPTRLYLDYLPHQPSLYLELTRRWAEHFIKEKEQWLM

SEQ ID NO: 2225 - DNA, 1105 bp, Homo sapiens
gtatggctcccatggtgcattttaccgctataagaacagcatgggcaagagcctcccactcttttatatctacgactcatacctgacgtcccctgaggcctgggcccacctcctgacaccaaacgggccccattcgatccgcaacacgccctacgatggggtcttcatagcgctgctggtggaggagggccacacccacgatatcctggccgccggatttgacggcatgtacacctactttgcctccaatggtttctcctttggttcttcccatcagaactggaaagctgtgaagaacttttgtgatgccaacaacctcatgttcatccccagtgtggggcctggctacatagacaccagcattcggccctggaacaaccacaatacgcgcaacagggtcaatggcaagtactatgagacggccctgcaggcggccctgacagtgaggcccgagatcgtttccattacctccttcaatgagtggcacgagggcacccagattgagaaggccattcccaagaagacacccacccgcctgtatttggactacctgcctcaccagcccagcctgtacctggagctgacacgccgctgggcggagcaatcatctgtcttctctaagttagggaaccatatttgagactttcaaaaagggaacttctaggtttaagctcctcccagtagattcctgaacccaattatcaggaaatcatcctgagcactcacaggttcatttaacactcactcatcaagcaccttcctatgtgctaggtgctggggaaaacttgaccaaggaagagttcctgtcctgaagcttccaggacccagctttccttttctggtgtggccttgtagctagtgcctgggcacaggtgtttttctttttgcagttttacctagtgctgggagttcagttctttttcctctagaaaaatacctctgtgctccagagcctaatttttcccagatgcatatttagctctagggagaggactaggaggaaatccccctccctttagctgcctgaactgactgaggcccactcactagagccatgttcagtgctactgtgattagtagtaattaaatatgaactggtattctc

SEQ ID NO: 2226 - protein, 199 aa, Homo sapiens
MGKSLPLFYIYDSYLTSPEAWAHLLTPNGPHSIRNTPYDGVFIALLVEEGHTHDILAAGFDGMYTYFASNGFSFGSSHQNWKAVKNFCDANNLMFIPSVGPGYIDTSIRPWNNHNTRNRVNGKYYETALQAALTVRPEIVSITSFNEWHEGTQIEKAIPKKTPTRLYLDYLPHQPSLYLELTRRWAEQSSVFSKLGNHI

SEQ ID NO: 2227 - DNA, 1468 bp, Homo sapiens
gtatggctcccatggtgcattttaccgctataagaacagcatgggcaagagcctcccactcttttatatctacgactcatacctgacgtcccctgaggcctgggcccacctcctgacaccaaacgggccccattcgatccgcaacacgccctacgatggggtcttcatagcgctgctggtggaggagggccacacccacgatatcctggccgccggatttgacggcatgtacacctactttgcctccaatggtttctcctttggttcttcccatcagaactggaaagctgtgaagaacttttgtgatgccaacaacctcatgttcatccccagtgtggggcctggctacatagacaccagcattcggccctggaacaaccacaatacgcgcaacagggtcaatggcaagtactatgagacggccctgcaggcggccctgacagtgaggcccgagatcgtttccattacctccttcaatgagtggcacgagggcacccagattgagaaggccattcccaagaagacacccacccgcctgtatttggactacctgcctcaccagcccagcctgtacctggagctgacacgccgctgggcggagcacttcatcaaagagaaggagcagtggctcatgtgaggggcctgtaaatgggcgtgaggtgctgatgtccttgccttgctggaagatgtcaccatgtggggttcagctgaggttgtagccactcactcgttcccaggtcagaggtcagcagatgggtgtttctgggtgggccgtcaggcatgggcctgtgcaacacagagcccgttcctcaggcgagtggtgctgaggtgctctgtggtgatgggaacggcagaggctggcaggtgactgaacttagcccagggcagctccacatcctgggaacactttcatgtaaccccttctagttttgaactctgcatcctctcctcaggcctccttcccacatcatctgtcttctctaagttagggaaccatatttgagactttcaaaaagggaacttctaggtttaagctcctcccagtagattcctgaacccaattatcaggaaatcatcctgagcactcacaggttcatttaacactcactcatcaagcaccttcctatgtgctaggtgctggggaaaacttgaccaaggaagagttcctgtcctgaagcttccaggacccagctttccttttctggtgtggccttgtagctagtgcctgggcacaggtgtttttctttttgcagttttacctagtgctgggagttcagttctttttcctctagaaaaatacctctgtgctccagagcctaatttttcccagatgcatatttagctctagggagaggactaggaggaaatccccctccctttagctgcctgaactgactgaggcccactcactagagccatgttcagtgctactgtgattagtagtaattaaatatgaactggtattctc

SEQ ID NO: 2228 - protein, 198 aa, Homo sapiens; identical to SEQ ID NO: 2224

SEQ ID NO: 2229 - DNA, 4143 bp, Homo sapiens
gtatggctcccatggtgcattttaccgctataagaacagcatgggcaagagcctcccactcttttatatctacgactcatacctgacgtcccctgaggcctgggcccacctcctgacaccaaacgggccccattcgatccgcaacacgccctacgatggggtcttcatagcgctgctggtggaggagggccacacccacgatatcctggccgccggatttgacggcatgtacacctactttgcctccaatggtttctcctttggttcttcccatcagaactggaaagctgtgaagaacttttgtgatgccaacaacctcatgttcatccccagtgtggggcctggctacatagacaccagcattcggccctggaacaaccacaatacgcgcaacagggtcaatggcaagtactatgagacggccctgcaggcggccctgacagtgaggcccgagatcgtttccattacctccttcaatgagtggcacgagggcacccagattgagaaggccattcccaagaagacacccacccgcctgtatttggactacctgcctcaccagcccagcctgtacctggagctgacacgccgctgggcggagcaatcatctgtcttctctaagttagggaaccatatttgagactttcaaaaagggaacttctaggtttaagctcctcccagtagattcctgaacccaattatcaggaaatcatcctgagcactcacaggttcatttaacactcactcatcaagcaccttcctatgtgctaggtgctggggaaaacttgaccaaggaagagttcctgtcctgaagcttccaggacccagctttccttttctggtgtggccttgtagctagtgcctgggcacaggtgtttttctttttgcagttttacctagtgctgggagttcagttctttttcctctagaaaaatacctctgtgctccagagcctaatttttcccagatgcatatttagctctagggagaggactaggaggaaatccccctccctttagctgcctgaactgactgaggcccactcactagagccatgttcagtgctactgtgattagtagtaattaaatatgaactggtattctcaagtaagcattccttttgctctctttaagacctcacagattctgaccttagattctgtgacaaactgatacaggagctgggctggctatggctttaccacaacaagtaggtttgcttaagaaattactaaacaatggctgggcgtggtggctcactcctgtaatcccagcactttgggaggccgagatgggcggatcacgaggtcaggagatcgagaccatcctggctaacagggtgaaaccacgtctctactaaaaatacaaaaaaattagccaggcgtagtggtgggcgcctgtagtcccagctacttgggaggctgaggcaggagaatggcgtgaacccgggaggcggagcttgcagtgagccgagatcacgccactgcactccagcctgggcgacagagcgagactccgtctcaaaaaaaaaaaagttactaaacaaggctgggcgtggtggctcacacctgtaatcccagcactttgggaggccaaggaaggtggatcacctgaggtcaggagttcgagaccagcctggccaacatggtgaaaccccatccctactaaaaatacaaaaattagctgggcgtgggtgcctgtaatcccagctacttctgaggctgaggcaggagaaccgcttgaacctgggaggcggaggttgcagtgagccaatgtggcaccactggactccagcctgggcaagagcaagactgtctcaaaacaaaaacaacaaacaaacaaacaaaaagaaaacacaaaaaacattactaaacaagatttctagagggaattaacaaaccagtgcttatttaccaataaactaatacgctaattgcaggaaccctgattaaagcaggcccctgttaacacaagattcttaggatatacttggaaacaggtgcattggaaaccactgtactgagaagtttatgggctcaagactgaattggaagctaggcgtggtcgctcatgcctgtaatcccagcactctgggaggctgaggtggaaggatgagttcaggagttcgagaccagcctgggcaacacagagagacgtgtctttaaaaaagtaaaaaatgggctgagtgccttggctcatgcctgtaatcccagcactttgggaagccaaggcgggtggatcacttcaggccaggagttcaagaacagcctgaccaacatggcaaaactccatctctactaaaaataccaaaaaaattagcagggtgtggtggtgcacacctgtagtcccagctactcaggaggctgatgtgtgagaatcacttgaacctgggaggcggagtttgcagcgagccaagatcgtgccactgcactccagtgtgggcaacagagattctgtctcaaaaaaaaaaaaaaaagactgaatcagaattttgggaactagggtacaagagggaaggggaggaaggaggaaatagaccccagtggtcacctcaaggacacccagccccagttaggtaactgatattaagccccaccagagagatgagcaggcctggccacctggctttggggcttagctggggaaaccaaggcaggcagggacagctgaaagggttggatgttgacctgtagtaatttacagaaggtagcaacactggcttcatttaacacacacacaatctgaaaaatactaaacatgggaaggccagggggcagaggcagccattctcacacactgctaacagcagtgtaacttgactcagttcttttgaaggctaatccatactgagagccataaatacttcctacactttgacctactctcctaaggaaataattcaaaagaagaaaaacaaaccatttacaaatatgtttaatagcagcatttctttaaagaaaaacaaagttcaaatgcccaataataattatgtttaacacttggtacacatataaatagacaaaaggctgcggagaacactggatttaaataaaggtgttatgggtataattaactataatttattttatgaataaataagaaaaaagtccctggctataaaggatagtggaggtttatttcccaatattcttccatttggactgaacccctgccaactaagcagacatcccactattacaccaaaaagactgctctccctgcgagcaattacaatacatgacaccactaggcccaatggctcagagggaagagtggcctgtggctcttcaatctttatccaaacctggttctagcttcaggagcctttggtcacctgagactttttatttattaatttttatgagacggagtattgctatgttgcccaggctgattctgaactcctgggctcaagcagttctcccgcctgggcctcccagaatgttgggattacaggcatgagccaccacacgcagccacctgagactttttaaacagcaccagcacttctggctggtttgaaccttaaatgccaccacccaccagagaggaggctctcactagattctaaatctgttatttaattacttttcaattgaaaaacaaaacagacagaagaaacttattagaataaggccacctaggaatgttcttaacttttccattcagcttttggctgatatatgaaaatacaaataaatacatcctttccccaggtgcaaggctaaaccagcagctccaagggcttggtctacagtgctcagaaagacacactgccttaaaagtcaggctagtgccctagctccggtggcctctgcaaatgaggccttgacagtcgtcagtggacagacacatagtatccagcaccaggtcttgggccttcctgcttcccagagtttcacaggtaggacgcatgtgaggggagcagtccgtacttctgttggaggatggctgtagtactttccagggcactgaggaggaaacaggacagttaccagtctgacttctcagaagtcccgagcccaccagaggctggtgagcagggacatcgaaactggctagccttgttaagccctgttcatcaacccttgatgaaaccttttgaatcctaagaaagccaggaaacttagtcccactgcaact

SEQ ID NO: 2230 - protein, 199 aa, Homo sapiens; identical to SEQ ID NO: 2226

SEQ ID NO: 2231 - DNA, 4506 bp, Homo sapiens
gtatggctcccatggtgcattttaccgctataagaacagcatgggcaagagcctcccactcttttatatctacgactcatacctgacgtcccctgaggcctgggcccacctcctgacaccaaacgggccccattcgatccgcaacacgccctacgatggggtcttcatagcgctgctggtggaggagggccacacccacgatatcctggccgccggatttgacggcatgtacacctactttgcctccaatggtttctcctttggttcttcccatcagaactggaaagctgtgaagaacttttgtgatgccaacaacctcatgttcatccccagtgtggggcctggctacatagacaccagcattcggccctggaacaaccacaatacgcgcaacagggtcaatggcaagtactatgagacggccctgcaggcggccctgacagtgaggcccgagatcgtttccattacctccttcaatgagtggcacgagggcacccagattgagaaggccattcccaagaagacacccacccgcctgtatttggactacctgcctcaccagcccagcctgtacctggagctgacacgccgctgggcggagcacttcatcaaagagaaggagcagtggctcatgtgaggggcctgtaaatgggcgtgaggtgctgatgtccttgccttgctggaagatgtcaccatgtggggttcagctgaggttgtagccactcactcgttcccaggtcagaggtcagcagatgggtgtttctgggtgggccgtcaggcatgggcctgtgcaacacagagcccgttcctcaggcgagtggtgctgaggtgctctgtggtgatgggaacggcagaggctggcaggtgactgaacttagcccagggcagctccacatcctgggaacactttcatgtaaccccttctagttttgaactctgcatcctctcctcaggcctccttcccacatcatctgtcttctctaagttagggaaccatatttgagactttcaaaaagggaacttctaggtttaagctcctcccagtagattcctgaacccaattatcaggaaatcatcctgagcactcacaggttcatttaacactcactcatcaagcaccttcctatgtgctaggtgctggggaaaacttgaccaaggaagagttcctgtcctgaagcttccaggacccagctttccttttctggtgtggccttgtagctagtgcctgggcacaggtgtttttctttttgcagttttacctagtgctgggagttcagttctttttcctctagaaaaatacctctgtgctccagagcctaatttttcccagatgcatatttagctctagggagaggactaggaggaaatccccctccctttagctgcctgaactgactgaggcccactcactagagccatgttcagtgctactgtgattagtagtaattaaatatgaactggtattctcaagtaagcattccttttgctctctttaagacctcacagattctgaccttagattctgtgacaaactgatacaggagctgggctggctatggctttaccacaacaagtaggtttgcttaagaaattactaaacaatggctgggcgtggtggctcactcctgtaatcccagcactttgggaggccgagatgggcggatcacgaggtcaggagatcgagaccatcctggctaacagggtgaaaccacgtctctactaaaaatacaaaaaaattagccaggcgtagtggtgggcgcctgtagtcccagctacttgggaggctgaggcaggagaatggcgtgaacccgggaggcggagcttgcagtgagccgagatcacgccactgcactccagcctgggcgacagagcgagactccgtctcaaaaaaaaaaaagttactaaacaaggctgggcgtggtggctcacacctgtaatcccagcactttgggaggccaaggaaggtggatcacctgaggtcaggagttcgagaccagcctggccaacatggtgaaaccccatccctactaaaaatacaaaaattagctgggcgtgggtgcctgtaatcccagctacttctgaggctgaggcaggagaaccgcttgaacctgggaggcggaggttgcagtgagccaatgtggcaccactggactccagcctgggcaagagcaagactgtctcaaaacaaaaacaacaaacaaacaaacaaaaagaaaacacaaaaaacattactaaacaagatttctagagggaattaacaaaccagtgcttatttaccaataaactaatacgctaattgcaggaaccctgattaaagcaggcccctgttaacacaagattcttaggatatacttggaaacaggtgcattggaaaccactgtactgagaagtttatgggctcaagactgaattggaagctaggcgtggtcgctcatgcctgtaatcccagcactctgggaggctgaggtggaaggatgagttcaggagttcgagaccagcctgggcaacacagagagacgtgtctttaaaaaagtaaaaaatgggctgagtgccttggctcatgcctgtaatcccagcactttgggaagccaaggcgggtggatcacttcaggccaggagttcaagaacagcctgaccaacatggcaaaactccatctctactaaaaataccaaaaaaattagcagggtgtggtggtgcacacctgtagtcccagctactcaggaggctgatgtgtgagaatcacttgaacctgggaggcggagtttgcagcgagccaagatcgtgccactgcactccagtgtgggcaacagagattctgtctcaaaaaaaaaaaaaaaagactgaatcagaattttgggaactagggtacaagagggaaggggaggaaggaggaaatagaccccagtggtcacctcaaggacacccagccccagttaggtaactgatattaagccccaccagagagatgagcaggcctggccacctggctttggggcttagctggggaaaccaaggcaggcagggacagctgaaagggttggatgttgacctgtagtaatttacagaaggtagcaacactggcttcatttaacacacacacaatctgaaaaatactaaacatgggaaggccagggggcagaggcagccattctcacacactgctaacagcagtgtaacttgactcagttcttttgaaggctaatccatactgagagccataaatacttcctacactttgacctactctcctaaggaaataattcaaaagaagaaaaacaaaccatttacaaatatgtttaatagcagcatttctttaaagaaaaacaaagttcaaatgcccaataataattatgtttaacacttggtacacatataaatagacaaaaggctgcggagaacactggatttaaataaaggtgttatgggtataattaactataatttattttatgaataaataagaaaaaagtccctggctataaaggatagtggaggtttatttcccaatattcttccatttggactgaacccctgccaactaagcagacatcccactattacaccaaaaagactgctctccctgcgagcaattacaatacatgacaccactaggcccaatggctcagagggaagagtggcctgtggctcttcaatctttatccaaacctggttctagcttcaggagcctttggtcacctgagactttttatttattaatttttatgagacggagtattgctatgttgcccaggctgattctgaactcctgggctcaagcagttctcccgcctgggcctcccagaatgttgggattacaggcatgagccaccacacgcagccacctgagactttttaaacagcaccagcacttctggctggtttgaaccttaaatgccaccacccaccagagaggaggctctcactagattctaaatctgttatttaattacttttcaattgaaaaacaaaacagacagaagaaacttattagaataaggccacctaggaatgttcttaacttttccattcagcttttggctgatatatgaaaatacaaataaatacatcctttccccaggtgcaaggctaaaccagcagctccaagggcttggtctacagtgctcagaaagacacactgccttaaaagtcaggctagtgccctagctccggtggcctctgcaaatgaggccttgacagtcgtcagtggacagacacatagtatccagcaccaggtcttgggccttcctgcttcccagagtttcacaggtaggacgcatgtgaggggagcagtccgtacttctgttggaggatggctgtagtactttccagggcactgaggaggaaacaggacagttaccagtctgacttctcagaagtcccgagcccaccagaggctggtgagcagggacatcgaaactggctagccttgttaagccctgttcatcaacccttgatgaaaccttttgaatcctaagaaagccaggaaacttagtcccactgcaact

SEQ ID NO: 2232 - protein, 198 aa, Homo sapiens; identical to SEQ ID NO: 2224

SEQ ID NO: 2233 - DNA, 1061 bp, Homo sapiens
aacacgccctacgatggggtcttcatagcgctgctggtggaggagggccacacccacgatatcctggccgccggatttgacggcatgtacacctactttgcctccaatggtttctcctttggttcttcccatcagaactggaaagctgtgaagaacttttgtgatgccaacaaccacaatacgcgcaacagggtcaatggcaagtactatgagacggccctgcaggcggccctgacagtgaggcccgagatcgtttccattacctccttcaatgagtggcacgagggcacccagattgagaaggccattcccaagaagacacccacccgcctgtatttggactacctgcctcaccagcccagcctgtacctggagctgacacgccgctgggcggagcacttcatcaaagagaaggagcagtggctcatgtgaggggcctgtaaatgggcgtgaggtgctgatgtccttgccttgctggaagatggtgtcagggtctgggctcgcatgcaccctgctcccttctgccagcctgcatcctctcctcaggcctccttcccacatcatctgtcttctctaagttagggaaccatatttgagactttcaaaaagggaacttctaggtttaagctcctcccagtagattcctgaacccaattatcaggaaatcatcctgagcactcacaggttcatttaacactcactcatcaagcaccttcctatgtgctaggtgctggggaaaacttgaccaaggaagagttcctgtcctgaagcttccaggacccagctttccttttctggtgtggccttgtagctagtgcctgggcacaggtgtttttctttttgcagttttacctagtgctgggagttcagttctttttcctctagaaaaatacctctgtgctccagagcctaatttttcccagatgcatatttagctctagggagaggactaggaggaaatccccctccctttagctgcctgaactgactgaggcccactcactagagccatgttcagtgctactgtgattagtagtaattaaatatgaactggtattctc

SEQ ID NO: 2234 - protein, 115 aa, Homo sapiens
MYTYFASNGFSFGSSHQNWKAVKNFCDANNHNTRNRVNGKYYETALQAALTVRPEIVSITSFNEWHEGTQIEKAIPKKTPTRLYLDYLPHQPSLYLELTRRWAEHFIKEKEQWLM

SEQ ID NO: 2235 - DNA, 4078 bp, Homo sapiens
ttcatagcgctgctggtggaggagggccacacccacgatatcctggccgccggatttgacggcatgtacacctactttgcctccaatggtttctcctttggttcttcccatcagaactggaaagctgtgaagaacttttgtgatgccaacaaccacaatacgcgcaacagggtcaatggcaagtactatgagacggccctgcaggcggccctgacagtgaggcccgagatcgtttccattacctccttcaatgagtggcacgagggcacccagattgagaaggccattcccaagaagacacccacccgcctgtatttggactacctgcctcaccagcccagcctgtacctggagctgacacgccgctgggcggagcacttcatcaaagagaaggagcagtggctcatgtgaggggcctgtaaatgggcgtgaggtgctgatgtccttgccttgctggaagatggtgtcagggtctgggctcgcatgcaccctgctcccttctgccagcctgcatcctctcctcaggcctccttcccacatcatctgtcttctctaagttagggaaccatatttgagactttcaaaaagggaacttctaggtttaagctcctcccagtagattcctgaacccaattatcaggaaatcatcctgagcactcacaggttcatttaacactcactcatcaagcaccttcctatgtgctaggtgctggggaaaacttgaccaaggaagagttcctgtcctgaagcttccaggacccagctttccttttctggtgtggccttgtagctagtgcctgggcacaggtgtttttctttttgcagttttacctagtgctgggagttcagttctttttcctctagaaaaatacctctgtgctccagagcctaatttttcccagatgcatatttagctctagggagaggactaggaggaaatccccctccctttagctgcctgaactgactgaggcccactcactagagccatgttcagtgctactgtgattagtagtaattaaatatgaactggtattctcaagtaagcattccttttgctctctttaagacctcacagattctgaccttagattctgtgacaaactgatacaggagctgggctggctatggctttaccacaacaagtaggtttgcttaagaaattactaaacaatggctgggcgtggtggctcactcctgtaatcccagcactttgggaggccgagatgggcggatcacgaggtcaggagatcgagaccatcctggctaacagggtgaaaccacgtctctactaaaaatacaaaaaaattagccaggcgtagtggtgggcgcctgtagtcccagctacttgggaggctgaggcaggagaatggcgtgaacccgggaggcggagcttgcagtgagccgagatcacgccactgcactccagcctgggcgacagagcgagactccgtctcaaaaaaaaaaaagttactaaacaaggctgggcgtggtggctcacacctgtaatcccagcactttgggaggccaaggaaggtggatcacctgaggtcaggagttcgagaccagcctggccaacatggtgaaaccccatccctactaaaaatacaaaaattagctgggcgtgggtgcctgtaatcccagctacttctgaggctgaggcaggagaaccgcttgaacctgggaggcggaggttgcagtgagccaatgtggcaccactggactccagcctgggcaagagcaagactgtctcaaaacaaaaacaacaaacaaacaaacaaaaagaaaacacaaaaaacattactaaacaagatttctagagggaattaacaaaccagtgcttatttaccaataaactaatacgctaattgcaggaaccctgattaaagcaggcccctgttaacacaagattcttaggatatacttggaaacaggtgcattggaaaccactgtactgagaagtttatgggctcaagactgaattggaagctaggcgtggtcgctcatgcctgtaatcccagcactctgggaggctgaggtggaaggatgagttcaggagttcgagaccagcctgggcaacacagagagacgtgtctttaaaaaagtaaaaaatgggctgagtgccttggctcatgcctgtaatcccagcactttgggaagccaaggcgggtggatcacttcaggccaggagttcaagaacagcctgaccaacatggcaaaactccatctctactaaaaataccaaaaaaattagcagggtgtggtggtgcacacctgtagtcccagctactcaggaggctgatgtgtgagaatcacttgaacctgggaggcggagtttgcagcgagccaagatcgtgccactgcactccagtgtgggcaacagagattctgtctcaaaaaaaaaaaaaaaagactgaatcagaattttgggaactagggtacaagagggaaggggaggaaggaggaaatagaccccagtggtcacctcaaggacacccagccccagttaggtaactgatattaagccccaccagagagatgagcaggcctggccacctggctttggggcttagctggggaaaccaaggcaggcagggacagctgaaagggttggatgttgacctgtagtaatttacagaaggtagcaacactggcttcatttaacacacacacaatctgaaaaatactaaacatgggaaggccagggggcagaggcagccattctcacacactgctaacagcagtgtaacttgactcagttcttttgaaggctaatccatactgagagccataaatacttcctacactttgacctactctcctaaggaaataattcaaaagaagaaaaacaaaccatttacaaatatgtttaatagcagcatttctttaaagaaaaacaaagttcaaatgcccaataataattatgtttaacacttggtacacatataaatagacaaaaggctgcggagaacactggatttaaataaaggtgttatgggtataattaactataatttattttatgaataaataagaaaaaagtccctggctataaaggatagtggaggtttatttcccaatattcttccatttggactgaacccctgccaactaagcagacatcccactattacaccaaaaagactgctctccctgcgagcaattacaatacatgacaccactaggcccaatggctcagagggaagagtggcctgtggctcttcaatctttatccaaacctggttctagcttcaggagcctttggtcacctgagactttttatttattaatttttatgagacggagtattgctatgttgcccaggctgattctgaactcctgggctcaagcagttctcccgcctgggcctcccagaatgttgggattacaggcatgagccaccacacgcagccacctgagactttttaaacagcaccagcacttctggctggtttgaaccttaaatgccaccacccaccagagaggaggctctcactagattctaaatctgttatttaattacttttcaattgaaaaacaaaacagacagaagaaacttattagaataaggccacctaggaatgttcttaacttttccattcagcttttggctgatatatgaaaatacaaataaatacatcctttccccaggtgcaaggctaaaccagcagctccaagggcttggtctacagtgctcagaaagacacactgccttaaaagtcaggctagtgccctagctccggtggcctctgcaaatgaggccttgacagtcgtcagtggacagacacatagtatccagcaccaggtcttgggccttcctgcttcccagagtttcacaggtaggacgcatgtgaggggagcagtccgtacttctgttggaggatggctgtagtactttccagggcactgaggaggaaacaggacagttaccagtctgacttctcagaagtcccgagcccaccagaggctggtgagcagggacatcgaaactggctagccttgttaagccctgttcatcaacccttgatgaaaccttttgaatcctaagaaagccaggaaacttagtcccactgcaact

SEQ ID NO: 2236 - protein, 115 aa, Homo sapiens; identical to SEQ ID NO: 2234

SEQ ID NO: 2237 - DNA, 895 bp, Homo sapiens
ctccttcaatgagtggcacgagggcacccagattgagaaggccattcccaagaagacacccacccgcctgtatttggactacctgcctcaccagcccagcctgtacctggagctgacacgccgctgggcggagcacttcatcaaagagaaggagcagtggctcatgtgaggggcctgtaaatgggcgtgaggtgctgatgtccttgccttgctggaagatgtcaccatgtggggttcagctgaggttgtagccactcactcgttcccaggtcagaggtcagcagatgggtgtttctgggtgggccgtcaggcatgggcctgtgcaacacagagcccgttcctcaggcgagtggtgctgaggtgctctgtggtgatgggaacggcagaggctggcaggtgactgaacttagcccagggcagctccacatcctgggaacactttcatgtaaccccttctagttttgaactctgcagcaggctggtgctgtgtagaaatcatcctgagcactcacaggttcatttaacactcactcatcaagcaccttcctatgtgctaggtgctggggaaaacttgaccaaggaagagttcctgtcctgaagcttccaggacccagctttccttttctggtgtggccttgtagctagtgcctgggcacaggtgtttttctttttgcagttttacctagtgctgggagttcagttctttttcctctagaaaaatacctctgtgctccagagcctaatttttcccagatgcatatttagctctagggagaggactaggaggaaatccccctccctttagctgcctgaactgactgaggcccactcactagagccatgttcagtgctactgtgattagtagtaattaaatatgaactggtattctcaagt

SEQ ID NO: 2238 - protein, 57 aa, Homo sapiens
MWGSAEVVATHSFPGQRSADGCFWVGRQAWACATQSPFLRRVVLRCSVVMGTAEAGR

SEQ ID NO: 2239 - DNA, 1845 bp, Homo sapiens
tcccggaagcgggcctgggcggatgtctccggcgcgtcggtgcagggggatgagggccgcggtggctgccagcgtggggttgagcgaggggcctgctggctcccggagcggtcgcctcttccgcccgccgagtcccgctccggcggcccccggcgcccggctgttgcggctcccggggagcggggccgtgcaggccgcgagcccggagcgcgccggctggaccgaggcgctgcgggccgccgtggccgagctgcgcgccggcgccgtggtggccgtccccaccgatacgctgtacggcctggcctgcgcggcgagctgctcggcggctctgcgcgctgtgtaccgcctcaagggtcgcagcgaggccaagcctctggccgtatgcctcggccgcgtggccgacgtctacagatactgccgtgtgagagtacctgaggggctcctgaaagacctactgccaggaccagtgaccctggtgatggaacgctcggaggagctcaacaaggacctaaacccttttacgcctcttgtaggcattcggattcctgatcatgcttttatgcaagacttggctcagatgtttgagggtccgcttgctctcactagtgccaacctcagctcccaggccagttctctgaatgtcgaggagttccaggatctctggcctcagttgtccttggttattgatgggggacaaattggggatggccagagccccgagtgtcgccttggctcaactgtggttgatttgtctgtgcccggaaagtttggcatcattcgtccaggctgtgccctggaaagtactacagccatcctccaacagaagtacggactgctcccctcacatgcgtcctacctgtgaaactctgggaagcaggaaggcccaagacctggtgctggatactatgtgtctgtccactgacgactgtcaaggcctcatttgcagaggccaccggagctagggcactagcctgacttttaaggcagtgtgtctttctgagcactgtagaccaagcccttggagctgctggtttagccttgcacctggggaaaggatgtatttatttgtattttcatatatcagccaaaagctgaatggaaaagttaagaacattcctaggtggccttattctaataagtttcttctgtctgttttgtttttcaattgaaaagtaattaaataacagatttagaatctagtgagagcctcctctctggtgggtggtggcatttaaggttcaaaccagccagaagtgctggtgctgtttaaaaagtctcaggtggctgcgtgtggtggctcatgcctgtaatcccaacattctgggaggcccaggcgggagaactgcttgagcccaggagttcagaatcagcctgggcaacatagcaatactccgtctcataaaaattaataaataaaaagtctcaggtgaccaaaggctcctgaagctagaaccaggtttggataaagattgaagagccacaggccactcttccctctgagccattgggcctagtggtgtcatgtattgtaattgctcgcagggagagcagtctttttggtgtaatagtgggatgtctgcttagttggcaggggttcagtccaaatggaagaatattgggaaataaacctccactatcctttatagccagggacttttttcttatttattcataaaataaattatagttaattatacccataacacctttatttaaatccagtgttctccgcagccttttgtctatttatatgtgtaccaagtgttaaacataattattattgggcatttgaactttgtttttctttaaagaaatgctgctattaaacatatttgtaaatggttt

SEQ ID NO: 2240 - protein, 279 aa, Homo sapiens; identical to SEQ ID NO: 69

SEQ ID NO: 2241 - DNA, 1198 bp, Homo sapiens
tcccggaagcgggcctgggcggatgtctccggcgcgtcggtgcagggggatgagggccgcggtggctgccagcgtggggttgagcgaggggcctgctggctcccggagcggtcgcctcttccgcccgccgagtcccgctccggcggcccccggcgcccggctgttgcggctcccggggagcggggccgtgcaggccgcgagcccggagcgcgccggctggaccgaggcgctgcgggccgccgtggccgagctgcgcgccggcgccgtggtggccgtccccaccgatacgctgtacggcctggcctgcgcggcgagctgctcggcggctctgcgcgctgtgtaccgcctcaagggtcgcagcgaggccaagcctctggccgtatgcctcggccgcgtggccgacgtctacagatactgccgtgtgagagtacctgaggggctcctgaaagacctactgccaggaccagtgaccctggtgatggaacgctcggaggagctcaacaaggacctaaacccttttacgcctcttgtaggcattcggattcctgatcatgcttttatgcaagacttggctcagatgtttgagggtccgcttgctctcactagtgccaacctcagctcccaggccagttctctgaatgtcgaggagttccaggatctctggcctcagttgtccttggttattgatgggggacaaattggggatggccagagccccgagtgtcgccttggctcaactgtggttgatttgtctgtgcccggaaagtttggcatcattcgtccaggctgtgccctggaaagtactacagccatcctccaacagaagtacggactgctcccctcacatgcgtcctacctgtgaaactctgggaagcaggaaggcccaagacctggtgctggatactatgtgtctgtccactgacgactgtcaaggcctcatttgcagaggccaccggagctagggcactagcctgacttttaaggcagtgtgtctttctgagcactgtagaccaagcccttggagctgctggtttagccttgcacctggggaaaggatgtatttatttgtattttcatatatcagccaaaagctgaatggaaaagttaagaacattcctaggtggccttattctaataagtttcttctgtctgttttgtttttcaattgaaaagtaattaaataacagatttagaatct

SEQ ID NO: 2242 - protein, 279 aa, Homo sapiens; identical to SEQ ID NO: 69

SEQ ID NO: 2243 - DNA, 1133 bp, Homo sapiens
tcccggaagcgggcctgggcggatgtctccggcgcgtcggtgcagggggatgagggccgcggtggctgccagcgtggggttgagcgaggggcctgctggctcccggagcggtcgcctcttccgcccgccgagtcccgctccggcggcccccggcgcccggctgttgcggctcccggggagcggggccgtgcaggccgcgagcccggagcgcgccggctggaccgaggcgctgcgggccgccgtggccgagctgcgcgccggcgccgtggtggccgtccccaccgatacgctgtacggcctggcctgcgcggcgagctgctcggcggctctgcgcgctgtgtaccgcctcaagggtcgcagcgaggccaagcctctggccgtatgcctcggccgcgtggccgacgtctacagatactgccgtgtgagagtacctgaggggctcctgaaagacctactgccaggaccagtgaccctggtgatggaacgctcggaggagctcaacaaggacctaaacccttttacgcctcttgtaggcattcggattcctgatcatgcttttatgcaagacttggctcagatgtttgagggtccgcttgctctcactagtgccaacctcagctcccaggccagttctctgaatgtcgaggagttccaggatctctggcctcagttgtccttggttattgatgggggacaaattggggatggccagagccccgagtgtcgccttggctcaactgtggttgatttgtctgtgcccggaaagtttggcatcattcgtccaggctgtgccctggaaagtactacagccatcctccaacagaagtacggactgctcccctcacatgcgtcctacctgtgaaactctgggaagcaggaaggcccaagacctggtgctggatactatgtgtctgtccactgacgactgtcaaggcctcatttgcagaggccaccggagctagggcactagcctgacttttaaggcagtgtgtctttctgagcactgtagaccaagcccttggagctgctggtttagccttgcacctggggaaaggatgtatttatttgtattttcatatatcagccaaaagctgaatggaaaagttaagaacattcctaggtggccttattct

SEQ ID NO: 2244 - protein, 279 aa, Homo sapiens; identical to SEQ ID NO: 69

SEQ ID NO: 2245 - DNA, 2553 bp, Homo sapiens
tttgagataaaatctttcaaatttttttaatttatattgccccccaccacctccctgccagctgggcaaccttcccactgttggcccaagaactctcatgcctggccatcccagtgtactatcaatgccactgattcacagaaaacagtatgtgcgctggtgacatttccaggggaaggactgggtaaactcacctcgacattcagagaactggcctgggagctgaggttggcactagtgagagcaagcggaccctcaaacatctgagccaagtcttgcataaaagcatgatcaggaatccgaatgcctacaagctgtaaggcaaggggaaagggatcatgagaaaggttggaagggataagagggtaagtcttatctggatcctagtgaaagccaagtggcctggagtctggggacacaagagaaaacttgactcacaggcgtaaaagggtttaggtccttgttgagctcctccgagcgttccatcaccagggtcactggtcctggcagtaggtctttcaggagcccctcaggtactctcacacggcagtatctgggaaacacagaagaataaatccattcaaaattgaagggccactggtggtcctttcctagactctaggcagacgtagaaaaggaatccttcgagtttacaatgggagccgcctgtctccctgcttcacctccctaagagcttgagcagaaagcagggctccagaggcgcacccctggcttgacgcccatgtgcctctggtctcagggactacaacagctgcaccgctgtgatatcatgatagtgggatcaagctccacgttttattttcttcaaggcattcgctattaaattaagctactgtgtttgtttgcttttttcccgggggcctccccaattagcacaaatacgccaagggaacagggtccctgcctttctcgtgtgttgctgcttcccagcagcatgtagttcagggcccggggcacgttaagtcctcggtacatatttccagttccggattccttggtgagcctggacaagcccctcccgctctctgcgcctcagtctcccaagcctgtcaccggaaacccctcccgcggtgccgcccctagcggggccgggtcggggcggccttacctgtagacgtcggccacgcggccgaggcatacggccagaggcttggcctcgctgcgacccttgaggcggtacacagcgcgcagagccgccgagcagctcgccgcgcaggccaggccgtacagcgtatcggtggggacggccaccacggcgccggcgcgcagctcggccacggcggcccgcagcgcctcggtccagccggcgcgctccgggctcgcggcctgcacggccccgctccccgggagccgcaacagccgggcgccgggggccgccggagcgggactcggcgggcggaagaggcgaccgctccgggagccagcaggcccctcgctcaaccccacgctggcagccaccgcggccctcatccccctgcaccgacgcgccggagacatccgcccaggcccgcttccgggaggaagtgacgctcccagccagcttccggtccaggagactcggccccgcctctgcgccgggcagcttaaagggaccacgacccccaggaggattgaaggagaccggtggggacggggcggggcgcagccttgcgaagccctaacgcagcgctggggaggggggcggccgaaaggggggcggtggtcgggccgcgcaagcggagatggaatggggcccgggctcagactggtcacgggggtgagagggggcccgtcggggcgggaggaaggggcttggccccgcgcaagcgccggccctgaccgtctgtctctcgctctctcccgggcagggaggctgccggcgtggaccgcgggaaggcggggctggggctcggcgggaggccacccccacagccgccccgggaggagcgcgcccagcagctgctggacgcggtggagcagcggcagcggcagctcctggacaccatcgcagcctgcgaggagatgttacggcagctgggccgccggcgcccggagccggctggtggcgggaacgtctcagccaaacctggagcgcccccccagccggctgtctccgccagaggcggctttccaaaggatgctggcgatggagctgcggagccctgaccatccccgagcagaataccctgacttctctccctccccagggccggtggctggactctgaacaactcccttcagtaaaggggccagtcttcactggcagtggctggtacttggctctcagcctggagtggcagctctgctagcagctgggttcactcccacttcatcctggctgaaagcagtgctgtgctttgaaatgcagccaatgaatacccagtctgattacccagatttgggcagaccagcagtgctcgccagagtggtctggcctgctatgggggatccaggtggtgttacatgtccatttcatgttttgggggcttttagccccacaaaacaccttcagtagagccttgattaaaaggaaacctgcagactctcctggtg

SEQ ID NO: 2246 - protein, 159 aa, Homo sapiens
MGPGLRLVTGVRGGPSGREEGAWPRASAGPDRLSLALSRAGRLPAWTAGRRGWGSAGGHPHSRPGRSAPSSCWTRWSSGSGSSWTPSQPARRCYGSWAAGARSRLVAGTSQPNLERPPSRLSPPEAAFQRMLAMELRSPDHPRAEYPDFSPSPGPVAGL

SEQ ID NO: 2247 - DNA, 1245 bp, Homo sapiens
tcccgcggtgccgcccctagcggggccgggtcggggcggccttacctgtagacgtcggccacgcggccgaggcatacggccagaggcttggcctcgctgcgacccttgaggcggtacacagcgcgcagagccgccgagcagctcgccgcgcaggccaggccgtacagcgtatcggtggggacggccaccacggcgccggcgcgcagctcggccacggcggcccgcagcgcctcggtccagccggcgcgctccgggctcgcggcctgcacggccccgctccccgggagccgcaacagccgggcgccgggggccgccggagcgggactcggcgggcggaagaggcgaccgctccgggagccagcaggcccctcgctcaaccccacgctggcagccaccgcggccctcatccccctgcaccgacgcgccggagacatccgcccaggcccgcttccgggaggaagtgacgctcccagccagcttccggtccaggagactcggccccgcctctgcgccgggcagcttaaagggaccacgacccccaggaggattgaaggagaccgggaggctgccggcgtggaccgcgggaaggcggggctggggctcggcgggaggccacccccacagccgccccgggaggagcgcgcccagcagctgctggacgcggtggagcagcggcagcggcagctcctggacaccatcgcagcctgcgaggagatgttacggcagctgggccgccggcgcccggagccggctggtggcgggaacgtctcagccaaacctggagcgcccccccagccggctgtctccgccagaggcggctttccaaaggatgctggcgatggagctgcggagccctgaccatccccgagcagaataccctgacttctctccctccccagggccggtggctggactctgaacaactcccttcagtaaaggggccagtcttcactggcagtggctggtacttggctctcagcctggagtggcagctctgctagcagctgggttcactcccacttcatcctggctgaaagcagtgctgtgctttgaaatgcagccaatgaatacccagtctgattacccagatttgggcagaccagcagtgctcgccagagtggtctggcctgctatgggggatccaggtggtgttacatgtccatttcatgttttgggggcttttagccccacaaaacaccttcagtagagccttgattaaaaggaaacctgcagactctcctggtg

SEQ ID NO: 2248 - protein, 47 aa, Homo sapiens
MLRQLGRRRPEPAGGGNVSAKPGAPPQPAVSARGGFPKDAGDGAAEP

SEQ ID NO: 2249 - DNA, 1358 bp, Homo sapiens
ggggccgggtcggggcggccttacctgtagacgtcggccacgcggccgaggcatacggccagaggcttggcctcgctgcgacccttgaggcggtacacagcgcgcagagccgccgagcagctcgccgcgcaggccaggccgtacagcgtatcggtggggacggccaccacggcgccggcgcgcagctcggccacggcggcccgcagcgcctcggtccagccggcgcgctccgggctcgcggcctgcacggccccgctccccgggagccgcaacagccgggcgccgggggccgccggagcgggactcggcgggcggaagaggcgaccgctccgggagccagcaggcccctcgctcaaccccacgctggcagccaccgcggccctcatccccctgcaccgacgcgccggagacatccgcccaggcccgcttccgggaggaagtgacgctcccagccagcttccggtccaggagactcggccccgcctctgcgccgggcagcttaaagggaccacgacccccaggaggattgaaggagaccggtggggacggggcggggcgcagccttgcgaagccctaacgcagcgctggggaggggggcggccgaaaggggggcggtggtcgggccgcgcaagcggagatggaatggggcccgggctcagactggtcacggggggaggctgccggcgtggaccgcgggaaggcggggctggggctcggcgggaggccacccccacagccgccccgggaggagcgcgcccagcagctgctggacgcggtggagcagcggcagcggcagctcctggacaccatcgcagcctgcgaggagatgttacggcagctgggccgccggcgcccggagccggctggtggcgggaacgtctcagccaaacctggagcgcccccccagccggctgtctccgccagaggcggctttccaaaggatgctggcgatggagctgcggagccctgaccatccccgagcagaataccctgacttctctccctccccagggccggtggctggactctgaacaactcccttcagtaaaggggccagtcttcactggcagtggctggtacttggctctcagcctggagtggcagctctgctagcagctgggttcactcccacttcatcctggctgaaagcagtgctgtgctttgaaatgcagccaatgaatacccagtctgattacccagatttgggcagaccagcagtgctcgccagagtggtctggcctgctatgggggatccaggtggtgttacatgtccatttcatgttttgggggcttttagccccacaaaacaccttcagtagagccttgattaaaaggaaacctgcagactctcctggtga

SEQ ID NO: 2250 - protein, 156 aa, Homo sapiens; identical to SEQ ID NO: 71

SEQ ID NO: 2251 - DNA, 480 bp, Homo sapiens
cttgcgaagccctaacgcagcgctggggaggggggcggccgaaaggggggcggctttccaaaggatgctggcgatggagctgcggagccctgaccatccccgagcagaataccctgacttctctccctccccagggccggtggctggactctgaacaactcccttcagtaaaggggccagtcttcactggcagtggctggtacttggctctcagcctggagtggcagctctgctagcagctgggttcactcccacttcatcctggctgaaagcagtgctgtgctttgaaatgcagccaatgaatacccagtctgattacccagatttgggcagaccagcagtgctcgccagagtggtctggcctgctatgggggatccaggtggtgttacatgtccatttcatgttttgggggcttttagccccacaaaacaccttcagtagagccttgattaaaaggaaacctgcagactctcctggtg

SEQ ID NO: 2252 - protein, 50 aa, Homo sapiens [sequence omitted]

SEQ ID NO: 2253 - DNA, 756 bp, Homo sapiens
gaatggggcccgggctcagactggtcacgggggtgagagggggcccgtcggggcgggaggaaggggcttggccccgcgcaagcgccggccctgaccgtctgtctctcgctctctcccgggcagggaggctgccggcgtggaccgcgggaaggcggggctggggctcggcgggaggccacccccacagccgccccgggaggagcgcgcccagcagctgctggacgcggtggagcagcggcagcggcagctcctggacaccatcgcagcctgcgaggagatgttacggcagctgggccgccggcgcccccggctgtctccgccagaggcggctttccaaaggatgctggcgatggagctgcggagccctgaccatccccgagcagaataccctgacttctctccctccccagggccggtggctggactctgaacaactcccttcagtaaaggggccagtcttcactggcagtggctggtacttggctctcagcctggagtggcagctctgctagcagctgggttcactcccacttcatcctggctgaaagcagtgctgtgctttgaaatgcagccaatgaatacccagtctgattacccagatttgggcagaccagcagtgctcgccagagtggtctggcctgctatgggggatccaggtggtgttacatgtccatttcatgttttgggggcttttagccccacaaaacaccttcagtagagccttgattaaaaggaaacctgcagactctcctggtg

SEQ ID NO: 2254 - protein, 169 aa, Homo sapiens
MGPGLRLVTGVRGGPSGREEGAWPRASAGPDRLSLALSRAGRLPAWTAGRRGWGSAGGHPHSRPGRSAPSSCWTRWSSGSGSSWTPSQPARRCYGSWAAGAPGCLRQRRLSKGCWRWSCGALTIPEQNTLTSLPPQGRWLDSEQLPSVKGPVFTGSGWYLALSLEWQLC

SEQ ID NO: 2255 - DNA, 7983 bp, Homo sapiens
aaagaggaagcggaagtgacgttaggggaaggtgggggcaatcatggtgccgctggggaggggagaagctgctgctgccgccgttgccgggagccgcggagacaagtcattacgttttcatttctcacaactgggctgagcacaactgaaccatgggggaacacagtccagacaacaacatcatctactttgaggcagaggaagatgagctgacccccgatgataaaatgctcaggtttgtggataaaaacggactggtgccttcctcatctggaactgtttatgataggaccactgttcttattgagcaggaccctggcactttggaggatgaagatgacgacggacagtgcggagaacacttgccttttctagtagggggtgaagagggctttcacctgatagatcatgaagcaatgtcccagggttatgtgcagcacattatctcaccagatcagattcatttgacaataaaccctggttccacacccatgccaagaaatattgaaggtgcaaccctcactctgcagtcggaatgtccggaaacaaaacgtaaagaagtaaagcggtaccaatgtacctttgagggctgtccccgcacctacagcacagcaggcaacctgcgaacccaccagaagactcaccgaggagagtacacctttgtctgtaatcaggagggctgtggcaaagccttccttacctcttacagcctcaggatccacgtgcgagtgcacacgaaggagaagccatttgagtgtgacgtgcagggctgtgagaaggcattcaacacactgtacaggctgaaagcacatcagaggcttcacacagggaaaacgtttaactgtgaatctgaaggctgcagcaaatacttcaccacactcagtgatctgaggaagcacattcgaactcatacaggggaaaagccatttcggtgcgatcacgatggctgtggaaaagcatttgcagcaagccaccaccttaaaactcacgttcgtacacatactggtgaaagacccttcttctgccccagtaatggctgtgagaaaacattcagcactcaatacagtctcaaaagtcacatgaaaggtcatgataacaaaggacactcatacaatgcacttccacaacacaatggatcagaggatacaaatcactcactttgtctaagtgacttgagccttctgtccacagattctgaattgcgagaaaattccagtacgacccagggccaggacctcagcacaatttcaccagcaatcatctttgaatcaatgttccagaattcagatgatacggcaattcaggaagatcctcaacagacagcttccttgactgaaagttttaatggtgatgcagagtcagtcagtgatgttccgccatccacaggaaattcagcatctttatctcttccacttgtactgcaacctggcctctccgagccaccccagcctctactacctgcctcagctccgtctgctcctccgcctgctccctccctaggacctggctcccagcaagctgcatttggcaacccccctgctctcttacaacctccagaagtgcctgttccccacagcacacagtttgctgctaatcatcaagagtttcttccgcacccccaggcaccgcagcccattgtaccaggactttctgttgttgctggggcttctgcatcagcagcggcagtggcatcagctgtggcagcaccagccccaccacaaagtactactgagcccctgccagccatggtccagactctgcccctgggtgccaactctgtcctaactaataatcccacaataaccatcaccccaactcccaacacagctatcctgcagtccagcctagtcatgggagaacagaacttacaatggatattaaatggtgccaccagttctccacaaaaccaagaacaaattcagcaagcatctaaagttgagaaggtgttttttaccactgcagtaccagtagccagtagcccagggagctctgtccagcagattggcctcagtgttcctgtgatcatcatcaaacaagaagaggcatgtcagtgtcagtgtgcatgccgggactctgcaaaggagcgggcatccagcaggagaaagggctgctcctccccaccccctccagagccgagcccccaggctcctgatgggcccagcctgcagctcccagcgcagactttctcttcagcccctgttcccgggtcatcatcctctaccttgccctcctcctgtgagcaaagccgacaagcagagactccttcagaccctcagacagaaacattaagtgccatggatgtgtcagagtttctatccctccagagcctggacaccccgtccaatctgattcccattgaagcactactgcagggggaggaggagatgggcctcaccagcagcttctccaagtgaagggcccatgtgtgctcacctctgggaaaagcgggtgagcaggaggcatgaggtacaatgcctgccatcatgggtcagaaatttgaaggatgaagaaatctactgtttgaaatcctcacctttcagacgtattttctttattcacatcccaggagcatccattttaaggaactattctttggaaaaaaacaaaaaacaaaaaaaacaacaaaaaaagctaagttataagtgaactgtttggctgcactgtatgtcacttttgcttgttgtcatgtgaacttggaaactaaggttactcgtgtgcataaaaattctaaatgaaagggtgtggtttccatcaatctgatgctgcccatcgcttgcactggggtctttgtggatcgggcaggagttttcagtgtgttgggtgttgctccttcctatgtgtcttttgaatctgaggctgacatttgcttggaaggccagacccttgctccatcagagagggcagtggcaaaggccagtgaggcagctgtgagttggacagggttcaggtgagatggtgttgtcatttgtgcttagtgttggtggtgctcagggtggataacacgggtcgttctgcagcccgcttcagcacaaataggcagcttaaggcctggctcacaggctgtggggttgatctggctctgcagaggccctaggcagcttgttgactgctgtctgttgatgacgtgtgtgcaaagcaggctctagcaacatgatcactgtccttgccttcctggttctttctctcggttggttgccagggcttgcagatcgcagtgaattttccttggggaacatcgctgttttgtcctagagtgaacttgtggcttatggccagtgctgtttggtggtctgccttctttttaatggtattttcttcctcagagcagaagggctgcattttgcttatcagaagaaggtgcagatttaagggaattcatatgaggtggcatgtaattggcaggccaggtgtcctggttccaggttccagccaggctttgggttgccccctccatctctgcccccctctggattttgcatacagcctcatacagtgcaaacaaggatgtgacttgctcagcttagtcatgtgatttatttaaaaaaaaaaaaaaaagaaacacaaaacgatgatcttctactcagggtatagcaaaacaaaaaaattccctttccaccaaaaagcctgaaatgttgcaataagttatctcatttggaatgtttcattaagttgtgttataggaaaaaattgtgtgtgtgtgttatagaattatatccatatgtctgcctttggctccaagtcattgcctcttaaaataaaagatacaatccatactagcatgaaaagtttccctcaacaggctatattaacatagtcatgagtgctgaccaaactcaccgagctcagaggccaggcatggcctgaggtgcagaataggcctctgcctcccaagagccctttccttgccctgagcaaggagtggtgttccacaaacaaggctgctcttctaagccaacagtgtcaggcaggaagcagccataattttgccttgcattttcattccctaatgtaaagggatctgcattggtcactctcctgttctctgagccattgctcagggccagccaagatattattgagaacagataatttaccttggagccagaggccctccctgcctttagcaaggatgttcagggacagacaaagagggcagtggtggtgaatgttgttactgccatgaggagaaatggcagtaagaaatcttaactacaagcagccaatttctcattccaggaccctagccagaataattgacttctttttttttttgagacagagttttgcttttgttgccctggctggagtgcagtggcgcaatcttggctcaccgcaacctccacttcccaggttcaagcaattctgcctcagcctcccgagtagctgggattacaggcatgcgccaccacgcctggctaattttgtatttttagtagagacggggtttctccatgttggtcaggctggtctcgaactcccaacgtcaggtgatcctcccgcctcagtctcccaaagtgctgggattacaggtgtgagccaccatgcctggtctagggaattgacttctttttgaccttctgcactcccttccccaaaaggattgtggcttctgttgaccattgacctcagcagaagttgataaggcaggaggtttccagtcctcctggaaaaccaactgctgagcatgagttgtccttggctgtctctgggcctcgcacccatgggaagttttgaggtagggcccttgctgtttacaacttctgagagagtagtgatgggaccccaaagtaagcttgtatcagagggcagtaatgaccttcccatatccccatcctgtggtcacctgggatttgggttccctggggcggaagtgggaaataggagcccagggaaggacatctgaagcacccacagtttaaatagcgactcttcttggttagccagggctgtgctcatgttgggccctacccaggtcagtggccttttcactctcaaagatcgggggtgacgaagcagcatcttaaacagtgtttaggctgacagatttttccagttgaagaagctgaagtatctgccttttgagggtgactctagattacaagagagactatcagatccaatcagcttttgaaaaatcaggaatgtgcttaaaatgccagtgagtggttgtgaagatcaggtttatttcccaggataggcagtctttctttccctccttttccagttctcttttcctacctgtccttccataagcctggtctctagtgccgaggaccttggagaagagagggcccctagctaagctggagccagaaagaaccttcatggtgagtgtggtttcccaaacttgggaaatgaacctagggtgaggttagggaggatttgtagaattctagcaggtaaaaatcaagcctttttcccctcccatagtaaacttaaccattttcaccctgtacgttatcttctagctcctactaacatctccaattagacaaccgcttcaaagggtgcttagcaccagggattggggttcatggacttaggaggtggtaaggaaactggctggcaccaccaaactgccttagtgaacttggcccttcccaggcaggtaggttgggcattgagggaaggtggcccagtctttgctggcagggtctggccagtctcatgggggcaccaccagtttggtgacagaagtggtgtcatttattgaattccacctccgtttagaaggagatcatggtacaaagcccaggaggggccttaagatgtgaagatctctctgagtaaaaggcaaggggcttctcttcttcacctctgggatagttggtagatcggagagttttattttcagggtcaaggctgtggactgatggggatattggagggtgggtgggttttcctgagagactttgtataatgctgaatgtgtccagagggacaagtttgcagaacctcatattggtatattaaagaaataataaaataaaaaagcactttaggttattttatctttaacccgattgctgcaatttcttttgtgtgtatatatacatatatatactttccacaaagttttattttttgctcagaataaaaagttaaattgaggtgtgaaaagaaaagcacttaccttggtgcaatatgtgtagcttgatggtcgttgtcccatgtggccctggcctggcagcgtttttccgctcaatcagccctgtgctgtgagactgtccatagggaaacactattatgcattctcagcaaccgctcaatctatgcaagccttccctgtgtgccccagggcgccccctcaggctctctgaagaactgctgtgggtcctgttttctgctgactgttgaggccctttttcatcacttcttggtctctcgccatcttttccctcttcaccattacaaaatgatgcctgaaaggaaggaacagattgttcctaggtagaaacctggcaccttctagacttttatatttgtaatcacatccattgtccttaaagacttttccagagtgattgaaaccattgatttgtggaactgcaacaatatttctcaagagtttacaattgtcttacaccaccaatcagaaatatgtttggggaggcatgggtggcagggggcaacatgagccatttccatactgctccccatactacctgtgttggttccttaagcaaaaaggcctccagccttcattaaatcctataaacaaacattacatcccatgaatcattatcaactttcttcctttactccacctcccccattttatcttcaattctcaggctatagaatagacaagttttagaatatacttcagccaaagcagaaggattttcatagatccaatatgcaaatagttctgctgtgacatagatcagaaattgtctgttccttaatatttgggggtggaggcaacaaaactgaagcatatttctgattggttagccattttggcctgtttcctcttgcatgttttttagggagagagggaaacagtcctgtatttcttctgatgccctttggggaagccgacgaccactgggcatttctcactgttactcctgttcaagagagggcttctcagtctgcactgaaaaatgcaaattaaactggatctttatgtcaatgtgtacatagtacaagcttttttactggaattgaggtttaaaaccacacactgcccttttggtggtgtgcctgttgggccaaaaattgggtgataatgtagtgtcactttctcagctcaatgcagtttctactttttcttatgggaaaatttttcataaaacctttttgcaccaaaacccaggggtgttttttgcaatatccttgttatcctcgtagtgtgccaagtcagaggctttctcttgcccttttcctgctgtgttctcaggcctcccaagggctatttgactcaacagtctacatccttcgttgtgttttggagaatgtgggggtgggggtcagagttcaaggtgtctgttcccttttcctgtgaactctttctagtccctatttggggagggtggctggaaacagatttttgctgaatttctggctcagatcttctagccaggaaaggcaagagcccccaagagcccttttttttgacatacactaatcattggccggggtcttggtgacaacttttaaaatcccaaatagttttatttggattatgtaaaagtaagtgtgaaacatgggaacaacggacttccactgagcgatgtgaaaacgttacaggttcagtacttccaaaggaagaaacctccaaacccaaaaaagaataaatatgaatttgtatttttgaagaatgtgaaataatggtgtttgcttaattgctcattttgtataaacttaatattgtactttaaaatatctgctaaaaagtgaaaatttaactttttggaattgaaaaagcaatattaaatactaatgaaatcctaattaaatgcttatttaaatctggta

SEQ ID NO: 2256 - protein, 753 aa, Homo sapiens; identical to SEQ ID NO: 73

SEQ ID NO: 2257 - DNA, 1394 bp, Homo sapiens
atatttgtaatcacatccattgtccttaaagacttttccagagtgattgaaaccattgatttgtggaactgcaacaatatttctcaagagtttacaattgtcttacaccaccaatcagaaatatgtttggggaggcatgggtggcagggggcaacatgagccatttccatactgctccccatactacctgtgttggttccttaagcaaaaaggcctccagccttcattaaatcctataaacaaacattacatcccatgaatcattatcaactttcttcctttactccacctcccccattttatcttcaattctcaggctatagaatagacaagttttagaatatacttcagccaaagcagaaggattttcatagatccaatatgcaaatagttctgctgtgacatagatcagaaattgtctgttccttaatatttgggggtggaggcaacaaaactgaagcatatttctgattggttagccattttggcctgtttcctcttgcatgttttttagggagagagggaaacagtcctgtatttcttctgatgccctttggggaagccgacgaccactgggcatttctcactgttactcctgttcaagagagggcttctcagtctgcactgaaaaatgcaaattaaactggatctttatgtcaatgtgtacatagtacaagcttttttactggaattgaggtttaaaaccacacactgcccttttggtggtgtgcctgttgggccaaaaattgggtgataatgtagtgtcactttctcagctcaatgcagtttctactttttcttatgggaaaatttttcataaaacctttttgcaccaaaacccaggggtgttttttgcaatatccttgttatcctcgtagtgtgccaagtcagagttcaaggtgtctgttcccttttcctgtgaactctttctagtccctatttggggagggtggctggaaacagatttttgctgaatttctggctcagatcttctagccaggaaaggcaagagcccccaagagcccttttttttgacatacactaatcattggccggggtcttggtgacaacttttaaaatcccaaatagttttatttggattatgtaaaagtaagtgtgaaacatgggaacaacggacttccactgagcgatgtgaaaacgttacaggttcagtacttccaaaggaagaaacctccaaacccaaaaaagaataaatatgaatttgtatttttgaagaatgtgaaataatggtgtttgcttaattgctcattttgtataaacttaatattgtactttaaaatatctgctaaaaagtgaaaatttaactttttggaattgaaaaagcaatattaaatactaatgaaatcctaattaaatgcttatttaaatctggt

SEQ ID NO: 2258 - protein, 50 aa, Homo sapiens
MQFLLFLMGKFFIKPFCTKTQGCFLQYPCYPRSVPSQSSRCLFPFPVNSF

SEQ ID NO: 2259 - DNA, 436 bp, Homo sapiens
aatcatggtgccgctggggaggggagaagctggctgcatttggcaacccccctgctctcttacaacctccagaagtgcctgttccccacagcacacagtttgctgctaatcatcaagagtttcttccgcacccccaggcaccgcagcccattgtaccaggactttctgttgttgctggggcttctgcatcagcagcggcagtggcatcagctgtggcagcaccagccccaccacaaagtactactgagcccctgccagccatggtccagactctgcccctgggtgccaactctgtcctaactaataatcccacaataaccatcaccccaactcccaacacagctatcctgcagtccagcctagtcatgggagaacagaacttacaatggatattaaatggtgccaccagttctccacaaaaccaagaacaaattgt

SEQ ID NO: 2260 - protein, 34 aa, Homo sapiens
MVPLGRGEAGCIWQPPCSLTTSRSACSPQHTVCC

SEQ ID NO: 2261 - DNA, 608 bp, Homo sapiens
aaagaggaagcggaagtgacgttaggggaaggtgggggcaatcatggtgccgctggggaggggagaagctgctgctgccgccgttgccgggagccgcggagacaagtcattacgttttcatttctcacaactgggctgagcacaactgaaccatgggggaacacagtccagacaacaacatcatctactttgaggcagaggaagatgagctgacccccgatgataaaatgctcaggtttgtggataaaaacggactggtgccttcctcatctggaactgtttatgataggaccactgttcttattgagcaggaccctggcactttggaggatgaagatgacgacggacagtgcggagaacacttgccttttctagtagggggtgaagagggctttcacctgatagatcatgaagcaatgtcccagggttatgtgcagcacattatctcaccagatcagattcatttgacaataaaccctggttccacacccatgccaagaaatattgaaggtgcaaccctcactctgcagtcggaatgtccggaaacaaaacgtaaagaaataactgttgtgcctagccatgaaacataatgatgtaaatggtttaat

SEQ ID NO: 2262 - protein, 145 aa, Homo sapiens
MGEHSPDNNIIYFEAEEDELTPDDKMLRFVDKNGLVPSSSGTVYDRTTVLIEQDPGTLEDEDDDGQCGEHLPFLVGGEEGFHLIDHEAMSQGYVQHIISPDQIHLTINPGSTPMPRNIEGATLTLQSECPETKRKEITVVPSHET

SEQ ID NO: 2263 - DNA, 464 bp, Homo sapiens
cactgttaaaaatacatttatcattaaaatatattacacatggagacaggatgcatcatatacagtttggaagacttgctggcccagaaaatcccacttgtttcaccgaacactcattttttcagtgattttacattttatttttagagacggggtctccctctctcacccgggctggcgtacagtgatgtggtcataggtcactgcagcctcaaactcctgtgctcaagtgagccacccacgtcagcctcccaagtaactgggaccacaggcatgcatcaccacacccagctaattttttaaaaatgtttttgtagagagggggtctccctgtgttgcccagcctggtcccaaactcctggtctcaagtgatgctcccacctcagtctcccaaagcaggtggatcacctgaggccaggcattcgagaccagcctggccaacatggtgaaaccgtgtctatact

SEQ ID NO: 2264 - protein, 35 aa, Homo sapiens
METGCIIYSLEDLLAQKIPLVSPNTHFFSDFTFYF

SEQ ID NO: 2265 - DNA, 2272 bp, Homo sapiens
agtactcattgatcagggcctgatcaacccttctaattatgctcctgccaaaattgacttctcataaagtgttctctctacttacttcactatttcccttctcctgccctttttttatactttctttgctctcaccccagttattaacctctgtaagtcccattttgtcttacattcaagacccaactaaaatgtcttatttctttcagtcttataggaacatgtagttaaaagtttgacttctaaattcatgttgcatttgacccgtacctctcttttgatacttatgccaagtggtaagcaaccagttttctgtgcacagtctttctcgtgcacttggatcgtgtatacagttcttggactatagtaggcacttgagaaatgattcagtgaacaaaagacaaatcccggttcttcctctttcaggtcatttctactctccccatattccacaaaaatgtcttccactacttgatggcgtttttgcgagaactgctgaaaaattcagcaaaaaatcatttggatgagaatattctagctagcatatttggcagcttattgcttcgaaacccagctggtcaccaaaagcttgatatgacagagaagaagaaggctcaagaatttattcaccagttcctctgcaacccactctgagcctctctctcctcctattttacttgaggctgccaattaccagccccacctgtttcagctcaagagatgccttaagataattatgtgaggccacttggtagcaagaatggcagctatttcctgagcctagtaccccaattaagcccaccattggttagcacactcagcgctgtgagtcgtgaagacacgggagaaaatccaccataataaaactgacattcaattttcaactttagttatttaacacagatttttttattttttatttttttttattttgagacggagttttgctctgtcgcgcagggtggagtgcggtggcacgatctcggctcactgcaacctctgcctcctgggtgcaagcaattatcctgcctcagcctcccgagtagctgggactgcaggcacacactgccacgcccagctaattttttgcattttagtagagacggggtttcaccgtgttgcccaggctgttctaaaactcctgaactcaggtaatctgcctgcctcggcctccccaagtgctaggattacagatgtgagccaccacgcccggccttttttttttttttttcttttttgagatggagtttcactcttgttgcccaggctggagtgcgttggcgtggtcttggctcactgcaacctctgcctccttggttcaagcaattctcctgcctcagcctctcgagtagctgggattataggcgtccgccaccatgcctggctaatttttttgtgtgtttttagtatagacacggtttcaccatgttggccaggctggtctcgaatgcctggcctcaggtgatccacctgccttggcctcccaaagtgctgggattacaggcatgaaccaccacgcctggcctaaaatgtttttaaataactgtacttgtactcactcaccctacctccagggcatagtcagtctgggctgagatccccatgatcagatatttgatggaaagtcctgaaaggccaatgagttggatggcaagaatgcaggcagaagctgctggataaaataggctacagccacctcagatgctttcagtgctctgtctgaggatgtgtatatgcatatgcaaactcgacccccgttcctgcccagataatggctcaataactctgaggctggttgctcagcctctgagggcaatacaggcatttaaaaaattaaaatgaccaggcacagtggctcacgcctgtaatctcggcactttgggagactgaggtgggagcatcacttgagaccaggagtttgggaccaggctgggcaacacagggagaccccctctctacaaaaacatttttaaaaaattagctgggtgtggtgatgcatgcctgtggtcccagttacttgggaggctgacgtgggtggctcacttgagcacaggagtttgaggctgcagtgacctatgaccacatcactgtacgccagcccgggtgagagagggagaccccgtctctaaaaataaaatgtaaaatcactgaaaaaatgagtgttcggtgaaacaagtgggattttctgggccagcaagtcttccaaactgtatatgatgcatcctgtctccatgtgtaatatattttaatgataaatgtatttttaacagtg

SEQ ID NO: 2266 - protein, 59 aa, Homo sapiens
MAFLRELLKNSAKNHLDENILASIFGSLLLRNPAGHQKLDMTEKKKAQEFIHQFLCNPL

SEQ ID NO: 2267 - DNA, 3905 bp, Homo sapiens
gcggcgggatgaggagcttgaggaagcaggcagggaaatgtctgccgccgccggctctcgggagcgcaacactgcaggtggttctaactttgatggtttgagaccaaatgggaagggagtgcctatggaccaaagctccaggggtcaagataaaccagaaagcttgcaaccaagacagaataaatccaagtccgaaattactgacatggttcgctcctccactatcacagtgtcggacaaggctcatattttatccatgcagaagtttggactgcgagatacaattgtgaaatcacatctactacagaaagaagaggattacacctatatccagaacttcaggttttttgcgggaacatacaatgtaaatgggcagtcccccaaagaatgcctccggctgtggctgagcaatggtatccaggccccagatgtctattgtgtagggttccaggagcttgatctgagtaaggaagcttttttctttcacgataccccaaaggaggaagagtggttcaaagctgtgtcagagggtcttcatccagatgccaaatatgcaaaggtgaagcttatccgactggttgggattatgctgctgttatatgtcaaacaggagcatgcagcttatatctcagaagtggaagccgagactgtggggacaggaatcatggggaggatgggcaacaagggaggcgtggcgatcaggttccagttccacaacaccagcatctgcgttgtgaattctcacttggcagcccacattgaagagtatgagaggaggaaccaggactataaggacatttgttctcgaatgcagttttgtcagcctgacccaagccttccccctctcaccatcagcaaccatgatgtgatcttgtggctgggggacctcaactacaggatagaagagctggatgtggaaaaagtgaaaaagctcatcgaagagaaggactttcaaatgctgtatgcatatgatcagctgaaaattcaggtggccgcaaagactgtctttgaaggcttcacagagggtgagctcacattccagcctacttacaagtatgatacgggctctgacgactgggataccagtgagaagtgccgtgctcctgcctggtgtgatcggattctctggaaagggaagaacatcactcagctgagttaccagagccacatggccctgaagaccagtgaccacaagcctgtcagctcagtgtttgacatcggggtgagggtcgtaaatgacgagctttaccggaagacactggaggaaattgttcgctccctggataagatggaaaatgccaacattccttctgtgtccctgtccaagcgagagttctgttttcagaatgtgaagtacatgcaattgaaagtagaatcctttacaattcataatggacaagtaccctgtcattttgaattcatcaacaagcctgatgaagagtcttactgtaagcagtggctgaatgccaaccccagcagaggcttcctcctgccagattctgatgttgagattgacttggagctcttcgtaaataagatgacagctacaaagctcaactcgggtgaagacaaaattgaggacattctggttctgcacttggacaggggaaaggattactttttgtctgtgtctgggaactacctgcccagctgttttgggtctcccattcatacactgtgttacatgagagagccaatcttggacctaccacttgaaaccattagtgagctgactctgatgccagtatggactggagatgatgggagccagttggatagccccatggaaatccccaaagagctctggatgatggttgattacctgtaccgaaatgctgtccagcaggaagatctgtttcagcaaccaggcctgaggtcagaatttgaacatatcagggactgcttggatactggaatgattgataacctctctgccagcaatcattctgtagccgaagccctgctgcttttcctggagagccttccagagcctgtcatctgttacagcacctaccataactgcttggagtgttctggcaactacacagcaagcaaacaggtcatttctactctccccatattccacaaaaatgtcttccactacttgatggcgtttttgcgagaactgctgaaaaattcagcaaaaaatcatttggatgagaatattctagctagcatatttggcagcttattgcttcgaaacccagctggtcaccaaaagcttgatatgacagagaagaagaaggctcaagaatttattcaccagttcctctgcaacccactctgagcctctctctcctcctattttacttgaggctgccaattaccagccccacctgtttcagctcaagagatgccttaagataattatgtgaggccacttggtagcaagaatggcagctatttcctgagcctagtaccccaattaagcccaccattggttagcacactcagcgctgtgagtcgtgaagacacgggagaaaatccaccataataaaactgacattcaattttcaactttagttatttaacacagatttttttattttttatttttttttattttgagacggagttttgctctgtcgcgcagggtggagtgcggtggcacgatctcggctcactgcaacctctgcctcctgggtgcaagcaattatcctgcctcagcctcccgagtagctgggactgcaggcacacactgccacgcccagctaattttttgcattttagtagagacggggtttcaccgtgttgcccaggctgttctaaaactcctgaactcaggtaatctgcctgcctcggcctccccaagtgctaggattacagatgtgagccaccacgcccggccttttttttttttttttcttttttgagatggagtttcactcttgttgcccaggctggagtgcgttggcgtggtcttggctcactgcaacctctgcctccttggttcaagcaattctcctgcctcagcctctcgagtagctgggattataggcgtccgccaccatgcctggctaatttttttgtgtgtttttagtatagacacggtttcaccatgttggccaggctggtctcgaatgcctggcctcaggtgatccacctgccttggcctcccaaagtgctgggattacaggcatgaaccaccacgcctggcctaaaatgtttttaaataactgtacttgtactcactcaccctacctccagggcatagtcagtctgggctgagatccccatgatcagatatttgatggaaagtcctgaaaggccaatgagttggatggcaagaatgcaggcagaagctgctggataaaataggctacagccacctcagatgctttcagtgctctgtctgaggatgtgtatatgcatatgcaaactcgacccccgttcctgcccagataatggctcaataactctgaggctggttgctcagcctctgagggcaatacaggcatttaaaaaattaaaatgaccaggcacagtggctcacgcctgtaatctcggcactttgggagactgaggtgggagcatcacttgagaccaggagtttgggaccaggctgggcaacacagggagaccccctctctacaaaaacatttttaaaaaattagctgggtgtggtgatgcatgcctgtggtcccagttacttgggaggctgacgtgggtggctcacttgagcacaggagtttgaggctgcagtgacctatgaccacatcactgtacgccagcccgggtgagagagggagaccccgtctctaaaaataaaatgtaaaatcactgaaaaaatgagtgttcggtgaaacaagtgggattttctgggccagcaagtcttccaaactgtatatgatgcatcctgtctccatgtgtaatatattttaatgataaatgtatttttaacagtg

SEQ ID NO: 2268 - protein, 749 aa, Homo sapiens
MSAAAGSRERNTAGGSNFDGLRPNGKGVPMDQSSRGQDKPESLQPRQNKSKSEITDMVRSSTITVSDKAHILSMQKFGLRDTIVKSHLLQKEEDYTYIQNFRFFAGTYNVNGQSPKECLRLWLSNGIQAPDVYCVGFQELDLSKEAFFFHDTPKEEEWFKAVSEGLHPDAKYAKVKLIRLVGIMLLLYVKQEHAAYISEVEAETVGTGIMGRMGNKGGVAIRFQFHNTSICVVNSHLAAHIEEYERRNQDYKDICSRMQFCQPDPSLPPLTISNHDVILWLGDLNYRIEELDVEKVKKLIEEKDFQMLYAYDQLKIQVAAKTVFEGFTEGELTFQPTYKYDTGSDDWDTSEKCRAPAWCDRILWKGKNITQLSYQSHMALKTSDHKPVSSVFDIGVRVVNDELYRKTLEEIVRSLDKMENANIPSVSLSKREFCFQNVKYMQLKVESFTIHNGQVPCHFEFINKPDEESYCKQWLNANPSRGFLLPDSDVEIDLELFVNKMTATKLNSGEDKIEDILVLHLDRGKDYFLSVSGNYLPSCFGSPIHTLCYMREPILDLPLETISELTLMPVWTGDDGSQLDSPMEIPKELWMMVDYLYRNAVQQEDLFQQPGLRSEFEHIRDCLDTGMIDNLSASNHSVAEALLLFLESLPEPVICYSTYHNCLECSGNYTASKQVISTLPIFHKNVFHYLMAFLRELLKNSAKNHLDENILASIFGSLLLRNPAGHQKLDMTEKKKAQEFIHQFLCNPL

SEQ ID NO: 2269 - DNA, 3122 bp, Homo sapiens
gcaatgggcctgctggggcgggggtgaagggcaagcagcaatgggacacttcctgtctccaaggaaagaggaatgggaccctcctgaatgacaggtgtgtgcgctcagcaggggccagcatggaccagtctgtggcaatccaggagacgctggctgagggggaatactgcgtcatcgcggtgcaaggtgtgctgtgtgagggggacagccggcagagccgcctcctgggactcgtgcgctaccgcctggagcacggcggccaggaacacgctctcttcctctatacgcaccggaggatggccattaccggggacgatgtctctctggaccagatagtgccagtctcgcgggattttacgctggaagaagtgtccccagatggtgaactctacatccttggctcagatgtgaccgtccagctggacacagcagagcttagcctcgtattccaactgccctttggttcacaaaccaggatgttcctccacgaagttgccagggcctgtccaggcttcgattctgcgacccgggatcctgaattcctgtggctgtctcggtataggtgcgcagagctggagctggagatgccaacgccgcgcggttgtaactcggccctagttacctggccagggtacgcgacaattggcggaggtggttctaactttgatggtttgagaccaaatgggaagggagtgcctatggaccaaagctccaggggtcaagataaaccagaaagcttgcaaccaagacagaataaatccaagtccgaaattactgacatggttcgctcctccactatcacagtgtcggacaaggctcatattttatccatgcagaagtttggactgcgagatacaattgtgaaatcacatctactacagaaagaagaggattacacctatatccagaacttcaggttttttgcgggaacatacaatgtaaatgggcagtcccccaaagaatgcctccggctgtggctgagcaatggtatccaggccccagatgtctattgtgtagggttccaggagcttgatctgagtaaggaagcttttttctttcacgataccccaaaggaggaagagtggttcaaagctgtgtcagagggtcttcatccagatgccaaatatgcaaaggtgaagcttatccgactggttgggattatgctgctgttatatgtcaaacaggagcatgcagcttatatctcagaagtggaagccgagactgtggggacaggaatcatggggaggatgggcaacaagggaggcgtggcgatcaggttccagttccacaacaccagcatctgcgttgtgaattctcacttggcagcccacattgaagagtatgagaggaggaaccaggactataaggacatttgttctcgaatgcagttttgtcagcctgacccaagccttccccctctcaccatcagcaaccatgatgtgatcttgtggctgggggacctcaactacaggatagaagagctggatgtggaaaaagtgaaaaagctcatcgaagagaaggactttcaaatgctgtatgcatatgatcagctgaaaattcaggtggccgcaaagactgtctttgaaggcttcacagagggtgagctcacattccagcctacttacaagtatgatacgggctctgacgactgggataccagtgagaagtgccgtgctcctgcctggtgtgatcggattctctggaaagggaagaacatcactcagctgagttaccagagccacatggccctgaagaccagtgaccacaagcctgtcagctcagtgtttgacatcggggtgagggtcgtaaatgacgagctttaccggaagacactggaggaaattgttcgctccctggataagatggaaaatgccaacattccttctgtgtccctgtccaagcgagagttctgttttcagaatgtgaagtacatgcaattgaaagtagaatcctttacaattcataatggacaagtaccctgtcattttgaattcatcaacaagcctgatgaagagtcttactgtaagcagtggctgaatgccaaccccagcagaggcttcctcctgccagattctgatgttgagattgacttggagctcttcgtaaataagatgacagctacaaagctcaactcgggtgaagacaaaattgaggacattctggttctgcacttggacaggggaaaggattactttttgtctgtgtctgggaactacctgcccagctgttttgggtctcccattcatacactgtgttacatgagagagccaatcttggacctaccacttgaaaccattagtgagctgctagcatatttggcagcttattgcttcgaaacccagctggtcaccaaaagcttgatatgacagagaagaagaaggctcaagaatttattcaccagttcctctgcaacccactctgagcctctctctcctcctattttacttgaggctgccaattaccagccccacctgtttcagctcaagagatgccttaagataattatgtgaggccacttggtagcaagaatggcagctatttcctgagcctagtaccccaattaagcccaccattggttagcacactcagcgctgtgagtcgtgaagacacgggagaaaatccaccataataaaactgacattcaattttcaactttagttatttaacacagataaaatgtttttaaataactgtacttgtactcactcaccctacctccagggcatagtcagtctgggctgagatccccatgatcagatatttgatggaaagtcctgaaaggccaatgagttggatggcaagaatgcaggcagaagctgctggataaaataggctacagccacctcagatgctttcagtgctctgtctgaggatgtgtatatgcatatgcaaactcgacccccgttcctgcccagataatggctcaataactctgaggctggttgctcagcctctgagggcaatacaggcatttaaaaaattaaaattgtaaaatcactgaaaaaatgagtgttcggtgaaacaagtgggattttctgggccagcaagtcttccaaactgtatatgatgcatcctgtctccatgtgtaatatattttaatgataaatgtatttttaacagtg

SEQ ID NO: 2270 - protein, 748 aa, Homo sapiens [sequence omitted]

SEQ ID NO: 2271 - DNA, 3097 bp, Homo sapiens
aaatgtagtcactgtcccggaacctggggcagcggagtcccgtgcgccctgtggtgacagctcaggagggtgtgtgcgctcagcaggggccagcatggaccagtctgtggcaatccaggagacgctggctgagggggaatactgcgtcatcgcggtgcaaggtgtgctgtgtgagggggacagccggcagagccgcctcctgggactcgtgcgctaccgcctggagcacggcggccaggaacacgctctcttcctctatacgcaccggaggatggccattaccggggacgatgtctctctggaccagatagtgccagtctcgcgggattttacgctggaagaagtgtccccagatggtgaactctacatccttggctcagatgtgaccgtccagctggacacagcagagcttagcctcgtattccaactgccctttggttcacaaaccaggatgttcctccacgaagttgccagggcctgtccaggcttcgattctgcgacccgggatcctgaattcctgtggctgtctcggtataggtgcgcagagctggagctggagatgccaacgccgcgcggttgtaactcggccctagttacctggccagggtacgcgacaattggcggaggtggttctaactttgatggtttgagaccaaatgggaagggagtgcctatggaccaaagctccaggggtcaagataaaccagaaagcttgcaaccaagacagaataaatccaagtccgaaattactgacatggttcgctcctccactatcacagtgtcggacaaggctcatattttatccatgcagaagtttggactgcgagatacaattgtgaaatcacatctactacagaaagaagaggattacacctatatccagaacttcaggttttttgcgggaacatacaatgtaaatgggcagtcccccaaagaatgcctccggctgtggctgagcaatggtatccaggccccagatgtctattgtgtagggttccaggagcttgatctgagtaaggaagcttttttctttcacgataccccaaaggaggaagagtggttcaaagctgtgtcagagggtcttcatccagatgccaaatatgcaaaggtgaagcttatccgactggttgggattatgctgctgttatatgtcaaacaggagcatgcagcttatatctcagaagtggaagccgagactgtggggacaggaatcatggggaggatgggcaacaagggaggcgtggcgatcaggttccagttccacaacaccagcatctgcgttgtgaattctcacttggcagcccacattgaagagtatgagaggaggaaccaggactataaggacatttgttctcgaatgcagttttgtcagcctgacccaagccttccccctctcaccatcagcaaccatgatgtgatcttgtggctgggggacctcaactacaggatagaagagctggatgtggaaaaagtgaaaaagctcatcgaagagaaggactttcaaatgctgtatgcatatgatcagctgaaaattcaggtggccgcaaagactgtctttgaaggcttcacagagggtgagctcacattccagcctacttacaagtatgatacgggctctgacgactgggataccagtgagaagtgccgtgctcctgcctggtgtgatcggattctctggaaagggaagaacatcactcagctgagttaccagagccacatggccctgaagaccagtgaccacaagcctgtcagctcagtgtttgacatcggggtgagggtcgtaaatgacgagctttaccggaagacactggaggaaattgttcgctccctggataagatggaaaatgccaacattccttctgtgtccctgtccaagcgagagttctgttttcagaatgtgaagtacatgcaattgaaagtagaatcctttacaattcataatggacaagtaccctgtcattttgaattcatcaacaagcctgatgaagagtcttactgtaagcagtggctgaatgccaaccccagcagaggcttcctcctgccagattctgatgttgagattgacttggagctcttcgtaaataagatgacagctacaaagctcaactcgggtgaagacaaaattgaggacattctggttctgcacttggacaggggaaaggattactttttgtctgtgtctgggaactacctgcccagctgttttgggtctcccattcatacactgtgttacatgagagagccaatcttggacctaccacttgaaaccattagtgagctgctagcatatttggcagcttattgcttcgaaacccagctggtcaccaaaagcttgatatgacagagaagaagaaggctcaagaatttattcaccagttcctctgcaacccactctgagcctctctctcctcctattttacttgaggctgccaattaccagccccacctgtttcagctcaagagatgccttaagataattatgtgaggccacttggtagcaagaatggcagctatttcctgagcctagtaccccaattaagcccaccattggttagcacactcagcgctgtgagtcgtgaagacacgggagaaaatccaccataataaaactgacattcaattttcaactttagttatttaacacagataaaatgtttttaaataactgtacttgtactcactcaccctacctccagggcatagtcagtctgggctgagatccccatgatcagatatttgatggaaagtcctgaaaggccaatgagttggatggcaagaatgcaggcagaagctgctggataaaataggctacagccacctcagatgctttcagtgctctgtctgaggatgtgtatatgcatatgcaaactcgacccccgttcctgcccagataatggctcaataactctgaggctggttgctcagcctctgagggcaatacaggcatttaaaaaattaaaattgtaaaatcactgaaaaaatgagtgttcggtgaaacaagtgggattttctgggccagcaagtcttccaaactgtatatgatgcatcctgtctccatgtgtaatatattttaatgataaatgtatttttaacagtg

SEQ ID NO: 2272 - protein, 748 aa, Homo sapiens [sequence omitted]

SEQ ID NO: 2273 - DNA, 882 bp, Homo sapiens
agtactcattgatcagggcctgatcaacccttctaattatgctcctgccaaaattgacttctcataaagtgttctctctacttacttcactatttcccttctcctgccctttttttatactttctttgctctcaccccagttattaacctctgtaagtcccattttgtcttacattcaagacccaactaaaatgtcttatttctttcagtcttataggaacatgtagttaaaagtttgacttctaaattcatgttgcatttgacccgtacctctcttttgatacttatgccaagtggtaagcaaccagttttctgtgcacagtctttctcgtgcacttggatcgtgtatacagttcttggactatagtaggcacttgagaaatgattcagtgaacaaaagacaaatcccggttcttcctctttcaggtcatttctactctccccatattccacaaaaatgtcttccactacttgatggcgtttttgcgagaactgctgaaaaattcagcaaaaaatcatttggatgagaatattctagctagcatatttggcagcttattgcttcgaaacccagctggtcaccaaaagcttgatatgacagagaagaagaaggctcaagaatttattcaccagttcctctgcaacccactctgagcctctctctcctcctattttacttgaggctgccaattaccagccccacctgtttcagctcaagagatgccttaagataattatgtgaggccacttggtagcaagaatggcagctatttcctgagcctagtaccccaattaagcccaccattggttagcacactcagcgctgtgagtcgtgaagacacgggagaaaatccaccataataaaactgacattcaattttc

SEQ ID NO: 2274 - protein, 59 aa, Homo sapiens; identical to SEQ ID NO: 2266

SEQ ID NO: 2275 - DNA, 2515 bp, Homo sapiens
gcggcgggatgaggagcttgaggaagcaggcagggaaatgtctgccgccgccggctctcgggagcgcaacactgcaggtggttctaactttgatggtttgagaccaaatgggaagggagtgcctatggaccaaagctccaggggtcaagataaaccagaaagcttgcaaccaagacagaataaatccaagtccgaaattactgacatggttcgctcctccactatcacagtgtcggacaaggctcatattttatccatgcagaagtttggactgcgagatacaattgtgaaatcacatctactacagaaagaagaggattacacctatatccagaacttcaggttttttgcgggaacatacaatgtaaatgggcagtcccccaaagaatgcctccggctgtggctgagcaatggtatccaggccccagatgtctattgtgtagggttccaggagcttgatctgagtaaggaagcttttttctttcacgataccccaaaggaggaagagtggttcaaagctgtgtcagagggtcttcatccagatgccaaatatgcaaaggtgaagcttatccgactggttgggattatgctgctgttatatgtcaaacaggagcatgcagcttatatctcagaagtggaagccgagactgtggggacaggaatcatggggaggatgggcaacaagggaggcgtggcgatcaggttccagttccacaacaccagcatctgcgttgtgaattctcacttggcagcccacattgaagagtatgagaggaggaaccaggactataaggacatttgttctcgaatgcagttttgtcagcctgacccaagccttccccctctcaccatcagcaaccatgatgtgatcttgtggctgggggacctcaactacaggatagaagagctggatgtggaaaaagtgaaaaagctcatcgaagagaaggactttcaaatgctgtatgcatatgatcagctgaaaattcaggtggccgcaaagactgtctttgaaggcttcacagagggtgagctcacattccagcctacttacaagtatgatacgggctctgacgactgggataccagtgagaagtgccgtgctcctgcctggtgtgatcggattctctggaaagggaagaacatcactcagctgagttaccagagccacatggccctgaagaccagtgaccacaagcctgtcagctcagtgtttgacatcggggtgagggtcgtaaatgacgagctttaccggaagacactggaggaaattgttcgctccctggataagatggaaaatgccaacattccttctgtgtccctgtccaagcgagagttctgttttcagaatgtgaagtacatgcaattgaaagtagaatcctttacaattcataatggacaagtaccctgtcattttgaattcatcaacaagcctgatgaagagtcttactgtaagcagtggctgaatgccaaccccagcagaggcttcctcctgccagattctgatgttgagattgacttggagctcttcgtaaataagatgacagctacaaagctcaactcgggtgaagacaaaattgaggacattctggttctgcacttggacaggggaaaggattactttttgtctgtgtctgggaactacctgcccagctgttttgggtctcccattcatacactgtgttacatgagagagccaatcttggacctaccacttgaaaccattagtgagctgactctgatgccagtatggactggagatgatgggagccagttggatagccccatggaaatccccaaagagctctggatgatggttgattacctgtaccgaaatgctgtccagcaggaagatctgtttcagcaaccaggcctgaggtcagaatttgaacatatcagggactgcttggatactggaatgattgataacctctctgccagcaatcattctgtagccgaagccctgctgcttttcctggagagccttccagagcctgtcatctgttacagcacctaccataactgcttggagtgttctggcaactacacagcaagcaaacaggtcatttctactctccccatattccacaaaaatgtcttccactacttgatggcgtttttgcgagaactgctgaaaaattcagcaaaaaatcatttggatgagaatattctagctagcatatttggcagcttattgcttcgaaacccagctggtcaccaaaagcttgatatgacagagaagaagaaggctcaagaatttattcaccagttcctctgcaacccactctgagcctctctctcctcctattttacttgaggctgccaattaccagccccacctgtttcagctcaagagatgccttaagataattatgtgaggccacttggtagcaagaatggcagctatttcctgagcctagtaccccaattaagcccaccattggttagcacactcagcgctgtgagtcgtgaagacacgggagaaaatccaccataataaaactgacattcaattttc

SEQ ID NO: 2276 - protein, 749 aa, Homo sapiens; identical to SEQ ID NO: 2268

SEQ ID NO: 2277 - DNA, 3064 bp, Homo sapiens
aaatgtagtcactgtcccggaacctggggcagcggagtcccgtgcgccctgtggtgacagctcaggagggtgtgtgcgctcagcaggggccagcatggaccagtctgtggcaatccaggagacgctggctgagggggaatactgcgtcatcgcggtgcaaggtgtgctgtgtgagggggacagccggcagagccgcctcctgggactcgtgcgctaccgcctggagcacggcggccaggaacacgctctcttcctctatacgcaccggaggatggccattaccggggacgatgtctctctggaccagatagtgccagtctcgcgggattttacgctggaagaagtgtccccagatggtgaactctacatccttggctcagatgtgaccgtccagctggacacagcagagcttagcctcgtattccaactgccctttggttcacaaaccaggatgttcctccacgaagttgccagggcctgtccaggcttcgattctgcgacccgggatcctgaattcctgtggctgtctcggtataggtgcgcagagctggagctggagatgccaacgccgcgcggttgtaactcggccctagttacctggccagggtacgcgacaattggcggaggtggttctaactttgatggtttgagaccaaatgggaagggagtgcctatggaccaaagctccaggggtcaagataaaccagaaagcttgcaaccaagacagaataaatccaagtccgaaattactgacatggttcgctcctccactatcacagtgtcggacaaggctcatattttatccatgcagaagtttggactgcgagatacaattgtgaaatcacatctactacagaaagaagaggattacacctatatccagaacttcaggttttttgcgggaacatacaatgtaaatgggcagtcccccaaagaatgcctccggctgtggctgagcaatggtatccaggccccagatgtctattgtgtagggttccaggagcttgatctgagtaaggaagcttttttctttcacgataccccaaaggaggaagagtggttcaaagctgtgtcagagggtcttcatccagatgccaaatatgcaaaggtgaagcttatccgactggttgggattatgctgctgttatatgtcaaacaggagcatgcagcttatatctcagaagtggaagccgagactgtggggacaggaatcatggggaggatgggcaacaagggaggcgtggcgatcaggttccagttccacaacaccagcatctgcgttgtgaattctcacttggcagcccacattgaagagtatgagaggaggaaccaggactataaggacatttgttctcgaatgcagttttgtcagcctgacccaagccttccccctctcaccatcagcaaccatgatgtgatcttgtggctgggggacctcaactacaggatagaagagctggatgtggaaaaagtgaaaaagctcatcgaagagaaggactttcaaatgctgtatgcatatgatcagctgaaaattcaggtggccgcaaagactgtctttgaaggcttcacagagggtgagctcacattccagcctacttacaagtatgatacgggctctgacgactgggataccagtgagaagtgccgtgctcctgcctggtgtgatcggattctctggaaagggaagaacatcactcagctgagttaccagagccacatggccctgaagaccagtgaccacaagcctgtcagctcagtgtttgacatcggggtgagggtcgtaaatgacgagctttaccggaagacactggaggaaattgttcgctccctggataagatggaaaatgccaacattccttctgtgtccctgtccaagcgagagttctgttttcagaatgtgaagtacatgcaattgaaagtagaatcctttacaattcataatggacaagtaccctgtcattttgaattcatcaacaagcctgatgaagagtcttactgtaagcagtggctgaatgccaaccccagcagaggcttcctcctgccagattctgatgttgagattgacttggagctcttcgtaaataagatgacagctacaaagctcaactcgggtgaagacaaaattgaggacattctggttctgcacttggacaggggaaaggattactttttgtctgtgtctgggaactacctgcccagctgttttgggtctcccattcatacactgtgttacatgagagagccaatcttggacctaccacttgaaaccattagtgagctgactctgatgccagtatggactggagatgatgggagccagttggatagccccatggaaatccccaaagagctctggatgatggttgattacctgtaccgaaatgctgtccagcaggaagatctgtttcagcaaccaggcctgaggtcagaatttgaacatatcagggactgcttggatactggaatgattgataacctctctgccagcaatcattctgtagccgaagccctgctgcttttcctggagagccttccagagcctgtcatctgttacagcacctaccataactgcttggagtgttctggcaactacacagcaagcaaacaggtcatttctactctccccatattccacaaaaatgtcttccactacttgatggcgtttttgcgagaactgctgaaaaattcagcaaaaaatcatttggatgagaatattctagctagcatatttggcagcttattgcttcgaaacccagctggtcaccaaaagcttgatatgacagagaagaagaaggctcaagaatttattcaccagttcctctgcaacccactctgagcctctctctcctcctattttacttgaggctgccaattaccagccccacctgtttcagctcaagagatgccttaagataattatgtgaggccacttggtagcaagaatggcagctatttcctgagcctagtaccccaattaagcccaccattggttagcacactcagcgctgtgagtcgtgaagacacgggagaaaatccaccataataaaactgacattcaattttc

SEQ ID NO: 2278 - protein, 913 aa, Homo sapiens; identical to SEQ ID NO: 75

SEQ ID NO: 2279 - DNA, 747 bp, Homo sapiens
tgaaataaacagccctgttgctcacacaaagcctgttggtggtctcttcacaaggatgcgtgtgacatttggtgccaaaacccaggacaggaggactccttcaggagaccagtcccctgtcttcgccctcactccgtgacctcaggtcctcagaccaaccagcccaaggaacatctcaccaacttcaaattgggaccccactggaaatcagactgtccaactcacccagcagccactcccagagcccctggaactctggcccaaggctctctgactgactccttcccagatcgtctcagcttagcggctgaagactgacactgcccgatcgcctcggaagcctacaggaccatcacagatgctctggataactcttacagtggagggttaagacccaaactggttcaattggcatctgacgccctttgcaaatggctctactctccttcatcaatccatcacccaaagacagcctgatctaaaaggatagattcttcacacatgccatccgcactcctgccttcatatgaagttactcctactttttggccacctctccttcgaagcccagcctcaactcccacctcctccttcatgaagccctccccagccacataagttctcagtagtcatttctctgaattttgagtgtcttcctgtctatataatgtgtctggcactttaagaaacattagactgttttggaaaatgccttgggctttggaataaaatagagctggtgatgtt

SEQ ID NO: 2280 - protein, 38 aa, Homo sapiens
MPSALLPSYEVTPTFWPPLLRSPASTPTSSFMKPSPAT

SEQ ID NO: 2281 - DNA, 276 bp, Homo sapiens
aaatgtagtcactgtcccggaacctggggcagcggagtcccgtgcgccctgtggtgacagctcaggagggtgtgtgcgctcagcaggggccagcatggaccagtctgtggcaatccaggagacgctggctgagggggaatactgcgtcatcgcggtgcaaggtgtgctgtgtgagggggacagccggcagagccgcctcctgggactcgtgcgctaccgcctggagcacggcggccaggaacacgctgtccccagatggtgaactctacatccttg

SEQ ID NO: 2282 - protein, 55 aa, Homo sapiens
MDQSVAIQETLAEGEYCVIAVQGVLCEGDSRQSRLLGLVRYRLEHGGQEHAVPRW

SEQ ID NO: 2283 - DNA, 1135 bp, Homo sapiens
aggaagaatatgaagactcaagtgggaatgttgtgaataagaagacatacgaggatctgaaaagacaaggactgctctagtgttcagggatgtagctcagcttttgggctagcccaggcttccctaagatctgctttttctatttctcccaaccaaatcctcttaaagaccctttgctatgtagtctcatggtctagcatgcatcttgtagaaacaaggcatgctggcagattgcagggttgagatgtgttttatctgttttatattttaaaagattctgccagaaaataaaaccagaccttgttctaaagcccagggttatggaccaactcagtgcttcaggtcttaacgcctccatacctcttcctcaccaactttactagtagctgagatttaatgggcacctattatgctacatatcatgactaagtgtcgcaccaaggtttgccttttgtatttgcataaagaaaggagttggagctgggtgcagtggcttgtgcctgtagtcccagctacttgggaggctgaggcaggagggttgcttgagactagcctaggtaacatagtgagaccctgtctcattaaaaaaaaaaaaaaggcatggtggcacgcactgtagtcccagctactcaggagactgaggctagaagatcctttgaacctaggagtttgagaccagcctgggcgatatagtgaggccccatctcaaaaaaaaaaaaaggggggggggggggagttgggctgtgttggaatgggcctgcagcccaacaaacaagggaactaggaccgacagtgacttcaccagcttgctaggtcagaatgagagactggtgggtctgtctacctgtttcttctacaagatccctatttgactgtaaaagtagctaatactcacatgttctccaatcccaggtagccatggtagagttgggtagagttgagcagctgccccaggatccaaatgtggtgtctgaaatggaaagaactaaggcaaccaggaaggcactgatctgccttataagcacagtcatctgaaagtcaggcctgctgcaggacaggatcccccagagaccccatttgcctctcaacactcagaccttcaactgttttttaataaatctactttttaaaaaaa

SEQ ID NO: 2284 - protein, 69 aa, Homo sapiens [sequence omitted]

SEQ ID NO: 2285 - DNA, 2371 bp, Homo sapiens
atttactattcattcacccatcttaggctttaactgtctctctgtgatatttcttctaatcttgtcaagtttagattattctgcttgatgggaaaggtggaaacgcaggaatcaagttctgttttctcatcatctattgatattttattatcttccctctctggcagtggacctgtcttatgtattacatgtagccatctgttctaagagttcaccttcctgacaccatactttaagattcaagttgttggccaggcacagtggctcatgcctgtaatcccagcactttgggaggccgaggcgggtggatcacgaggtcaggagatggagaccatcctggctaacacggtgaaaccccatctctactaaaaaatacaaaaaaaattagccgggcatgggggcgggcgcctgtagtcccagctactcgggaggctgaggcaggagaatggcgtgaacccgggaggcggagcttgcagtgagctgagatcaccccactgcactccagcctgggcgacagagcgagagtccgtctcaaaaaaaaagattcaagttgttctttccctggtttgtatctgtttttttcttgtgtatacttgtctgatcactccttctgaagctacaatgatttttttggatgtctttaccttttctccttcatagagattgttattgaactattagaatttttatattatgagctttaagaaagtaaagtcactttccccattattctcataggttgttccacattaacctccttcaagagtatcagtttctctgttttcggaggtctttggttatatttgatccaacttttatagcaaagcaagatcatgatgaattttgcagtggaaagggttttgtctataggtggtccagaaccaaaactctggtttggggtaggcaagaatctcaaaggcagagtcttctagggagcatcctaatggcagggagagaggattataacactggatacccaacagatgttcagtccatcctgattgctgttcatttctcatcctgcagtgtgggccaaactgaaattgcagaaggcttcagaacgatggcagcctgacactgaggaagaatatgaagactcaagtgggaatgttgtgaataagaagacatacgaggatctgaaaagacaaggactgctctagtgttcagggatgtagctcagcttttgggctagcccaggcttccctaagatctgctttttctatttctcccaaccaaatcctcttaaagaccctttgctatgtagtctcatggtctagcatgcatcttgtagaaacaaggcatgctggcagattgcagggttgagatgtgttttatctgttttatattttaaaagattctgccagaaaataaaaccagaccttgttctaaagcccagggttatggaccaactcagtgcttcaggtcttaacgcctccatacctcttcctcaccaactttactagtagctgagatttaatgggcacctattatgctacatatcatgttaggtaaatctgacctgacctctttccccaccctcctttgttgctgcttccctgaatgagtattaccccaggatgaggtctgccatcagcttagttagccattgatgcaaatactagggaaagactaggaggatgagccagggttgctactaaggactaagtgtcgcaccaaggtttgccttttgtatttgcataaagaaaggagttggagctgggtgcagtggcttgtgcctgtagtcccagctacttgggaggctgaggcaggagggttgcttgagactagcctaggtaacatagtgagaccctgtctcattaaaaaaaaaaaaaaggcatggtggcacgcactgtagtcccagctactcaggagactgaggctagaagatcctttgaacctaggagtttgagaccagcctgggcgatatagtgaggccccatctcaaaaaaaaaaaaaggggggggggggggagttgggctgtgttggaatgggcctgcagcccaacaaacaagggaactaggaccgacagtgacttcaccagcttgctaggtcagaatgagagactggtgggtctgtctacctgtttcttctacaagatccctatttgactgtaaaagtagctaatactcacatgttctccaatcccaggtagccatggtagagttgggtagagttgagcagctgccccaggatccaaatgtggtgtctgaaatggaaagaactaaggcaaccaggaaggcactgatctgccttataagcacagtcatctgaaagtcaggcctgctgcaggacaggatcccccagagaccccatttgcctctcaacactcagaccttcaactgttttttaataaatctactttttaaaaaaa

SEQ ID NO: 2286 - protein, 43 aa, Homo sapiens
MAGREDYNTGYPTDVQSILIAVHFSSCSVGQTEIAEGFRTMAA

SEQ ID NO: 2287 - DNA, 2635 bp, Homo sapiens
gcagttttagtagagacggggtttcaccgtgttagacaggatggtctcaatctcctgatctcgttggatgcacagtattttatttaacatattcgctgccgatagacaagtcgtttctacacgtgaatttcttttttttttttttttttgagactgagtctcattctgtcgcccaggctggagtgcagtggcacgatctcagctgacggcaacctctgcttcccgggttcaagcgattctcctgcctcagcctccggagtagctgggactacaggcgcctgccatcacgcccggctaatttttgtttgtttgtttttagtagagacggggtttcaccatgttagccagcctggtcgtctcgaacctctgacctcaagtgatccgcccgcctcggcctcccaaagtgttgggattacaggcgtgagctaccgcgcccggcctcacatgtgaatttttttaaaaacaccaccagcaaaaccccactattcccattttcctgagaaagacgctgaggtccagagaaagagaaaacgttctcataatttatgctgaaagctgcgtcctcaagttccggtttcccaactcccatccgcactccaactgctcgcgcagtccacacaggatacctgcccgccaagccggccccagcaagccgcaggaagccgtccgctgaacctcaggttcttgggttttcctatgccccctggaggcatctgcgaacctctcggcatcgctccaccacacctcccaccagcaggtggcactgttgccatctccataacatggactggccttccttgtggtgctcctgttttcttaagtcccggggcacttccggcactcgcggaactttggtgcagcctgatgcgcaacgtggggactcaggcgcgctgggcggcaggagttgcttccggccgtgttggtggtctgaattgagaagccgcgactaagggaagatggagacaatactggagcagcagcggcgctatcatgaggagaaggaacggctcatggacgtcatggctaaagagatgctcaccaagaagtccacgctccgggaccagatcaattctgatcaccgcactcgggccatgcaagataggtatatggaggtcagtgggaacctgagggatttgtatgatgataaggatggaaactacacctaccgagggcccaaagccttccagcgacactttgctgaatggcgtcatgctcatggcatgaggtgtttgggcatcccaaacactgctcactttgctaatgtgacacagattgaagatgctgtctccttgtgggccaaactgaaattgcagaaggcttcagaacgatggcagcctgacactgaggaagaatatgaagactcaagtgggaatgttgtgaataagaagacatacgaggatctgaaaagacaaggactgctctagtgttcagggatgtagctcagcttttgggctagcccaggcttccctaagatctgctttttctatttctcccaaccaaatcctcttaaagaccctttgctatgtagtctcatggtctagcatgcatcttgtagaaacaaggcatgctggcagattgcagggttgagatgtgttttatctgttttatattttaaaagattctgccagaaaataaaaccagaccttgttctaaagcccagggttatggaccaactcagtgcttcaggtcttaacgcctccatacctcttcctcaccaactttactagtagctgagatttaatgggcacctattatgctacatatcatgttaggtaaatctgacctgacctctttccccaccctcctttgttgctgcttccctgaatgagtattaccccaggatgaggtctgccatcagcttagttagccattgatgcaaatactagggaaagactaggaggatgagccagggttgctactaaggactaagtgtcgcaccaaggtttgccttttgtatttgcataaagaaaggagttggagctgggtgcagtggcttgtgcctgtagtcccagctacttgggaggctgaggcaggagggttgcttgagactagcctaggtaacatagtgagaccctgtctcattaaaaaaaaaaaaaaggcatggtggcacgcactgtagtcccagctactcaggagactgaggctagaagatcctttgaacctaggagtttgagaccagcctgggcgatatagtgaggccccatctcaaaaaaaaaaaaaggggggggggggggagttgggctgtgttggaatgggcctgcagcccaacaaacaagggaactaggaccgacagtgacttcaccagcttgctaggtcagaatgagagactggtgggtctgtctacctgtttcttctacaagatccctatttgactgtaaaagtagctaatactcacatgttctccaatcccaggtagccatggtagagttgggtagagttgagcagctgccccaggatccaaatgtggtgtctgaaatggaaagaactaaggcaaccaggaaggcactgatctgccttataagcacagtcatctgaaagtcaggcctgctgcaggacaggatcccccagagaccccatttgcctctcaacactcagaccttcaactgttttttaataaatctactttttaaaaaaa

SEQ ID NO: 2288 - protein, 155 aa, Homo sapiens
METILEQQRRYHEEKERLMDVMAKEMLTKKSTLRDQINSDHRTRAMQDRYMEVSGNLRDLYDDKDGNYTYRGPKAFQRHFAEWRHAHGMRCLGIPNTAHFANVTQIEDAVSLWAKLKLQKASERWQPDTEEEYEDSSGNVVNKKTYEDLKRQGLL

SEQ ID NO: 2289 - DNA, 3673 bp, Homo sapiens
gcagttttagtagagacggggtttcaccgtgttagacaggatggtctcaatctcctgatctcgttggatgcacagtattttatttaacatattcgctgccgatagacaagtcgtttctacacgtgaatttcttttttttttttttttttgagactgagtctcattctgtcgcccaggctggagtgcagtggcacgatctcagctgacggcaacctctgcttcccgggttcaagcgattctcctgcctcagcctccggagtagctgggactacaggcgcctgccatcacgcccggctaatttttgtttgtttgtttttagtagagacggggtttcaccatgttagccagcctggtcgtctcgaacctctgacctcaagtgatccgcccgcctcggcctcccaaagtgttgggattacaggcgtgagctaccgcgcccggcctcacatgtgaatttttttaaaaacaccaccagcaaaaccccactattcccattttcctgagaaagacgctgaggtccagagaaagagaaaacgttctcataatttatgctgaaagctgcgtcctcaagttccggtttcccaactcccatccgcactccaactgctcgcgcagtccacacaggatacctgcccgccaagccggccccagcaagccgcaggaagccgtccgctgaacctcaggttcttgggttttcctatgccccctggaggcatctgcgaacctctcggcatcgctccaccacacctcccaccagcaggtggcactgttgccatctccataacatggactggccttccttgtggtgctcctgttttcttaagtcccggggcacttccggcactcgcggaactttggtgcagcctgatgcgcaacgtggggactcaggcgcgctgggcggcaggagttgcttccggccgtgttggtggtctgaattgagaagccgcgactaagggaagatggagacaatactggagcagcagcggcgctatcatgaggagaaggaacggctcatggacgtcatggctaaagagatgctcaccaagaagtccacgctccgggaccagatcaattctgatcaccgcactcgggccatgcaagataggtatatggaggtcagtgggaacctgagggatttgtatgatgataaggatggattacgaaaggaggagctcaatgccatttcaggacccaatgagtttgctgaattctataatagactcaagcaaataaaggaattccaccggaagcacccaaatgagatctgtgtgccaatgtcagtggaatttgaggaactcctgaaggctcgagagaatccaagtgaagaggcacaaaacttggtggagttcacagatgaagagggatatggtcgttatctcgatctccatgactgttacctcaagtacattaacctgaaggcatctgagaagctggattatatcacatacctgtccatctttgaccaattatttgacattcctaaagaaaggaagaatgcagagtataagagatacctagagatgctgcttgagtaccttcaggattacacagatagagtgaagcctctccaagatcagaatgaactttttgggaagattcaggctgagtttgagaagaaatgggagaatgggacctttcctggatggccgaaagagacaagcagtgccctgacccatgctggagcccatcttgacctctctgcattctcctcctgggaggagttggcttctctgggtttggacagattgaaatctgctctcttagctttaggcttgaaatgtggcgggaccctagaagagcgagcccagagactattcagtaccaaaggaaagtccctggagtcacttgatacctctttgtttgccaaaaatcccaagtcaaagggcaccaagcgagacactgaaaggaacaaagacattgcttttctagaagcccagatctatgaatatgtagagattctcggggaacagcgacatctcactcatgaaaatgtacagcgcaagcaagccaggacaggagaagagcgagaagaagaggaagaagagcagatcagtgagagtgagagtgaagatgaagagaacgagatcatttacaaccccaaaaacctgccacttggctgggatggcaaacctattccctactggctgtataagcttcatggcctaaatatcaactacaactgtgagatttgtggaaactacacctaccgagggcccaaagccttccagcgacactttgctgaatggcgtcatgctcatggcatgaggtgtttgggcatcccaaacactgctcactttgctaatgtgacacagattgaagatgctgtctccttgtgggccaaactgaaattgcagaaggcttcagaacgatggcagcctgacactgaggaagaatatgaagactcaagtgggaatgttgtgaataagaagacatacgaggatctgaaaagacaaggactgctctagtgttcagggatgtagctcagcttttgggctagcccaggcttccctaagatctgctttttctatttctcccaaccaaatcctcttaaagaccctttgctatgtagtctcatggtctagcatgcatcttgtagaaacaaggcatgctggcagattgcagggttgagatgtgttttatctgttttatattttaaaagattctgccagaaaataaaaccagaccttgttctaaagcccagggttatggaccaactcagtgcttcaggtcttaacgcctccatacctcttcctcaccaactttactagtagctgagatttaatgggcacctattatgctacatatcatgttaggtaaatctgacctgacctctttccccaccctcctttgttgctgcttccctgaatgagtattaccccaggatgaggtctgccatcagcttagttagccattgatgcaaatactagggaaagactaggaggatgagccagggttgctactaaggactaagtgtcgcaccaaggtttgccttttgtatttgcataaagaaaggagttggagctgggtgcagtggcttgtgcctgtagtcccagctacttgggaggctgaggcaggagggttgcttgagactagcctaggtaacatagtgagaccctgtctcattaaaaaaaaaaaaaaggcatggtggcacgcactgtagtcccagctactcaggagactgaggctagaagatcctttgaacctaggagtttgagaccagcctgggcgatatagtgaggccccatctcaaaaaaaaaaaaaggggggggggggggagttgggctgtgttggaatgggcctgcagcccaacaaacaagggaactaggaccgacagtgacttcaccagcttgctaggtcagaatgagagactggtgggtctgtctacctgtttcttctacaagatccctatttgactgtaaaagtagctaatactcacatgttctccaatcccaggtagccatggtagagttgggtagagttgagcagctgccccaggatccaaatgtggtgtctgaaatggaaagaactaaggcaaccaggaaggcactgatctgccttataagcacagtcatctgaaagtcaggcctgctgcaggacaggatcccccagagaccccatttgcctctcaacactcagaccttcaactgttttttaataaatctactttttaaaaaaa

SEQ ID NO: 2290 - protein, 501 aa, Homo sapiens; identical to SEQ ID NO: 77

SEQ ID NO: 2291 - DNA, 303 bp, Homo sapiens
aggaagaatatgaagactcaagtgggaatgttgtgaataagaagacatacgaggatctgaaaagacaaggactgctctagtgttcagggatccatggtagagttgggtagagttgagcagctgccccaggatccaaatgtggtgtctgaaatggaaagaactaaggcaaccaggaaggcactgatctgccttataagcacagtcatctgaaagtcaggcctgctgcaggacaggatcccccagagaccccatttgcctctcaacactcagaccttcaactgttttttaataaatctacttttt

SEQ ID NO: 2292 - protein, 38 aa, Homo sapiens [sequence omitted]

SEQ ID NO: 2293 - DNA, 364 bp, Homo sapiens
tccaactcctttctttatgcaaatacaaaaggcaaaccttggtgcgacacttagtccttagtagcaaccctggctcatcctcctagtctttccctagtatttgcatcaatggctaactaagctgatggcagactcttttaaaatataaaacagataaaacacatctcaaccctgcaatctgccagcatgccttgtttctacaagatgcatgctagaccatgagactacatagcaaagggtctttaagaggatttggttgggagaaatagaaaaagcagatcttagggaagcctgggctagcccaaaagctgagctacatccctgaacactagagcagtccttgtcttttcagatcctcgtatgt

SEQ ID NO: 2294 - protein, 30 aa, Homo sapiens
QRVFKRIWLGEIEKADLREAWASPKAELHP

SEQ ID NO: 2295 - DNA, 1407 bp, Homo sapiens
atttactattcattcacccatcttaggctttaactgtctctctgtgatatttcttctaatcttgtcaagtttagattattctgcttgatgggaaaggtggaaacgcaggaatcaagttctgttttctcatcatctattgatattttattatcttccctctctggcagtggacctgtcttatgtattacatgtagccatctgttctaagagttcaccttcctgacaccatactttaagattcaagttgttggccaggcacagtggctcatgcctgtaatcccagcactttgggaggccgaggcgggtggatcacgaggtcaggagatggagaccatcctggctaacacggtgaaaccccatctctactaaaaaatacaaaaaaaattagccgggcatgggggcgggcgcctgtagtcccagctactcgggaggctgaggcaggagaatggcgtgaacccgggaggcggagcttgcagtgagctgagatcaccccactgcactccagcctgggcgacagagcgagagtccgtctcaaaaaaaaagattcaagttgttctttccctggtttgtatctgtttttttcttgtgtatacttgtctgatcactccttctgaagctacaatgatttttttggatgtctttaccttttctccttcatagagattgttattgaactattagaatttttatattatgagctttaagaaagtaaagtcactttccccattattctcataggttgttccacattaacctccttcaagagtatcagtttctctgttttcggaggtctttggttatatttgatccaacttttatagcaaagcaagatcatgatgaattttgcagtggaaagggttttgtctataggtggtccagaaccaaaactctggtttggggtaggcaagaatctcaaaggcagagtcttctagggagcatcctaatggcagggagagaggattataacactggatacccaacagatgttcagtccatcctgattgctgttcatttctcatcctgcagtgtgggccaaactgaaattgcagaaggcttcagaacgatggcagcctgacactgaggaagaatatgaagactcaagtgggaatgttgtgaataagaagacatacgaggatctgaaaagacaaggactgctctagtgttcagggatgtagctcagcttttgggctagcccaggcttccctaagatctgctttttctatttctcccaaccaaatcctcttaaagaccctttgctatgtagtctcatggtctagcatgcatcttgtagaaacaaggcatgctggcagattgcagggttgagatgtgttttatctgttttatattttaaaagattctgccagaaaataaaaccagaccttgttctaaagcccagggttatggacc

SEQ ID NO: 2296 - protein, 43 aa, Homo sapiens; identical to SEQ ID NO: 2286

SEQ ID NO: 2297 - DNA, 818 bp, Homo sapiens
ctggagagtttagacttactgctagattggctgtgaaatgtgtggtcctgccacagcctcaggaacacccaccctctggcctgcatttggggtttcccaaaaatctgttaatgtaatattgtaatttttctcttctttgtataggagttggcttctctgggtttggacagattgaaatctgctctcttagctttaggcttgaaatgtggcgggtaaggaatagtttttctatcaaaactatcgatttactgtgtgtttgcacagtcttctaagtagctctgattccattttttttgttgctccacactgcaaaaataagccagcctgtgtggtaaagtaaccctaaaatcctttgccgtcctgtctccttaggaccctagaagagcgagcccagagactattcagtaccaaaggaaagtccctggagtcacttgatacctctttgtttgccaaaaatcccaagtcaaagggcaccaagcggtgagtggctggggaagaatatgaagactcaagtgggaatgttgtgaataagaagacatacgaggatctgaaaagacaaggactgctctagtgttcagggatgtagctcagcttttgggctagcccaggcttccctaagatctgctttttctatttctcccaaccaaatcctcttaaagaccctttgctatgtagtctcatggtctagcatgcatcttgtagaaacaaggcatgctggcagattgcagggttgagatgtgttttatctgttttatattttaaaagattctgccagaaaataaaaccagaccttgttctaaagcccagggttatggacc

SEQ ID NO: 2298 - protein, 45 aa, Homo sapiens
NPLPSCLLRTLEERAQRLFSTKGKSLESLDTSLFAKNPKSKGTKR

SEQ ID NO: 2299 - DNA, 1671 bp, Homo sapiens
gcagttttagtagagacggggtttcaccgtgttagacaggatggtctcaatctcctgatctcgttggatgcacagtattttatttaacatattcgctgccgatagacaagtcgtttctacacgtgaatttcttttttttttttttttttgagactgagtctcattctgtcgcccaggctggagtgcagtggcacgatctcagctgacggcaacctctgcttcccgggttcaagcgattctcctgcctcagcctccggagtagctgggactacaggcgcctgccatcacgcccggctaatttttgtttgtttgtttttagtagagacggggtttcaccatgttagccagcctggtcgtctcgaacctctgacctcaagtgatccgcccgcctcggcctcccaaagtgttgggattacaggcgtgagctaccgcgcccggcctcacatgtgaatttttttaaaaacaccaccagcaaaaccccactattcccattttcctgagaaagacgctgaggtccagagaaagagaaaacgttctcataatttatgctgaaagctgcgtcctcaagttccggtttcccaactcccatccgcactccaactgctcgcgcagtccacacaggatacctgcccgccaagccggccccagcaagccgcaggaagccgtccgctgaacctcaggttcttgggttttcctatgccccctggaggcatctgcgaacctctcggcatcgctccaccacacctcccaccagcaggtggcactgttgccatctccataacatggactggccttccttgtggtgctcctgttttcttaagtcccggggcacttccggcactcgcggaactttggtgcagcctgatgcgcaacgtggggactcaggcgcgctgggcggcaggagttgcttccggccgtgttggtggtctgaattgagaagccgcgactaagggaagatggagacaatactggagcagcagcggcgctatcatgaggagaaggaacggctcatggacgtcatggctaaagagatgctcaccaagaagtccacgctccgggaccagatcaattctgatcaccgcactcgggccatgcaagataggtatatggaggtcagtgggaacctgagggatttgtatgatgataaggatggaaactacacctaccgagggcccaaagccttccagcgacactttgctgaatggcgtcatgctcatggcatgaggtgtttgggcatcccaaacactgctcactttgctaatgtgacacagattgaagatgctgtctccttgtgggccaaactgaaattgcagaaggcttcagaacgatggcagcctgacactgaggaagaatatgaagactcaagtgggaatgttgtgaataagaagacatacgaggatctgaaaagacaaggactgctctagtgttcagggatgtagctcagcttttgggctagcccaggcttccctaagatctgctttttctatttctcccaaccaaatcctcttaaagaccctttgctatgtagtctcatggtctagcatgcatcttgtagaaacaaggcatgctggcagattgcagggttgagatgtgttttatctgttttatattttaaaagattctgccagaaaataaaaccagaccttgttctaaagcccagggttatggacc

SEQ ID NO: 2300 - protein, 155 aa, Homo sapiens; identical to SEQ ID NO: 2288

SEQ ID NO: 2301 - DNA, 2709 bp, Homo sapiens
gcagttttagtagagacggggtttcaccgtgttagacaggatggtctcaatctcctgatctcgttggatgcacagtattttatttaacatattcgctgccgatagacaagtcgtttctacacgtgaatttcttttttttttttttttttgagactgagtctcattctgtcgcccaggctggagtgcagtggcacgatctcagctgacggcaacctctgcttcccgggttcaagcgattctcctgcctcagcctccggagtagctgggactacaggcgcctgccatcacgcccggctaatttttgtttgtttgtttttagtagagacggggtttcaccatgttagccagcctggtcgtctcgaacctctgacctcaagtgatccgcccgcctcggcctcccaaagtgttgggattacaggcgtgagctaccgcgcccggcctcacatgtgaatttttttaaaaacaccaccagcaaaaccccactattcccattttcctgagaaagacgctgaggtccagagaaagagaaaacgttctcataatttatgctgaaagctgcgtcctcaagttccggtttcccaactcccatccgcactccaactgctcgcgcagtccacacaggatacctgcccgccaagccggccccagcaagccgcaggaagccgtccgctgaacctcaggttcttgggttttcctatgccccctggaggcatctgcgaacctctcggcatcgctccaccacacctcccaccagcaggtggcactgttgccatctccataacatggactggccttccttgtggtgctcctgttttcttaagtcccggggcacttccggcactcgcggaactttggtgcagcctgatgcgcaacgtggggactcaggcgcgctgggcggcaggagttgcttccggccgtgttggtggtctgaattgagaagccgcgactaagggaagatggagacaatactggagcagcagcggcgctatcatgaggagaaggaacggctcatggacgtcatggctaaagagatgctcaccaagaagtccacgctccgggaccagatcaattctgatcaccgcactcgggccatgcaagataggtatatggaggtcagtgggaacctgagggatttgtatgatgataaggatggattacgaaaggaggagctcaatgccatttcaggacccaatgagtttgctgaattctataatagactcaagcaaataaaggaattccaccggaagcacccaaatgagatctgtgtgccaatgtcagtggaatttgaggaactcctgaaggctcgagagaatccaagtgaagaggcacaaaacttggtggagttcacagatgaagagggatatggtcgttatctcgatctccatgactgttacctcaagtacattaacctgaaggcatctgagaagctggattatatcacatacctgtccatctttgaccaattatttgacattcctaaagaaaggaagaatgcagagtataagagatacctagagatgctgcttgagtaccttcaggattacacagatagagtgaagcctctccaagatcagaatgaactttttgggaagattcaggctgagtttgagaagaaatgggagaatgggacctttcctggatggccgaaagagacaagcagtgccctgacccatgctggagcccatcttgacctctctgcattctcctcctgggaggagttggcttctctgggtttggacagattgaaatctgctctcttagctttaggcttgaaatgtggcgggaccctagaagagcgagcccagagactattcagtaccaaaggaaagtccctggagtcacttgatacctctttgtttgccaaaaatcccaagtcaaagggcaccaagcgagacactgaaaggaacaaagacattgcttttctagaagcccagatctatgaatatgtagagattctcggggaacagcgacatctcactcatgaaaatgtacagcgcaagcaagccaggacaggagaagagcgagaagaagaggaagaagagcagatcagtgagagtgagagtgaagatgaagagaacgagatcatttacaaccccaaaaacctgccacttggctgggatggcaaacctattccctactggctgtataagcttcatggcctaaatatcaactacaactgtgagatttgtggaaactacacctaccgagggcccaaagccttccagcgacactttgctgaatggcgtcatgctcatggcatgaggtgtttgggcatcccaaacactgctcactttgctaatgtgacacagattgaagatgctgtctccttgtgggccaaactgaaattgcagaaggcttcagaacgatggcagcctgacactgaggaagaatatgaagactcaagtgggaatgttgtgaataagaagacatacgaggatctgaaaagacaaggactgctctagtgttcagggatgtagctcagcttttgggctagcccaggcttccctaagatctgctttttctatttctcccaaccaaatcctcttaaagaccctttgctatgtagtctcatggtctagcatgcatcttgtagaaacaaggcatgctggcagattgcagggttgagatgtgttttatctgttttatattttaaaagattctgccagaaaataaaaccagaccttgttctaaagcccagggttatggacc

SEQ ID NO: 2302 - protein, 501 aa, Homo sapiens; identical to SEQ ID NO: 77

SEQ ID NO: 2303 - DNA, 471 bp, Homo sapiens
ggcgcggtgtctcacgcctgtaatcccagcactttgggaggctgaggtgggcgggcagatcacctgaggttgggagttcgagaccagcctgaccaacatggagaaaccccatctctactacaaatacaaaattagccaggtgtggtggtgcatgcctgtaatccctgctactcaggaggctgaggcaggagaatcacttgaacccaggaggtggaggttgggtgagccgagatcgcaccgctgcatccatctcaaaaaaaaaaaaaaaaaaaaagaatattaataaagtgcgaccaatcacctaaatggcgatttccggtggcaatttcagagggctctttcttagcttttgtacagttaaaaaaaaatcataaatctaaaccaatggaataactaacataataaatttataagtaaaaccctctaagttaaaaaaaaaaaaaaaatcactgcggccgggtgcggtggctc

SEQ ID NO: 2304 - protein, 61 aa, Homo sapiens [sequence omitted]

SEQ ID NO: 2305 - DNA, 940 bp, Homo sapiens
tttcctatgccccctggaggcatctgcgaacctctcggcatcgctccaccacacctcccaccagcaggtggcactgttgccatctccataacatggactggccttccttgtggtgctcctgttttcttaagtcccggggcacttccggcactcgcggaactttggtgcagcctgatgcgcaacgtggggactcaggcgcgctgggcggcaggagttgcttccggccgtgttggtggtctgaattgagaagccgcgactaagggaagatggagacaatactggagcagcagcggcgctatcatgaggagaaggaacggctcatggacgtcatggctaaagagatgctcaccaagaagtccacgctccgggaccagatcaattctgatcaccgcactcgggccatgcaagatatctgtgtgccaatgtcagtggaatttgaggaactcctgaaggctcgagagaatccaagtgaagaggcacaaaacttggtggagttcacagatgaagagggatatggtcgttatctcgatctccatgactgttacctcaagtacattaacctgaaggcatctgagaagctggattatatcacatacctgtccatctttgaccaattatttgacattcctaaagaaaggaagaatgcagagtataagagatacctagagatgctgcttgagtaccttcaggattacacagatagagtgaagcctctccaagatcagaatgaactttttgggaagattcaggctgagtttgagaagaaatgggagaatgggacctttcctggatggccgaaagagacaagcagtgccctgacccatgctggagcccatcttgacctctctgcattctcctcctgggaggtatgtttccttcagcagtagtagtgttctctctgtctatttttctgtctttaaagactgctctcctgtcttta

SEQ ID NO: 2306 - protein, 206 aa, Homo sapiens
METILEQQRRYHEEKERLMDVMAKEMLTKKSTLRDQINSDHRTRAMQDICVPMSVEFEELLKARENPSEEAQNLVEFTDEEGYGRYLDLHDCYLKYINLKASEKLDYITYLSIFDQLFDIPKERKNAEYKRYLEMLLEYLQDYTDRVKPLQDQNELFGKIQAEFEKKWENGTFPGWPKETSSALTHAGAHLDLSAFSSWEVCFLQQ

SEQ ID NO: 2307 - DNA, 1620 bp, Homo sapiens
gcagttttagtagagacggggtttcaccgtgttagacaggatggtctcaatctcctgatctcgttggatgcacagtattttatttaacatattcgctgccgatagacaagtcgtttctacacgtgaatttcttttttttttttttttttgagactgagtctcattctgtcgcccaggctggagtgcagtggcacgatctcagctgacggcaacctctgcttcccgggttcaagcgattctcctgcctcagcctccggagtagctgggactacaggcgcctgccatcacgcccggctaatttttgtttgtttgtttttagtagagacggggtttcaccatgttagccagcctggtcgtctcgaacctctgacctcaagtgatccgcccgcctcggcctcccaaagtgttgggattacaggcgtgagctaccgcgcccggcctcacatgtgaatttttttaaaaacaccaccagcaaaaccccactattcccattttcctgagaaagacgctgaggtccagagaaagagaaaacgttctcataatttatgctgaaagctgcgtcctcaagttccggtttcccaactcccatccgcactccaactgctcgcgcagtccacacaggatacctgcccgccaagccggccccagcaagccgcaggaagccgtccgctgaacctcaggttcttgggttttcctatgccccctggaggcatctgcgaacctctcggcatcgctccaccacacctcccaccagcaggtggcactgttgccatctccataacatggactggccttccttgtggtgctcctgttttcttaagtcccggggcacttccggcactcgcggaactttggtgcagcctgatgcgcaacgtggggactcaggcgcgctgggcggcaggagttgcttccggccgtgttggtggtctgaattgagaagccgcgactaagggaagatggagacaatactggagcagcagcggcgctatcatgaggagaaggaacggctcatggacgtcatggctaaagagatgctcaccaagaagtccacgctccgggaccagatcaattctgatcaccgcactcgggccatgcaagataggtatatggaggtcagtgggaacctgagggatttgtatgatgataaggatggattacgaaaggaggagtcctgaaggctcgagagaatccaagtgaagaggcacaaagtaagtaggggtgaaaatttcattcagcaccagcaaaaatacaggttaatgacagctcagatttgcagccatggcctcagagatatttatagccaggatttcttgctggttttgtctttgctggtttctgggctagagtgacatcctaagttggtcttgggcaaaatgttcattttgttctctcctacctcaaatttactggcttggaaagccaaggattgttcactttagttcacaatactaaaatgagtcagtccttgttaccttgtaagagaaaactcacttttgatctcacttaacttattggaggttatattgtgagcaaagggaagacatttgggtgaagtgctgcctcaggaaactaggaacacacagtccatttgaaaaggtaagtccaagagagtggtctgta

SEQ ID NO: 2308 - protein, 72 aa, Homo sapiens
METILEQQRRYHEEKERLMDVMAKEMLTKKSTLRDQINSDHRTRAMQDRYMEVSGNLRDLYDDKDGLRKEES

SEQ ID NO: 2309 - DNA, 372 bp, Homo sapiens
acatcttgcagcaggtagcagctcgagtggaaaaggcaagacttgctgcctggagtggggatgaagaaacatttaggggcaggaaggcatcaggtttgagacacagtgactggaggatggtggtggtaaggcggtccacccacctaacaggaagtgagagatgtgcagctacaaaattgtttgatttatttcaatacaaacatttttcagacttaacataaaagaaacccagacatataatcaaaggtgtgtcattgtttaattgacaattttttctctcttccttagtaaagcataaaataatactgagttttacatttgatggcatctcgtattcaagaaatacagtagctctccaagtttatacccccc

SEQ ID NO: 2310 - protein, 34 aa, Homo sapiens
MVVVRRSTHLTGSERCAATKLFDLFQYKHFSDLT

SEQ ID NO: 2311 - DNA, 668 bp, Homo sapiens
tgcgcccgctgctctacctccctggtgggccagggcttcgtaccggatggagaccaagtgctctgccagggctgtagccaggcagggccctaagccagggctcctggacccaggctttcccataccacgggcccaggactgtggctccttttctaaaccacctctgggactcagctccccccgccaaaaaaaatggggccccaaacctgggctcttacagagcctccatgagtcaagccccctccccacacctggactccagaattcaccctctcccctgcagtctgggttcccagactgagtcctctccccaaatcagggctctagacccgagccctccaaacctggactctgggacttaggcccccttaaatctagacttctctttataggtttcaggtctcctatgggtgcctgggaagtccttgaaagtggactgttctcaggcttgacctgccccaccccatccccgcggttgaggctgtgggggcagcagatcaggagcccactgataaggggccctagggtacagggtgctgcccagcaggtcgccaccgagtgtcttctcattttatttcagctccattttgcccatagatgggcagaggggtgagattggctcatcccccttccagattctgcaataaagcggtgtgaggaagcagggg

SEQ ID NO: 2312 - protein, 84 aa, Homo sapiens
METKCSARAVARQGPKPGLLDPGFPIPRAQDCGSFSKPPLGLSSPRQKKWGPKPGLLQSLHESSPLPTPGLQNSPSPLQSGFPD

SEQ ID NO: 2313 - DNA, 845 bp, Homo sapiens
gagaactctttgcacctaagtgcagcagctgcaagcgccccatcgtaggactcggtggaggcaagtatgtgtcctttgaagaccgacactggcaccacaactgcttctcctgcgcccgctgctctacctccctggtgggccagggcttcgtaccggatggagaccaagtgctctgccagggctgtagccaggcagggccctaagccagggctcctggacccaggctttcccataccacgggcccaggactgtggctccttttctaaaccacctctgggactcagctccccccgccaaaaaaaatgggtctccttctgggctccaggattgtctccccactccagcatccccaaactggtactccctgacccagggccccaaacctgggctcttacagagcctccatgagtcaagccccctccccacacctggactccagaattcaccctctcccctgcagtctgggttcccagactgagtcctctccccaaatcagggctctagacccgagccctccaaacctggactctgggacttaggcccccttaaatctagacttctctttataggtttcaggtctcctatgggtgcctgggaagtccttgaaagtggactgttctcaggcttgacctgccccaccccatccccgcggttgaggctgtgggggcagcagatcaggagcccactgataaggggccctagggtacagggtgctgcccagcaggtcgccaccgagtgtcttctcattttatttcagctccattttgcccatagatgggcagaggggtgagattggctcatcccccttccagattctgcaataaagcggtgtgaggaagcagggg

SEQ ID NO: 2314 - protein, 113 aa, Homo sapiens
MCPLKTDTGTTTASPAPAALPPWWARASYRMETKCSARAVARQGPKPGLLDPGFPIPRAQDCGSFSKPPLGLSSPRQKKWVSFWAPGLSPHSSIPKLVLPDPGPQTWALTEPP

SEQ ID NO: 2315 - DNA, 1305 bp, Homo sapiens
ggtccgtctgcagtcggcagcctcgccggcagctcgctcggcccccgcttggcccggcccgcaggtaggagccgccgagggacgcggcgcccggttcccggccccgcctgcgccgcgcgctccccgctcccgccgcccgcttcgaggagctgttctatgaagaccgccatttccacgagggctgcttccgctgctgccgctgccagcgctcactagccgatgaacccttcacctgccaggacagtgagctgctctgcaatgactgctactgcagtgcgttttcctcgcagtgctccgcttgtggggagactgtcatgcctgacgctgacacagggtggagtgacataccgtgatcagccgtggcatcgagaatgtctggtctgtaccggatgccagacgcccctggcagggcagcagttcacctcccgggatgaagatccctactgtgtggcctgttttggagaactctttgcacctaagtgcagcagctgcaagcgccccatcgtaggactcggtggaggcaagtatgtgtcctttgaagaccgacactggcaccacaactgcttctcctgcgcccgctgctctacctccctggtgggccagggcttcgtaccggatggagaccaagtgctctgccagggctgtagccaggcagggccctaagccagggctcctggacccaggctttcccataccacgggcccaggactgtggctccttttctaaaccacctctgggactcagctccccccgccaaaaaaaatgggtctccttctgggctccaggattgtctccccactccagcatccccaaactggtactccctgacccagggccccaaacctgggctcttacagagcctccatgagtcaagccccctccccacacctggactccagaattcaccctctcccctgcagtctgggttcccagactgagtcctctccccaaatcagggctctagacccgagccctccaaacctggactctgggacttaggcccccttaaatctagacttctctttataggtttcaggtctcctatgggtgcctgggaagtccttgaaagtggactgttctcaggcttgacctgccccaccccatccccgcggttgaggctgtgggggcagcagatcaggagcccactgataaggggccctagggtacagggtgctgcccagcaggtcgccaccgagtgtcttctcattttatttcagctccattttgcccatagatgggcagaggggtgagattggctcatcccccttccagattctgcaataaagcggtgtgaggaagcagggg

SEQ ID NO: 2316 - protein, 147 aa, Homo sapiens
MNPSPARTVSCSAMTATAVRFPRSAPLVGRLSCLTLTQGGVTYRDQPWHRECLVCTGCQTPLAGQQFTSRDEDPYCVACFGELFAPKCSSCKRPIVGLGGGKYVSFEDRHWHHNCFSCARCSTSLVGQGFVPDGDQVLCQGCSQAGP

SEQ ID NO: 2317 - DNA, 1393 bp, Homo sapiens
ggtccgtctgcagtcggcagcctcgccggcagctcgctcggcccccgcttggcccggcccgcaggagctgttctatgaagaccgccatttccacgagggctgcttccgctgctgccgctgccagcgctcactagccgatgaacccttcacctgccaggacagtgagctgctctgcaatgactgctactgcagtgcgttttcctcgcagtgctccgcttgtggggagactgtcatgcctgggtcccggaagctggaatatggaggccagacatggcatgagcactgcttcctgtgcagtggctgtgaacagccactgggctcccgttcttttgtgcccgacaagggtgctcactactgcgtgccctgctatgagaacaagtttgctcctcgctgcgcccgctgcagcaagacgctgacacagggtggagtgacataccgtgatcagccgtggcatcgagaatgtctggtctgtaccggatgccagacgcccctggcagggcagcagttcacctcccgggatgaagatccctactgtgtggcctgttttggagaactctttgcacctaagtgcagcagctgcaagcgccccatcgtaggactcggtggaggcaagtatgtgtcctttgaagaccgacactggcaccacaactgcttctcctgcgcccgctgctctacctccctggtgggccagggcttcgtaccggatggagaccaagtgctctgccagggctgtagccaggcagggccctaagccagggctcctggacccaggctttcccataccacgggcccaggactgtggctccttttctaaaccacctctgggactcagctccccccgccaaaaaaaatgggtctccttctgggctccaggattgtctccccactccagcatccccaaactggtactccctgacccagggccccaaacctgggctcttacagagcctccatgagtcaagccccctccccacacctggactccagaattcaccctctcccctgcagtctgggttcccagactgagtcctctccccaaatcagggctctagacccgagccctccaaacctggactctgggacttaggcccccttaaatctagacttctctttataggtttcaggtctcctatgggtgcctgggaagtccttgaaagtggactgttctcaggcttgacctgccccaccccatccccgcggttgaggctgtgggggcagcagatcaggagcccactgataaggggccctagggtacagggtgctgcccagcaggtcgccaccgagtgtcttctcattttatttcagctccattttgcccatagatgggcagaggggtgagattggctcatcccccttccagattctgcaataaagcggtgtgaggaagcagggg

SEQ ID NO: 2318 - protein, 172 aa, Homo sapiens
MPGSRKLEYGGQTWHEHCFLCSGCEQPLGSRSFVPDKGAHYCVPCYENKFAPRCARCSKTLTQGGVTYRDQPWHRECLVCTGCQTPLAGQQFTSRDEDPYCVACFGELFAPKCSSCKRPIVGLGGGKYVSFEDRHWHHNCFSCARCSTSLVGQGFVPDGDQVLCQGCSQAGP

SEQ ID NO: 2319 - DNA, 1475 bp, Homo sapiens
ggtccgtctgcagtcggcagcctcgccggcagctcgctcggcccccgcttggcccggcccgcaggtaggagccgccgagggacgcggcgcccggttcccggccccgcctgcgccgcgcgctccccgctcccgccgcccgcttcgaggagctgttctatgaagaccgccatttccacgagggctgcttccgctgctgccgctgccagcgctcactagccgatgaacccttcacctgccaggacagtgagctgctctgcaatgactgctactgcagtgcgttttcctcgcagtgctccgcttgtggggagactgtcatgcctgggtcccggaagctggaatatggaggccagacatggcatgagcactgcttcctgtgcagtggctgtgaacagccactgggctcccgttcttttgtgcccgacaagggtgctcactactgcgtgccctgctatgagaacaagtttgctcctcgctgcgcccgctgcagcaagacgctgacacagggtggagtgacataccgtgatcagccgtggcatcgagaatgtctggtctgtaccggatgccagacgcccctggcagggcagcagttcacctcccgggatgaagatccctactgtgtggcctgttttggagaactctttgcacctaagtgcagcagctgcaagcgccccatcgtaggactcggtggaggcaagtatgtgtcctttgaagaccgacactggcaccacaactgcttctcctgcgcccgctgctctacctccctggtgggccagggcttcgtaccggatggagaccaagtgctctgccagggctgtagccaggcagggccctaagccagggctcctggacccaggctttcccataccacgggcccaggactgtggctccttttctaaaccacctctgggactcagctccccccgccaaaaaaaatgggtctccttctgggctccaggattgtctccccactccagcatccccaaactggtactccctgacccagggccccaaacctgggctcttacagagcctccatgagtcaagccccctccccacacctggactccagaattcaccctctcccctgcagtctgggttcccagactgagtcctctccccaaatcagggctctagacccgagccctccaaacctggactctgggacttaggcccccttaaatctagacttctctttataggtttcaggtctcctatgggtgcctgggaagtccttgaaagtggactgttctcaggcttgacctgccccaccccatccccgcggttgaggctgtgggggcagcagatcaggagcccactgataaggggccctagggtacagggtgctgcccagcaggtcgccaccgagtgtcttctcattttatttcagctccattttgcccatagatgggcagaggggtgagattggctcatcccccttccagattctgcaataaagcggtgtgaggaagcagggg

SEQ ID NO: 2320 - protein, 172 aa, Homo sapiens; identical to SEQ ID NO: 2318

SEQ ID NO: 2321 - DNA, 1616 bp, Homo sapiens
tcacttcctcggggaggggttggggccgcgctcccactcgcccacacggtccgtctgcagtcggcagcctcgccggcagctcgctcggcccccgcttggcccggcccgcagggttctctccccttgccaccatgagcgagtcatttgactgtgcaaaatgcaacgagtccctgtatggacgcaagtacatccagacagacagcggcccctactgtgtgccctgctatgacaatacctttgccaacacctgtgctgagtgccagcagcttatcgggcatgactcgagggagctgttctatgaagaccgccatttccacgagggctgcttccgctgctgccgctgccagcgctcactagccgatgaacccttcacctgccaggacagtgagctgctctgcaatgactgctactgcagtgcgttttcctcgcagtgctccgcttgtggggagactgtcatgcctgggtcccggaagctggaatatggaggccagacatggcatgagcactgcttcctgtgcagtggctgtgaacagccactgggctcccgttcttttgtgcccgacaagggtgctcactactgcgtgccctgctatgagaacaagtttgctcctcgctgcgcccgctgcagcaagacgctgacacagggtggagtgacataccgtgatcagccgtggcatcgagaatgtctggtctgtaccggatgccagacgcccctggcagggcagcagttcacctcccgggatgaagatccctactgtgtggcctgttttggagaactctttgcacctaagtgcagcagctgcaagcgccccatcgtaggactcggtggaggcaagtatgtgtcctttgaagaccgacactggcaccacaactgcttctcctgcgcccgctgctctacctccctggtgggccagggcttcgtaccggatggagaccaagtgctctgccagggctgtagccaggcagggccctaagccagggctcctggacccaggctttcccataccacgggcccaggactgtggctccttttctaaaccacctctgggactcagctccccccgccaaaaaaaatgggtctccttctgggctccaggattgtctccccactccagcatccccaaactggtactccctgacccagggccccaaacctgggctcttacagagcctccatgagtcaagccccctccccacacctggactccagaattcaccctctcccctgcagtctgggttcccagactgagtcctctccccaaatcagggctctagacccgagccctccaaacctggactctgggacttaggcccccttaaatctagacttctctttataggtttcaggtctcctatgggtgcctgggaagtccttgaaagtggactgttctcaggcttgacctgccccaccccatccccgcggttgaggctgtgggggcagcagatcaggagcccactgataaggggccctagggtacagggtgctgcccagcaggtcgccaccgagtgtcttctcattttatttcagctccattttgcccatagatgggcagaggggtgagattggctcatcccccttccagattctgcaataaagcggtgtgaggaagcagggg

SEQ ID NO: 2322 - protein, 280 aa, Homo sapiens; identical to SEQ ID NO: 79

SEQ ID NO: 2323 - DNA, 1809 bp, Homo sapiens
gggaggagggggccgggccgactggcggccgaaagggaggtgggggcggggtctggcccccgcggcgggctggggggccgggggcggggtccgggcggggcgggcccgcgctcacttcctcggggaggggttggggccgcgctcccactcgcccacacggtccgtctgcagtcggcagcctcgccggcagctcgctcggcccccgcttggcccggcccgcaggtaggagccgccgagggacgcggcgcccggttcccggccccgcctgcgccgcgcgctccccgctcccgccgcccgcttcgagggttctctccccttgccaccatgagcgagtcatttgactgtgcaaaatgcaacgagtccctgtatggacgcaagtacatccagacagacagcggcccctactgtgtgccctgctatgacaatacctttgccaacacctgtgctgagtgccagcagcttatcgggcatgactcgagggagctgttctatgaagaccgccatttccacgagggctgcttccgctgctgccgctgccagcgctcactagccgatgaacccttcacctgccaggacagtgagctgctctgcaatgactgctactgcagtgcgttttcctcgcagtgctccgcttgtggggagactgtcatgcctgggtcccggaagctggaatatggaggccagacatggcatgagcactgcttcctgtgcagtggctgtgaacagccactgggctcccgttcttttgtgcccgacaagggtgctcactactgcgtgccctgctatgagaacaagtttgctcctcgctgcgcccgctgcagcaagacgctgacacagggtggagtgacataccgtgatcagccgtggcatcgagaatgtctggtctgtaccggatgccagacgcccctggcagggcagcagttcacctcccgggatgaagatccctactgtgtggcctgttttggagaactctttgcacctaagtgcagcagctgcaagcgccccatcgtaggactcggtggaggcaagtatgtgtcctttgaagaccgacactggcaccacaactgcttctcctgcgcccgctgctctacctccctggtgggccagggcttcgtaccggatggagaccaagtgctctgccagggctgtagccaggcagggccctaagccagggctcctggacccaggctttcccataccacgggcccaggactgtggctccttttctaaaccacctctgggactcagctccccccgccaaaaaaaatgggtctccttctgggctccaggattgtctccccactccagcatccccaaactggtactccctgacccagggccccaaacctgggctcttacagagcctccatgagtcaagccccctccccacacctggactccagaattcaccctctcccctgcagtctgggttcccagactgagtcctctccccaaatcagggctctagacccgagccctccaaacctggactctgggacttaggcccccttaaatctagacttctctttataggtttcaggtctcctatgggtgcctgggaagtccttgaaagtggactgttctcaggcttgacctgccccaccccatccccgcggttgaggctgtgggggcagcagatcaggagcccactgataaggggccctagggtacagggtgctgcccagcaggtcgccaccgagtgtcttctcattttatttcagctccattttgcccatagatgggcagaggggtgagattggctcatcccccttccagattctgcaataaagcggtgtgaggaagcagggg

SEQ ID NO: 2324 - protein, 280 aa, Homo sapiens; identical to SEQ ID NO: 79

SEQ ID NO: 2325 - DNA, 1884 bp, Homo sapiens
ctgtctggaggatttttgtttggggagggacggaggagcgcctggcagagcgggatcttcagggcagcgggcaaccccttggcccaggaagcctggaacgcaaggaccggagggcgtgggctgggacgcccctaccttggtctttcagggaaaggccttggaaagcagtcgttgcgccagacagcccagggaagagcggcagcctgaggacctagggccacctgctgttccctgggattcatgtccttctggggaggagggaggacccaggacaatggctgctgttcatgatctggagatggagagcatgaatctgaatatggggagagagatgaaagaagagctggaggaagaggagaaaatgagagaggatgggggaggtaaagatcgggccaagagtaaaaaggtccacaggattgtctcaaaatggatgctgcccgaaaagtcccgaggaacatacttggagagagctaactgcttcccgcctcccgtgttcatcatctccatcagcctggccgagctggcagtgtttatttactatgctgtgtggaagcctcagaaacagtggatcacgttggacacaggcatcttggagagtccctttatctacagtcctgagaagagggaggaagcctggaggtttatctcatacatgctggtacatgctggagttcagcacatcttggggaatctttgtatgcagcttgttttgggtattcccttggaaatggtccacaaaggcctccgtgtggggctggtgtacctggcaggagtgattgcagggtcccttgccagctccatctttgacccactcagatatcttgtgggagcttcaggaggagtctatgctctgatgggaggctattttatgaatgttctggtgaattttcaagaaatgattcctgcctttggaattttcagactgctgatcatcatcctgataattgtgttggacatgggatttgctctctatagaaggttctttgttcctgaagatgggtctccggtgtcttttgcagctcacattgcaggtggatttgctggaatgtccattggctacacggtgtttagctgctttgataaagcactgctgaaagatccaaggttttggatagcaattgctgcatatttagcttgtgtcttatttgctgtgtttttcaacattttcctatctccagcaaactgacctgcccctattgtaagtcaattaataaaaagagccatctggaggaaataaaaaaaaaaggaagactctatgaagaaacagagaagtctcagaaaaggctaacaattttatatagaggacaaaacagcattaaactcatcagttgcaaagattgcctataaaaggaccttaggatttaaggaaggggcttcttaatgtagaaagggaagaagaagagagaaaagaagggtagtaaaaactagagattggggccaggcgcagtggctcacgcctgtaatcccagcactttgggaggctgaggcgggtgaaatcacctgaggtcatgagttcaagaccagcctgaccaatatggtgaaaccctgtctctactaaagaaaatacaaaaattagccgggcgtggtggcgtgtgcctgtagtcccagctacttgcgaggctgaggcaggagaattgcttgaacctgggaggcgaaggttgcagtgagccgagattgcgccactgcactccagcctgggtgacagagcgacactcggtctcaaaaaacaaaacaaaacaaaacaaaattagagattgggtctttcccaggcatatggtattctataaaacagacttactctccttggaggatatattttggagaatgcttcataaaatctatgaatactgtacaatgctgataataaaaactttttatacctgt

SEQ ID NO: 2326 - protein, 303 aa, Homo sapiens; identical to SEQ ID NO: 81

SEQ ID NO: 2327 - DNA, 716 bp, Homo sapiens
gatttttgtttggggagggacggaggagcgcctggcagagcgggatcttcagggcagcgggcaaccccttggcccaggaagcctggaacgcaaggaccggagggcgtgggctgggacgcccctaccttggtctttcagggaaaggccttggaaagcagtcgttgcgccagacagcccagggaagagcggcagcctgaggacctagggccacctgctgttccctgggattcatgtccttctggggaggagggaggacccaggacaatggctgctgttcatgatctggagatggagagcatgaatctgaatatggggagagagatgaaagaagagctggaggaagaggagaaaatgagagaggatgggggaggtaaagatcgggccaagagtaaaaaggtccacaggattgtctcaaaatggatgctgcccgaaaagtcccgaggaacatacttggagagagctaactgcttcccgcctcccgtgttcatcatctccatcagcctggccgagctggcagtgtttatttactatgctgtgtggaagcctcagaaacagtggatcacgttggacacaggcatcttggagagtccctttatctacagtcctgagaagagggaggaagcctggaggtttatctcatacatgctggtacatgctgggtaagcaatgatagttaagcccctggtatcagaggtgattatatcattgtaacctct

SEQ ID NO: 2328 - protein, 132 aa, Homo sapiens
MAAVHDLEMESMNLNMGREMKEELEEEEKMREDGGGKDRAKSKKVHRIVSKWMLPEKSRGTYLERANCFPPPVFIISISLAELAVFIYYAVWKPQKQWITLDTGILESPFIYSPEKREEAWRFISYMLVHAG

SEQ ID NO: 2329 - DNA, 662 bp, Homo sapiens
agagcgggatcttcagggcagcgggcaaccccttggcccaggaagcctggaacgcaaggaccggagggcgtgggctgggacgcccctaccttggtctttcagggaaaggccttggaaagcagtcgttgcgccagacagcccagggaagagcggcagcctgaggacctagggccacctgctgttccctgggattcatgtccttctggggaggagggaggacccaggacaatggctgctgttcatgatctggagatggagagcatgaatctgaatatggggagagagatgaaagaagagctggaggaagaggagaaaatgagagaggatgggggaggtaaagatcgggccaagagtaaaaaggtccacaggattgtctcaaaatggatgctgcccgaaaagtcccgaggaacatacttggagagagctaactgcttcccgcctcccgtgttcatcatctccatcagcctggccgaggtgaatggggagcggggtgggcaccggggtaagtggcatggggaagctgggaacaaactaggggtcagatctagatctagagaagagactgggaacatgggagagagcttcgtggggatggggacagcacacacctcacctctgcctctgctctccccacagctgcctttgaggctttccctatactc

SEQ ID NO: 2330 - protein, 143 aa, Homo sapiens
MAAVHDLEMESMNLNMGREMKEELEEEEKMREDGGGKDRAKSKKVHRIVSKWMLPEKSRGTYLERANCFPPPVFIISISLAEVNGERGGHRGKWHGEAGNKLGVRSRSREETGNMGESFVGMGTAHTSPLPLLSPQLPLRLSL

SEQ ID NO: 2331 - DNA, 5708 bp, Homo sapiens
ataaggtatgaaagatgtggcctgcagagagccggcactatctctactgctgctgctgctgctactgctgctgttgctaccgctgcctctgctgccaccgccactactgctgccagcggagccgctaggagtgagcatcccctctccgggatacccagctccgcggcgtctcccgcgcgccctggccccacacggacctgccagccccagggaacaaaagcggagcccgctcgccctctactgcagccggaggatgagtcgagagggctgagcggagagtgtggtcctcggcggctggagctatttccttggcttctctccatgacgattcctgactcgtggccccggcaatcttgggaagacatcatccagcttcttcagtccagaccctgggcaccccccttttgccaggatcgtccccacccagcctggacacattgactgaactgttttctaggacactgcactcagcaagacatggtggtgagccctgactctcagtcttcatgattgaagaactcttttgtacaacacaaagcactcaaaaagagtgaatgaaatgtgcagctcagagtgtcatttctgaagggaggagtctttctcttggagaagagtcctcaatgagcctggccgaggcccgggatctgtgtgaagtggactaaggattaagtaggatgtcaactgagacagaacttcaagtagctgtgaaaaccagcgccaagaaagactccagaaagaaaggtcaggatcgcagtgaagccactttgataaagaggtttaaaggtgaaggggtccggtacaaagccaaattgatcgggattgatgaagtttccgcagctcggggagacaagttatgtcaagattccatgatgaaactcaagggcgttgttgctggcgctcgttccaaaggagaacacaaacagaaaatctttttaaccatctcctttggaggaatcaaaatctttgatgagaagacaggggcccttcagcatcatcatgctgttcatgaaatatcctacattgcaaaggacattacagatcaccgggcctttggatatgtttgtgggaaggaagggaatcacagatttgtggccataaaaacagcccaggcggctgaacctgttattctggacttgagagatctctttcaactcatttatgaattgaagcaaagagaagaattagaaaaaaaggcacaaaaggataagcagtgtgaacaagctgtgtaccagacaatattggaagaggatgttgaagatcctgtgtaccagtacattgtgtttgaggctggacacgagccaatccgtgatcccgaaacggaagaaaacatttatcaggttcccaccagccaaaagaaggaaggtgtttatgatgtgccaaaaagtcaacctgtaagtgctgtgacccaattagaactttttggggacatgtccacaccccctgatataacctctccccccactcctgcaactccaggtgatgcctttatcccatcttcatctcagacccttccagcgagtgcagatgtgtttagttctgtacctttcggcactgctgctgtaccctcaggttacgttgcaatgggcgctgtcctcccgtccttctggggtcagcagcccctcgtccaacagcagatggtcatgggtgcccagccaccagtcgctcaggtgatgccgggggctcagcccatcgcatggggccagccgggtctctttcctgccactcagcagccctggccaactgtggccgggcagtttccgccagccgccttcatgcccacacaaactgttatgcctttgccagctgccatgttccaaggtcccctcaccccccttgccaccgtcccaggcacgagtgactccaccaggtcaagtccacagaccgacaagcccaggcagaaaatgggcaaagaaacgtttaaggatttccagatggcccagcctccgcccgtgccctcccgcaaacccgaccagccctccctcacctgtacctcagaggccttctccagttacttcaacaaagtcggggtggcacaggatacagacgactgtgatgactttgacatctcccagttgaatttgacccctgtgacttctaccacaccatcgaccaactcacctccaaccccagcccctagacagagctctccatccaaatcatctgcatcccatgccagtgatcctaccacagatgacatctttgaagagggctttgaaagtcccagcaaaagcgaagagcaagaagctcctgatggatcacaggcctcatccaacagtgatccatttggtgagcccagtggggagcccagtggtgataatataagtccacaggccggtagctagatagcgcaggtctgggagccagagcctctgtacgcgcagatcaacagacctaagaaatagcatcgatgcgagctcgtggtgggtgctcaagactggcatggacatcagcatcacgacaggctctcttgtattctttcacctcttcccacaagaaattcatgattgcccaatggaactcgctcagaagagggaactaagcatttttggcaaccaatggcagatatctatggcagcacacaaaaaaagtatagaaagatccacccaacattaaatcagaaatcaagcaaatgcttacccaacaaatatttgagccctcatagctgggtttaagatgactcagtgtgcaaaattattaattccctttttatttctctacctgttgaccactgttgagacaccaaatttggagtgacaggcatcagaggattacaacagggttggaactgacttctttaagcaaaagcaaagggtcttctgtgaccacaatatcgtcatccatatgccttttcacataggatgatgtgttttttgtcactccatggggcctggtctgccattttcccccctttcctttttttgtcatgtttgaaaattaataggtgtacaaatttttgtattgcttttgactttttttagatatgggtgaagaaatctaactggggagaaaaaaagcctcagtgaaatgaattaacttgaaattacaagacaaataagtggttgattattcattatgatcacgaatgttgccaaaacagtcctttagctattctgcatcctggtgaagaaagacagctttcagtacgaaccttcattctgtgagtaggaaaagacatcagatcccattgatgagaaagatgaaaaatgcatctgatttcttaagaagctctaaactctaagtacaataaaatgatattttttatttttccgatatcttgctgctgtgttgctatgcagacaagtgtcttctccacgtgccattttcaaagaaaagtcatttgccaaataattctggtacaattctggtaatgtggttttggatcttaaaaaccaactttctaatggaacaatggtggcataaatattcagaataacaaactgattctgtggtccaaatggttcatctctatctctttttgtacatcagaaaattcaaatgggatttttattttataacttgaaaaaaaaaccttaccattaaactctttaaatatttaagggaaatggctttaaggagttctaatgaaaaaaaattgtcttttttttgtaaatataaatgttaatgaaaatgatttttaataatgccattacactgtagagaaggtagcagattgagtgcaaggtgtgacaaacttgatggatggggctcactttccagacgttattctggagcatatggtaggaagctggagtgcagggacagctggcaggagcagttggccaatcagcagctagtgaacgggaagggagcacgtgactccatcatctagcctttccacgagagtccccaccctacgtgcaacacaagaaaaagacaattcacattctgaagaattcagattctgaaactctcccacctccccactcccacctacccccgatataaatcactggactgtttgtacgtgaaacagaagaggctaagcttcctttttttacacttatgagacaaaaagtgcagtgtttggttcgtatgtttagcacatgattttcataaagaatctatatatttttgccctacagagaattgttatacaggtcaagtgtgttttcctgatgttcctatgcagttacagtatgttgaaagtgttttaacactaagaagaaaactttaaagattcatgtgattaattggatttgaggataattattattatttggtttttagatttgaaaagtagaatttccattgagacaattgatttgaataggcctgcatttgattcttcatatcaatagaaactaaaatgatttgggagattcatttgaaaaatgattgtatacttgttcacaaagcgaaaagtgatacatgaaggtaatggttatcatttaaagcccacattttacactatcaggtcacaggagtctaatttttttttcagttagataaactgaccaaacgtctattcaagaatatatgtcaatatcatcctaatgtggaaggtccgaagaaccagaaaagtgagaagggccgtttacctccctctgtagctatcacctgttggtccacagagtttcttgagaaatgagcaaacattttatgattaggtaaccctttcacatgaacgggaagatgggaaaggtggaatgaccataagagttggcctgagaccagtttgttttctggggatttggtaagataggcagttcccatgggaaattgcttaaattgctttgttgcctatgatttgattctaaacaagtggtgctatcttctccctcaatatggctgtcttgagtttgtcttgcagtatcacaccattataccaattctttgggttgcttctgacacattcaaagtgaactctggctgatgttgctgtttcaggtataccatctggagttaatttcctagcagaaggtgaaagtccaggagaattgtcctctttcattgaacatgattgaaaatgtaactggctctgaacttcaagaagatagatgcccaagtgatgcattaaagtaagggaaataaagtcaagtttttcaactgccatccatattctcattggcagaattctgatttttttccaagcactgtttggtgagcctggaagcaccgtatcctgtcccaggagtacagtgaaatttccaagcaagagctgaggtgccaataccaaaagaccatggggagtctgcacggttctggttagatcaatagaaaatccatgtgtacaactgttaattcctcatcctccactagcactaaatttgtcactttaaattttgaaaccagggaaacaccacctgtcattctgtccccattctccatagctcttcaatctttacatgccgcaagacttttttgatagctcgtactcatcccagtgtctcctgaaaccccatcatgtaatgtactgggcaccttcttttaaacaaatgtttactctgtgggtttggttcatttcaatttctgcgttctgacacatatttttttaataaagatgagaaagagaaaatgactgttgcagtacctttctagacctactttaactttacctcagatgacagtttgttaacatatatggacacattatttttaactttatgtacaatgcattcaacagaacagcaaaatttttagaaattttccattaatttctgtaacacaccatgtaaaactgttacaaataaacatgtttgagaacaaca

SEQ ID NO: 2332 - protein, 555 aa, Homo sapiens; identical to SEQ ID NO: 83

SEQ ID NO: 2333 - DNA, 2580 bp, Homo sapiens; identical to SEQ ID NO: 82

SEQ ID NO: 2334 - protein, 555 aa, Homo sapiens; identical to SEQ ID NO: 83

SEQ ID NO: 2335 - DNA, 2256 bp, Homo sapiens
agtgatgtataaggtatgaaagatgtggcctgcagagagccggcactatctctactgctgctgctgctgctactgctgctgttgctaccgctgcctctgctgccaccgccactactgctgccagcggagccgctaggagtgagcatcccctctccgggatacccagctccgcggcgtctcccgcgcgccctggccccacacggacctgccagccccagggaacaaaagcggagcccgctcgccctctactgcagccggaggatgagtcgagagggctgagcggagagtgtggtcctcggcggctggaggaaattgtgggtttcttggaaggctctggatatctgtgacagacctcagggacacagataatttgaaaattgcatgctatttccttggcttctctccatgacgattcctgactcgtggccccggcaatcttgggaagacatcatccagcttcttcagtccagaccctgggcaccccccttttgccaggatcgtccccacccagcctggacacattgactgaactgttttctaggacactgcactcagcaagacatggtggtgagccctgactctcagtcttcatgattgaagaactcttttgtacaacacaaagcactcaaaaagagtgaatgaaatgtgcagctcagagtgtcatttctgaagggaggagtctttctcttggagaagagtcctcaatgagcctggccgaggcccgggatctgtgtgaagtggactaaggattaagtaggatgtcaactgagacagaacttcaagtagctgtgaaaaccagcgccaagaaagactccagaaagaaaggtcaggatcgcagtgaagccactttgataaagaggtttaaaggtgaaggggtccggtacaaagccaaattgatcgggattgatgaagtttccgcagctcggggagacaagttatgtcaagattccatgatgaaactcaaggtgctatgcaaacgttttcttttcaatactttgtgtttaatgtgaatgaggaaaagaagtgattaccatcataattgtaaataactttattcatttattggtaaattacttggcttactgttgaatcaccatattttttcattcggaagatatttcaatcattcagcaaatgtttgttgagcacctactatgtggaaatattttggtaggcccaggtttacaatttttgagtgtatcacattttattccattttattttcattttgcaactcctgcaaaaataaaagcaaaaaattatcaaattgttttgtcacccacattttatgaattttgccatcttgttatttttgaataaataatatatatttttgccatatggtaagagatgttaagataaaagttgattttattcattcttacagtttctacaaatgtaccccaagcactttaagataatatccttaaagtaaaatgtaattatattttgggatttggggatatcatgaagagatttctgattttaaatgctataaagaagccttttctctgaggaatctaagaaagaaattagattttttttttctttttttttttttgagaaggagtctcactctatcgcctaggctggagtgcagtggcgcaatctcggctcactgcaacttccgcctcctgggttcaagcaattctcctgcctcagcctcctgagtagctgggattacaggtgcacactaccaggcctggctaatttttgtatttttagtagagacggggtttcaccatgttggtcaggctggtctcgaactcctgacctcatgatccgtccgcctcggcctcccaaagtgctgggattacaggcgtgagccactgtgcccggccagaaattagaaattttttaaatatacaaaataaattattttattaaacatccttaaaagcatacaaaaataacacttttctcagattctgatgtccatatattgtttcttttaaaaagttataaaatattgaaaaaataaatggtttagcaagaagtatacaaatatcatatgtatttcaaacatatattatttatttttctgattacagagttcacttatgtgcattatggaatattttgaaaatacagaaaaatgtaaggaagaaaactgaaataatccacaatcccacaaagacaatcagtgtcaatatttttgtgtataatttacaagttctttttgtggttttacatatataatatatgaattatacacatatatgtaataaaattggaattaaaatttatacagtttcc

SEQ ID NO: 2336 - protein, 83 aa, Homo sapiens
MSTETELQVAVKTSAKKDSRKKGQDRSEATLIKRFKGEGVRYKAKLIGIDEVSAARGDKLCQDSMMKLKVLCKRFLFNTLCLM

SEQ ID NO: 2337 - DNA, 583 bp, Homo sapiens
atgaaagatgtggcctgcagagagccggcactatctctactgctgctgctgctgctactgctgctgttgctaccgctgcctctgctgccaccgccactactgctgccagcggagccgctaggagtgagcatcccctctccgggatacccagctccgcggcgtctcccgcgcgccctggccccacacggacctgccagccccagggaacaaaagcggagcccgctcgccctctactgcagccggaggatgagtcgagagggctgagcggagagtgtggtcctcggcggctggagctatttccttggcttctctccatgacgattcctgactcgtggccccggcaatcttgggaagacatcatccagcttcttcagtccagaccctgggcaccccccttttgccaggatcgtccccacccagcctggacacattgactgaactgttttctaggacactgcactcagcaagacatggtggtgagccctgactctcagtcttcatgattgaagaactcttttgtacaacacaaaggaagcctccagccacacaccagatcacgagggttagaggtcccagcctgtca

SEQ ID NO: 2338 - protein, 87 aa, Homo sapiens [sequence omitted]

SEQ ID NO: 2339 - DNA, 587 bp, Homo sapiens
agtgatgtataaggtatgaaagatgtggcctgcagagagccggcactatctctactgctgctgctgctgctactgctgctgttgctaccgctgcctctgctgccaccgccactactgctgccagcggagccgctaggagtgagcatcccctctccgggatacccagctccgcggcgtctcccgcgcgccctggccccacacggacctgccagccccagggaacaaaagcggagcccgctcgccctctactgcagccggaggatgagtcgagagggctgagcggagagtgtggtcctcggcggctggagctatttccttggcttctctccatgacgattcctgactcgtggccccggcaatcttgggaagacatcatccagcttcttcagtccagaccctgggcaccccccttttgccaggatcgtccccacccagcctggacacattgactgaactgttttctaggacactgctcttggattgttttactggattctttggattggtttcaattttctcctgaatctcattgagcttccttgtcatccagattctgaactctatgtctgtcatttcagtctgattga

SEQ ID NO: 2340 - protein, 87 aa, Homo sapiens [sequence omitted]

SEQ ID NO: 2341 - DNA, 1071 bp, Homo sapiens
agaatatatattatcctgttgatttaaaaaattccagtgaacacagaaaacatgtgtcatctattttatgtgaattaaaaccaaaagatctaggcatgaaatcaaaaacatcaagacatctcattcaaaaagatctcaagaaatatataaaagacattgtgaagaaaaatttgttatggatatgattgcctttgaaaaagcctgtgaaagacttcaagatgctaaaacaaaagtagcaattgtgaaaacaaatttagactttaaagttcccaatggactgataaaatgaatcaatgccagatcacatcctatgatcatcttaaattatagtcattatttttagttgaaggaatttgaaataatactctaaagcaagaaatactctacatcacaagatggatttatatataagtcttctaaaaatataaagattagttaaaatgtttctcttattggtcataatttaacttaaagttgacttagcacctctgaaaaatttcttagatcagatgcctaaggaacaattaaactgatttaatgtattgcagacaatgttgcaatgacattgctgatattctgtttcatattctttctaaatatagcaattcataagctaatttaggtttttctggaaaccttagaatagtaatttctactccaactgctgacttttattaagacactgtgtacgttgatgacttttattacctgcttttatatatttcctgcttattttgttaaaacaatttctgaatttattttttaaagtatggtttcaatattttgtcagtgatatatgctgttataaaaattcagaaaatatgaactatgaaaagtaaattaaacattcttatcaccttccttgaagactgtaagatttttgtatatttacttttgatgggtttgccctgtttggtatacatgtgaagacagggaaaagacagaggagagaagcaagagacaacccatataattatatattggaatcataaaatatacagaaatggtatatattaaccataagtctgtttaatacataccaatggtagaaaatttgaaaaataaactgtt

SEQ ID NO: 2342 - protein, 37 aa, Homo sapiens [sequence omitted]

SEQ ID NO: 2343 - DNA, 4706 bp, Homo sapiens
gccttggctggcgcccggaaaaccatgatgtggagaacttggatgttgtcttgtttctctagcaacggtctcaggagcagatggccgcccagcgatttgtctgactgtgttggggctgggccacttgtctccaactcataagggcttgcagcccagttgacccgatgtttcatggaacagtcacagaagagctaaccagtcatgaagaatggagtcactataatgaaaacataagagaaggtcaaaaagattttgtttttgtgaagttcaatggccttcatttaaagtctatggaaaatttgcagtcttgcatctctcttagagtatgcatcttctcaaacaattttattacagatattcatccacttcaaagttgtataaaattaatcaaacttgatctccatggaaatcagataaagagtctaccaaataccaaattttggaatggattgaagaacctaaaactactctatcttcatgacaatgggtttgcaaagttaaagaatatatgtgtattatctgcctgtccaaccctcattgccctcactatgtttgattgtccagtaagccttaaaaaaggatatagacatgttcttgttaacagtatatggcctctcaaagcgctggatcatcatgtgatttctgatgaagaaataattcagaactggcatcttcctgaaagattcaaagcatgtaaccatcgacttttctttaatttctgcccagctttgagaaagggaacaacctatgaagaggaaattaataatattaaacatattacttcaaaaattaatgcaattctggctcataattcaccagttttgattgttcaaagatggatacgtggtttcttagttagaaaaaatttgagccctgtgtttttccacaaaaaaaaacagcaggaaaaaattattagaggatatgaagcaaaatggatttacataaccaaagggtatgaagataagctccttaaggatctctttttcaaacctgaaactaatataaaaggaaagcttgcatattggaaacatgataaaaaaaaattatgggtcaattttcactgaagtgggctggatgtgtgtattcatctctcatcagtgccaaaaggaattatgcacatcattcattggacaacaggatgaaaacttgtctctgattggacactagggatatcagctgtacacacaagataagtgtaaagttgaaaagagaaatacacttagtaattcactcaagctagcatttattaacactttaaaacttgcattaaaatgttcatgatattatttccttcctcatataagaaagctaacattacaattcttaaattgaatgaaacataccatcataaaaattgctttgcagagactgctaatgcaaaaacttttaagctgttcatccttttttaatgaaaaagataataagatcaataaaagcaccattctttaccacttacttagaatgaatttttatttgttcaatgtaagagagattggctatttcaatgtgtttcaatattggtataagctttaaatgacaaagatttgtgttttatgacttacctatacatcaacagcactgaattttctcaaaacttatttaggcagcatgacttggaaggaaaatattaactattgaatcacactgatgctctctggtctagttaagatagttttttagatactccatataagcctgggttttgctgacaaaattcacctacaaagcccagagagacttacagtcacttgcaggcatttctttatattaaggcctttaaaaataaaatatacaagattctgacaacacttgccttaattgcttaagaacttaaaataagcttgttggtagaaatggtttgccaactagggcagttttgagtcaccttatccagtccccggaatattggagtcttgtaaataattaacatttgggcagtggctgaaatatttctgaccagagcagtaggcataaagttattaagcaagctatgctgaatacaatgtggagtgaaacagactaagatttgtactgaggctgtagaattttcaggctgcctaccttgggtgagtgatagcagtttactgagactgagcctcaggagatatatatgtacatacataagcacgtgtgtttgtgtgtgtgtattttctgccttgttatataatccatcatttgataaaaagagtccctgaagttttagagatacatgtggcatttggcggagaagaaacataactatacttcatatgagacagtcattttaggcttcagtattgtaataaaaacttacatgaagtaacacttaagaaatattctgaaatcctaaaatgaatatattgttccaagttgcagggggataaaacctcaattttagaaaatattattcaagtaattgttattgagtcaatttcataatttatcaatatgtgtttataaagtacatgcaagtagattgtaatatgccttactttagagatataattatatatatatagctactttgttaataggagacatttttctcatgaaaaaatataaatccctcctcagattcaaactcaaacttaaaacacataaattctaaattgctggattacttaaggtgtttaggtaaagtaagagcaaactaatcagtaataaaatattggcaagtccccgtttgtggcttttttctaaatctttcataaatatagacattgttcaaatatacttagaaatatagagtcttgagctatgtattttattgttaagaaaaaagaatttccctcttgaaaattccattttattgcccatcattaaattttacatgaccctatgaacttttcagaattgcaaattacttaagcagtgtaaactcatattactcatatacgtatgtctctttcattaaaatgattagatttataaattgaaaatattatcgtaactaattggcctaaaacatgaggtttaataaaatgcagattttaatcaggagcttaagaatttagcctatgctttctactatgtttttctcactttcaatgcctttttttcttgttttcacatctacatagggaaataatcagtaaattatgaaatattttgaaaaagacataatttaaatatttactaataataactttgtgcctatgtttaatattatgccatggatatagctgccattcaatacatagttgttgaataaactaatcaaatttattatccttttttgttgtttgtgacttgataatacaacagattgaagaatacaatcaaactggtgcggaaatatcaagataagtaaaccacaacctcagtcctcagagagagtaatttttactaggggttatccaaaatcatctgaagatatgttttcctgatctgacatagttcttcagaagtgaatatgaatatatattatcctgttgatttaaaaaattccagtgaacacagaaaacatgtgtcatctattttatgtgaattaaaaccaaaagatctaggcatgaaatcaaaaacatcaagacatctcattcaaaaaggtcaggagtctgaagatgaaattgtggatgaaaaattggataccagttttaggatatcagttttcaaactacccatatacacttcaggttcattgaagaataatgcagtattgagagagaaaaaacaacatttttttcctgcatatcctcagccaatctatactactcatccaaagccaatcattaaaaaagacatacgattggagcggagtatgaaagagttttttgcaccacaaagagctgatctcaagaaatatataaaagacattgtgaagaaaaatttgttatggatatgattgcctttgaaaaagcctgtgaaagacttcaagatgctaaaacaaaagtagcaattgtgaaaacaaatttagactttaaagttcccaatggactgataaaatgaatcaatgccagatcacatcctatgatcatcttaaattatagtcattatttttagttgaaggaatttgaaataatactctaaagcaagaaatactctacatcacaagatggatttatatataagtcttctaaaaatataaagattagttaaaatgtttctcttattggtcataatttaacttaaagttgacttagcacctctgaaaaatttcttagatcagatgcctaaggaacaattaaactgatttaatgtattgcagacaatgttgcaatgacattgctgatattctgtttcatattctttctaaatatagcaattcataagctaatttaggtttttctggaaaccttagaatagtaatttctactccaactgctgacttttattaagacactgtgtacgttgatgacttttattacctgcttttatatatttcctgcttattttgttaaaacaatttctgaatttattttttaaagtatggtttcaatattttgtcagtgatatatgctgttataaaaattcagaaaatatgaactatgaaaagtaaattaaacattcttatcaccttccttgaagactgtaagatttttgtatatttacttttgatgggtttgccctgtttggtatacatgtgaagacagggaaaagacagaggagagaagcaagagacaacccatataattatatattggaatcataaaatatacagaaatggtatatattaaccataagtctgtttaatacataccaatggtagaaaatttgaaaaataaactgtt

SEQ ID NO: 2344 - protein, 299 aa, Homo sapiens
MFHGTVTEELTSHEEWSHYNENIREGQKDFVFVKFNGLHLKSMENLQSCISLRVCIFSNNFITDIHPLQSCIKLIKLDLHGNQIKSLPNTKFWNGLKNLKLLYLHDNGFAKLKNICVLSACPTLIALTMFDCPVSLKKGYRHVLVNSIWPLKALDHHVISDEEIIQNWHLPERFKACNHRLFFNFCPALRKGTTYEEEINNIKHITSKINAILAHNSPVLIVQRWIRGFLVRKNLSPVFFHKKKQQEKIIRGYEAKWIYITKGYEDKLLKDLFFKPETNIKGKLAYWKHDKKKLWVNFH

SEQ ID NO: 2345 - DNA, 865 bp, Homo sapiens
agaatatatattatcctgttgatttaaaaaattccagtgaacacagaaaacatgtgtcatctattttatgtgaattaaaaccaaaagatctaggcatgaaatcaaaaacatcaagacatctcattcaaaaagatctcaagaaatatataaaagacattgtgaagaaaaatttgttatggatatgattgcctttgaaaaagcctgtgaaagacttcaagatgctaaaacaaaagtagcaattgtgaaaacaaatttagactttaaagttcccaatggactgataaaatgaatcaatgccagatcacatcctatgatcatcttaaattatagtcattatttttagttgaaggaatttgaaataatactctaaagcaagaaatactctacatcacaagatggatttatatataagtcttctaaaaatataaagattagttaaaatgtttctcttattggtcataatttaacttaaagttgacttagcacctctgaaaaatttcttagatcagatgcctaaggaacaattaaactgatttaatgtattgcagacaatgttgcaatgacattgctgatattctgtttcatattctttctaaatatagcaattcataagctaatttaggtttttctggaaaccttagaatagtaatttctactccaactgctgacttttattaagacactgtgtacgttgatgacttttattacctgcttttatatatttcctgcttattttgttaaaacaatttctgaatttattttttaaagtatggtttcaatattttgtcagtgatatatgctgttataaaaattcagaaaatatgaactatgaaaagtaaattaaacattcttatcaccttccttg

SEQ ID NO: 2346 - protein, 37 aa, Homo sapiens [sequence omitted]

SEQ ID NO: 2347 - DNA, 4500 bp, Homo sapiens
gccttggctggcgcccggaaaaccatgatgtggagaacttggatgttgtcttgtttctctagcaacggtctcaggagcagatggccgcccagcgatttgtctgactgtgttggggctgggccacttgtctccaactcataagggcttgcagcccagttgacccgatgtttcatggaacagtcacagaagagctaaccagtcatgaagaatggagtcactataatgaaaacataagagaaggtcaaaaagattttgtttttgtgaagttcaatggccttcatttaaagtctatggaaaatttgcagtcttgcatctctcttagagtatgcatcttctcaaacaattttattacagatattcatccacttcaaagttgtataaaattaatcaaacttgatctccatggaaatcagataaagagtctaccaaataccaaattttggaatggattgaagaacctaaaactactctatcttcatgacaatgggtttgcaaagttaaagaatatatgtgtattatctgcctgtccaaccctcattgccctcactatgtttgattgtccagtaagccttaaaaaaggatatagacatgttcttgttaacagtatatggcctctcaaagcgctggatcatcatgtgatttctgatgaagaaataattcagaactggcatcttcctgaaagattcaaagcatgtaaccatcgacttttctttaatttctgcccagctttgagaaagggaacaacctatgaagaggaaattaataatattaaacatattacttcaaaaattaatgcaattctggctcataattcaccagttttgattgttcaaagatggatacgtggtttcttagttagaaaaaatttgagccctgtgtttttccacaaaaaaaaacagcaggaaaaaattattagaggatatgaagcaaaatggatttacataaccaaagggtatgaagataagctccttaaggatctctttttcaaacctgaaactaatataaaaggaaagcttgcatattggaaacatgataaaaaaaaattatgggtcaattttcactgaagtgggctggatgtgtgtattcatctctcatcagtgccaaaaggaattatgcacatcattcattggacaacaggatgaaaacttgtctctgattggacactagggatatcagctgtacacacaagataagtgtaaagttgaaaagagaaatacacttagtaattcactcaagctagcatttattaacactttaaaacttgcattaaaatgttcatgatattatttccttcctcatataagaaagctaacattacaattcttaaattgaatgaaacataccatcataaaaattgctttgcagagactgctaatgcaaaaacttttaagctgttcatccttttttaatgaaaaagataataagatcaataaaagcaccattctttaccacttacttagaatgaatttttatttgttcaatgtaagagagattggctatttcaatgtgtttcaatattggtataagctttaaatgacaaagatttgtgttttatgacttacctatacatcaacagcactgaattttctcaaaacttatttaggcagcatgacttggaaggaaaatattaactattgaatcacactgatgctctctggtctagttaagatagttttttagatactccatataagcctgggttttgctgacaaaattcacctacaaagcccagagagacttacagtcacttgcaggcatttctttatattaaggcctttaaaaataaaatatacaagattctgacaacacttgccttaattgcttaagaacttaaaataagcttgttggtagaaatggtttgccaactagggcagttttgagtcaccttatccagtccccggaatattggagtcttgtaaataattaacatttgggcagtggctgaaatatttctgaccagagcagtaggcataaagttattaagcaagctatgctgaatacaatgtggagtgaaacagactaagatttgtactgaggctgtagaattttcaggctgcctaccttgggtgagtgatagcagtttactgagactgagcctcaggagatatatatgtacatacataagcacgtgtgtttgtgtgtgtgtattttctgccttgttatataatccatcatttgataaaaagagtccctgaagttttagagatacatgtggcatttggcggagaagaaacataactatacttcatatgagacagtcattttaggcttcagtattgtaataaaaacttacatgaagtaacacttaagaaatattctgaaatcctaaaatgaatatattgttccaagttgcagggggataaaacctcaattttagaaaatattattcaagtaattgttattgagtcaatttcataatttatcaatatgtgtttataaagtacatgcaagtagattgtaatatgccttactttagagatataattatatatatatagctactttgttaataggagacatttttctcatgaaaaaatataaatccctcctcagattcaaactcaaacttaaaacacataaattctaaattgctggattacttaaggtgtttaggtaaagtaagagcaaactaatcagtaataaaatattggcaagtccccgtttgtggcttttttctaaatctttcataaatatagacattgttcaaatatacttagaaatatagagtcttgagctatgtattttattgttaagaaaaaagaatttccctcttgaaaattccattttattgcccatcattaaattttacatgaccctatgaacttttcagaattgcaaattacttaagcagtgtaaactcatattactcatatacgtatgtctctttcattaaaatgattagatttataaattgaaaatattatcgtaactaattggcctaaaacatgaggtttaataaaatgcagattttaatcaggagcttaagaatttagcctatgctttctactatgtttttctcactttcaatgcctttttttcttgttttcacatctacatagggaaataatcagtaaattatgaaatattttgaaaaagacataatttaaatatttactaataataactttgtgcctatgtttaatattatgccatggatatagctgccattcaatacatagttgttgaataaactaatcaaatttattatccttttttgttgtttgtgacttgataatacaacagattgaagaatacaatcaaactggtgcggaaatatcaagataagtaaaccacaacctcagtcctcagagagagtaatttttactaggggttatccaaaatcatctgaagatatgttttcctgatctgacatagttcttcagaagtgaatatgaatatatattatcctgttgatttaaaaaattccagtgaacacagaaaacatgtgtcatctattttatgtgaattaaaaccaaaagatctaggcatgaaatcaaaaacatcaagacatctcattcaaaaaggtcaggagtctgaagatgaaattgtggatgaaaaattggataccagttttaggatatcagttttcaaactacccatatacacttcaggttcattgaagaataatgcagtattgagagagaaaaaacaacatttttttcctgcatatcctcagccaatctatactactcatccaaagccaatcattaaaaaagacatacgattggagcggagtatgaaagagttttttgcaccacaaagagctgatctcaagaaatatataaaagacattgtgaagaaaaatttgttatggatatgattgcctttgaaaaagcctgtgaaagacttcaagatgctaaaacaaaagtagcaattgtgaaaacaaatttagactttaaagttcccaatggactgataaaatgaatcaatgccagatcacatcctatgatcatcttaaattatagtcattatttttagttgaaggaatttgaaataatactctaaagcaagaaatactctacatcacaagatggatttatatataagtcttctaaaaatataaagattagttaaaatgtttctcttattggtcataatttaacttaaagttgacttagcacctctgaaaaatttcttagatcagatgcctaaggaacaattaaactgatttaatgtattgcagacaatgttgcaatgacattgctgatattctgtttcatattctttctaaatatagcaattcataagctaatttaggtttttctggaaaccttagaatagtaatttctactccaactgctgacttttattaagacactgtgtacgttgatgacttttattacctgcttttatatatttcctgcttattttgttaaaacaatttctgaatttattttttaaagtatggtttcaatattttgtcagtgatatatgctgttataaaaattcagaaaatatgaactatgaaaagtaaattaaacattcttatcaccttccttg

SEQ ID NO: 2348 - protein, 299 aa, Homo sapiens; identical to SEQ ID NO: 2344

SEQ ID NO: 2349 - DNA, 4005 bp, Homo sapiens
gcccggaaaaccatgatgtggagaacttggatgttgtcttgtttctctagcaacggtctcaggagcagatggccgcccagcgatttgtctgactgtgttggggctgggccacttgtctccaactcataagggcttgcagcccagttgacccgatgtttcatggaacagtcacagaagagctaaccagtcatgaagaatggagtcactataatgaaaacataagagaaggtcaaaaagattttgtttttgtgaagttcaatggccttcatttaaagtctatggaaaatttgcagtcttgcatctctcttagagtatgcatcttctcaaacaattttattacagatattcatccacttcaaagttgtataaaattaatcaaacttgatctccatggaaatcaggtaagcaatagccatttcagatatttgcatataaacgaaatttcagtcttataataagtacttatgttacctatccacagtatttcttcaacatggtcttttgtctaaaatataaacaaaaatttaacaataaattaaaagcatgtaagatgtatataaatacggacactttgatgtaaatgaaaatacataaatagtgtgtaatctggtatgtttcacttcttaaatctatagcctggattaagaatgcctcatgattccttaattttccttaggtaaggaaagtattttagaaaagtttaaagagtcaacctattacaaagaaattttctttgaacaaaaaagtatggttatgcattttactatgcgaataataataaattatctcagatacccagtgtattatggttttcaactggccatcattggataattataaatactctgtttgcttattaattagaaacttgctatttggggaatattgaattttatatgtgtaatattttaccattttctgtgctattcgaaaaaagtaattttggaatttaaaagatttttaataatatttcagataaagagtctaccaaataccaaattttggaatggattgaagaacctaaaactactctatcttcatgacaatgggtttgcaaagttaaagaatatatgtgtattatctgcctgtccaaccctcattgccctcactatgtttgattgtccagtaagccttaaaaaaggatatagacatgttcttgttaacagtatatggcctctcaaagcgctggatcatcatgtgatttctgatgaagaaataattcagaactggcatcttcctgaaagattcaaagcatgtaaccatcgacttttctttaatttctgcccagctttgagaaaggtaattggcttctttagggtttcattttaattaaatgtataaaagggaaattttagcttctgagttctatatctaaattatataaactttttaatatttttgcatcatttatataaaataatataaaccaatgaatatatttgtaatgtctttctatctgaaacttgataaaagtttgcatgccaactacattaaacaaagcctgaaatgatcaaattgtagagaaacaaatttttgttttttaaattgaaagtaaatctctaatttattcagaatttggtatatgaaagactccattgagaaatacttaatgttttttaagagcgttaaaggatgacttagattattattagaagataaaatatttaattcttacacaattgatttggttatttgacaagataaaaccatcattatctattgatttataaaatgttagaagaagtgattgtgaaaagttgataccaagttaacggatacagactaattaagtggatttacaaaaacataaggaaacgttctttataacacatgaataaatattagaacaaatcatttaagagttcaaaagagggggttaaattaggtacaagatatagtaacaataagttgcaggaaatgtttgtaatatgttctaaagatatgtgaagtcacatatatgtgtgtagaaattttgaggaagaatagaacataattttgaacagtgagtatatctaaaagaatatataaacattgaacagtgattatgcgtggaaaaactgaaaattacaaagttggaagaattttattactgcatataatttttttaattagggacatattagtgattttgtaatagttttaaaaatttaggattttggtaataattttgtactaatagttaaaaatataaaaaacaaggtagtatttaagtctgatatcttaacctgggccctaaataaagaatttcacttaggtacttcagttgcgtagtatggcataatgaaaggtggcaacaggcatgacccttttaaggataatcgaagtgacagattcatttaaggaagtaatggaaagttgggcagtgggcattgagaaagaacttggatgacctactaaagagcttagacttgatgaatataatgaagattaattgaaattatttgagtaggaaaattagggtaggtccctcatagtaagtgctctatgaataaatggtattgacaaggtttttaaaaggtgatcaacccaacattttgctagcagattaatggaggatagaagccaaatgagggcaaggggatcaattactgtaggttcaaaatgatgtgattaggattgatataggcagataccagtaataaagaagaaagaacacagtgtagaggacagacacatattcagtgaatgccattgtggtaggcgctttatacattttatttcttcattctttcaccaagtatatactgagtacctaatatatgaaaaggactgtctgggacttggagattcagtggtaaataatactgacaaaattcttgtcctcattaagtccaagggaaaggcacagagaatagacaaatctggaaacaaaaataaaactaaacaaccataaaatgtcagctagtgttagttgctaaagaaaagaaagtaaggcattaacacagactgaaaggggtagagatttgggctacattagctagggtggatggggaaggcctttttgaagaatatttattcctcattgtttccttggatgtggaaaaatgttagtcttattttacaggagaaaatgaagcatagtgaggtttaggaacttacccaatattggacagcaaatgagtcatgaggtgggatttcaacaagtctgcagtcaacattgcatcacaaatgacagacagtgcagagatttgagtgtacttttcacactgagtgtggaaagaggagaagaataagtgtggaaatactcctctactattttgaagctggataactgggacagaaaagaacttatttaacagaaatggcagcacttaaagacttttggtgaaaagataagtttggtcatacttctttgaggcaggatattaaagaagaaataataactagacattggaaatgaaaaacaaaaattcagaaatagtgttctggacttgattgtaaattcaggagtatttgcttggggtcatagttaaagcctagttctctcaggtaaatacagggatcaataaaggctgaaaactaaggacacaaccttggggcactgtctcattttgtgggtagaaagcagtgtaaccaatgaagataaaggataattgatctcagcaggtaagagtaaaaaaaaaattaaatagaaaagaaaaaaacatattggaagaattttttatggtaaagaggatgtcgcatctttagaatttcaatagcttgcagttgttggacatgaaattgtggtgggttatatataactgccaagtatagaacctttactgagaatattttggacagaagaaaaataaagctttaactataggaaatagaatttatgaaagatttattaaagtgaagtggtacttgcctcactttaacttaccaaatatataatttaccatatttataaactgaggataaatgagttttgattagaaagagaaagagactgaaaatgtcataaatgaagaaataattggagaaaatcattgtgaagaagtatgaatggacggtaacaca

SEQ ID NO: 2350 - protein, 100 aa, Homo sapiens [sequence omitted]

SEQ ID NO: 2351 - DNA, 1600 bp, Homo sapiens
gccttggctggcgcccggaaaaccatgatgtggagaacttggatgttgtcttgtttctctagcaacggtctcaggagcagatggccgcccagcgatttgtctgactgtgttggggctgggccacttgtctccaactcataagggcttgcagcccagttgacccgatgtttcatggaacagtcacagaagagctaaccagtcatgaagaatggagtcactataatgaaaacataagagaaggtcaaaaagattttgtttttgtgaagttcaatggccttcatttaaagtctatggaaaatttgcagtcttgcatctctcttagagtatgcatcttctcaaacaattttattacagatattcatccacttcaaagttgtataaaattaatcaaacttgatctccatggaaatcagataaagagtctaccaaataccaaattttggaatggattgaagaacctaaaactactctatcttcatgacaatgggtttgcaaagttaaagaatatatgtgtattatctgcctgtccaaccctcattgccctcactatgtttgattgtccagtaagccttaaaaaaggatatagacatgttcttgttaacagtatatggcctctcaaagcgctggatcatcatgtgatttctgatgaagaaataattcagaactggcatcttcctgaaagattcaaagcatgtaaccatcgacttttctttaatttctgcccagctttgagaaaggagaaaatgaagcatagtgaggtttaggaacttacccaatattggacagcaaatgagtcatgaggtgggatttcaacaagtctgcagtcaacattgcatcacaaatgacagacagtgcagagatttgagtgtacttttcacactgagtgtggaaagaggagaagaataagtgtggaaatactcctctactattttgaagctggataactgggacagaaaagaacttatttaacagaaatggcagcacttaaagacttttggtgaaaagataagtttggtcatacttctttgaggcaggatattaaagaagaaataataactagacattggaaatgaaaaacaaaaattcagaaatagtgttctggacttgattgtaaattcaggagtatttgcttggggtcatagttaaagcctagttctctcaggtaaatacagggatcaataaaggctgaaaactaaggacacaaccttggggcactgtctcattttgtgggtagaaagcagtgtaaccaatgaagataaaggataattgatctcagcaggtaagagtaaaaaaaaaattaaatagaaaagaaaaaaacatattggaagaattttttatggtaaagaggatgtcgcatctttagaatttcaatagcttgcagttgttggacatgaaattgtggtgggttatatataactgccaagtatagaacctttactgagaatattttggacagaagaaaaataaagctttaactataggaaatagaatttatgaaagatttattaaagtgaagtggtacttgcctcactttaacttaccaaatatataatttaccatatttataaactgaggataaatgagttttgattagaaagag

SEQ ID NO: 2352 - protein, 199 aa, Homo sapiens
MFHGTVTEELTSHEEWSHYNENIREGQKDFVFVKFNGLHLKSMENLQSCISLRVCIFSNNFITDIHPLQSCIKLIKLDLHGNQIKSLPNTKFWNGLKNLKLLYLHDNGFAKLKNICVLSACPTLIALTMFDCPVSLKKGYRHVLVNSIWPLKALDHHVISDEEIIQNWHLPERFKACNHRLFFNFCPALRKEKMKHSEV

SEQ ID NO: 2353 - DNA, 952 bp, Homo sapiens
ggagcgccttggctggcgcccggaaaaccatgatgtggagaacttggatgttgtcttgtttctctagcaacggtctcaggagcagatggccgcccagcgatttgtctgactgtgttggggctgggccacttgtctccaactcataagggcttgcagcccagttgacccgatgtttcatggaacagtcacagaagagctaaccagtcatgaagaatggagtcactataatgaaaacataagagaaggtcaaaaagattttgtttttgtgaagttcaatggccttcatttaaagtctatggaaaatttgcagtcttgcatctctcttagagtatgcatcttctcaaacaattttattacagatattcatccacttcaaagttgtataaaattaatcaaacttgatctccatggaaatcagataaagagtctaccaaataccaaattttggaatggattgaagaacctaaaactactctatcttcatgacaatgggtttgcaaagttaaagaatatatgtgtattatctgcctgtccaaccctcattgccctcactatgtttgattgtccagtaagccttaaaaaaggatatagacatgttcttgttaacagtatatggcctctcaaagcgctggatcatcatgtgatttctgatgaagaaataattcagaactggcatcttcctgaaagattcaaagcatgtaaccatcgacttttctttaatttctgcccagctttgagaaaggtaattggcttctttagggtttcattttaattaaatgtataaaagggaaattttagcttctgagttctatatctaaattatataaactttttaatatttttgcatcatttatataaaataatataaaccaatgaatatatttgtaatgtctttctatctgaaacttgataaaagtttgcatgccaactacattaaacaaagcctgaaatg

SEQ ID NO: 2354 - protein, 200 aa, Homo sapiens [sequence omitted]

SEQ ID NO: 2355 - DNA, 3077 bp, Homo sapiens
aaccgggcggaggcgcaccccagggcgcatgcgtgctgtgcggcgcggtctcagggaaggtggggctatggcagctgctagggaccctccggaagtatcgctgcgagaagccacccagcgaaaattgcggaggttttccgagctaagaggcaaacttgtagcacgtggagaattctgggacatagttgcaataacagcggctgatgaaaaacaggaacttgcttacaaccaacagctgtcagaaaagctgaaaagaaaggagttaccccttggagttcaatatcacgtttttgtggatcctgctggagccaaaattggaaatggaggatcaacactttgtgcccttcaatgtttggaaaagctatatggagataaatggaattcttttaccatcttattaattcactctggtggctacagtcaacgacttccaaatgcaagtgctctgggaaaaattttcactgctttacctcttggtaaccccatttatcagatgctagaattaaaactagccatgtacattgatttccccttaaatatgaatcctggaattctggttacctgtgcagatgatattgaactttatagtattggagatatttgtcttagatccttttgatgatttaaaacatagagaccttgaatacaggtcttgccatcgtttccttcataagcccagcatagaaaagatgtatcagtttaatgctgtgtgtagacctggaaatttttgtcaacaggactttgctgggggtgacattgccgatcttaaattagactctgactatgtctacacagatagcctattttatatggatcataaatcagcaaaaatgttacttgctttttatgaaaaaataggcacactgagctgtgaaatagatgcctatggtgactttctgcaggctttgggacctggagcaactgtggagtacaccagaaacacatcaaatgtcattaaagaagagtcagagttggtagaaatgaggcagagaatatttcatcttcttaaaggaacatcactaaatgttgttgttcttaataactccaaattttatcacattggaacaaccgaagaatatttgttttactttacctcagataacagtttaaagtcagagctcggcttacagtccataacttttagtatctttccagatataccagaatgctctggcaaaacatcctgtatcattcaaagcatactggattcaagatgttctgtggcacctggctcagttgtggagtattccagattggggcctgatgtttcagttggggaaaactgcattattagtggttcttacatcctaacaaaagctgccctccccgcacattcttttgtatgttccttaagcttaaagatgaatagatgcttaaagtatgcaactatggcatttggagtgcaagacaacttgaaaaagagtgtgaaaacattgtcagatataaagttacttcaattctttggagtctgtttcctgtcatgcttagatgtttggaatcttaaagttacagaggaactgttctctggtaacaagacatgtctgagtttgtggactgcacgcattttcccagtttgttcttctttgagtgactcagttataacatccctaaagatgttaaatgctgttaagaacaagtcagcattcagcctgaatagctataagttgctgtccattgaagaaatgcttatctacaaagatgtagaagatatgataacttacagggaacaaatttttctagaaatcagtttaaaaagcagtttgatgtagagatattttaaatattgtacactttgcctttttgagtaacattccagagataggtattttttgtaggctgtttcactgaactcagttaatgaaaactgtattaacataattgttgtagcataatattaatagtgcaaaagtacatataagtcattttgatgaaaaatattccaagactaagttgagaaaagagatactattttggatgtgtatcagtatttttgtttttaataatgattgatttgtggagcattgttttttcacataattagttttaaaggtaattttctaagcatacctttggaatttttccatcttttttgaggcttttggtccagtgaagttctaagtattcactggcacttctctcctcaactgtaattctatttttaataataaaaatggcatactgtagggtcttcagagtagtgtaggaatactgtagaaatactttttcagaaacgaatccatagctgacaaattcactcagtgcccaatatattgtgattattttcgttgataaagaactagatacaaagacctctgaaattgatgataaaatttgtatctcattaattttatcaaaatgaaactaaaagtacatatgtattatacacttgaacatgtgtttgtatatctttaaaattttcctttatgttccattccataggaaaacacacatatgcacacaaaactcagttatctgtggggaaagtggtagtaataattgagattcatcaataatcatataatttcactatagacattacttgcattatctcctatcagtccttctaacaaaacttcaattaccagatgaactgactttagttttcatcttattttttgtccacatgctggtgatgctgagaaacaataattggcccaaatgcagacatcaagaagcaggcaggaaaatggaaaaactgagataatacacaggtgataaacagtttcgagaaaataaaaattggctagaatctcaagttatgtgtttctatattggtataagcatataagtgaaaagtcttataagtgtaatagagaaaagatttgtcagtgtgtttttttaaatgaaataactagtctgtgctactttatgtcaatataaaaattggtaaactagaagtaacttgtccacaaccctcagttatgatacttatgtgcgtgtttttttttccaaagtttttcccaaggagaagatacaaatatatggtagctattgtttaaaaatgattgatttacttgcagatttttcagaggatgttatgtctttgtcattcattaaatgttcaaaattgtagtttt

SEQ ID NO: 2356 - protein, 399 aa, Homo sapiens
MILNFIVLEIFVLDPFDDLKHRDLEYRSCHRFLHKPSIEKMYQFNAVCRPGNFCQQDFAGGDIADLKLDSDYVYTDSLFYMDHKSAKMLLAFYEKIGTLSCEIDAYGDFLQALGPGATVEYTRNTSNVIKEESELVEMRQRIFHLLKGTSLNVVVLNNSKFYHIGTTEEYLFYFTSDNSLKSELGLQSITFSIFPDIPECSGKTSCIIQSILDSRCSVAPGSVVEYSRLGPDVSVGENCIISGSYILTKAALPAHSFVCSLSLKMNRCLKYATMAFGVQDNLKKSVKTLSDIKLLQFFGVCFLSCLDVWNLKVTEELFSGNKTCLSLWTARIFPVCSSLSDSVITSLKMLNAVKNKSAFSLNSYKLLSIEEMLIYKDVEDMITYREQIFLEISLKSSLM

SEQ ID NO: 2357 - DNA, 3175 bp, Homo sapiens
aaccgggcggaggcgcaccccagggcgcatgcgtgctgtgcggcgcggtctcagggaaggtggggctatggcagctgctagggaccctccggaagtatcgctgcgagaagccacccagcgaaaattgcggaggttttccgagctaagaggcaaacttgtagcacgtggagaattctgggacatagttgcaataacagcggctgatgaaaaacaggaacttgcttacaaccaacagctgtcagaaaagctgaaaagaaaggagttaccccttggagttcaatatcacgtttttgtggatcctgctggagccaaaattggaaatggaggatcaacactttgtgcccttcaatgtttggaaaagctatatggagataaatggaattcttttaccatcttattaattcactctggtggctacagtcaacgacttccaaatgcaagtgctctgggaaaaattttcactgctttacctcttggtaaccccatttatcagatgctagaattaaaactagccatgtacattgatttccccttaaatatgaatcctggaattctggttacctgtgcagatgatattgaactttatagtattggagatatttgtcttagatccttttgatgatttaaaacatagagaccttgaatacaggtcttgccatcgtttccttcataagcccagcatagaaaagatgtatcagtttaatgctgtgtgtagacctggaaatttttgtcaacaggactttgctgggggtgacattgccgatcttaaattagactctgactatgtctacacagatagcctattttatatggatcataaatcagcaaaaatgttacttgctttttatgaaaaaataggcacactgagctgtgaaatagatgcctatggtgactttctgcaggctttgggacctggagcaactgtggagtacaccagaaacacatcaaatgtcattaaagaagagtcagagttggtagaaatgaggcagagaatatttcatcttcttaaaggaacatcactaaatgttgttgttcttaataactccaaattttatcacattggaacaaccgaagaatatttgttttactttacctcagataacagtttaaagtcagagctcggcttacagtccataacttttagtatctttccagatataccagaatgctctggcaaaacatcctgtatcattcaaagcatactggattcaagatgttctgtggcacctggctcagttgtggagtattccagattggggcctgatgtttcagttggggaaaactgcattattagtggttcttacatcctaacaaaagctgccctccccgcacattcttttgtatgttccttaagcttaaagatgaatagatgcttaaagtatgcaactatggcatttggagtgcaagacaacttgaaaaagagtgtgaaaacattgtcagatataaagttacttcaattctttggagtctgtttcctgtcatgcttagatgtttggaatcttaaagttacagaggaactgttctctggtaacaagacatgtctgagtttgtggactgcacgcattttcccagtttgttcttctttgagtgactcagttataacatccctaaagatgttaaatgctgttaagaacaagtcagcattcagcctgaatagctataagttgctgtccattgaagaaatgcttatctacaaagatgtagaagatatgataacttacagggaacaaatttttctagaaatcagtttaaaaagcagtttgatgtagagatattttaaatattgtacactttgcctttttgagtaacattccagagataggtattttttgtaggctgtttcactgaactcagttaatgaaaactgtattaacataattgttgtagcataatattaatagtgcaaaagtacatataagtcattttgatgaaaaatattccaagactaagttgagaaaagagatactattttggatgtgtatcagtatttttgtttttaataatgattgatttgtggagcattgttttttcacataattagttttaaaggtaattttctaagcatacctttggaatttttccatcttttttgaggcttttggtccagtgaagttctaagtattcactggcacttctctcctcaactgtaattctatttttaataataaaaatggcatactgtagggtcttcagagtagtgtaggaatactgtagaaatactttttcagaaacgaatccatagctgacaaattcactcagtgcccaatatattgtgattattttcgttgataaagaactagatacaaagacctctgaaattgatgataaaatttgtatctcattaattttatcaaaatgaaactaaaagtacatatgtattatacacttgaacatgtgtttgtatatctttaaaattttcctttatgttccattccataggaaaacacacatatgcacacaaaactcagttatctgtggggaaagtggtagtaataattgagattcatcaataatcatataatttcactatagacattacttgcattatctcctatcagtccttctaacaaaacttcaattaccagatgaactgactttagttttcatcttattttttgtccacatgctggtgatgctgagaaacaataattggcccaaatgcagacatcaagaagcaggcaggaaaatggaaaaactgagataatacacaggtgataaacagtttcgagaaaataaaaattggctagaatctcaagttatgtgtttctatattggtataagcatataagtgaaaagtcttataagtgtaatagagaaaagatttgtcagtgtgtttttttaaatgaaataactagtctgtgctactttatgtcaatataaaaattggtaaactagaagtaacttgtccacaaccctcagttatgatacttatgtgcgtgtttttttttccaaagtttttcccaaggagaagatacaaatatatggtagctattgtttaaaaatgattgatttacttgcagatttttcagaggatgttatgtctttgtcattcattaaatgttcaaaattgtagttttaccaaatctgaagtgccatcagttataagaatcaccattattttatgttccattaagaaaaacacaataaaacatgacactgctttttttgttacttg

SEQ ID NO: 2358 - protein, 399 aa, Homo sapiens; identical to SEQ ID NO: 2356

SEQ ID NO: 2359 - DNA, 5192 bp, Homo sapiens
aaccgggcggaggcgcaccccagggcgcatgcgtgctgtgcggcgcggtctcagggaaggtggggctatggcagctgctagggaccctccggaagtatcgctgcgagaagccacccagcgaaaattgcggaggttttccgagctaagaggcaaacttgtagcacgtggagaattctgggacatagttgcaataacagcggctgatgaaaaacaggaacttgcttacaaccaacagctgtcagaaaagctgaaaagaaaggagttaccccttggagttcaatatcacgtttttgtggatcctgctggagccaaaattggaaatggaggatcaacactttgtgcccttcaatgtttggaaaagctatatggagataaatggaattcttttaccatcttattaattcactctggtggctacagtcaacgacttccaaatgcaagtgctctgggaaaaattttcactgctttacctcttggtaaccccatttatcagatgctagaattaaaactagccatgtacattgatttccccttaaatatgaatcctggaattctggttacctgtgcagatgatattgaactttatagtattggagatatttgtcttagatccttttgatgatttaaaacatagagaccttgaatacaggtcttgccatcgtttccttcataagcccagcatagaaaagatgtatcagtttaatgctgtgtgtagacctggaaatttttgtcaacaggactttgctgggggtgacattgccgatcttaaattagactctgactatgtctacacagatagcctattttatatggatcataaatcagcaaaaatgttacttgctttttatgaaaaaataggcacactgagctgtgaaatagatgcctatggtgactttctgcaggctttgggacctggagcaactgtggagtacaccagaaacacatcaaatgtcattaaagaagagtcagagttggtagaaatgaggcagagaatatttcatcttcttaaaggaacatcactaaatgttgttgttcttaataactccaaattttatcacattggaacaaccgaagaatatttgttttactttacctcagataacagtttaaagtcagagctcggcttacagtccataacttttagtatctttccagatataccagaatgctctggcaaaacatcctgtatcattcaaagcatactggattcaagatgttctgtggcacctggctcagttgtggagtattccagattggggcctgatgtttcagttggggaaaactgcattattagtggttcttacatcctaacaaaagctgccctccccgcacattcttttgtatgttccttaagcttaaagatgaatagatgcttaaagtatgcaactatggcatttggagtgcaagacaacttgaaaaagagtgtgaaaacattgtcagatataaagttacttcaattctttggagtctgtttcctgtcatgcttagatgtttggaatcttaaagttacagaggaactgttctctggtaacaagacatgtctgagtttgtggactgcacgcattttcccagtttgttcttctttgagtgactcagttataacatccctaaagatgttaaatgctgttaagaacaagtcagcattcagcctgaatagctataagttgctgtccattgaagaaatgcttatctacaaagatgtagaagatatgataacttacagggaacaaatttttctagaaatcagtttaaaaagcagtttgatgtagagatattttaaatattgtacactttgcctttttgagtaacattccagagataggtattttttgtaggctgtttcactgaactcagttaatgaaaactgtattaacataattgttgtagcataatattaatagtgcaaaagtacatataagtcattttgatgaaaaatattccaagactaagttgagaaaagagatactattttggatgtgtatcagtatttttgtttttaataatgattgatttgtggagcattgttttttcacataattagttttaaaggtaattttctaagcatacctttggaatttttccatcttttttgaggcttttggtccagtgaagttctaagtattcactggcacttctctcctcaactgtaattctatttttaataataaaaatggcatactgtagggtcttcagagtagtgtaggaatactgtagaaatactttttcagaaacgaatccatagctgacaaattcactcagtgcccaatatattgtgattattttcgttgataaagaactagatacaaagacctctgaaattgatgataaaatttgtatctcattaattttatcaaaatgaaactaaaagtacatatgtattatacacttgaacatgtgtttgtatatctttaaaattttcctttatgttccattccataggaaaacacacatatgcacacaaaactcagttatctgtggggaaagtggtagtaataattgagattcatcaataatcatataatttcactatagacattacttgcattatctcctatcagtccttctaacaaaacttcaattaccagatgaactgactttagttttcatcttattttttgtccacatgctggtgatgctgagaaacaataattggcccaaatgcagacatcaagaagcaggcaggaaaatggaaaaactgagataatacacaggtgataaacagtttcgagaaaataaaaattggctagaatctcaagttatgtgtttctatattggtataagcatataagtgaaaagtcttataagtgtaatagagaaaagatttgtcagtgtgtttttttaaatgaaataactagtctgtgctactttatgtcaatataaaaattggtaaactagaagtaacttgtccacaaccctcagttatgatacttatgtgcgtgtttttttttccaaagtttttcccaaggagaagatacaaatatatggtagctattgtttaaaaatgattgatttacttgcagatttttcagaggatgttatgtctttgtcattcattaaatgttcaaaattgtagttttaccaaatctgaagtgccatcagttataagaatcaccattattttatgttccattaagaaaaacacaataaaacatgacactgctttttttgttacttgaaattttcatatttattggagagctcttttagatgtttttaaatacagatttttatttaaccctcttgcatatacatataaaataacaaaaaaataaaatattgagatatcatcaagaaatttctacagcttcacattcaaactcttcagcactttcagagctattgatatgcatatgtccacctagtaccatcttctctgctttcagaattattggtaaggctgcatttcctgagtgctctaccacacttatgtctggattttttttacccagctacagacccacactcctgcaagatttgatacccttctatttggcaaaactcagtttcacttttctttcagtttaatcacaggtccttagaagatcggacctgtgattctattcaaagtcagaaagagatttctcacaaattgacgtcatattaacatgtcaatatgaaaattaattgtttggtaaaccagaagtgacctgtctgaagccctcaattgtggtatttgtgtgtttgttttttctttttcaagattctttttaaagaaaatatatggtagctgttgtttaacatttatctacttacagagcgttcagaggatgttatatgtttattaagtgctcaatactgtattttaacctaatctgaattttaatcataatcctgtacaatgcatggattctggttgctttgaaatggttctgttcaaaggacttatcaatgtctcttgctttgagatgtattgcttggtgtgtagtagcacaaacgtaccaccaataatgtacctaattcaactgaagtgacagtcatatacgcagatatgaccaagttcacatgtgagcaagtaacaactccatgactattgctgcctggctaatagctattatactatcatttgtaaggcacattctgttttctggggtgtcgaaatgtggataaaaaaagatgaattaggaatgattctaacctaagtatgtgttttaataaaaggatctaggcaaaaaaaaaaaaagtaagtcactcctaaatttaatccctgaataatgcagtgtacatgatgatagaggagaagtgtgtttttgataagaagtgactaaattttgtgacaatcttaattttttaggcttttcatttagtcttccaataaagataatttttttctgagttttatcagcagtagaaaaataagacctacatggataagtttgaaattaaacattttgtctcattttataatttttatttttatgaaatcatggcacttacatcatatactcaggtgtgtaaaagcctgctatttgtaactataatccataaacttattgatgatttaataactatcaacaagggcatgggaaaaattcaacatttgataataatcttttaccttaggcatttattctctaagcaaagcagaaataaaggatatgtatcagtgtatactgattgaaataaagctttaaaaatccaagtgatactctgaaattgtcaaaagtttaatggcatgaatccaggattaattcccataacctgtgatgatctagtcatcttctgtagctacatagtactcctaatgttaagattaccaaattcagcaataaagccaaaatcaaaactgccttctgtcacatatagctgttaagtaaactacacaaaatcagagttgctgtttacatacatcatgatgccgtctggacttgagcaccttggcggctcaggattaaggcacctcagtctagcctagcagagttacaatggagagaagtgaaaactcattagtagctcaaaacaagctaaaggatttcagatgctctttttcttgttcatctaaatcaagtcttcatctgtgtcaagaactaaattgttaaagacctttttaatttgcttagtgcaagaaaaataatagcaaccatatatctagttaacttgagtcttctgtgcctctaaaattttgtttagagaaagcctatttctattgaggttgaggaacacaattctaatacttagtaaaattattaacattc

SEQ ID NO: 2360 - protein, 399 aa, Homo sapiens; identical to SEQ ID NO: 2356

SEQ ID NO: 2361 - DNA, 7573 bp, Homo sapiens
ggcgcatgcgtgctgtgcggcgcggtctcagggaaggtggggctatggcagctgctagggaccctccggaagtatcgctgcgagaagccacccagcgaaaattgcggaggttttccgagctaagaggcaaacttgtagcacgtggagaattctgggacatagttgcaataacagcggctgatgaaaaacaggaacttgcttacaaccaacagctgtcagaaaagctgaaaagaaaggagttaccccttggagttcaatatcacgtttttgtggatcctgctggagccaaaattggaaatggaggatcaacactttgtgcccttcaatgtttggaaaagctatatggagataaatggaattcttttaccatcttattaattcactctgatgaatggaagaaaaaagtcagtgaatcatatgttatcacaatagaaagattagaagatgacctgcagatcaaggaaaaagaactgacagaactaaggaatatatttggctctgatgaagccttcagtaaagtcaatttaaattaccgcactgaaaatgggctgtctctacttcatttatgttgcatttgtggaggcaagaaatcacatattcgaactcttatgttgaaagggctccgcccatctcgactgacaagaaatggatttacagccttgcatttagcagtttacaaggataatgcagaattgatcacttctctgcttcacagtggagctgatatacagcaggttggatacggtggcctcactgccctccatattgctacaatagctggccacctagaggctgctgatgtgctgttgcaacatggagctaatgtcaatattcaagatgcagtttttttcactccattgcatattgcagcgtactatggacatgaacaggtaactcgccttcttttgaaatttggtgctgatgtaaatgtaagtggtgaagttggagatagacccctccacctagcatctgcaaaaggattcttgaatattgcaaaactcttgatggaagaaggcagcaaagcagatgtgaatgctcaagataatgaagaccatgtcccactccatttctgttctcgatttggacaccatgatatagttaagtatctgctgcaaagtgatttggaagttcaacctcatgttgttaatatctatggagatacccccttacacctggcatgctacaatggcaaatttgaagttgccaaggaaatcatccaaatatcaggaacagaaagtctgactaaggaaaacatcttcagtgaaacagcttttcatagtgcttgtacctatggcaagagcattgacctagtcaaatttcttcttgatcagaatgtcataaacatcaaccaccaaggaagggatgggcacactggattacactctgcttgctaccacggtcacattcgcctggttcagttcttactggataatggagctgatatgaatctagtggcttgtgatcccagcaggtctagtggtgaaaaagatgagcagacatgtttgatgtgggcttatgaaaaagggcatgatgccattgtcacactcctgaagcattataagagaccacaagatgaattgccctgtaatgaatattctcagcctggaggagatggctcctatgtgtctgttccatcacccttggggaagattaaaagcatgacaaaagagaaggcagatattctcctcctaagagctggattgccttcacatttccatcttcagctctcagaaattgagttccatgagattattggctcaggttcttttgggaaagtatataaaggacgatgcagaaataaaatagtggctataaaacgttatcgagccaatacctactgctccaagtcagatgtggatatgttttgccgagaggtgtccattctctgccagctcaatcatccctgcgtaattcagtttgtgggtgcttgcttgaatgatcccagccagtttgccattgtcactcaatacatatcagggggttctctgttctccctccttcatgagcagaagaggattcttgatttgcagtctaaattaattattgcagtagatgttgccaaaggcatggagtaccttcacaacctgacacagccaattatacatcgtgacttgaacaggtatttttttcctaaataatgaactcagaagggtatgactaactgggagtttaagacagatttcagtgaagatacattttagacttattgcagatcagggtactctgtggttaagaggacaggctaccataagcttaggcgatagaaagttttgtcattgtcttttaaggagtagaaagctgtataactgcttctcagggatcttttaaatctatgaagaatattcacaaatatagtaatatctgtaagatgcaccagctaactagttcccaggtcagtaaggtcacatcaagcagtgagctaaatggctattaaaaaaatgatatgtctcctataaagtgaagtgttggagtagctcctgatataaaattatctgaaacgtactttgtgctaccgtaaattcagcttaaccacaacagcttatttacctagttatcaggtaaagaggatttcatgtgaaacaaatataaaatcagagtgttccagtggtggaaccccaagtgacctcaaaacttttcctaaatagtgaaaactttctctgagtaaagtcttataggaaaggccaatatacaaaatggagcagtgttgggtgaaggtaaagtggggaggagaaaactctatttacttcccatttcccactgctaaggagagagattcctgcaccacctctgtggaagcccaaaggtgctgtagagaatagttggacaaacactgatttagtttatgaagcaagtcagattattccacatcaatcactttcattttatgatagtcaataagattcaaatagattgtgtatatagtcctttatagaagctttacagttctgaagctagtaaatattgattactctagtcagtcatttggtcaacaactatgtttgaacatatatgtttaaagactattttcagcacagtagagcttacaaagtgggacgttcatagactacattcagggagttttcacactctatgtagaggagaaaaatatttacctaaatgtatttgaggtataaaataataagttatatacaagatttagtacaaaaatttcaggaacaagaatattaattgcttctgaggattctaacaacaactctatggaagggatgacatatgagcttggtcctgaaagatgggtagtttggaagagcatcctataggcttagggaagacataataaaatgcatagagattagaaagttaaaggtatatataggaactatagtttcattttagtatacaaagtgtataaatgtatgtaatgtgtataatgtaagaagtggacaactggaaaaaggtatagaaaaatagaaaaagagcacagacaccagtgaatgctattactaaggtatttcagattttttttcctgtaaggagaccataaagaggtttgagctgaaaatcacaaatttggagctatattattgaaagatgaatccagcatctggtaaaatatcaacttgaagggaaagtcaagaaactagtgagggagttgttgcagtaatctagataagaagtaacgaaaagcagaatttcaccggtggcagtggatatgaaaggaagagacatgtcaactttaaataacaaaatacagagtttattcaagctcaaagcttgaggatcattacccatgagcatggactcaagttgtcctgaatacatactccaattagcagtggttacaagatagtttttaagaaaaaaaaaaaaaaaaaaaaaagcagtttttaagttgtttacaaagaatttacataaataatataaactattgattggttgtaccttgttctttaatcaaaaattataggaacataaagataatgggtaacacagctagtcaggaacaaaatacctttacactattgccccagggaaatggagattggagagatgactaaagtcccatgctcatgtctctctgggcctgataaattttgtgttgctcatacagctcagactgccctcagctatttttctcttctcagatagatatgaaagataggagagataaatcagatacgtgagtggtagaatcttaaatattgaaagtaaatgtaaataagtctcaatctatttataattatttactagttttcacataaaagtcatttcttaatttttagctattagttctttacctttcttaatttcaaaccaaacatttacgttaacaaacatttaactatttcagacacagatttagatgataaattagcataatataaaccgatgattttgagttttaagagtattatctttccatcccaaacatttttgcacatggtattaaaacaaatgagtaatcattgcaataagtaatcattgcaagttttctctagctgtaactcttcatttgtggggccattatatattctgttgccctgagttatgtgcaagttgttaccaccagttgtcaggcaggaccaaaaatataaatgttgattaaaataaaaacagaacatttactatatagctgatataagtttatatctacaatttttgctgcctctaatctaacctaaatgcttaattgcatcaaaaagtttttaaatcttatgaaacaccattttgtaggtgccttcattatgacagagtcccaaactattgtatcaattatttgtagactattttctatcaatctttaatctggtagcaacagcaaaacattgtttttcagatgcatgcatatgtagcattctacatggctcaaaagagcctgggtcctttccctcagagagcttactgcactacttggcaaataagacatatgcccagaaagcaactagagttccactttatatagaaaataattaagggtcaaaatgatgaaagagcaactttcagaggatttcaagtaagtcaaagatgaaagttgagtagaatgcttcttagcctatgtggagctaaacgtagagtttgaagaacaggcattaatcttttctcaggcttttcacagcatactaacctctgctttagcatggtacctagaaagtctcactcaaagaagtagagagaaagatgcacatcagagactgggaaactcatacacttatttgcatttgtattgacatggtgtgtttatatttttatattccccattagcctgggcaagtcagggtttcaggggcagagactgctctcttcatctcacattttctgaactaagcattgtgtcttacacagagaagatgtctaattaatattttttaactgaaccaaattattgtggatttctatgagtgtcatttcacgaagcaatgacctaattggtataagtatgactacttgtgtatagcatccaacttgcccaataacttttataattttaaagggaaaaggatgtttgagcccacgggatggggcacttttatatttgagtttgtggttgttgcaattgtttgagtgaaaaaaaagaactctacttttcccatggcaagcaaagccagctgagggtttgtaccatccagttctgaaagttaattttgatcttcagtaaatgtcccttggcatctgcaggggattggttccaggacctctcatggataccaaagtctgagaatgctcaagtccctggtattaattgctgtagcatttgcatatttcctatgcacatcctctcctgtactttaaatcattgaaagagtacctataatatctagtacaatgtaaatgctctgtaaatagtttttgcactatattgtctagggaataatgacaaaggaaaaagagtctatacatcttcagtacagacacaatctttaaaaaaattttttgatccatggttagttgaatccacagaagtgaaacctatggatttagagggccaactatatatactaaggaaaagttcaaggaaggagtaagaaagtagttattttcaatgtaaatgatgataatgataatacctaccatttatttatcaccatatgaaaggagctttgctaagtttttcatgctttcatttaaccacgcaactctatgggatagttgttattatttccattttacagataaggaaactgactaaagagactaagtctgtagtattctgtatcttctactgtaacaacaacaacagcaaaaccatgtgagaagagagagatagaaggagcgtactgatgatattgaatgggcatcagcaatatttatcagccttactctctgtactttaatcttttaaaaagtcaattcctgtgacccaaacaatttctcatatcatcttatgcttctgtgttcctgctttatttcttctttcacactccatgttctgctggtgtggaacagatgttgcatagaaagcatgcagataggttttgtttggcccatagtgtttaaatattttgaaaatgttcataattcaagcaggaatgtacctctctaatttgctgtagacctcaccacctaccaacttatatttggtctaatttatacattcattttgtggcattggagtttgctagtcattatttatagcttaaaggatttaaactttttacttaatactagaagctgtgtgtttttcttggaaaagtatatttttcaaattgtttgacactgaagcagaaacatcactgcaaacatacatggatcaaatacatgatattctccttctataaagatatagtattatatgttatattaacactgtaaggaattaaatagtgataacctccatcacaaagtgcacatggcattcacatgaaatatgtatatgaaatcattttataaactgtgaagcaccatacaaaatgcattttttattactcttaattcctcatttgttccctttaatattggggatggaaaaacactccacaattaaaaccacctttgcaaaaactacaactgagaaaattatgactgaaagatctgacttgactccactttgcttctaacctgcaagctgttcttgttcattcatggacataggccaaaataactttgggaggaacttgaaactaagacaataatagccctttcacaaaacaaacctctttcctgcctggggactacactaccttcataggactaacaaattagccacaagattagaaataatggtttaggaatcacatagctggagactgaaagattagaaacctccccagattgcttctggggataaatcactattgcaaaacctaagatcagtgcttgagatattttgcagatgctgtacaggatggctcagctgctaccacccagactgataaactgggtcatctggtctcctggccccaggagactgactcagcatcaagaggacaactttgacaccctatgatatcatctccaacccaaccaatcagcagtccccactttcagacccctacccaccaagttttccttaaaacccccatcctcaagtttttgagaagactgatttgagtaataataacactcttctctcctgtacagctggctgtgcgtgaattaaacttttctctattgc

SEQ ID NO: 2362 - protein, 710 aa, Homo sapiens
MRAVRRGLREGGAMAAARDPPEVSLREATQRKLRRFSELRGKLVARGEFWDIVAITAADEKQELAYNQQLSEKLKRKELPLGVQYHVFVDPAGAKIGNGGSTLCALQCLEKLYGDKWNSFTILLIHSDEWKKKVSESYVITIERLEDDLQIKEKELTELRNIFGSDEAFSKVNLNYRTENGLSLLHLCCICGGKKSHIRTLMLKGLRPSRLTRNGFTALHLAVYKDNAELITSLLHSGADIQQVGYGGLTALHIATIAGHLEAADVLLQHGANVNIQDAVFFTPLHIAAYYGHEQVTRLLLKFGADVNVSGEVGDRPLHLASAKGFLNIAKLLMEEGSKADVNAQDNEDHVPLHFCSRFGHHDIVKYLLQSDLEVQPHVVNIYGDTPLHLACYNGKFEVAKEIIQISGTESLTKENIFSETAFHSACTYGKSIDLVKFLLDQNVININHQGRDGHTGLHSACYHGHIRLVQFLLDNGADMNLVACDPSRSSGEKDEQTCLMWAYEKGHDAIVTLLKHYKRPQDELPCNEYSQPGGDGSYVSVPSPLGKIKSMTKEKADILLLRAGLPSHFHLQLSEIEFHEIIGSGSFGKVYKGRCRNKIVAIKRYRANTYCSKSDVDMFCREVSILCQLNHPCVIQFVGACLNDPSQFAIVTQYISGGSLFSLLHEQKRILDLQSKLIIAVDVAKGMEYLHNLTQPIIHRDLNRYFFPK

SEQ ID NO: 2363 - DNA, 2759 bp, Homo sapiens
ggcgcatgcgtgctgtgcggcgcggtctcagggaaggtggggctatggcagctgctagggaccctccggaagtatcgctgcgagaagccacccagcgaaaattgcggaggttttccgagctaagaggcaaacttgtagcacgtggagaattctgggacatagttgcaataacagcggctgatgaaaaacaggaacttgcttacaaccaacagctgtcagaaaagctgaaaagaaaggagttaccccttggagttcaatatcacgtttttgtggatcctgctggagccaaaattggaaatggaggatcaacactttgtgcccttcaatgtttggaaaagctatatggagataaatggaattcttttaccatcttattaattcactctgatgaatggaagaaaaaagtcagtgaatcatatgttatcacaatagaaagattagaagatgacctgcagatcaaggaaaaagaactgacagaactaaggaatatatttggctctgatgaagccttcagtaaagtcaatttaaattaccgcactgaaaatgggctgtctctacttcatttatgttgcatttgtggaggcaagaaatcacatattcgaactcttatgttgaaagggctccgcccatctcgactgacaagaaatggatttacagccttgcatttagcagtttacaaggataatgcagaattgatcacttctctgcttcacagtggagctgatatacagcaggttggatacggtggcctcactgccctccatattgctacaatagctggccacctagaggctgctgatgtgctgttgcaacatggagctaatgtcaatattcaagatgcagtttttttcactccattgcatattgcagcgtactatggacatgaacaggtaactcgccttcttttgaaatttggtgctgatgtaaatgtaagtggtgaagttggagatagacccctccacctagcatctgcaaaaggattcttgaatattgcaaaactcttgatggaagaaggcagcaaagcagatgtgaatgctcaagataatgaagaccatgtcccactccatttctgttctcgatttggacaccatgatatagttaagtatctgctgcaaagtgatttggaagttcaacctcatgttgttaatatctatggagatacccccttacacctggcatgctacaatggcaaatttgaagttgccaaggaaatcatccaaatatcaggaacagaaagtctgactaaggaaaacatcttcagtgaaacagcttttcatagtgcttgtacctatggcaagagcattgacctagtcaaatttcttcttgatcagaatgtcataaacatcaaccaccaaggaagggatgggcacactggattacactctgcttgctaccacggtcacattcgcctggttcagttcttactggataatggagctgatatgaatctagtggcttgtgatcccagcaggtctagtggtgaaaaagatgagcagacatgtttgatgtgggcttatgaaaaagggcatgatgccattgtcacactcctgaagcattataagagaccacaagatgaattgccctgtaatgaatattctcagcctggaggagatggctcctatgtgtctgttccatcacccttggggaagattaaaagcatgacaaaagagaaggcagatattctcctcctaagagctggattgccttcacatttccatcttcagctctcagaaattgagttccatgagattattggctcaggttcttttgggaaagtatataaaggacgatgcagaaataaaatagtggctataaaacgttatcgagccaatacctactgctccaagtcagatgtggatatgttttgccgagaggtgtccattctctgccagctcaatcatccctgcgtaattcagtttgtgggtgcttgcttgaatgatcccagccagtttgccattgtcactcaatacatatcagggggttctctgttctccctccttcatgagcagaagaggattcttgatttgcagtctaaattaattattgcagtagatgttgccaaaggcatggagtaccttcacaacctgacacagccaattatacatcgtgacttgaacagtcacaatattcttctctatgaggatgggcatgctgtggtggcagattttggagaatcaagatttctacagtctctggatgaagacaacatgacaaaacaacctgggaacctccgttggatggctcctgaggtgttcacgcagtgcactcggtacaccatcaaagcagatgtcttcagctatgctctgtgtctgtgggaaattctcactggcgaaattccattcgctcatctcaagccagcggctgcggcagcagacatggcttaccaccacatcagacctcccattggctattccattcccaagcccatatcatctctgctgatacgagggtggaacgcatgtcctgaagcaaaatccagaccaagtcattacccagtctcatctgtgtacacagaaactcttaagaagaaaaatgaagatcgttttgggatgtggattgagtatctcagaagataacctcttatcctggccattcaacctgatgtgttacatgtttatttgtttagaatcttccatcactaccaaaatgttagctccatgaaagcggtcctttttgtttattttgttcactgctataacactaacatctaaagctggatgcttaagaatgtttgttgagtaaatgaatgaataccagta

SEQ ID NO: 2364 - protein, 856 aa, Homo sapiens
MRAVRRGLREGGAMAAARDPPEVSLREATQRKLRRFSELRGKLVARGEFWDIVAITAADEKQELAYNQQLSEKLKRKELPLGVQYHVFVDPAGAKIGNGGSTLCALQCLEKLYGDKWNSFTILLIHSDEWKKKVSESYVITIERLEDDLQIKEKELTELRNIFGSDEAFSKVNLNYRTENGLSLLHLCCICGGKKSHIRTLMLKGLRPSRLTRNGFTALHLAVYKDNAELITSLLHSGADIQQVGYGGLTALHIATIAGHLEAADVLLQHGANVNIQDAVFFTPLHIAAYYGHEQVTRLLLKFGADVNVSGEVGDRPLHLASAKGFLNIAKLLMEEGSKADVNAQDNEDHVPLHFCSRFGHHDIVKYLLQSDLEVQPHVVNIYGDTPLHLACYNGKFEVAKEIIQISGTESLTKENIFSETAFHSACTYGKSIDLVKFLLDQNVININHQGRDGHTGLHSACYHGHIRLVQFLLDNGADMNLVACDPSRSSGEKDEQTCLMWAYEKGHDAIVTLLKHYKRPQDELPCNEYSQPGGDGSYVSVPSPLGKIKSMTKEKADILLLRAGLPSHFHLQLSEIEFHEIIGSGSFGKVYKGRCRNKIVAIKRYRANTYCSKSDVDMFCREVSILCQLNHPCVIQFVGACLNDPSQFAIVTQYISGGSLFSLLHEQKRILDLQSKLIIAVDVAKGMEYLHNLTQPIIHRDLNSHNILLYEDGHAVVADFGESRFLQSLDEDNMTKQPGNLRWMAPEVFTQCTRYTIKADVFSYALCLWEILTGEIPFAHLKPAAAAADMAYHHIRPPIGYSIPKPISSLLIRGWNACPEAKSRPSHYPVSSVYTETLKKKNEDRFGMWIEYLRR

SEQ ID NO: 2365 - DNA, 3304 bp, Homo sapiens
ggcgcatgcgtgctgtgcggcgcggtctcagggaaggtggggctatggcagctgctagggaccctccggaagtatcgctgcgagaagccacccagcgaaaattgcggaggttttccgagctaagaggcaaacttgtagcacgtggagaattctgggacatagttgcaataacagcggctgatgaaaaacaggaacttgcttacaaccaacagctgtcagaaaagctgaaaagaaaggagttaccccttggagttcaatatcacgtttttgtggatcctgctggagccaaaattggaaatggaggatcaacactttgtgcccttcaatgtttggaaaagctatatggagataaatggaattcttttaccatcttattaattcactctgatgaatggaagaaaaaagtcagtgaatcatatgttatcacaatagaaagattagaagatgacctgcagatcaaggaaaaagaactgacagaactaaggaatatatttggctctgatgaagccttcagtaaagtcaatttaaattaccgcactgaaaatgggctgtctctacttcatttatgttgcatttgtggaggcaagaaatcacatattcgaactcttatgttgaaagggctccgcccatctcgactgacaagaaatggatttacagccttgcatttagcagtttacaaggataatgcagaattgatcacttctctgcttcacagtggagctgatatacagcaggttggatacggtggcctcactgccctccatattgctacaatagctggccacctagaggctgctgatgtgctgttgcaacatggagctaatgtcaatattcaagatgcagtttttttcactccattgcatattgcagcgtactatggacatgaacaggtaactcgccttcttttgaaatttggtgctgatgtaaatgtaagtggtgaagttggagatagacccctccacctagcatctgcaaaaggattcttgaatattgcaaaactcttgatggaagaaggcagcaaagcagatgtgaatgctcaagataatgaagaccatgtcccactccatttctgttctcgatttggacaccatgatatagttaagtatctgctgcaaagtgatttggaagttcaacctcatgttgttaatatctatggagatacccccttacacctggcatgctacaatggcaaatttgaagttgccaaggaaatcatccaaatatcaggaacagaaagtctgactaaggaaaacatcttcagtgaaacagcttttcatagtgcttgtacctatggcaagagcattgacctagtcaaatttcttcttgatcagaatgtcataaacatcaaccaccaaggaagggatgggcacactggattacactctgcttgctaccacggtcacattcgcctggttcagttcttactggataatggagctgatatgaatctagtggcttgtgatcccagcaggtctagtggtgaaaaagatgagcagacatgtttgatgtgggcttatgaaaaagggcatgatgccattgtcacactcctgaagcattataagagaccacaagatgaattgccctgtaatgaatattctcagcctggaggagatggctcctatgtgtctgttccatcacccttggggaagattaaaagcatgacaaaagagaaggcagatattctcctcctaagagctggattgccttcacatttccatcttcagctctcagaaattgagttccatgagattattggctcaggttcttttgggaaagtatataaaggacgatgcagaaataaaatagtggctataaaacgttatcgagccaatacctactgctccaagtcagatgtggatatgttttgccgagaggtgtccattctctgccagctcaatcatccctgcgtaattcagtttgtgggtgcttgcttgaatgatcccagccagtttgccattgtcactcaatacatatcagggggttctctgttctccctccttcatgagcagaagaggattcttgatttgcagtctaaattaattattgcagtagatgttgccaaaggcatggagtaccttcacaacctgacacagccaattatacatcgtgacttgaacagtcacaatattcttctctatgaggatgggcatgctgtggtggcagattttggagaatcaagatttctacagtctctggatgaagacaacatgacaaaacaacctgggaacctccgttggatggctcctgaggtgttcacgcagtgcactcggtacaccatcaaagcagatgtcttcagctatgctctgtgtctgtgggaaattctcactggcgaaattccattcgctcatctcaagccagcggctgcggcagcagacatggcttaccaccacatcagacctcccattggctattccattcccaagcccatatcatctctgctgatacgagggtggaacgcatgtcctgaaggaagacccgaattttctgaagttgtcatgaagttagaagagtgtctctgcaacattgagctgatgtctcctgcatcaagtaacagcagtgggtctctctcaccttcttcttcttctgattgcctggtgaaccggggaggacctggccggagtcatgtggcagcattaagaagtcgtttcgaattggaatatgctctaaatgcaaggtcctatgctgctttgtcccaaagtgctggacaatattcctctcaaggtctgtctttggaggagatgaaaagaagtcttcaatacacacccattgacaaatatggctatgtatccgatcccatgagctcaatgcattttcattcttgccgaaatagtagcagctttgaggacagcagctgacagcattcggcgtatacctaaggagagttttttccccgaactgacagcaacgattccaaccacggcaagctggcttccaactataacattttactctcaaaggtctccttaaattgggcttgtttttacttgtcctatttaattccccactattagcaggctttggatttgtgcctaaggaataatatgcaaaagaaccaagacagaatgtatatgaagaattgtttttaattttgtaaattaaaaaaaaatttagatcgttacttggaaatggagcctaagtctgtggtggacagataataattatgttttcctgggctgaattatgtagacttgtgtttgacagctatgggtttatttcttagaacattgttcattttcttttctcattatgttacttctagtgttcacctctgtgattaaagattctttggtgaaatagaaaattg

SEQ ID NO: 2366 - protein, 949 aa, Homo sapiens
MRAVRRGLREGGAMAAARDPPEVSLREATQRKLRRFSELRGKLVARGEFWDIVAITAADEKQELAYNQQLSEKLKRKELPLGVQYHVFVDPAGAKIGNGGSTLCALQCLEKLYGDKWNSFTILLIHSDEWKKKVSESYVITIERLEDDLQIKEKELTELRNIFGSDEAFSKVNLNYRTENGLSLLHLCCICGGKKSHIRTLMLKGLRPSRLTRNGFTALHLAVYKDNAELITSLLHSGADIQQVGYGGLTALHIATIAGHLEAADVLLQHGANVNIQDAVFFTPLHIAAYYGHEQVTRLLLKFGADVNVSGEVGDRPLHLASAKGFLNIAKLLMEEGSKADVNAQDNEDHVPLHFCSRFGHHDIVKYLLQSDLEVQPHVVNIYGDTPLHLACYNGKFEVAKEIIQISGTESLTKENIFSETAFHSACTYGKSIDLVKFLLDQNVININHQGRDGHTGLHSACYHGHIRLVQFLLDNGADMNLVACDPSRSSGEKDEQTCLMWAYEKGHDAIVTLLKHYKRPQDELPCNEYSQPGGDGSYVSVPSPLGKIKSMTKEKADILLLRAGLPSHFHLQLSEIEFHEIIGSGSFGKVYKGRCRNKIVAIKRYRANTYCSKSDVDMFCREVSILCQLNHPCVIQFVGACLNDPSQFAIVTQYISGGSLFSLLHEQKRILDLQSKLIIAVDVAKGMEYLHNLTQPIIHRDLNSHNILLYEDGHAVVADFGESRFLQSLDEDNMTKQPGNLRWMAPEVFTQCTRYTIKADVFSYALCLWEILTGEIPFAHLKPAAAAADMAYHHIRPPIGYSIPKPISSLLIRGWNACPEGRPEFSEVVMKLEECLCNIELMSPASSNSSGSLSPSSSSDCLVNRGGPGRSHVAALRSRFELEYALNARSYAALSQSAGQYSSQGLSLEEMKRSLQYTPIDKYGYVSDPMSSMHFHSCRNSSSFEDSS

SEQ ID NO: 2367 - DNA, 3130 bp, Homo sapiens
gcgtgctgtgcggcgcggtctcagggaaggtggggctatggcagctgctagggaccctccggaagtatcgctgcgagaagccacccagcgaaaattgcggaggttttccgagctaagaggcaaacttgtagcacgtggagaattctgggacatagttgcaataacagcggctgatgaaaaacaggaacttgcttacaaccaacagctgtcagaaaagctgaaaagaaaggagttaccccttggagttcaatatcacgtttttgtggatcctgctggagccaaaattggaaatggaggatcaacactttgtgcccttcaatgtttggaaaagctatatggagataaatggaattcttttaccatcttattaattcactctggtggctacagtcaacgacttccaaatgcaagtgctctgggaaaaattttcactgctttacctcttggtaaccccatttatcagatgctagaattaaaactagccatgtacattgatttccccttaaatatgaatcctggaattctggttacctgtgcagatgatattgaactttatagtattggagaatttgagtttattaggtttgacaaacctggctttactgctttagctcatccttctagtttgacgataggtaccacacatggagtatttgtcttagatccttttgatgatttaaaacatagagaccttgaatacaggtcttgccatcgtttccttcataagcccagcatagaaaagatgtatcagtttaatgctgtgtgtagacctggaaatttttgtcaacaggactttgctgggggtgacattgccgatcttaaattagactctgactatgtctacacagatagcctattttatatggatcataaatcagcaaaaatgttacttgctttttatgaaaaaataggcacactgagctgtgaaatagatgcctatggtgactttctgcaggctttgggacctggagcaactgtggagtacaccagaaacacatcaaatgtcattaaagaagagtcagagttggtagaaatgaggcagagaatatttcatcttcttaaaggaacatcactaaatgttgttgttcttaataactccaaattttatcacattggaacaaccgaagaatatttgttttactttacctcagataacagtttaaagtcagagctcggcttacagtccataacttttagtatctttccagatataccagaatgctctggcaaaacatcctgtatcattcaaagcatactggattcaagatgttctgtggcacctggctcagttgtggagtattccagattggggcctgatgtttcagttggggaaaactgcattattagtggttcttacatcctaacaaaagctgccctccccgcacattcttttgtatgttccttaagcttaaagatgaatagatgcttaaagtatgcaactatggcatttggagtgcaagacaacttgaaaaagagtgtgaaaacattgtcagatataaagttacttcaattctttggagtctgtttcctgtcatgcttagatgtttggaatcttaaagttacagaggaactgttctctggtaacaagacatgtctgagtttgtggactgcacgcattttcccagtttgttcttctttgagtgactcagttataacatccctaaagatgttaaatgctgttaagaacaagtcagcattcagcctgaatagctataagttgctgtccattgaagaaatgcttatctacaaagatgtagaagatatgataacttacagggaacaaatttttctagaaatcagtttaaaaagcagtttgatgtagagatattttaaatattgtacactttgcctttttgagtaacattccagagataggtattttttgtaggctgtttcactgaactcagttaatgaaaactgtattaacataattgttgtagcataatattaatagtgcaaaagtacatataagtcattttgatgaaaaatattccaagactaagttgagaaaagagatactattttggatgtgtatcagtatttttgtttttaataatgattgatttgtggagcattgttttttcacataattagttttaaaggtaattttctaagcatacctttggaatttttccatcttttttgaggcttttggtccagtgaagttctaagtattcactggcacttctctcctcaactgtaattctatttttaataataaaaatggcatactgtagggtcttcagagtagtgtaggaatactgtagaaatactttttcagaaacgaatccatagctgacaaattcactcagtgcccaatatattgtgattattttcgttgataaagaactagatacaaagacctctgaaattgatgataaaatttgtatctcattaattttatcaaaatgaaactaaaagtacatatgtattatacacttgaacatgtgtttgtatatctttaaaattttcctttatgttccattccataggaaaacacacatatgcacacaaaactcagttatctgtggggaaagtggtagtaataattgagattcatcaataatcatataatttcactatagacattacttgcattatctcctatcagtccttctaacaaaacttcaattaccagatgaactgactttagttttcatcttattttttgtccacatgctggtgatgctgagaaacaataattggcccaaatgcagacatcaagaagcaggcaggaaaatggaaaaactgagataatacacaggtgataaacagtttcgagaaaataaaaattggctagaatctcaagttatgtgtttctatattggtataagcatataagtgaaaagtcttataagtgtaatagagaaaagatttgtcagtgtgtttttttaaatgaaataactagtctgtgctactttatgtcaatataaaaattggtaaactagaagtaacttgtccacaaccctcagttatgatacttatgtgcgtgtttttttttccaaagtttttcccaaggagaagatacaaatatatggtagctattgtttaaaaatgattgatttacttgcagatttttcagaggatgttatgtctttgtcattcattaaatgttcaaaattgtagtttt

SEQ ID NO: 2368 - protein, 594 aa, Homo sapiens; identical to SEQ ID NO: 85

SEQ ID NO: 2369 - DNA, 3196 bp, Homo sapiens
gcgtgctgtgcggcgcggtctcagggaaggtggggctatggcagctgctagggaccctccggaagtatcgctgcgagaagccacccagcgaaaattgcggaggttttccgagctaagaggtaccagagaaggcaccggagttctcctgggcaatgcagagggagggtgcttttacgtgccaggaggcaaacttgtagcacgtggagaattctgggacatagttgcaataacagcggctgatgaaaaacaggaacttgcttacaaccaacagctgtcagaaaagctgaaaagaaaggagttaccccttggagttcaatatcacgtttttgtggatcctgctggagccaaaattggaaatggaggatcaacactttgtgcccttcaatgtttggaaaagctatatggagataaatggaattcttttaccatcttattaattcactctggtggctacagtcaacgacttccaaatgcaagtgctctgggaaaaattttcactgctttacctcttggtaaccccatttatcagatgctagaattaaaactagccatgtacattgatttccccttaaatatgaatcctggaattctggttacctgtgcagatgatattgaactttatagtattggagaatttgagtttattaggtttgacaaacctggctttactgctttagctcatccttctagtttgacgataggtaccacacatggagtatttgtcttagatccttttgatgatttaaaacatagagaccttgaatacaggtcttgccatcgtttccttcataagcccagcatagaaaagatgtatcagtttaatgctgtgtgtagacctggaaatttttgtcaacaggactttgctgggggtgacattgccgatcttaaattagactctgactatgtctacacagatagcctattttatatggatcataaatcagcaaaaatgttacttgctttttatgaaaaaataggcacactgagctgtgaaatagatgcctatggtgactttctgcaggctttgggacctggagcaactgtggagtacaccagaaacacatcaaatgtcattaaagaagagtcagagttggtagaaatgaggcagagaatatttcatcttcttaaaggaacatcactaaatgttgttgttcttaataactccaaattttatcacattggaacaaccgaagaatatttgttttactttacctcagataacagtttaaagtcagagctcggcttacagtccataacttttagtatctttccagatataccagaatgctctggcaaaacatcctgtatcattcaaagcatactggattcaagatgttctgtggcacctggctcagttgtggagtattccagattggggcctgatgtttcagttggggaaaactgcattattagtggttcttacatcctaacaaaagctgccctccccgcacattcttttgtatgttccttaagcttaaagatgaatagatgcttaaagtatgcaactatggcatttggagtgcaagacaacttgaaaaagagtgtgaaaacattgtcagatataaagttacttcaattctttggagtctgtttcctgtcatgcttagatgtttggaatcttaaagttacagaggaactgttctctggtaacaagacatgtctgagtttgtggactgcacgcattttcccagtttgttcttctttgagtgactcagttataacatccctaaagatgttaaatgctgttaagaacaagtcagcattcagcctgaatagctataagttgctgtccattgaagaaatgcttatctacaaagatgtagaagatatgataacttacagggaacaaatttttctagaaatcagtttaaaaagcagtttgatgtagagatattttaaatattgtacactttgcctttttgagtaacattccagagataggtattttttgtaggctgtttcactgaactcagttaatgaaaactgtattaacataattgttgtagcataatattaatagtgcaaaagtacatataagtcattttgatgaaaaatattccaagactaagttgagaaaagagatactattttggatgtgtatcagtatttttgtttttaataatgattgatttgtggagcattgttttttcacataattagttttaaaggtaattttctaagcatacctttggaatttttccatcttttttgaggcttttggtccagtgaagttctaagtattcactggcacttctctcctcaactgtaattctatttttaataataaaaatggcatactgtagggtcttcagagtagtgtaggaatactgtagaaatactttttcagaaacgaatccatagctgacaaattcactcagtgcccaatatattgtgattattttcgttgataaagaactagatacaaagacctctgaaattgatgataaaatttgtatctcattaattttatcaaaatgaaactaaaagtacatatgtattatacacttgaacatgtgtttgtatatctttaaaattttcctttatgttccattccataggaaaacacacatatgcacacaaaactcagttatctgtggggaaagtggtagtaataattgagattcatcaataatcatataatttcactatagacattacttgcattatctcctatcagtccttctaacaaaacttcaattaccagatgaactgactttagttttcatcttattttttgtccacatgctggtgatgctgagaaacaataattggcccaaatgcagacatcaagaagcaggcaggaaaatggaaaaactgagataatacacaggtgataaacagtttcgagaaaataaaaattggctagaatctcaagttatgtgtttctatattggtataagcatataagtgaaaagtcttataagtgtaatagagaaaagatttgtcagtgtgtttttttaaatgaaataactagtctgtgctactttatgtcaatataaaaattggtaaactagaagtaacttgtccacaaccctcagttatgatacttatgtgcgtgtttttttttccaaagtttttcccaaggagaagatacaaatatatggtagctattgtttaaaaatgattgatttacttgcagatttttcagaggatgttatgtctttgtcattcattaaatgttcaaaattgtagtttt

SEQ ID NO: 2370 - protein, 616 aa, Homo sapiens
MAAARDPPEVSLREATQRKLRRFSELRGTREGTGVLLGNAEGGCFYVPGGKLVARGEFWDIVAITAADEKQELAYNQQLSEKLKRKELPLGVQYHVFVDPAGAKIGNGGSTLCALQCLEKLYGDKWNSFTILLIHSGGYSQRLPNASALGKIFTALPLGNPIYQMLELKLAMYIDFPLNMNPGILVTCADDIELYSIGEFEFIRFDKPGFTALAHPSSLTIGTTHGVFVLDPFDDLKHRDLEYRSCHRFLHKPSIEKMYQFNAVCRPGNFCQQDFAGGDIADLKLDSDYVYTDSLFYMDHKSAKMLLAFYEKIGTLSCEIDAYGDFLQALGPGATVEYTRNTSNVIKEESELVEMRQRIFHLLKGTSLNVVVLNNSKFYHIGTTEEYLFYFTSDNSLKSELGLQSITFSIFPDIPECSGKTSCIIQSILDSRCSVAPGSVVEYSRLGPDVSVGENCIISGSYILTKAALPAHSFVCSLSLKMNRCLKYATMAFGVQDNLKKSVKTLSDIKLLQFFGVCFLSCLDVWNLKVTEELFSGNKTCLSLWTARIFPVCSSLSDSVITSLKMLNAVKNKSAFSLNSYKLLSIEEMLIYKDVEDMITYREQIFLEISLKSSLM

SEQ ID NO: 2371 - DNA, 3294 bp, Homo sapiens
gcgtgctgtgcggcgcggtctcagggaaggtggggctatggcagctgctagggaccctccggaagtatcgctgcgagaagccacccagcgaaaattgcggaggttttccgagctaagaggtaccagagaaggcaccggagttctcctgggcaatgcagagggagggtgcttttacgtgccaggaggcaaacttgtagcacgtggagaattctgggacatagttgcaataacagcggctgatgaaaaacaggaacttgcttacaaccaacagctgtcagaaaagctgaaaagaaaggagttaccccttggagttcaatatcacgtttttgtggatcctgctggagccaaaattggaaatggaggatcaacactttgtgcccttcaatgtttggaaaagctatatggagataaatggaattcttttaccatcttattaattcactctggtggctacagtcaacgacttccaaatgcaagtgctctgggaaaaattttcactgctttacctcttggtaaccccatttatcagatgctagaattaaaactagccatgtacattgatttccccttaaatatgaatcctggaattctggttacctgtgcagatgatattgaactttatagtattggagaatttgagtttattaggtttgacaaacctggctttactgctttagctcatccttctagtttgacgataggtaccacacatggagtatttgtcttagatccttttgatgatttaaaacatagagaccttgaatacaggtcttgccatcgtttccttcataagcccagcatagaaaagatgtatcagtttaatgctgtgtgtagacctggaaatttttgtcaacaggactttgctgggggtgacattgccgatcttaaattagactctgactatgtctacacagatagcctattttatatggatcataaatcagcaaaaatgttacttgctttttatgaaaaaataggcacactgagctgtgaaatagatgcctatggtgactttctgcaggctttgggacctggagcaactgtggagtacaccagaaacacatcaaatgtcattaaagaagagtcagagttggtagaaatgaggcagagaatatttcatcttcttaaaggaacatcactaaatgttgttgttcttaataactccaaattttatcacattggaacaaccgaagaatatttgttttactttacctcagataacagtttaaagtcagagctcggcttacagtccataacttttagtatctttccagatataccagaatgctctggcaaaacatcctgtatcattcaaagcatactggattcaagatgttctgtggcacctggctcagttgtggagtattccagattggggcctgatgtttcagttggggaaaactgcattattagtggttcttacatcctaacaaaagctgccctccccgcacattcttttgtatgttccttaagcttaaagatgaatagatgcttaaagtatgcaactatggcatttggagtgcaagacaacttgaaaaagagtgtgaaaacattgtcagatataaagttacttcaattctttggagtctgtttcctgtcatgcttagatgtttggaatcttaaagttacagaggaactgttctctggtaacaagacatgtctgagtttgtggactgcacgcattttcccagtttgttcttctttgagtgactcagttataacatccctaaagatgttaaatgctgttaagaacaagtcagcattcagcctgaatagctataagttgctgtccattgaagaaatgcttatctacaaagatgtagaagatatgataacttacagggaacaaatttttctagaaatcagtttaaaaagcagtttgatgtagagatattttaaatattgtacactttgcctttttgagtaacattccagagataggtattttttgtaggctgtttcactgaactcagttaatgaaaactgtattaacataattgttgtagcataatattaatagtgcaaaagtacatataagtcattttgatgaaaaatattccaagactaagttgagaaaagagatactattttggatgtgtatcagtatttttgtttttaataatgattgatttgtggagcattgttttttcacataattagttttaaaggtaattttctaagcatacctttggaatttttccatcttttttgaggcttttggtccagtgaagttctaagtattcactggcacttctctcctcaactgtaattctatttttaataataaaaatggcatactgtagggtcttcagagtagtgtaggaatactgtagaaatactttttcagaaacgaatccatagctgacaaattcactcagtgcccaatatattgtgattattttcgttgataaagaactagatacaaagacctctgaaattgatgataaaatttgtatctcattaattttatcaaaatgaaactaaaagtacatatgtattatacacttgaacatgtgtttgtatatctttaaaattttcctttatgttccattccataggaaaacacacatatgcacacaaaactcagttatctgtggggaaagtggtagtaataattgagattcatcaataatcatataatttcactatagacattacttgcattatctcctatcagtccttctaacaaaacttcaattaccagatgaactgactttagttttcatcttattttttgtccacatgctggtgatgctgagaaacaataattggcccaaatgcagacatcaagaagcaggcaggaaaatggaaaaactgagataatacacaggtgataaacagtttcgagaaaataaaaattggctagaatctcaagttatgtgtttctatattggtataagcatataagtgaaaagtcttataagtgtaatagagaaaagatttgtcagtgtgtttttttaaatgaaataactagtctgtgctactttatgtcaatataaaaattggtaaactagaagtaacttgtccacaaccctcagttatgatacttatgtgcgtgtttttttttccaaagtttttcccaaggagaagatacaaatatatggtagctattgtttaaaaatgattgatttacttgcagatttttcagaggatgttatgtctttgtcattcattaaatgttcaaaattgtagttttaccaaatctgaagtgccatcagttataagaatcaccattattttatgttccattaagaaaaacacaataaaacatgacactgctttttttgttacttg

SEQ ID NO: 2372 - protein, 616 aa, Homo sapiens; identical to SEQ ID NO: 2370

SEQ ID NO: 2373 - DNA, 3228 bp, Homo sapiens
gcgtgctgtgcggcgcggtctcagggaaggtggggctatggcagctgctagggaccctccggaagtatcgctgcgagaagccacccagcgaaaattgcggaggttttccgagctaagaggcaaacttgtagcacgtggagaattctgggacatagttgcaataacagcggctgatgaaaaacaggaacttgcttacaaccaacagctgtcagaaaagctgaaaagaaaggagttaccccttggagttcaatatcacgtttttgtggatcctgctggagccaaaattggaaatggaggatcaacactttgtgcccttcaatgtttggaaaagctatatggagataaatggaattcttttaccatcttattaattcactctggtggctacagtcaacgacttccaaatgcaagtgctctgggaaaaattttcactgctttacctcttggtaaccccatttatcagatgctagaattaaaactagccatgtacattgatttccccttaaatatgaatcctggaattctggttacctgtgcagatgatattgaactttatagtattggagaatttgagtttattaggtttgacaaacctggctttactgctttagctcatccttctagtttgacgataggtaccacacatggagtatttgtcttagatccttttgatgatttaaaacatagagaccttgaatacaggtcttgccatcgtttccttcataagcccagcatagaaaagatgtatcagtttaatgctgtgtgtagacctggaaatttttgtcaacaggactttgctgggggtgacattgccgatcttaaattagactctgactatgtctacacagatagcctattttatatggatcataaatcagcaaaaatgttacttgctttttatgaaaaaataggcacactgagctgtgaaatagatgcctatggtgactttctgcaggctttgggacctggagcaactgtggagtacaccagaaacacatcaaatgtcattaaagaagagtcagagttggtagaaatgaggcagagaatatttcatcttcttaaaggaacatcactaaatgttgttgttcttaataactccaaattttatcacattggaacaaccgaagaatatttgttttactttacctcagataacagtttaaagtcagagctcggcttacagtccataacttttagtatctttccagatataccagaatgctctggcaaaacatcctgtatcattcaaagcatactggattcaagatgttctgtggcacctggctcagttgtggagtattccagattggggcctgatgtttcagttggggaaaactgcattattagtggttcttacatcctaacaaaagctgccctccccgcacattcttttgtatgttccttaagcttaaagatgaatagatgcttaaagtatgcaactatggcatttggagtgcaagacaacttgaaaaagagtgtgaaaacattgtcagatataaagttacttcaattctttggagtctgtttcctgtcatgcttagatgtttggaatcttaaagttacagaggaactgttctctggtaacaagacatgtctgagtttgtggactgcacgcattttcccagtttgttcttctttgagtgactcagttataacatccctaaagatgttaaatgctgttaagaacaagtcagcattcagcctgaatagctataagttgctgtccattgaagaaatgcttatctacaaagatgtagaagatatgataacttacagggaacaaatttttctagaaatcagtttaaaaagcagtttgatgtagagatattttaaatattgtacactttgcctttttgagtaacattccagagataggtattttttgtaggctgtttcactgaactcagttaatgaaaactgtattaacataattgttgtagcataatattaatagtgcaaaagtacatataagtcattttgatgaaaaatattccaagactaagttgagaaaagagatactattttggatgtgtatcagtatttttgtttttaataatgattgatttgtggagcattgttttttcacataattagttttaaaggtaattttctaagcatacctttggaatttttccatcttttttgaggcttttggtccagtgaagttctaagtattcactggcacttctctcctcaactgtaattctatttttaataataaaaatggcatactgtagggtcttcagagtagtgtaggaatactgtagaaatactttttcagaaacgaatccatagctgacaaattcactcagtgcccaatatattgtgattattttcgttgataaagaactagatacaaagacctctgaaattgatgataaaatttgtatctcattaattttatcaaaatgaaactaaaagtacatatgtattatacacttgaacatgtgtttgtatatctttaaaattttcctttatgttccattccataggaaaacacacatatgcacacaaaactcagttatctgtggggaaagtggtagtaataattgagattcatcaataatcatataatttcactatagacattacttgcattatctcctatcagtccttctaacaaaacttcaattaccagatgaactgactttagttttcatcttattttttgtccacatgctggtgatgctgagaaacaataattggcccaaatgcagacatcaagaagcaggcaggaaaatggaaaaactgagataatacacaggtgataaacagtttcgagaaaataaaaattggctagaatctcaagttatgtgtttctatattggtataagcatataagtgaaaagtcttataagtgtaatagagaaaagatttgtcagtgtgtttttttaaatgaaataactagtctgtgctactttatgtcaatataaaaattggtaaactagaagtaacttgtccacaaccctcagttatgatacttatgtgcgtgtttttttttccaaagtttttcccaaggagaagatacaaatatatggtagctattgtttaaaaatgattgatttacttgcagatttttcagaggatgttatgtctttgtcattcattaaatgttcaaaattgtagttttaccaaatctgaagtgccatcagttataagaatcaccattattttatgttccattaagaaaaacacaataaaacatgacactgctttttttgttacttg

SEQ ID NO: 2374 - protein, 594 aa, Homo sapiens; identical to SEQ ID NO: 85

SEQ ID NO: 2375 - DNA, 5245 bp, Homo sapiens
gcgtgctgtgcggcgcggtctcagggaaggtggggctatggcagctgctagggaccctccggaagtatcgctgcgagaagccacccagcgaaaattgcggaggttttccgagctaagaggcaaacttgtagcacgtggagaattctgggacatagttgcaataacagcggctgatgaaaaacaggaacttgcttacaaccaacagctgtcagaaaagctgaaaagaaaggagttaccccttggagttcaatatcacgtttttgtggatcctgctggagccaaaattggaaatggaggatcaacactttgtgcccttcaatgtttggaaaagctatatggagataaatggaattcttttaccatcttattaattcactctggtggctacagtcaacgacttccaaatgcaagtgctctgggaaaaattttcactgctttacctcttggtaaccccatttatcagatgctagaattaaaactagccatgtacattgatttccccttaaatatgaatcctggaattctggttacctgtgcagatgatattgaactttatagtattggagaatttgagtttattaggtttgacaaacctggctttactgctttagctcatccttctagtttgacgataggtaccacacatggagtatttgtcttagatccttttgatgatttaaaacatagagaccttgaatacaggtcttgccatcgtttccttcataagcccagcatagaaaagatgtatcagtttaatgctgtgtgtagacctggaaatttttgtcaacaggactttgctgggggtgacattgccgatcttaaattagactctgactatgtctacacagatagcctattttatatggatcataaatcagcaaaaatgttacttgctttttatgaaaaaataggcacactgagctgtgaaatagatgcctatggtgactttctgcaggctttgggacctggagcaactgtggagtacaccagaaacacatcaaatgtcattaaagaagagtcagagttggtagaaatgaggcagagaatatttcatcttcttaaaggaacatcactaaatgttgttgttcttaataactccaaattttatcacattggaacaaccgaagaatatttgttttactttacctcagataacagtttaaagtcagagctcggcttacagtccataacttttagtatctttccagatataccagaatgctctggcaaaacatcctgtatcattcaaagcatactggattcaagatgttctgtggcacctggctcagttgtggagtattccagattggggcctgatgtttcagttggggaaaactgcattattagtggttcttacatcctaacaaaagctgccctccccgcacattcttttgtatgttccttaagcttaaagatgaatagatgcttaaagtatgcaactatggcatttggagtgcaagacaacttgaaaaagagtgtgaaaacattgtcagatataaagttacttcaattctttggagtctgtttcctgtcatgcttagatgtttggaatcttaaagttacagaggaactgttctctggtaacaagacatgtctgagtttgtggactgcacgcattttcccagtttgttcttctttgagtgactcagttataacatccctaaagatgttaaatgctgttaagaacaagtcagcattcagcctgaatagctataagttgctgtccattgaagaaatgcttatctacaaagatgtagaagatatgataacttacagggaacaaatttttctagaaatcagtttaaaaagcagtttgatgtagagatattttaaatattgtacactttgcctttttgagtaacattccagagataggtattttttgtaggctgtttcactgaactcagttaatgaaaactgtattaacataattgttgtagcataatattaatagtgcaaaagtacatataagtcattttgatgaaaaatattccaagactaagttgagaaaagagatactattttggatgtgtatcagtatttttgtttttaataatgattgatttgtggagcattgttttttcacataattagttttaaaggtaattttctaagcatacctttggaatttttccatcttttttgaggcttttggtccagtgaagttctaagtattcactggcacttctctcctcaactgtaattctatttttaataataaaaatggcatactgtagggtcttcagagtagtgtaggaatactgtagaaatactttttcagaaacgaatccatagctgacaaattcactcagtgcccaatatattgtgattattttcgttgataaagaactagatacaaagacctctgaaattgatgataaaatttgtatctcattaattttatcaaaatgaaactaaaagtacatatgtattatacacttgaacatgtgtttgtatatctttaaaattttcctttatgttccattccataggaaaacacacatatgcacacaaaactcagttatctgtggggaaagtggtagtaataattgagattcatcaataatcatataatttcactatagacattacttgcattatctcctatcagtccttctaacaaaacttcaattaccagatgaactgactttagttttcatcttattttttgtccacatgctggtgatgctgagaaacaataattggcccaaatgcagacatcaagaagcaggcaggaaaatggaaaaactgagataatacacaggtgataaacagtttcgagaaaataaaaattggctagaatctcaagttatgtgtttctatattggtataagcatataagtgaaaagtcttataagtgtaatagagaaaagatttgtcagtgtgtttttttaaatgaaataactagtctgtgctactttatgtcaatataaaaattggtaaactagaagtaacttgtccacaaccctcagttatgatacttatgtgcgtgtttttttttccaaagtttttcccaaggagaagatacaaatatatggtagctattgtttaaaaatgattgatttacttgcagatttttcagaggatgttatgtctttgtcattcattaaatgttcaaaattgtagttttaccaaatctgaagtgccatcagttataagaatcaccattattttatgttccattaagaaaaacacaataaaacatgacactgctttttttgttacttgaaattttcatatttattggagagctcttttagatgtttttaaatacagatttttatttaaccctcttgcatatacatataaaataacaaaaaaataaaatattgagatatcatcaagaaatttctacagcttcacattcaaactcttcagcactttcagagctattgatatgcatatgtccacctagtaccatcttctctgctttcagaattattggtaaggctgcatttcctgagtgctctaccacacttatgtctggattttttttacccagctacagacccacactcctgcaagatttgatacccttctatttggcaaaactcagtttcacttttctttcagtttaatcacaggtccttagaagatcggacctgtgattctattcaaagtcagaaagagatttctcacaaattgacgtcatattaacatgtcaatatgaaaattaattgtttggtaaaccagaagtgacctgtctgaagccctcaattgtggtatttgtgtgtttgttttttctttttcaagattctttttaaagaaaatatatggtagctgttgtttaacatttatctacttacagagcgttcagaggatgttatatgtttattaagtgctcaatactgtattttaacctaatctgaattttaatcataatcctgtacaatgcatggattctggttgctttgaaatggttctgttcaaaggacttatcaatgtctcttgctttgagatgtattgcttggtgtgtagtagcacaaacgtaccaccaataatgtacctaattcaactgaagtgacagtcatatacgcagatatgaccaagttcacatgtgagcaagtaacaactccatgactattgctgcctggctaatagctattatactatcatttgtaaggcacattctgttttctggggtgtcgaaatgtggataaaaaaagatgaattaggaatgattctaacctaagtatgtgttttaataaaaggatctaggcaaaaaaaaaaaaagtaagtcactcctaaatttaatccctgaataatgcagtgtacatgatgatagaggagaagtgtgtttttgataagaagtgactaaattttgtgacaatcttaattttttaggcttttcatttagtcttccaataaagataatttttttctgagttttatcagcagtagaaaaataagacctacatggataagtttgaaattaaacattttgtctcattttataatttttatttttatgaaatcatggcacttacatcatatactcaggtgtgtaaaagcctgctatttgtaactataatccataaacttattgatgatttaataactatcaacaagggcatgggaaaaattcaacatttgataataatcttttaccttaggcatttattctctaagcaaagcagaaataaaggatatgtatcagtgtatactgattgaaataaagctttaaaaatccaagtgatactctgaaattgtcaaaagtttaatggcatgaatccaggattaattcccataacctgtgatgatctagtcatcttctgtagctacatagtactcctaatgttaagattaccaaattcagcaataaagccaaaatcaaaactgccttctgtcacatatagctgttaagtaaactacacaaaatcagagttgctgtttacatacatcatgatgccgtctggacttgagcaccttggcggctcaggattaaggcacctcagtctagcctagcagagttacaatggagagaagtgaaaactcattagtagctcaaaacaagctaaaggatttcagatgctctttttcttgttcatctaaatcaagtcttcatctgtgtcaagaactaaattgttaaagacctttttaatttgcttagtgcaagaaaaataatagcaaccatatatctagttaacttgagtcttctgtgcctctaaaattttgtttagagaaagcctatttctattgaggttgaggaacacaattctaatacttagtaaaattattaacattc

SEQ ID NO: 2376 - protein, 594 aa, Homo sapiens; identical to SEQ ID NO: 85

SEQ ID NO: 2377 - DNA, 5311 bp, Homo sapiens
gcgtgctgtgcggcgcggtctcagggaaggtggggctatggcagctgctagggaccctccggaagtatcgctgcgagaagccacccagcgaaaattgcggaggttttccgagctaagaggtaccagagaaggcaccggagttctcctgggcaatgcagagggagggtgcttttacgtgccaggaggcaaacttgtagcacgtggagaattctgggacatagttgcaataacagcggctgatgaaaaacaggaacttgcttacaaccaacagctgtcagaaaagctgaaaagaaaggagttaccccttggagttcaatatcacgtttttgtggatcctgctggagccaaaattggaaatggaggatcaacactttgtgcccttcaatgtttggaaaagctatatggagataaatggaattcttttaccatcttattaattcactctggtggctacagtcaacgacttccaaatgcaagtgctctgggaaaaattttcactgctttacctcttggtaaccccatttatcagatgctagaattaaaactagccatgtacattgatttccccttaaatatgaatcctggaattctggttacctgtgcagatgatattgaactttatagtattggagaatttgagtttattaggtttgacaaacctggctttactgctttagctcatccttctagtttgacgataggtaccacacatggagtatttgtcttagatccttttgatgatttaaaacatagagaccttgaatacaggtcttgccatcgtttccttcataagcccagcatagaaaagatgtatcagtttaatgctgtgtgtagacctggaaatttttgtcaacaggactttgctgggggtgacattgccgatcttaaattagactctgactatgtctacacagatagcctattttatatggatcataaatcagcaaaaatgttacttgctttttatgaaaaaataggcacactgagctgtgaaatagatgcctatggtgactttctgcaggctttgggacctggagcaactgtggagtacaccagaaacacatcaaatgtcattaaagaagagtcagagttggtagaaatgaggcagagaatatttcatcttcttaaaggaacatcactaaatgttgttgttcttaataactccaaattttatcacattggaacaaccgaagaatatttgttttactttacctcagataacagtttaaagtcagagctcggcttacagtccataacttttagtatctttccagatataccagaatgctctggcaaaacatcctgtatcattcaaagcatactggattcaagatgttctgtggcacctggctcagttgtggagtattccagattggggcctgatgtttcagttggggaaaactgcattattagtggttcttacatcctaacaaaagctgccctccccgcacattcttttgtatgttccttaagcttaaagatgaatagatgcttaaagtatgcaactatggcatttggagtgcaagacaacttgaaaaagagtgtgaaaacattgtcagatataaagttacttcaattctttggagtctgtttcctgtcatgcttagatgtttggaatcttaaagttacagaggaactgttctctggtaacaagacatgtctgagtttgtggactgcacgcattttcccagtttgttcttctttgagtgactcagttataacatccctaaagatgttaaatgctgttaagaacaagtcagcattcagcctgaatagctataagttgctgtccattgaagaaatgcttatctacaaagatgtagaagatatgataacttacagggaacaaatttttctagaaatcagtttaaaaagcagtttgatgtagagatattttaaatattgtacactttgcctttttgagtaacattccagagataggtattttttgtaggctgtttcactgaactcagttaatgaaaactgtattaacataattgttgtagcataatattaatagtgcaaaagtacatataagtcattttgatgaaaaatattccaagactaagttgagaaaagagatactattttggatgtgtatcagtatttttgtttttaataatgattgatttgtggagcattgttttttcacataattagttttaaaggtaattttctaagcatacctttggaatttttccatcttttttgaggcttttggtccagtgaagttctaagtattcactggcacttctctcctcaactgtaattctatttttaataataaaaatggcatactgtagggtcttcagagtagtgtaggaatactgtagaaatactttttcagaaacgaatccatagctgacaaattcactcagtgcccaatatattgtgattattttcgttgataaagaactagatacaaagacctctgaaattgatgataaaatttgtatctcattaattttatcaaaatgaaactaaaagtacatatgtattatacacttgaacatgtgtttgtatatctttaaaattttcctttatgttccattccataggaaaacacacatatgcacacaaaactcagttatctgtggggaaagtggtagtaataattgagattcatcaataatcatataatttcactatagacattacttgcattatctcctatcagtccttctaacaaaacttcaattaccagatgaactgactttagttttcatcttattttttgtccacatgctggtgatgctgagaaacaataattggcccaaatgcagacatcaagaagcaggcaggaaaatggaaaaactgagataatacacaggtgataaacagtttcgagaaaataaaaattggctagaatctcaagttatgtgtttctatattggtataagcatataagtgaaaagtcttataagtgtaatagagaaaagatttgtcagtgtgtttttttaaatgaaataactagtctgtgctactttatgtcaatataaaaattggtaaactagaagtaacttgtccacaaccctcagttatgatacttatgtgcgtgtttttttttccaaagtttttcccaaggagaagatacaaatatatggtagctattgtttaaaaatgattgatttacttgcagatttttcagaggatgttatgtctttgtcattcattaaatgttcaaaattgtagttttaccaaatctgaagtgccatcagttataagaatcaccattattttatgttccattaagaaaaacacaataaaacatgacactgctttttttgttacttgaaattttcatatttattggagagctcttttagatgtttttaaatacagatttttatttaaccctcttgcatatacatataaaataacaaaaaaataaaatattgagatatcatcaagaaatttctacagcttcacattcaaactcttcagcactttcagagctattgatatgcatatgtccacctagtaccatcttctctgctttcagaattattggtaaggctgcatttcctgagtgctctaccacacttatgtctggattttttttacccagctacagacccacactcctgcaagatttgatacccttctatttggcaaaactcagtttcacttttctttcagtttaatcacaggtccttagaagatcggacctgtgattctattcaaagtcagaaagagatttctcacaaattgacgtcatattaacatgtcaatatgaaaattaattgtttggtaaaccagaagtgacctgtctgaagccctcaattgtggtatttgtgtgtttgttttttctttttcaagattctttttaaagaaaatatatggtagctgttgtttaacatttatctacttacagagcgttcagaggatgttatatgtttattaagtgctcaatactgtattttaacctaatctgaattttaatcataatcctgtacaatgcatggattctggttgctttgaaatggttctgttcaaaggacttatcaatgtctcttgctttgagatgtattgcttggtgtgtagtagcacaaacgtaccaccaataatgtacctaattcaactgaagtgacagtcatatacgcagatatgaccaagttcacatgtgagcaagtaacaactccatgactattgctgcctggctaatagctattatactatcatttgtaaggcacattctgttttctggggtgtcgaaatgtggataaaaaaagatgaattaggaatgattctaacctaagtatgtgttttaataaaaggatctaggcaaaaaaaaaaaaagtaagtcactcctaaatttaatccctgaataatgcagtgtacatgatgatagaggagaagtgtgtttttgataagaagtgactaaattttgtgacaatcttaattttttaggcttttcatttagtcttccaataaagataatttttttctgagttttatcagcagtagaaaaataagacctacatggataagtttgaaattaaacattttgtctcattttataatttttatttttatgaaatcatggcacttacatcatatactcaggtgtgtaaaagcctgctatttgtaactataatccataaacttattgatgatttaataactatcaacaagggcatgggaaaaattcaacatttgataataatcttttaccttaggcatttattctctaagcaaagcagaaataaaggatatgtatcagtgtatactgattgaaataaagctttaaaaatccaagtgatactctgaaattgtcaaaagtttaatggcatgaatccaggattaattcccataacctgtgatgatctagtcatcttctgtagctacatagtactcctaatgttaagattaccaaattcagcaataaagccaaaatcaaaactgccttctgtcacatatagctgttaagtaaactacacaaaatcagagttgctgtttacatacatcatgatgccgtctggacttgagcaccttggcggctcaggattaaggcacctcagtctagcctagcagagttacaatggagagaagtgaaaactcattagtagctcaaaacaagctaaaggatttcagatgctctttttcttgttcatctaaatcaagtcttcatctgtgtcaagaactaaattgttaaagacctttttaatttgcttagtgcaagaaaaataatagcaaccatatatctagttaacttgagtcttctgtgcctctaaaattttgtttagagaaagcctatttctattgaggttgaggaacacaattctaatacttagtaaaattattaacattc

SEQ ID NO: 2378 - protein, 616 aa, Homo sapiens; identical to SEQ ID NO: 2370

SEQ ID NO: 2379 - DNA, 2311 bp, Homo sapiens
gtgctgtgcggcgcggtctcagggaaggtggggctatggcagctgctagggaccctccggaagtatcgctgcgagaagccacccagcgaaaattgcggaggttttccgagctaagaggcaaacttgtagcacgtggagaattctgggacatagttgcaataacagcggctgatgaaaaacaggaacttgcttacaaccaacagctgtcagaaaagctgaaaagaaaggagttaccccttggagttcaatatcacgtttttgtggatcctgctggagccaaaattggaaatggaggatcaacactttgtgcccttcaatgtttggaaaagctatatggagataaatggaattcttttaccatcttattaattcactctgtatctttccagatataccagaatgctctggcaaaacatcctgtatcattcaaagcatactggattcaagatgttctgtggcacctggctcagttgtggagtattccagattggggcctgatgtttcagttggggaaaactgcattattagtggttcttacatcctaacaaaagctgccctccccgcacattcttttgtatgttccttaagcttaaagatgaatagatgcttaaagtatgcaactatggcatttggagtgcaagacaacttgaaaaagagtgtgaaaacattgtcagatataaagttacttcaattctttggagtctgtttcctgtcatgcttagatgtttggaatcttaaagttacagaggaactgttctctggtaacaagacatgtctgagtttgtggactgcacgcattttcccagtttgttcttctttgagtgactcagttataacatccctaaagatgttaaatgctgttaagaacaagtcagcattcagcctgaatagctataagttgctgtccattgaagaaatgcttatctacaaagatgtagaagatatgataacttacagggaacaaatttttctagaaatcagtttaaaaagcagtttgatgtagagatattttaaatattgtacactttgcctttttgagtaacattccagagataggtattttttgtaggctgtttcactgaactcagttaatgaaaactgtattaacataattgttgtagcataatattaatagtgcaaaagtacatataagtcattttgatgaaaaatattccaagactaagttgagaaaagagatactattttggatgtgtatcagtatttttgtttttaataatgattgatttgtggagcattgttttttcacataattagttttaaaggtaattttctaagcatacctttggaatttttccatcttttttgaggcttttggtccagtgaagttctaagtattcactggcacttctctcctcaactgtaattctatttttaataataaaaatggcatactgtagggtcttcagagtagtgtaggaatactgtagaaatactttttcagaaacgaatccatagctgacaaattcactcagtgcccaatatattgtgattattttcgttgataaagaactagatacaaagacctctgaaattgatgataaaatttgtatctcattaattttatcaaaatgaaactaaaagtacatatgtattatacacttgaacatgtgtttgtatatctttaaaattttcctttatgttccattccataggaaaacacacatatgcacacaaaactcagttatctgtggggaaagtggtagtaataattgagattcatcaataatcatataatttcactatagacattacttgcattatctcctatcagtccttctaacaaaacttcaattaccagatgaactgactttagttttcatcttattttttgtccacatgctggtgatgctgagaaacaataattggcccaaatgcagacatcaagaagcaggcaggaaaatggaaaaactgagataatacacaggtgataaacagtttcgagaaaataaaaattggctagaatctcaagttatgtgtttctatattggtataagcatataagtgaaaagtcttataagtgtaatagagaaaagatttgtcagtgtgtttttttaaatgaaataactagtctgtgctactttatgtcaatataaaaattggtaaactagaagtaacttgtccacaaccctcagttatgatacttatgtgcgtgtttttttttccaaagtttttcccaaggagaagatacaaatatatggtagctattgtttaaaaatgattgatttacttgcagatttttcagaggatgttatgtctttgtcattcattaaatgttcaaaattgtagtttt

SEQ ID NO: 2380 - protein, 219 aa, Homo sapiens
MEFFYHLINSLCIFPDIPECSGKTSCIIQSILDSRCSVAPGSVVEYSRLGPDVSVGENCIISGSYILTKAALPAHSFVCSLSLKMNRCLKYATMAFGVQDNLKKSVKTLSDIKLLQFFGVCFLSCLDVWNLKVTEELFSGNKTCLSLWTARIFPVCSSLSDSVITSLKMLNAVKNKSAFSLNSYKLLSIEEMLIYKDVEDMITYREQIFLEISLKSSLM

SEQ ID NO: 2381 - DNA, 2366 bp, Homo sapiens
gtgctgtgcggcgcggtctcagggaaggtggggctatggcagctgctagggaccctccggaagtatcgctgcgagaagccacccagcgaaaattgcggaggttttccgagctaagaggcaaacttgtagcacgtggagaattctgggacatagttgcaataacagcggctgatgaaaaacaggaacttgcttacaaccaacagctgtcagaaaagctgaaaagaaaggagttaccccttggagttcaatatcacgtttttgtggatcctgctggagccaaaattggaaatggaggatcaacactttgtgcccttcaatgtttggaaaagctatatggagataaatggaattcttttaccatcttattaattcactctggtggctacagtcaacgacttccaaatgcaagtgctctgggaaaaattttcactgctttacctcttgatataccagaatgctctggcaaaacatcctgtatcattcaaagcatactggattcaagatgttctgtggcacctggctcagttgtggagtattccagattggggcctgatgtttcagttggggaaaactgcattattagtggttcttacatcctaacaaaagctgccctccccgcacattcttttgtatgttccttaagcttaaagatgaatagatgcttaaagtatgcaactatggcatttggagtgcaagacaacttgaaaaagagtgtgaaaacattgtcagatataaagttacttcaattctttggagtctgtttcctgtcatgcttagatgtttggaatcttaaagttacagaggaactgttctctggtaacaagacatgtctgagtttgtggactgcacgcattttcccagtttgttcttctttgagtgactcagttataacatccctaaagatgttaaatgctgttaagaacaagtcagcattcagcctgaatagctataagttgctgtccattgaagaaatgcttatctacaaagatgtagaagatatgataacttacagggaacaaatttttctagaaatcagtttaaaaagcagtttgatgtagagatattttaaatattgtacactttgcctttttgagtaacattccagagataggtattttttgtaggctgtttcactgaactcagttaatgaaaactgtattaacataattgttgtagcataatattaatagtgcaaaagtacatataagtcattttgatgaaaaatattccaagactaagttgagaaaagagatactattttggatgtgtatcagtatttttgtttttaataatgattgatttgtggagcattgttttttcacataattagttttaaaggtaattttctaagcatacctttggaatttttccatcttttttgaggcttttggtccagtgaagttctaagtattcactggcacttctctcctcaactgtaattctatttttaataataaaaatggcatactgtagggtcttcagagtagtgtaggaatactgtagaaatactttttcagaaacgaatccatagctgacaaattcactcagtgcccaatatattgtgattattttcgttgataaagaactagatacaaagacctctgaaattgatgataaaatttgtatctcattaattttatcaaaatgaaactaaaagtacatatgtattatacacttgaacatgtgtttgtatatctttaaaattttcctttatgttccattccataggaaaacacacatatgcacacaaaactcagttatctgtggggaaagtggtagtaataattgagattcatcaataatcatataatttcactatagacattacttgcattatctcctatcagtccttctaacaaaacttcaattaccagatgaactgactttagttttcatcttattttttgtccacatgctggtgatgctgagaaacaataattggcccaaatgcagacatcaagaagcaggcaggaaaatggaaaaactgagataatacacaggtgataaacagtttcgagaaaataaaaattggctagaatctcaagttatgtgtttctatattggtataagcatataagtgaaaagtcttataagtgtaatagagaaaagatttgtcagtgtgtttttttaaatgaaataactagtctgtgctactttatgtcaatataaaaattggtaaactagaagtaacttgtccacaaccctcagttatgatacttatgtgcgtgtttttttttccaaagtttttcccaaggagaagatacaaatatatggtagctattgtttaaaaatgattgatttacttgcagatttttcagaggatgttatgtctttgtcattcattaaatgttcaaaattgtagtttt

SEQ ID NO: 2382 - protein, 340 aa, Homo sapiens
MAAARDPPEVSLREATQRKLRRFSELRGKLVARGEFWDIVAITAADEKQELAYNQQLSEKLKRKELPLGVQYHVFVDPAGAKIGNGGSTLCALQCLEKLYGDKWNSFTILLIHSGGYSQRLPNASALGKIFTALPLDIPECSGKTSCIIQSILDSRCSVAPGSVVEYSRLGPDVSVGENCIISGSYILTKAALPAHSFVCSLSLKMNRCLKYATMAFGVQDNLKKSVKTLSDIKLLQFFGVCFLSCLDVWNLKVTEELFSGNKTCLSLWTARIFPVCSSLSDSVITSLKMLNAVKNKSAFSLNSYKLLSIEEMLIYKDVEDMITYREQIFLEISLKSSLM

SEQ ID NO: 2383 - DNA, 3255 bp, Homo sapiens
gtgctgtgcggcgcggtctcagggaaggtggggctatggcagctgctagggaccctccggaagtatcgctgcgagaagccacccagcgaaaattgcggaggttttccgagctaagaggcaaacttgtagcacgtggagaattctgggacatagttgcaataacagcggctgatgaaaaacaggaacttgcttacaaccaacagctgtcagaaaagctgaaaagaaaggagttaccccttggagttcaatatcacgtttttgtggatcctgctggagccaaaattgtagagacggggtttcaccatgttagccaggacggtctgtatctcctgacctcgtgatccacctgcctcggcctcccaaagtgctgggattacaggcgtgatattatttccatagatgagaatctgaggaaatggaggatcaacactttgtgcccttcaatgtttggaaaagctatatggagataaatggaattcttttaccatcttattaattcactctggtggctacagtcaacgacttccaaatgcaagtgctctgggaaaaattttcactgctttacctcttggtaaccccatttatcagatgctagaattaaaactagccatgtacattgatttccccttaaatatgaatcctggaattctggttacctgtgcagatgatattgaactttatagtattggagaatttgagtttattaggtttgacaaacctggctttactgctttagctcatccttctagtttgacgataggtaccacacatggagtatttgtcttagatccttttgatgatttaaaacatagagaccttgaatacaggtcttgccatcgtttccttcataagcccagcatagaaaagatgtatcagtttaatgctgtgtgtagacctggaaatttttgtcaacaggactttgctgggggtgacattgccgatcttaaattagactctgactatgtctacacagatagcctattttatatggatcataaatcagcaaaaatgttacttgctttttatgaaaaaataggcacactgagctgtgaaatagatgcctatggtgactttctgcaggctttgggacctggagcaactgtggagtacaccagaaacacatcaaatgtcattaaagaagagtcagagttggtagaaatgaggcagagaatatttcatcttcttaaaggaacatcactaaatgttgttgttcttaataactccaaattttatcacattggaacaaccgaagaatatttgttttactttacctcagataacagtttaaagtcagagctcggcttacagtccataacttttagtatctttccagatataccagaatgctctggcaaaacatcctgtatcattcaaagcatactggattcaagatgttctgtggcacctggctcagttgtggagtattccagattggggcctgatgtttcagttggggaaaactgcattattagtggttcttacatcctaacaaaagctgccctccccgcacattcttttgtatgttccttaagcttaaagatgaatagatgcttaaagtatgcaactatggcatttggagtgcaagacaacttgaaaaagagtgtgaaaacattgtcagatataaagttacttcaattctttggagtctgtttcctgtcatgcttagatgtttggaatcttaaagttacagaggaactgttctctggtaacaagacatgtctgagtttgtggactgcacgcattttcccagtttgttcttctttgagtgactcagttataacatccctaaagatgttaaatgctgttaagaacaagtcagcattcagcctgaatagctataagttgctgtccattgaagaaatgcttatctacaaagatgtagaagatatgataacttacagggaacaaatttttctagaaatcagtttaaaaagcagtttgatgtagagatattttaaatattgtacactttgcctttttgagtaacattccagagataggtattttttgtaggctgtttcactgaactcagttaatgaaaactgtattaacataattgttgtagcataatattaatagtgcaaaagtacatataagtcattttgatgaaaaatattccaagactaagttgagaaaagagatactattttggatgtgtatcagtatttttgtttttaataatgattgatttgtggagcattgttttttcacataattagttttaaaggtaattttctaagcatacctttggaatttttccatcttttttgaggcttttggtccagtgaagttctaagtattcactggcacttctctcctcaactgtaattctatttttaataataaaaatggcatactgtagggtcttcagagtagtgtaggaatactgtagaaatactttttcagaaacgaatccatagctgacaaattcactcagtgcccaatatattgtgattattttcgttgataaagaactagatacaaagacctctgaaattgatgataaaatttgtatctcattaattttatcaaaatgaaactaaaagtacatatgtattatacacttgaacatgtgtttgtatatctttaaaattttcctttatgttccattccataggaaaacacacatatgcacacaaaactcagttatctgtggggaaagtggtagtaataattgagattcatcaataatcatataatttcactatagacattacttgcattatctcctatcagtccttctaacaaaacttcaattaccagatgaactgactttagttttcatcttattttttgtccacatgctggtgatgctgagaaacaataattggcccaaatgcagacatcaagaagcaggcaggaaaatggaaaaactgagataatacacaggtgataaacagtttcgagaaaataaaaattggctagaatctcaagttatgtgtttctatattggtataagcatataagtgaaaagtcttataagtgtaatagagaaaagatttgtcagtgtgtttttttaaatgaaataactagtctgtgctactttatgtcaatataaaaattggtaaactagaagtaacttgtccacaaccctcagttatgatacttatgtgcgtgtttttttttccaaagtttttcccaaggagaagatacaaatatatggtagctattgtttaaaaatgattgatttacttgcagatttttcagaggatgttatgtctttgtcattcattaaatgttcaaaattgtagtttt

SEQ ID NO: 2384 - protein, 101 aa, Homo sapiens
MAAARDPPEVSLREATQRKLRRFSELRGKLVARGEFWDIVAITAADEKQELAYNQQLSEKLKRKELPLGVQYHVFVDPAGAKIVETGFHHVSQDGLYLLTS

SEQ ID NO: 2385 - DNA, 2326 bp, Homo sapiens
gtgctgtgcggcgcggtctcagggaaggtggggctatggcagctgctagggaccctccggaagtatcgctgcgagaagccacccagcgaaaattgcggaggttttccgagctaagaggcaaacttgtagcacgtggagaattctgggacatagttgcaataacagcggctgatgaaaaacaggaacttgcttacaaccaacagctgtcagaaaagctgaaaagaaaggagttaccccttggagttcaatatcacgtttttgtggatcctgctggagccaaaattggaaatggaggatcaacactttgtgcccttcaatgtttggaaaagctatatggagataaatggaattcttttaccatcttattaattcactctggtggctacagtcaacgacttccaaatatataccagaatgctctggcaaaacatcctgtatcattcaaagcatactggattcaagatgttctgtggcacctggctcagttgtggagtattccagattggggcctgatgtttcagttggggaaaactgcattattagtggttcttacatcctaacaaaagctgccctccccgcacattcttttgtatgttccttaagcttaaagatgaatagatgcttaaagtatgcaactatggcatttggagtgcaagacaacttgaaaaagagtgtgaaaacattgtcagatataaagttacttcaattctttggagtctgtttcctgtcatgcttagatgtttggaatcttaaagttacagaggaactgttctctggtaacaagacatgtctgagtttgtggactgcacgcattttcccagtttgttcttctttgagtgactcagttataacatccctaaagatgttaaatgctgttaagaacaagtcagcattcagcctgaatagctataagttgctgtccattgaagaaatgcttatctacaaagatgtagaagatatgataacttacagggaacaaatttttctagaaatcagtttaaaaagcagtttgatgtagagatattttaaatattgtacactttgcctttttgagtaacattccagagataggtattttttgtaggctgtttcactgaactcagttaatgaaaactgtattaacataattgttgtagcataatattaatagtgcaaaagtacatataagtcattttgatgaaaaatattccaagactaagttgagaaaagagatactattttggatgtgtatcagtatttttgtttttaataatgattgatttgtggagcattgttttttcacataattagttttaaaggtaattttctaagcatacctttggaatttttccatcttttttgaggcttttggtccagtgaagttctaagtattcactggcacttctctcctcaactgtaattctatttttaataataaaaatggcatactgtagggtcttcagagtagtgtaggaatactgtagaaatactttttcagaaacgaatccatagctgacaaattcactcagtgcccaatatattgtgattattttcgttgataaagaactagatacaaagacctctgaaattgatgataaaatttgtatctcattaattttatcaaaatgaaactaaaagtacatatgtattatacacttgaacatgtgtttgtatatctttaaaattttcctttatgttccattccataggaaaacacacatatgcacacaaaactcagttatctgtggggaaagtggtagtaataattgagattcatcaataatcatataatttcactatagacattacttgcattatctcctatcagtccttctaacaaaacttcaattaccagatgaactgactttagttttcatcttattttttgtccacatgctggtgatgctgagaaacaataattggcccaaatgcagacatcaagaagcaggcaggaaaatggaaaaactgagataatacacaggtgataaacagtttcgagaaaataaaaattggctagaatctcaagttatgtgtttctatattggtataagcatataagtgaaaagtcttataagtgtaatagagaaaagatttgtcagtgtgtttttttaaatgaaataactagtctgtgctactttatgtcaatataaaaattggtaaactagaagtaacttgtccacaaccctcagttatgatacttatgtgcgtgtttttttttccaaagtttttcccaaggagaagatacaaatatatggtagctattgtttaaaaatgattgatttacttgcagatttttcagaggatgttatgtctttgtcattcattaaatgttcaaaattgtagtttt

SEQ ID NO: 2386 - protein, 224 aa, Homo sapiens
MEFFYHLINSLWWLQSTTSKYIPECSGKTSCIIQSILDSRCSVAPGSVVEYSRLGPDVSVGENCIISGSYILTKAALPAHSFVCSLSLKMNRCLKYATMAFGVQDNLKKSVKTLSDIKLLQFFGVCFLSCLDVWNLKVTEELFSGNKTCLSLWTARIFPVCSSLSDSVITSLKMLNAVKNKSAFSLNSYKLLSIEEMLIYKDVEDMITYREQIFLEISLKSSLM

SEQ ID NO: 2387 - DNA, 2464 bp, Homo sapiens
gtgctgtgcggcgcggtctcagggaaggtggggctatggcagctgctagggaccctccggaagtatcgctgcgagaagccacccagcgaaaattgcggaggttttccgagctaagaggcaaacttgtagcacgtggagaattctgggacatagttgcaataacagcggctgatgaaaaacaggaacttgcttacaaccaacagctgtcagaaaagctgaaaagaaaggagttaccccttggagttcaatatcacgtttttgtggatcctgctggagccaaaattggaaatggaggatcaacactttgtgcccttcaatgtttggaaaagctatatggagataaatggaattcttttaccatcttattaattcactctggtggctacagtcaacgacttccaaatgcaagtgctctgggaaaaattttcactgctttacctcttgatataccagaatgctctggcaaaacatcctgtatcattcaaagcatactggattcaagatgttctgtggcacctggctcagttgtggagtattccagattggggcctgatgtttcagttggggaaaactgcattattagtggttcttacatcctaacaaaagctgccctccccgcacattcttttgtatgttccttaagcttaaagatgaatagatgcttaaagtatgcaactatggcatttggagtgcaagacaacttgaaaaagagtgtgaaaacattgtcagatataaagttacttcaattctttggagtctgtttcctgtcatgcttagatgtttggaatcttaaagttacagaggaactgttctctggtaacaagacatgtctgagtttgtggactgcacgcattttcccagtttgttcttctttgagtgactcagttataacatccctaaagatgttaaatgctgttaagaacaagtcagcattcagcctgaatagctataagttgctgtccattgaagaaatgcttatctacaaagatgtagaagatatgataacttacagggaacaaatttttctagaaatcagtttaaaaagcagtttgatgtagagatattttaaatattgtacactttgcctttttgagtaacattccagagataggtattttttgtaggctgtttcactgaactcagttaatgaaaactgtattaacataattgttgtagcataatattaatagtgcaaaagtacatataagtcattttgatgaaaaatattccaagactaagttgagaaaagagatactattttggatgtgtatcagtatttttgtttttaataatgattgatttgtggagcattgttttttcacataattagttttaaaggtaattttctaagcatacctttggaatttttccatcttttttgaggcttttggtccagtgaagttctaagtattcactggcacttctctcctcaactgtaattctatttttaataataaaaatggcatactgtagggtcttcagagtagtgtaggaatactgtagaaatactttttcagaaacgaatccatagctgacaaattcactcagtgcccaatatattgtgattattttcgttgataaagaactagatacaaagacctctgaaattgatgataaaatttgtatctcattaattttatcaaaatgaaactaaaagtacatatgtattatacacttgaacatgtgtttgtatatctttaaaattttcctttatgttccattccataggaaaacacacatatgcacacaaaactcagttatctgtggggaaagtggtagtaataattgagattcatcaataatcatataatttcactatagacattacttgcattatctcctatcagtccttctaacaaaacttcaattaccagatgaactgactttagttttcatcttattttttgtccacatgctggtgatgctgagaaacaataattggcccaaatgcagacatcaagaagcaggcaggaaaatggaaaaactgagataatacacaggtgataaacagtttcgagaaaataaaaattggctagaatctcaagttatgtgtttctatattggtataagcatataagtgaaaagtcttataagtgtaatagagaaaagatttgtcagtgtgtttttttaaatgaaataactagtctgtgctactttatgtcaatataaaaattggtaaactagaagtaacttgtccacaaccctcagttatgatacttatgtgcgtgtttttttttccaaagtttttcccaaggagaagatacaaatatatggtagctattgtttaaaaatgattgatttacttgcagatttttcagaggatgttatgtctttgtcattcattaaatgttcaaaattgtagttttaccaaatctgaagtgccatcagttataagaatcaccattattttatgttccattaagaaaaacacaataaaacatgacactgctttttttgttacttg

SEQ ID NO: 2388 - protein, 340 aa, Homo sapiens; identical to SEQ ID NO: 2382

SEQ ID NO: 2389 - DNA, 3353 bp, Homo sapiens
gtgctgtgcggcgcggtctcagggaaggtggggctatggcagctgctagggaccctccggaagtatcgctgcgagaagccacccagcgaaaattgcggaggttttccgagctaagaggcaaacttgtagcacgtggagaattctgggacatagttgcaataacagcggctgatgaaaaacaggaacttgcttacaaccaacagctgtcagaaaagctgaaaagaaaggagttaccccttggagttcaatatcacgtttttgtggatcctgctggagccaaaattgtagagacggggtttcaccatgttagccaggacggtctgtatctcctgacctcgtgatccacctgcctcggcctcccaaagtgctgggattacaggcgtgatattatttccatagatgagaatctgaggaaatggaggatcaacactttgtgcccttcaatgtttggaaaagctatatggagataaatggaattcttttaccatcttattaattcactctggtggctacagtcaacgacttccaaatgcaagtgctctgggaaaaattttcactgctttacctcttggtaaccccatttatcagatgctagaattaaaactagccatgtacattgatttccccttaaatatgaatcctggaattctggttacctgtgcagatgatattgaactttatagtattggagaatttgagtttattaggtttgacaaacctggctttactgctttagctcatccttctagtttgacgataggtaccacacatggagtatttgtcttagatccttttgatgatttaaaacatagagaccttgaatacaggtcttgccatcgtttccttcataagcccagcatagaaaagatgtatcagtttaatgctgtgtgtagacctggaaatttttgtcaacaggactttgctgggggtgacattgccgatcttaaattagactctgactatgtctacacagatagcctattttatatggatcataaatcagcaaaaatgttacttgctttttatgaaaaaataggcacactgagctgtgaaatagatgcctatggtgactttctgcaggctttgggacctggagcaactgtggagtacaccagaaacacatcaaatgtcattaaagaagagtcagagttggtagaaatgaggcagagaatatttcatcttcttaaaggaacatcactaaatgttgttgttcttaataactccaaattttatcacattggaacaaccgaagaatatttgttttactttacctcagataacagtttaaagtcagagctcggcttacagtccataacttttagtatctttccagatataccagaatgctctggcaaaacatcctgtatcattcaaagcatactggattcaagatgttctgtggcacctggctcagttgtggagtattccagattggggcctgatgtttcagttggggaaaactgcattattagtggttcttacatcctaacaaaagctgccctccccgcacattcttttgtatgttccttaagcttaaagatgaatagatgcttaaagtatgcaactatggcatttggagtgcaagacaacttgaaaaagagtgtgaaaacattgtcagatataaagttacttcaattctttggagtctgtttcctgtcatgcttagatgtttggaatcttaaagttacagaggaactgttctctggtaacaagacatgtctgagtttgtggactgcacgcattttcccagtttgttcttctttgagtgactcagttataacatccctaaagatgttaaatgctgttaagaacaagtcagcattcagcctgaatagctataagttgctgtccattgaagaaatgcttatctacaaagatgtagaagatatgataacttacagggaacaaatttttctagaaatcagtttaaaaagcagtttgatgtagagatattttaaatattgtacactttgcctttttgagtaacattccagagataggtattttttgtaggctgtttcactgaactcagttaatgaaaactgtattaacataattgttgtagcataatattaatagtgcaaaagtacatataagtcattttgatgaaaaatattccaagactaagttgagaaaagagatactattttggatgtgtatcagtatttttgtttttaataatgattgatttgtggagcattgttttttcacataattagttttaaaggtaattttctaagcatacctttggaatttttccatcttttttgaggcttttggtccagtgaagttctaagtattcactggcacttctctcctcaactgtaattctatttttaataataaaaatggcatactgtagggtcttcagagtagtgtaggaatactgtagaaatactttttcagaaacgaatccatagctgacaaattcactcagtgcccaatatattgtgattattttcgttgataaagaactagatacaaagacctctgaaattgatgataaaatttgtatctcattaattttatcaaaatgaaactaaaagtacatatgtattatacacttgaacatgtgtttgtatatctttaaaattttcctttatgttccattccataggaaaacacacatatgcacacaaaactcagttatctgtggggaaagtggtagtaataattgagattcatcaataatcatataatttcactatagacattacttgcattatctcctatcagtccttctaacaaaacttcaattaccagatgaactgactttagttttcatcttattttttgtccacatgctggtgatgctgagaaacaataattggcccaaatgcagacatcaagaagcaggcaggaaaatggaaaaactgagataatacacaggtgataaacagtttcgagaaaataaaaattggctagaatctcaagttatgtgtttctatattggtataagcatataagtgaaaagtcttataagtgtaatagagaaaagatttgtcagtgtgtttttttaaatgaaataactagtctgtgctactttatgtcaatataaaaattggtaaactagaagtaacttgtccacaaccctcagttatgatacttatgtgcgtgtttttttttccaaagtttttcccaaggagaagatacaaatatatggtagctattgtttaaaaatgattgatttacttgcagatttttcagaggatgttatgtctttgtcattcattaaatgttcaaaattgtagttttaccaaatctgaagtgccatcagttataagaatcaccattattttatgttccattaagaaaaacacaataaaacatgacactgctttttttgttacttg

SEQ ID NO: 2390 - protein, 101 aa, Homo sapiens; identical to SEQ ID NO: 2384

SEQ ID NO: 2391 - DNA, 2409 bp, Homo sapiens
gtgctgtgcggcgcggtctcagggaaggtggggctatggcagctgctagggaccctccggaagtatcgctgcgagaagccacccagcgaaaattgcggaggttttccgagctaagaggcaaacttgtagcacgtggagaattctgggacatagttgcaataacagcggctgatgaaaaacaggaacttgcttacaaccaacagctgtcagaaaagctgaaaagaaaggagttaccccttggagttcaatatcacgtttttgtggatcctgctggagccaaaattggaaatggaggatcaacactttgtgcccttcaatgtttggaaaagctatatggagataaatggaattcttttaccatcttattaattcactctgtatctttccagatataccagaatgctctggcaaaacatcctgtatcattcaaagcatactggattcaagatgttctgtggcacctggctcagttgtggagtattccagattggggcctgatgtttcagttggggaaaactgcattattagtggttcttacatcctaacaaaagctgccctccccgcacattcttttgtatgttccttaagcttaaagatgaatagatgcttaaagtatgcaactatggcatttggagtgcaagacaacttgaaaaagagtgtgaaaacattgtcagatataaagttacttcaattctttggagtctgtttcctgtcatgcttagatgtttggaatcttaaagttacagaggaactgttctctggtaacaagacatgtctgagtttgtggactgcacgcattttcccagtttgttcttctttgagtgactcagttataacatccctaaagatgttaaatgctgttaagaacaagtcagcattcagcctgaatagctataagttgctgtccattgaagaaatgcttatctacaaagatgtagaagatatgataacttacagggaacaaatttttctagaaatcagtttaaaaagcagtttgatgtagagatattttaaatattgtacactttgcctttttgagtaacattccagagataggtattttttgtaggctgtttcactgaactcagttaatgaaaactgtattaacataattgttgtagcataatattaatagtgcaaaagtacatataagtcattttgatgaaaaatattccaagactaagttgagaaaagagatactattttggatgtgtatcagtatttttgtttttaataatgattgatttgtggagcattgttttttcacataattagttttaaaggtaattttctaagcatacctttggaatttttccatcttttttgaggcttttggtccagtgaagttctaagtattcactggcacttctctcctcaactgtaattctatttttaataataaaaatggcatactgtagggtcttcagagtagtgtaggaatactgtagaaatactttttcagaaacgaatccatagctgacaaattcactcagtgcccaatatattgtgattattttcgttgataaagaactagatacaaagacctctgaaattgatgataaaatttgtatctcattaattttatcaaaatgaaactaaaagtacatatgtattatacacttgaacatgtgtttgtatatctttaaaattttcctttatgttccattccataggaaaacacacatatgcacacaaaactcagttatctgtggggaaagtggtagtaataattgagattcatcaataatcatataatttcactatagacattacttgcattatctcctatcagtccttctaacaaaacttcaattaccagatgaactgactttagttttcatcttattttttgtccacatgctggtgatgctgagaaacaataattggcccaaatgcagacatcaagaagcaggcaggaaaatggaaaaactgagataatacacaggtgataaacagtttcgagaaaataaaaattggctagaatctcaagttatgtgtttctatattggtataagcatataagtgaaaagtcttataagtgtaatagagaaaagatttgtcagtgtgtttttttaaatgaaataactagtctgtgctactttatgtcaatataaaaattggtaaactagaagtaacttgtccacaaccctcagttatgatacttatgtgcgtgtttttttttccaaagtttttcccaaggagaagatacaaatatatggtagctattgtttaaaaatgattgatttacttgcagatttttcagaggatgttatgtctttgtcattcattaaatgttcaaaattgtagttttaccaaatctgaagtgccatcagttataagaatcaccattattttatgttccattaagaaaaacacaataaaacatgacactgctttttttgttacttg

SEQ ID NO: 2392 - protein, 219 aa, Homo sapiens; identical to SEQ ID NO: 2380

SEQ ID NO: 2393 - DNA, 2424 bp, Homo sapiens
gtgctgtgcggcgcggtctcagggaaggtggggctatggcagctgctagggaccctccggaagtatcgctgcgagaagccacccagcgaaaattgcggaggttttccgagctaagaggcaaacttgtagcacgtggagaattctgggacatagttgcaataacagcggctgatgaaaaacaggaacttgcttacaaccaacagctgtcagaaaagctgaaaagaaaggagttaccccttggagttcaatatcacgtttttgtggatcctgctggagccaaaattggaaatggaggatcaacactttgtgcccttcaatgtttggaaaagctatatggagataaatggaattcttttaccatcttattaattcactctggtggctacagtcaacgacttccaaatatataccagaatgctctggcaaaacatcctgtatcattcaaagcatactggattcaagatgttctgtggcacctggctcagttgtggagtattccagattggggcctgatgtttcagttggggaaaactgcattattagtggttcttacatcctaacaaaagctgccctccccgcacattcttttgtatgttccttaagcttaaagatgaatagatgcttaaagtatgcaactatggcatttggagtgcaagacaacttgaaaaagagtgtgaaaacattgtcagatataaagttacttcaattctttggagtctgtttcctgtcatgcttagatgtttggaatcttaaagttacagaggaactgttctctggtaacaagacatgtctgagtttgtggactgcacgcattttcccagtttgttcttctttgagtgactcagttataacatccctaaagatgttaaatgctgttaagaacaagtcagcattcagcctgaatagctataagttgctgtccattgaagaaatgcttatctacaaagatgtagaagatatgataacttacagggaacaaatttttctagaaatcagtttaaaaagcagtttgatgtagagatattttaaatattgtacactttgcctttttgagtaacattccagagataggtattttttgtaggctgtttcactgaactcagttaatgaaaactgtattaacataattgttgtagcataatattaatagtgcaaaagtacatataagtcattttgatgaaaaatattccaagactaagttgagaaaagagatactattttggatgtgtatcagtatttttgtttttaataatgattgatttgtggagcattgttttttcacataattagttttaaaggtaattttctaagcatacctttggaatttttccatcttttttgaggcttttggtccagtgaagttctaagtattcactggcacttctctcctcaactgtaattctatttttaataataaaaatggcatactgtagggtcttcagagtagtgtaggaatactgtagaaatactttttcagaaacgaatccatagctgacaaattcactcagtgcccaatatattgtgattattttcgttgataaagaactagatacaaagacctctgaaattgatgataaaatttgtatctcattaattttatcaaaatgaaactaaaagtacatatgtattatacacttgaacatgtgtttgtatatctttaaaattttcctttatgttccattccataggaaaacacacatatgcacacaaaactcagttatctgtggggaaagtggtagtaataattgagattcatcaataatcatataatttcactatagacattacttgcattatctcctatcagtccttctaacaaaacttcaattaccagatgaactgactttagttttcatcttattttttgtccacatgctggtgatgctgagaaacaataattggcccaaatgcagacatcaagaagcaggcaggaaaatggaaaaactgagataatacacaggtgataaacagtttcgagaaaataaaaattggctagaatctcaagttatgtgtttctatattggtataagcatataagtgaaaagtcttataagtgtaatagagaaaagatttgtcagtgtgtttttttaaatgaaataactagtctgtgctactttatgtcaatataaaaattggtaaactagaagtaacttgtccacaaccctcagttatgatacttatgtgcgtgtttttttttccaaagtttttcccaaggagaagatacaaatatatggtagctattgtttaaaaatgattgatttacttgcagatttttcagaggatgttatgtctttgtcattcattaaatgttcaaaattgtagttttaccaaatctgaagtgccatcagttataagaatcaccattattttatgttccattaagaaaaacacaataaaacatgacactgctttttttgttacttg

SEQ ID NO: 2394 - protein, 224 aa, Homo sapiens; identical to SEQ ID NO: 2386

SEQ ID NO: 2395 - DNA, 4426 bp, Homo sapiens
gtgctgtgcggcgcggtctcagggaaggtggggctatggcagctgctagggaccctccggaagtatcgctgcgagaagccacccagcgaaaattgcggaggttttccgagctaagaggcaaacttgtagcacgtggagaattctgggacatagttgcaataacagcggctgatgaaaaacaggaacttgcttacaaccaacagctgtcagaaaagctgaaaagaaaggagttaccccttggagttcaatatcacgtttttgtggatcctgctggagccaaaattggaaatggaggatcaacactttgtgcccttcaatgtttggaaaagctatatggagataaatggaattcttttaccatcttattaattcactctgtatctttccagatataccagaatgctctggcaaaacatcctgtatcattcaaagcatactggattcaagatgttctgtggcacctggctcagttgtggagtattccagattggggcctgatgtttcagttggggaaaactgcattattagtggttcttacatcctaacaaaagctgccctccccgcacattcttttgtatgttccttaagcttaaagatgaatagatgcttaaagtatgcaactatggcatttggagtgcaagacaacttgaaaaagagtgtgaaaacattgtcagatataaagttacttcaattctttggagtctgtttcctgtcatgcttagatgtttggaatcttaaagttacagaggaactgttctctggtaacaagacatgtctgagtttgtggactgcacgcattttcccagtttgttcttctttgagtgactcagttataacatccctaaagatgttaaatgctgttaagaacaagtcagcattcagcctgaatagctataagttgctgtccattgaagaaatgcttatctacaaagatgtagaagatatgataacttacagggaacaaatttttctagaaatcagtttaaaaagcagtttgatgtagagatattttaaatattgtacactttgcctttttgagtaacattccagagataggtattttttgtaggctgtttcactgaactcagttaatgaaaactgtattaacataattgttgtagcataatattaatagtgcaaaagtacatataagtcattttgatgaaaaatattccaagactaagttgagaaaagagatactattttggatgtgtatcagtatttttgtttttaataatgattgatttgtggagcattgttttttcacataattagttttaaaggtaattttctaagcatacctttggaatttttccatcttttttgaggcttttggtccagtgaagttctaagtattcactggcacttctctcctcaactgtaattctatttttaataataaaaatggcatactgtagggtcttcagagtagtgtaggaatactgtagaaatactttttcagaaacgaatccatagctgacaaattcactcagtgcccaatatattgtgattattttcgttgataaagaactagatacaaagacctctgaaattgatgataaaatttgtatctcattaattttatcaaaatgaaactaaaagtacatatgtattatacacttgaacatgtgtttgtatatctttaaaattttcctttatgttccattccataggaaaacacacatatgcacacaaaactcagttatctgtggggaaagtggtagtaataattgagattcatcaataatcatataatttcactatagacattacttgcattatctcctatcagtccttctaacaaaacttcaattaccagatgaactgactttagttttcatcttattttttgtccacatgctggtgatgctgagaaacaataattggcccaaatgcagacatcaagaagcaggcaggaaaatggaaaaactgagataatacacaggtgataaacagtttcgagaaaataaaaattggctagaatctcaagttatgtgtttctatattggtataagcatataagtgaaaagtcttataagtgtaatagagaaaagatttgtcagtgtgtttttttaaatgaaataactagtctgtgctactttatgtcaatataaaaattggtaaactagaagtaacttgtccacaaccctcagttatgatacttatgtgcgtgtttttttttccaaagtttttcccaaggagaagatacaaatatatggtagctattgtttaaaaatgattgatttacttgcagatttttcagaggatgttatgtctttgtcattcattaaatgttcaaaattgtagttttaccaaatctgaagtgccatcagttataagaatcaccattattttatgttccattaagaaaaacacaataaaacatgacactgctttttttgttacttgaaattttcatatttattggagagctcttttagatgtttttaaatacagatttttatttaaccctcttgcatatacatataaaataacaaaaaaataaaatattgagatatcatcaagaaatttctacagcttcacattcaaactcttcagcactttcagagctattgatatgcatatgtccacctagtaccatcttctctgctttcagaattattggtaaggctgcatttcctgagtgctctaccacacttatgtctggattttttttacccagctacagacccacactcctgcaagatttgatacccttctatttggcaaaactcagtttcacttttctttcagtttaatcacaggtccttagaagatcggacctgtgattctattcaaagtcagaaagagatttctcacaaattgacgtcatattaacatgtcaatatgaaaattaattgtttggtaaaccagaagtgacctgtctgaagccctcaattgtggtatttgtgtgtttgttttttctttttcaagattctttttaaagaaaatatatggtagctgttgtttaacatttatctacttacagagcgttcagaggatgttatatgtttattaagtgctcaatactgtattttaacctaatctgaattttaatcataatcctgtacaatgcatggattctggttgctttgaaatggttctgttcaaaggacttatcaatgtctcttgctttgagatgtattgcttggtgtgtagtagcacaaacgtaccaccaataatgtacctaattcaactgaagtgacagtcatatacgcagatatgaccaagttcacatgtgagcaagtaacaactccatgactattgctgcctggctaatagctattatactatcatttgtaaggcacattctgttttctggggtgtcgaaatgtggataaaaaaagatgaattaggaatgattctaacctaagtatgtgttttaataaaaggatctaggcaaaaaaaaaaaaagtaagtcactcctaaatttaatccctgaataatgcagtgtacatgatgatagaggagaagtgtgtttttgataagaagtgactaaattttgtgacaatcttaattttttaggcttttcatttagtcttccaataaagataatttttttctgagttttatcagcagtagaaaaataagacctacatggataagtttgaaattaaacattttgtctcattttataatttttatttttatgaaatcatggcacttacatcatatactcaggtgtgtaaaagcctgctatttgtaactataatccataaacttattgatgatttaataactatcaacaagggcatgggaaaaattcaacatttgataataatcttttaccttaggcatttattctctaagcaaagcagaaataaaggatatgtatcagtgtatactgattgaaataaagctttaaaaatccaagtgatactctgaaattgtcaaaagtttaatggcatgaatccaggattaattcccataacctgtgatgatctagtcatcttctgtagctacatagtactcctaatgttaagattaccaaattcagcaataaagccaaaatcaaaactgccttctgtcacatatagctgttaagtaaactacacaaaatcagagttgctgtttacatacatcatgatgccgtctggacttgagcaccttggcggctcaggattaaggcacctcagtctagcctagcagagttacaatggagagaagtgaaaactcattagtagctcaaaacaagctaaaggatttcagatgctctttttcttgttcatctaaatcaagtcttcatctgtgtcaagaactaaattgttaaagacctttttaatttgcttagtgcaagaaaaataatagcaaccatatatctagttaacttgagtcttctgtgcctctaaaattttgtttagagaaagcctatttctattgaggttgaggaacacaattctaatacttagtaaaattattaacattc

SEQ ID NO: 2396 - protein, 219 aa, Homo sapiens; identical to SEQ ID NO: 2380

SEQ ID NO: 2397 - DNA, 5370 bp, Homo sapiens
gtgctgtgcggcgcggtctcagggaaggtggggctatggcagctgctagggaccctccggaagtatcgctgcgagaagccacccagcgaaaattgcggaggttttccgagctaagaggcaaacttgtagcacgtggagaattctgggacatagttgcaataacagcggctgatgaaaaacaggaacttgcttacaaccaacagctgtcagaaaagctgaaaagaaaggagttaccccttggagttcaatatcacgtttttgtggatcctgctggagccaaaattgtagagacggggtttcaccatgttagccaggacggtctgtatctcctgacctcgtgatccacctgcctcggcctcccaaagtgctgggattacaggcgtgatattatttccatagatgagaatctgaggaaatggaggatcaacactttgtgcccttcaatgtttggaaaagctatatggagataaatggaattcttttaccatcttattaattcactctggtggctacagtcaacgacttccaaatgcaagtgctctgggaaaaattttcactgctttacctcttggtaaccccatttatcagatgctagaattaaaactagccatgtacattgatttccccttaaatatgaatcctggaattctggttacctgtgcagatgatattgaactttatagtattggagaatttgagtttattaggtttgacaaacctggctttactgctttagctcatccttctagtttgacgataggtaccacacatggagtatttgtcttagatccttttgatgatttaaaacatagagaccttgaatacaggtcttgccatcgtttccttcataagcccagcatagaaaagatgtatcagtttaatgctgtgtgtagacctggaaatttttgtcaacaggactttgctgggggtgacattgccgatcttaaattagactctgactatgtctacacagatagcctattttatatggatcataaatcagcaaaaatgttacttgctttttatgaaaaaataggcacactgagctgtgaaatagatgcctatggtgactttctgcaggctttgggacctggagcaactgtggagtacaccagaaacacatcaaatgtcattaaagaagagtcagagttggtagaaatgaggcagagaatatttcatcttcttaaaggaacatcactaaatgttgttgttcttaataactccaaattttatcacattggaacaaccgaagaatatttgttttactttacctcagataacagtttaaagtcagagctcggcttacagtccataacttttagtatctttccagatataccagaatgctctggcaaaacatcctgtatcattcaaagcatactggattcaagatgttctgtggcacctggctcagttgtggagtattccagattggggcctgatgtttcagttggggaaaactgcattattagtggttcttacatcctaacaaaagctgccctccccgcacattcttttgtatgttccttaagcttaaagatgaatagatgcttaaagtatgcaactatggcatttggagtgcaagacaacttgaaaaagagtgtgaaaacattgtcagatataaagttacttcaattctttggagtctgtttcctgtcatgcttagatgtttggaatcttaaagttacagaggaactgttctctggtaacaagacatgtctgagtttgtggactgcacgcattttcccagtttgttcttctttgagtgactcagttataacatccctaaagatgttaaatgctgttaagaacaagtcagcattcagcctgaatagctataagttgctgtccattgaagaaatgcttatctacaaagatgtagaagatatgataacttacagggaacaaatttttctagaaatcagtttaaaaagcagtttgatgtagagatattttaaatattgtacactttgcctttttgagtaacattccagagataggtattttttgtaggctgtttcactgaactcagttaatgaaaactgtattaacataattgttgtagcataatattaatagtgcaaaagtacatataagtcattttgatgaaaaatattccaagactaagttgagaaaagagatactattttggatgtgtatcagtatttttgtttttaataatgattgatttgtggagcattgttttttcacataattagttttaaaggtaattttctaagcatacctttggaatttttccatcttttttgaggcttttggtccagtgaagttctaagtattcactggcacttctctcctcaactgtaattctatttttaataataaaaatggcatactgtagggtcttcagagtagtgtaggaatactgtagaaatactttttcagaaacgaatccatagctgacaaattcactcagtgcccaatatattgtgattattttcgttgataaagaactagatacaaagacctctgaaattgatgataaaatttgtatctcattaattttatcaaaatgaaactaaaagtacatatgtattatacacttgaacatgtgtttgtatatctttaaaattttcctttatgttccattccataggaaaacacacatatgcacacaaaactcagttatctgtggggaaagtggtagtaataattgagattcatcaataatcatataatttcactatagacattacttgcattatctcctatcagtccttctaacaaaacttcaattaccagatgaactgactttagttttcatcttattttttgtccacatgctggtgatgctgagaaacaataattggcccaaatgcagacatcaagaagcaggcaggaaaatggaaaaactgagataatacacaggtgataaacagtttcgagaaaataaaaattggctagaatctcaagttatgtgtttctatattggtataagcatataagtgaaaagtcttataagtgtaatagagaaaagatttgtcagtgtgtttttttaaatgaaataactagtctgtgctactttatgtcaatataaaaattggtaaactagaagtaacttgtccacaaccctcagttatgatacttatgtgcgtgtttttttttccaaagtttttcccaaggagaagatacaaatatatggtagctattgtttaaaaatgattgatttacttgcagatttttcagaggatgttatgtctttgtcattcattaaatgttcaaaattgtagttttaccaaatctgaagtgccatcagttataagaatcaccattattttatgttccattaagaaaaacacaataaaacatgacactgctttttttgttacttgaaattttcatatttattggagagctcttttagatgtttttaaatacagatttttatttaaccctcttgcatatacatataaaataacaaaaaaataaaatattgagatatcatcaagaaatttctacagcttcacattcaaactcttcagcactttcagagctattgatatgcatatgtccacctagtaccatcttctctgctttcagaattattggtaaggctgcatttcctgagtgctctaccacacttatgtctggattttttttacccagctacagacccacactcctgcaagatttgatacccttctatttggcaaaactcagtttcacttttctttcagtttaatcacaggtccttagaagatcggacctgtgattctattcaaagtcagaaagagatttctcacaaattgacgtcatattaacatgtcaatatgaaaattaattgtttggtaaaccagaagtgacctgtctgaagccctcaattgtggtatttgtgtgtttgttttttctttttcaagattctttttaaagaaaatatatggtagctgttgtttaacatttatctacttacagagcgttcagaggatgttatatgtttattaagtgctcaatactgtattttaacctaatctgaattttaatcataatcctgtacaatgcatggattctggttgctttgaaatggttctgttcaaaggacttatcaatgtctcttgctttgagatgtattgcttggtgtgtagtagcacaaacgtaccaccaataatgtacctaattcaactgaagtgacagtcatatacgcagatatgaccaagttcacatgtgagcaagtaacaactccatgactattgctgcctggctaatagctattatactatcatttgtaaggcacattctgttttctggggtgtcgaaatgtggataaaaaaagatgaattaggaatgattctaacctaagtatgtgttttaataaaaggatctaggcaaaaaaaaaaaaagtaagtcactcctaaatttaatccctgaataatgcagtgtacatgatgatagaggagaagtgtgtttttgataagaagtgactaaattttgtgacaatcttaattttttaggcttttcatttagtcttccaataaagataatttttttctgagttttatcagcagtagaaaaataagacctacatggataagtttgaaattaaacattttgtctcattttataatttttatttttatgaaatcatggcacttacatcatatactcaggtgtgtaaaagcctgctatttgtaactataatccataaacttattgatgatttaataactatcaacaagggcatgggaaaaattcaacatttgataataatcttttaccttaggcatttattctctaagcaaagcagaaataaaggatatgtatcagtgtatactgattgaaataaagctttaaaaatccaagtgatactctgaaattgtcaaaagtttaatggcatgaatccaggattaattcccataacctgtgatgatctagtcatcttctgtagctacatagtactcctaatgttaagattaccaaattcagcaataaagccaaaatcaaaactgccttctgtcacatatagctgttaagtaaactacacaaaatcagagttgctgtttacatacatcatgatgccgtctggacttgagcaccttggcggctcaggattaaggcacctcagtctagcctagcagagttacaatggagagaagtgaaaactcattagtagctcaaaacaagctaaaggatttcagatgctctttttcttgttcatctaaatcaagtcttcatctgtgtcaagaactaaattgttaaagacctttttaatttgcttagtgcaagaaaaataatagcaaccatatatctagttaacttgagtcttctgtgcctctaaaattttgtttagagaaagcctatttctattgaggttgaggaacacaattctaatacttagtaaaattattaacattc

SEQ ID NO: 2398 - protein, 101 aa, Homo sapiens; identical to SEQ ID NO: 2384

SEQ ID NO: 2399 - DNA, 4441 bp, Homo sapiens
gtgctgtgcggcgcggtctcagggaaggtggggctatggcagctgctagggaccctccggaagtatcgctgcgagaagccacccagcgaaaattgcggaggttttccgagctaagaggcaaacttgtagcacgtggagaattctgggacatagttgcaataacagcggctgatgaaaaacaggaacttgcttacaaccaacagctgtcagaaaagctgaaaagaaaggagttaccccttggagttcaatatcacgtttttgtggatcctgctggagccaaaattggaaatggaggatcaacactttgtgcccttcaatgtttggaaaagctatatggagataaatggaattcttttaccatcttattaattcactctggtggctacagtcaacgacttccaaatatataccagaatgctctggcaaaacatcctgtatcattcaaagcatactggattcaagatgttctgtggcacctggctcagttgtggagtattccagattggggcctgatgtttcagttggggaaaactgcattattagtggttcttacatcctaacaaaagctgccctccccgcacattcttttgtatgttccttaagcttaaagatgaatagatgcttaaagtatgcaactatggcatttggagtgcaagacaacttgaaaaagagtgtgaaaacattgtcagatataaagttacttcaattctttggagtctgtttcctgtcatgcttagatgtttggaatcttaaagttacagaggaactgttctctggtaacaagacatgtctgagtttgtggactgcacgcattttcccagtttgttcttctttgagtgactcagttataacatccctaaagatgttaaatgctgttaagaacaagtcagcattcagcctgaatagctataagttgctgtccattgaagaaatgcttatctacaaagatgtagaagatatgataacttacagggaacaaatttttctagaaatcagtttaaaaagcagtttgatgtagagatattttaaatattgtacactttgcctttttgagtaacattccagagataggtattttttgtaggctgtttcactgaactcagttaatgaaaactgtattaacataattgttgtagcataatattaatagtgcaaaagtacatataagtcattttgatgaaaaatattccaagactaagttgagaaaagagatactattttggatgtgtatcagtatttttgtttttaataatgattgatttgtggagcattgttttttcacataattagttttaaaggtaattttctaagcatacctttggaatttttccatcttttttgaggcttttggtccagtgaagttctaagtattcactggcacttctctcctcaactgtaattctatttttaataataaaaatggcatactgtagggtcttcagagtagtgtaggaatactgtagaaatactttttcagaaacgaatccatagctgacaaattcactcagtgcccaatatattgtgattattttcgttgataaagaactagatacaaagacctctgaaattgatgataaaatttgtatctcattaattttatcaaaatgaaactaaaagtacatatgtattatacacttgaacatgtgtttgtatatctttaaaattttcctttatgttccattccataggaaaacacacatatgcacacaaaactcagttatctgtggggaaagtggtagtaataattgagattcatcaataatcatataatttcactatagacattacttgcattatctcctatcagtccttctaacaaaacttcaattaccagatgaactgactttagttttcatcttattttttgtccacatgctggtgatgctgagaaacaataattggcccaaatgcagacatcaagaagcaggcaggaaaatggaaaaactgagataatacacaggtgataaacagtttcgagaaaataaaaattggctagaatctcaagttatgtgtttctatattggtataagcatataagtgaaaagtcttataagtgtaatagagaaaagatttgtcagtgtgtttttttaaatgaaataactagtctgtgctactttatgtcaatataaaaattggtaaactagaagtaacttgtccacaaccctcagttatgatacttatgtgcgtgtttttttttccaaagtttttcccaaggagaagatacaaatatatggtagctattgtttaaaaatgattgatttacttgcagatttttcagaggatgttatgtctttgtcattcattaaatgttcaaaattgtagttttaccaaatctgaagtgccatcagttataagaatcaccattattttatgttccattaagaaaaacacaataaaacatgacactgctttttttgttacttgaaattttcatatttattggagagctcttttagatgtttttaaatacagatttttatttaaccctcttgcatatacatataaaataacaaaaaaataaaatattgagatatcatcaagaaatttctacagcttcacattcaaactcttcagcactttcagagctattgatatgcatatgtccacctagtaccatcttctctgctttcagaattattggtaaggctgcatttcctgagtgctctaccacacttatgtctggattttttttacccagctacagacccacactcctgcaagatttgatacccttctatttggcaaaactcagtttcacttttctttcagtttaatcacaggtccttagaagatcggacctgtgattctattcaaagtcagaaagagatttctcacaaattgacgtcatattaacatgtcaatatgaaaattaattgtttggtaaaccagaagtgacctgtctgaagccctcaattgtggtatttgtgtgtttgttttttctttttcaagattctttttaaagaaaatatatggtagctgttgtttaacatttatctacttacagagcgttcagaggatgttatatgtttattaagtgctcaatactgtattttaacctaatctgaattttaatcataatcctgtacaatgcatggattctggttgctttgaaatggttctgttcaaaggacttatcaatgtctcttgctttgagatgtattgcttggtgtgtagtagcacaaacgtaccaccaataatgtacctaattcaactgaagtgacagtcatatacgcagatatgaccaagttcacatgtgagcaagtaacaactccatgactattgctgcctggctaatagctattatactatcatttgtaaggcacattctgttttctggggtgtcgaaatgtggataaaaaaagatgaattaggaatgattctaacctaagtatgtgttttaataaaaggatctaggcaaaaaaaaaaaaagtaagtcactcctaaatttaatccctgaataatgcagtgtacatgatgatagaggagaagtgtgtttttgataagaagtgactaaattttgtgacaatcttaattttttaggcttttcatttagtcttccaataaagataatttttttctgagttttatcagcagtagaaaaataagacctacatggataagtttgaaattaaacattttgtctcattttataatttttatttttatgaaatcatggcacttacatcatatactcaggtgtgtaaaagcctgctatttgtaactataatccataaacttattgatgatttaataactatcaacaagggcatgggaaaaattcaacatttgataataatcttttaccttaggcatttattctctaagcaaagcagaaataaaggatatgtatcagtgtatactgattgaaataaagctttaaaaatccaagtgatactctgaaattgtcaaaagtttaatggcatgaatccaggattaattcccataacctgtgatgatctagtcatcttctgtagctacatagtactcctaatgttaagattaccaaattcagcaataaagccaaaatcaaaactgccttctgtcacatatagctgttaagtaaactacacaaaatcagagttgctgtttacatacatcatgatgccgtctggacttgagcaccttggcggctcaggattaaggcacctcagtctagcctagcagagttacaatggagagaagtgaaaactcattagtagctcaaaacaagctaaaggatttcagatgctctttttcttgttcatctaaatcaagtcttcatctgtgtcaagaactaaattgttaaagacctttttaatttgcttagtgcaagaaaaataatagcaaccatatatctagttaacttgagtcttctgtgcctctaaaattttgtttagagaaagcctatttctattgaggttgaggaacacaattctaatacttagtaaaattattaacattc

SEQ ID NO: 2400 - protein, 224 aa, Homo sapiens; identical to SEQ ID NO: 2386

SEQ ID NO: 2401 - DNA, 4481 bp, Homo sapiens
gtgctgtgcggcgcggtctcagggaaggtggggctatggcagctgctagggaccctccggaagtatcgctgcgagaagccacccagcgaaaattgcggaggttttccgagctaagaggcaaacttgtagcacgtggagaattctgggacatagttgcaataacagcggctgatgaaaaacaggaacttgcttacaaccaacagctgtcagaaaagctgaaaagaaaggagttaccccttggagttcaatatcacgtttttgtggatcctgctggagccaaaattggaaatggaggatcaacactttgtgcccttcaatgtttggaaaagctatatggagataaatggaattcttttaccatcttattaattcactctggtggctacagtcaacgacttccaaatgcaagtgctctgggaaaaattttcactgctttacctcttgatataccagaatgctctggcaaaacatcctgtatcattcaaagcatactggattcaagatgttctgtggcacctggctcagttgtggagtattccagattggggcctgatgtttcagttggggaaaactgcattattagtggttcttacatcctaacaaaagctgccctccccgcacattcttttgtatgttccttaagcttaaagatgaatagatgcttaaagtatgcaactatggcatttggagtgcaagacaacttgaaaaagagtgtgaaaacattgtcagatataaagttacttcaattctttggagtctgtttcctgtcatgcttagatgtttggaatcttaaagttacagaggaactgttctctggtaacaagacatgtctgagtttgtggactgcacgcattttcccagtttgttcttctttgagtgactcagttataacatccctaaagatgttaaatgctgttaagaacaagtcagcattcagcctgaatagctataagttgctgtccattgaagaaatgcttatctacaaagatgtagaagatatgataacttacagggaacaaatttttctagaaatcagtttaaaaagcagtttgatgtagagatattttaaatattgtacactttgcctttttgagtaacattccagagataggtattttttgtaggctgtttcactgaactcagttaatgaaaactgtattaacataattgttgtagcataatattaatagtgcaaaagtacatataagtcattttgatgaaaaatattccaagactaagttgagaaaagagatactattttggatgtgtatcagtatttttgtttttaataatgattgatttgtggagcattgttttttcacataattagttttaaaggtaattttctaagcatacctttggaatttttccatcttttttgaggcttttggtccagtgaagttctaagtattcactggcacttctctcctcaactgtaattctatttttaataataaaaatggcatactgtagggtcttcagagtagtgtaggaatactgtagaaatactttttcagaaacgaatccatagctgacaaattcactcagtgcccaatatattgtgattattttcgttgataaagaactagatacaaagacctctgaaattgatgataaaatttgtatctcattaattttatcaaaatgaaactaaaagtacatatgtattatacacttgaacatgtgtttgtatatctttaaaattttcctttatgttccattccataggaaaacacacatatgcacacaaaactcagttatctgtggggaaagtggtagtaataattgagattcatcaataatcatataatttcactatagacattacttgcattatctcctatcagtccttctaacaaaacttcaattaccagatgaactgactttagttttcatcttattttttgtccacatgctggtgatgctgagaaacaataattggcccaaatgcagacatcaagaagcaggcaggaaaatggaaaaactgagataatacacaggtgataaacagtttcgagaaaataaaaattggctagaatctcaagttatgtgtttctatattggtataagcatataagtgaaaagtcttataagtgtaatagagaaaagatttgtcagtgtgtttttttaaatgaaataactagtctgtgctactttatgtcaatataaaaattggtaaactagaagtaacttgtccacaaccctcagttatgatacttatgtgcgtgtttttttttccaaagtttttcccaaggagaagatacaaatatatggtagctattgtttaaaaatgattgatttacttgcagatttttcagaggatgttatgtctttgtcattcattaaatgttcaaaattgtagttttaccaaatctgaagtgccatcagttataagaatcaccattattttatgttccattaagaaaaacacaataaaacatgacactgctttttttgttacttgaaattttcatatttattggagagctcttttagatgtttttaaatacagatttttatttaaccctcttgcatatacatataaaataacaaaaaaataaaatattgagatatcatcaagaaatttctacagcttcacattcaaactcttcagcactttcagagctattgatatgcatatgtccacctagtaccatcttctctgctttcagaattattggtaaggctgcatttcctgagtgctctaccacacttatgtctggattttttttacccagctacagacccacactcctgcaagatttgatacccttctatttggcaaaactcagtttcacttttctttcagtttaatcacaggtccttagaagatcggacctgtgattctattcaaagtcagaaagagatttctcacaaattgacgtcatattaacatgtcaatatgaaaattaattgtttggtaaaccagaagtgacctgtctgaagccctcaattgtggtatttgtgtgtttgttttttctttttcaagattctttttaaagaaaatatatggtagctgttgtttaacatttatctacttacagagcgttcagaggatgttatatgtttattaagtgctcaatactgtattttaacctaatctgaattttaatcataatcctgtacaatgcatggattctggttgctttgaaatggttctgttcaaaggacttatcaatgtctcttgctttgagatgtattgcttggtgtgtagtagcacaaacgtaccaccaataatgtacctaattcaactgaagtgacagtcatatacgcagatatgaccaagttcacatgtgagcaagtaacaactccatgactattgctgcctggctaatagctattatactatcatttgtaaggcacattctgttttctggggtgtcgaaatgtggataaaaaaagatgaattaggaatgattctaacctaagtatgtgttttaataaaaggatctaggcaaaaaaaaaaaaagtaagtcactcctaaatttaatccctgaataatgcagtgtacatgatgatagaggagaagtgtgtttttgataagaagtgactaaattttgtgacaatcttaattttttaggcttttcatttagtcttccaataaagataatttttttctgagttttatcagcagtagaaaaataagacctacatggataagtttgaaattaaacattttgtctcattttataatttttatttttatgaaatcatggcacttacatcatatactcaggtgtgtaaaagcctgctatttgtaactataatccataaacttattgatgatttaataactatcaacaagggcatgggaaaaattcaacatttgataataatcttttaccttaggcatttattctctaagcaaagcagaaataaaggatatgtatcagtgtatactgattgaaataaagctttaaaaatccaagtgatactctgaaattgtcaaaagtttaatggcatgaatccaggattaattcccataacctgtgatgatctagtcatcttctgtagctacatagtactcctaatgttaagattaccaaattcagcaataaagccaaaatcaaaactgccttctgtcacatatagctgttaagtaaactacacaaaatcagagttgctgtttacatacatcatgatgccgtctggacttgagcaccttggcggctcaggattaaggcacctcagtctagcctagcagagttacaatggagagaagtgaaaactcattagtagctcaaaacaagctaaaggatttcagatgctctttttcttgttcatctaaatcaagtcttcatctgtgtcaagaactaaattgttaaagacctttttaatttgcttagtgcaagaaaaataatagcaaccatatatctagttaacttgagtcttctgtgcctctaaaattttgtttagagaaagcctatttctattgaggttgaggaacacaattctaatacttagtaaaattattaacattc

SEQ ID NO: 2402 - protein, 340 aa, Homo sapiens; identical to SEQ ID NO: 2382

SEQ ID NO: 2403 - DNA, 1215 bp, Homo sapiens
gtgctgtgcggcgcggtctcagggaaggtggggctatggcagctgctagggaccctccggaagtatcgctgcgagaagccacccagcgaaaattgcggaggttttccgagctaagaggcaaacttgtagcacgtggagaattctgggacatagttgcaataacagcggctgatgaaaaacaggaacttgcttacaaccaacagctgtcagaaaagctgaaaagaaaggagttaccccttggagttcaatatcacgtttttgtggatcctgctggagccaaaattggaaatggaggatcaacactttgtgcccttcaatgtttggaaaagctatatggagataaatggaattcttttaccatcttattaattcactctgatgaatggaagaaaaaagtcagtgaatcatatgttatcacaatagaaagattagaagatgacctgcagatcaaggaaaaagaactgacagaactaaggaatatatttgggtaatggattggtgacaggaagaaatgaagaaaaagagaaggcaggaggagaaagaaagacagaaagggcaccttagagtaccattgtctgattatatcctcctctgtgctgcctctaatctttatcaacataacagcacttactacatggtgttgtttttatccatttataggtctatctccccactagtatatgtgttcattaaaggcagctttttttcttatttagccttatttatatttgtacttatttgtaaaacaaactaataacttagggcttaccatatgccagaaatgcttctacgtatctttttgtgcatcagcttatataatcctaatggtgtatatgtaaagtgctttagcacagtgtctggcacatggcaaaccctcaaaaatgttagttaacacttaatcattattgtttatgttaacaaccctctgaagtaagtgttgcaattgccatgttatacctggagaaaatgaggctaatcaaattaaactggcttgaactagattaaacaatttgtatgatttacctaggattgcatccatctttatttgatttcaaaatgtatcatattcataatcttggttatgaatattatacaacctttttgaaaaaactatggaagtgatggctctccacatgtgacttcaaatgttttcaattaaattattttgtttcaatagtttttatcataataaattttaagactatgttttgctaa

SEQ ID NO: 2404 - protein, 151 aa, Homo sapiens
MAAARDPPEVSLREATQRKLRRFSELRGKLVARGEFWDIVAITAADEKQELAYNQQLSEKLKRKELPLGVQYHVFVDPAGAKIGNGGSTLCALQCLEKLYGDKWNSFTILLIHSDEWKKKVSESYVITIERLEDDLQIKEKELTELRNIFG

SEQ ID NO: 2405 - DNA, 522 bp, Homo sapiens
gtgctgtgcggcgcggtctcagggaaggtggggctatggcagctgctagggaccctccggaagtatcgctgcgagaagccacccagcgaaaattgcggaggttttccgagctaagaggcaaacttgtagcacgtggagaattctgggacatagttgcaataacagcggctgatgaaaaacaggaacttgcttacaaccaacagctgtcagaaaagctgaaaagaaaggagttaccccttggagttcaatatcacgtttttgtggatcctgctggagccaaaattggaaatggaggatcaacactttgtgcccttcaatgtttggaaaagctatatggagataaatggaattcttttaccatcttattaattcactctgggcatgatgccattgtcacactcctgaagcattataagagaccacaagatgaattgccctgtaatgaatattctcagcctggaggagatggctcctatgtgtctgttccatcacccttggggaagattaaaagcatgacaaaag

SEQ ID NO: 2406 - protein, 161 aa, Homo sapiens
MAAARDPPEVSLREATQRKLRRFSELRGKLVARGEFWDIVAITAADEKQELAYNQQLSEKLKRKELPLGVQYHVFVDPAGAKIGNGGSTLCALQCLEKLYGDKWNSFTILLIHSGHDAIVTLLKHYKRPQDELPCNEYSQPGGDGSYVSVPSPLGKIKSMT

SEQ ID NO: 2407 - DNA, 6745 bp, Homo sapiens
aacagggaagctgtggataccaacggagggtgggagcccgggaggctgcgggtagcccgggcgcccaggggcggcggcggcccagcccaggtgcccgcgcacaggggacctcggtgcggagccacccctcgagcgcgactgtcgcagcgccagcgcgcacggggccccacgcacccaccctccgcacctgccgcggggtccaaaagggatcctgcaaaaatgagccattctcaccccgctgggttacttgctgcatataatagccttatggataaacacctggctgggtattttaacaatacaaggataaggcgtcatctcttaagatcaggactgatcacaagaagtggaagaatactttctgaaaaagaatataaactaaatatgatgaagcgggatcatcaaaaatatatccgggaatgcttagcccaggcaatttttcataaagttcttgatatggagcgttaccatcagcttgaaataaaaaagaaattggagaccttagctaggaaggagcgaatccagaggtttaagggagagcacacaagaaggtctgttgaaaataacatgccaatcctgtctccccacccaccagttggcccaaagagtaatcgtggccatagtgttctggttgatgaaggacattccagtccgttagcactgacagcccctcgaccatatactgctccaggaaatatgcagcctccaattcgattacagcctcttcccagtaatcctgcagtagaaactgttccaaaggtaacttcaaggtccagatcaaaaacctcattgctggaaaatgaagctctgtttcccattgggggcaagaaggcagtgatgaagttcaggaactccataggcaattcacagagaatgaattcatatcaacttccaaacattaacagttacatgatgcctattcctcctccacttcccccaactgggaaaatcacaagagaaaatagatctgaaacatggagaaggagaagatttcgtccaaccactgctccaaatggcttagaacctcttttgacaaaggattcaagaaggattcataaaacatccttacatagtaatgcagctattacaatgatctatttggggaaaaatgtgcacctatcttctgataatcctgacttccgggatgaaattaaagtttatcagcagcactgtggtggggaaaacctttgtgtctacaaaggcaaactacttgaaaaagagacctttcagtttatttccaaaaggcatcatggtttccccttcagtctcacctttttcctgaatgggatgcaggtgaacaggttaagctcctgttgtgaatacaagcatcggaaaggttccaggcttggaggcaaacgaggctactttgggtttgtgtgtgttgagagatcatctccttgctacaagtgcattattgcaatgggccttgacaaaaaaccgtctttgccgaaatctaggaaagaaaagagcactgagaaaggagaggaactgaagaaggctgaggggaaagtgaggaaagagagagagtatgtgataccaaaaagaaatgagatcaaggagaacaaaacctctgtttcagccaaattttcagctcaagaaataaaaacagggctcaaagaagtggtaactgctgtggaggaaatgacaagtaaaggaaaaccaggacaagaagtcttggaagacgaccaggaaaatactttaaaatatgagtatgaagaagactttgaagtagatgaggagaaacaaggtgaaaaatctaatgaagaaggacaggctgatgttcaaatgaatggaataccgcagtcacctttggatgataaaaaagataatttagaccctgaaaaagagagtgaaacctcatcacagaaggcaccagatgcccgtgacaatgtgaaagatgagaatgatggatgctctgagagtgaactggaagaggataaacaagatatgaaaactgcttcatcaacctcatccagaagtcacccttattctagtgacagtgaggatgaatctgcagtgggggacagggaagcccacactgacagcagcacagatgaaagtgccagaaggtcatcttctcaggaactgagtgaaaatgataagccaagaaagtctcaccttccaattgaggaatccttagaaattgaaattgaagaccaagaaataacaaaagcagatgtggagaccaagccgatgccaatagacgaaagctttgagaatgttcttaaagaaggaacggagaaaggaacccaagagattgcagagggtttatctgagaagtccgggaaacatgtttctgcagaagaaaaggaaaaggataagagtaagctttgggaagaaagcactgctcaggtgaaggacaaaaaggcaggtctccctgggttggaggaaggtggaaaggattcattgccattagcctatgtcctggctcttggtgcaccaacaatgaatttcatggtggatgaaacagcagcaatcaactcaaacaaggaatcccagcaattggtgcaaaaaacgtatacactggagaagaaagaagcaatggaggaagatgaagcgccccagcacagagatgctgacatagtacagggaaaaggggaggcagcactgtggggagaagcaggagctgttcatgaggctcccttgagggcgtggaagccaacagcagagcagccagaattggcagaagagtttacagaaaaaagggagatccctccaggcatagaaaggggggcagagggagcagcagaagcagaaggggtcagaaggctgggtgaaggggggtcagaccccataggacaagcagcagcaaaagatgctgtgggtctgagtaaagatgaggctcctgaaaagcaagccttgatgctcacagtgcttgagacagacaaagcagcttctgaaggggaacagggtttagagaaggcagtgcttgcaaatgaagcagcagccctgaacttggagcatcttcatgaagtagcagccctgagagaggcagcgacatcggaggagggagaggctgagggtggggtggctgtgagtgatgtcggagaaagtgaagaggaagcatccatagacctagaggacacaggacccatggaggacacagcatcaaagagagaggacggttctgaagaggcaattcttgggggagaggaaccagccaaagagagaaaagaggttatgagaacagaaacacgcttgagccccttcacaggagaggcagaggcaagccggatgcaggtttcggagggcagccctgaggaaggaagccttgcaaaggaagccttcctttgcaaggaagatgtggaaggggaagagatggtgactgaggcagaagctaatagggaagatgataggaaagaaattttacccaaggaattagatttagcaagagagcgaaggaaagctgagaggccaaaaacatctctgaggaaaactgactctgagagagaagaggtgacaagggcaaatgcactcaaggatgaagatgcttttaaagaagagcaaaaacttaaagcggaagaaggggaaacagagacagaagtaagagctgaggaagagacaaaagctcccccaaatgaaatgggatctgatgctgagaacgaagcacctgtggaggcttctgagttgtctgacaatccagggcttctaggagaagattcactaaaagagacagtggttcccatatttgaagcaacgcctggatttgaaaagtcgctggaaaacataacagctctgaggaaagaaggaggaggggaaagactgagtgaagccagagacacagagcacaaagacagagaagagctgtccagcagggagaatagggccctgaaggaagggcaccgccaagatggagagggggccttagcagctcctgaagctgagccagcaggaaaggtgcaggcccctgaggggctgatcccagccacaggccaggcagaggagctagcagccaaagatcacgactcctgcgcaggactggaggggagagctgaagggcaaggaggagtggatgtcgtgctaaggacccaggaagctgttgctgaggaagatcccataatggcagaaaagttcagggaggaagcggtggatgaggacccagaggaggaagaggacaaagagtgcactctggagacagaagcgatgcaggacaggaactcggaaggggacggggacatggaaggagaaggaaacacacaaaagaatgagggcatgggaggaggaagggttgtggctgtggaagttctacacggaggtggtgaaacggcagaaacagccgcagaggagagggaggtgttggcaggttcggagacagccgaggagaaaacaatagcaaataaagcctcctccttttcagatgttgctgaggaagaaacctggcaccaacaggatgagttagtaggaaaaacagcagctgcagggaaggtggtggtagaggaattagcacggagtggggaggaagtgccagcagcagaggagatgacagtgacatatacaacagaggctggggtgggcactccaggagccctggagcggaagacctcagggctaggacaggagcaagaggaagggtcagagggccaggaggcagccactgggagtggcgatgggaggcaggagacaggagcagctgaaaaattccgattaggattatcacgggagggagagagggaattgagtccggagagtctacaggcgatggcaacacttccagtgaagcctgatttcactgaaacccgagagaagcaacagcatatggtgcaaggagaaagcgagactgcagatgtttcccccaacaacgtgcaggtctaggagacttgctggcagacagataatttaaagatgtcttctgaagatgtaaagagtggagaaagattcacgcaagcatctcaccaggattcttgattttctctctctcctctttagttgctggttgcgcttgtctgagatgattcccaatctgtcagccctggtcagtagctcagtaagcaccttgagaatagctcaagtagatctgtaggacccttcttagaagcagtggttcctcatggagaaacttgtgaggctgttacacattctacacacctaacattattttcaaacaaaaatgataattttcagatgcttgacttttaccaaagatcactggaaggcccagtcctaatgttaggggtttgtttaaagtcctttttattttacaatacagagccccagtcaattccacaatctcaatttcatacatgggaattttatttaaaaatctgtggtttggggctttaatgaattggcctgtgaaaatgagctctaaatttcctcccacgtacactcaaaactcaagattgctccaaatctctaagttcttccagcaaaagatttcttggcatgtatattcacttatacttagaaatattcattcttttaatttatgccagaataacaaagtggaaatcttatttcaaaatgctctttgtttttttgtgtgtgtttctgtagttctgctttctggggtagactagtaaaatggtagcttccagcattttgtccctggggccttctttatagggccactcaaatttaaataaaagtagtaaataatttagctaagtggaataagtataataattatagtggtaagcatagcacatcagcattatgccaacattctagactctttagttgatgtcattaaatggaaaagaaacttggattaaatgagtgtgctgctcaccttcccaagttctgttatttcaaacctgtgaactaaccttgcagttcattataaatcaacagtaacaactgcattctaaattactccctgatattattttctagttgtgtatcagcctgtctcctaggggttttcatttccctgaagacatacaagtgccccagagcgcatgtatatgtctaccatttctctatatgagaaggtaaaaaaaatttccttaagttctaaatcatcatataatccatgctggccacattacactcaaggtccctagggaccaggcatattatcatagtaggtattttccattttaatgtgtaatggagccattcaatgatcaaaaatacactggaccagatagtagactcatggactattgattgtattgaggattagtctcagttggaaagccaactacagaggcattttgaaagtaaatggcactcaatataaaagtggtggagtcaatcttaaacttatttttattatgattgtattgatacatgcacgaagtccctctgccctactccctattcaaggatattactcactgcacatcataaatctccatcatctgtcttaaagttttatgagtagatttcatctacattatattcaagttcatttattactgagctgtattactgtggagctctaacagtatttgtttcctgatttcaaactcaatgctacagagcactttgaatacatcacaccttataggaaagatagtaaatgtattaatcccattgaaaaattagttttgtacaatgtgctaaatagtattgcattggattacttttatatttaacacactccatcaaaacatcccataacataattttacaatctgcatgtgaatttaactgtgaaattcagtattgtgatattttgaataagtgaattctttctctgcaaatactatgttgataaaattacttgtatgttcccctgaaatggtttgtttcctgtttcttcattattaaaacataaatcaatcatatgtttacagataca

SEQ ID NO: 2408 - protein, 1530 aa, Homo sapiens
MSHSHPAGLLAAYNSLMDKHLAGYFNNTRIRRHLLRSGLITRSGRILSEKEYKLNMMKRDHQKYIRECLAQAIFHKVLDMERYHQLEIKKKLETLARKERIQRFKGEHTRRSVENNMPILSPHPPVGPKSNRGHSVLVDEGHSSPLALTAPRPYTAPGNMQPPIRLQPLPSNPAVETVPKVTSRSRSKTSLLENEALFPIGGKKAVMKFRNSIGNSQRMNSYQLPNINSYMMPIPPPLPPTGKITRENRSETWRRRRFRPTTAPNGLEPLLTKDSRRIHKTSLHSNAAITMIYLGKNVHLSSDNPDFRDEIKVYQQHCGGENLCVYKGKLLEKETFQFISKRHHGFPFSLTFFLNGMQVNRLSSCCEYKHRKGSRLGGKRGYFGFVCVERSSPCYKCIIAMGLDKKPSLPKSRKEKSTEKGEELKKAEGKVRKEREYVIPKRNEIKENKTSVSAKFSAQEIKTGLKEVVTAVEEMTSKGKPGQEVLEDDQENTLKYEYEEDFEVDEEKQGEKSNEEGQADVQMNGIPQSPLDDKKDNLDPEKESETSSQKAPDARDNVKDENDGCSESELEEDKQDMKTASSTSSRSHPYSSDSEDESAVGDREAHTDSSTDESARRSSSQELSENDKPRKSHLPIEESLEIEIEDQEITKADVETKPMPIDESFENVLKEGTEKGTQEIAEGLSEKSGKHVSAEEKEKDKSKLWEESTAQVKDKKAGLPGLEEGGKDSLPLAYVLALGAPTMNFMVDETAAINSNKESQQLVQKTYTLEKKEAMEEDEAPQHRDADIVQGKGEAALWGEAGAVHEAPLRAWKPTAEQPELAEEFTEKREIPPGIERGAEGAAEAEGVRRLGEGGSDPIGQAAAKDAVGLSKDEAPEKQALMLTVLETDKAASEGEQGLEKAVLANEAAALNLEHLHEVAALREAATSEEGEAEGGVAVSDVGESEEEASIDLEDTGPMEDTASKREDGSEEAILGGEEPAKERKEVMRTETRLSPFTGEAEASRMQVSEGSPEEGSLAKEAFLCKEDVEGEEMVTEAEANREDDRKEILPKELDLARERRKAERPKTSLRKTDSEREEVTRANALKDEDAFKEEQKLKAEEGETETEVRAEEETKAPPNEMGSDAENEAPVEASELSDNPGLLGEDSLKETVVPIFEATPGFEKSLENITALRKEGGGERLSEARDTEHKDREELSSRENRALKEGHRQDGEGALAAPEAEPAGKVQAPEGLIPATGQAEELAAKDHDSCAGLEGRAEGQGGVDVVLRTQEAVAEEDPIMAEKFREEAVDEDPEEEEDKECTLETEAMQDRNSEGDGDMEGEGNTQKNEGMGGGRVVAVEVLHGGGETAETAAEEREVLAGSETAEEKTIANKASSFSDVAEEETWHQQDELVGKTAAAGKVVVEELARSGEEVPAAEEMTVTYTTEAGVGTPGALERKTSGLGQEQEEGSEGQEAATGSGDGRQETGAAEKFRLGLSREGERELSPESLQAMATLPVKPDFTETREKQQHMVQGESETADVSPNNVQV

SEQ ID NO: 2409 - DNA, 3741 bp, Homo sapiens
aacagggaagctgtggataccaacggagggtgggagcccgggaggctgcgggtagcccgggcgcccaggggcggcggcggcccagcccaggtgcccgcgcacaggggacctcggtgcggagccacccctcgagcgcgactgtcgcagcgccagcgcgcacggggccccacgcacccaccctccgcacctgccgcggggtccaaaagggatcctgcaaaaatgagccattctcaccccgctgggttacttgctgcatataatagccttatggataaacacctggctgggtattttaacaatacaaggataaggcgtcatctcttaagatcaggactgatcacaagaagtggaagaatactttctgaaaaagaatataaactaaatatgatgaagcgggatcatcaaaaatatatccgggaatgcttagcccaggcaatttttcataaagttcttgatatggagcgttaccatcagcttgaaataaaaaagaaattggagaccttagctaggaaggagcgaatccagaggtttaagggagagcacacaagaaggtctgttgaaaataacatgccaatcctgtctccccacccaccagttggcccaaagagtaatcgtggccatagtgttctggttgatgaaggacattccagtccgttagcactgacagcccctcgaccatatactgctccaggaaatatgcagcctccaattcgattacagcctcttcccagtaatcctgcagtagaaactgttccaaaggtaacttcaaggtccagatcaaaaacctcattgctggaaaatgaagctctgtttcccattgggggcaagaaggcagtgatgaagttcaggaactccataggcaattcacagagaatgaattcatatcaacttccaaacattaacagttacatgatgcctattcctcctccacttcccccaactgggaaaatcacaagagaaaatagatctgaaacatggagaaggagaagatttcgtccaaccactgctccaaatggcttagaacctcttttgacaaaggattcaagaaggattcataaaacatccttacatagtaatgcagctattacaatgatctatttggggaaaaatgtgcacctatcttctgataatcctgacttccgggatgaaattaaagtttatcagcagcactgtggtggggaaaacctttgtgtctacaaaggcaaactacttgaaaaagagacctttcagtttatttccaaaaggcatcatggtttccccttcagtctcacctttttcctgaatgggatgcaggtgaacaggttaagctcctgttgtgaatacaagcatcggaaaggttccaggcttggaggcaaacgaggctactttgggtttgtgtgtgttgagagatcatctccttgctacaagtgcattattgcaatgggccttgacaaaaaaccgtctttgccgaaatctaggaaagaaaagagcactgagaaaggagaggaactgaagaaggctgaggggaaagtgaggaaagagagagagtatgtgataccaaaaagaaatgagatcaaggagaacaaaacctctgtttcagccaaattttcagctcaagaaataaaaacagggctcaaagaagtggtaactgctgtggaggaaatgacaagtaaaggaaaaccaggacaagaagtcttggaagacgaccaggaaaatactttaaaatatgagtatgaagaagactttgaagtagatgaggagaaacaaggtgaaaaatctaatgaagaaggacaggctgatgttcaaatgaatggaataccgcagtcacctttggatgataaaaaagataatttagaccctgaaaaagagagtgaaacctcatcacagaaggcaccagatgcccgtgacaatgtgaaagatgagaatgatggatgctctgagagtgaactggaagaggataaacaagatatgaaaactgcttcatcaacctcatccagaagtcacccttattctagtgacagtgaggatgaatctgcagtgggggacagggaagcccacactgacagcagcacagatgaaagtgccagaaggtcatcttctcaggaactgagtgaaaatgataagccaagaaagtctcaccttccaattgaggaatccttagaaattgaaattgaagaccaagaaataacaaaagcagatgtggagaccaagccgatgccaatagacgaaagctttgagaatgttcttaaagaaggaacggagaaaggaacccaagagattgcagagggtttatctgagaagtccgggaaacatgtttctgcagaagaaaaggaaaaggataagagtaagctttgggaagaaagcactgctcaggtgaaggacaaaaaggcaggtctccctgggttggaggaaggtggaaaggattcattgccattagcctatgtcctggctcttggtgcaccaacaatgaatttcatggtggatgaaacagcagcaatcaactcaaacaaggaatcccagcaattggtgcaaaaaacgtatacactggagaagaaagaagcaatggaggaagatgaagcgccccagcacagagatgctgacatagtacagggaaaaggggaggcagcactgtggggagaagcaggagctgttcatgaggctcccttgagggcgtggaagccaacagcagagcagccagaattggcagaagagtttacagaaaaaagggagatccctccaggcatagaaaggggggcagagggagcagcagaagcagaaggggtcagaaggctgggtgaaggggggtcagaccccataggacaagcagcagcaaaagatgctgtgggtctgagtaaagatgaggctcctgaaaagcaagccttgatgctcacagtgcttgagacagacaaagcagcttctgaaggggaacagggtttagagaaggcagtgcttgcaaatgaagcagcagccctgaacttggagcatcttcatgaagtagcagccctgagagaggcagcgacatcggaggagggagaggctgagggtggggtggctgtgagtgatgtcggagaaagtgaagaggaagcatccatagacctagaggacacaggacccatggaggacacagcatcaaagagagaggacggttctgaagaggcaattcttgggggagaggaaccagccaaagagagaaaagaggttatgagaacagaaacacgcttgagccccttcacaggagaggcagaggcaagccggatgcaggtttcggagggcagccctgaggaaggaagccttgcaaaggaagccttcctttgcaaggaagatgtggaaggggaagagatggtgactgaggcagaagctaatagggaagatgataggaaagaaattttacccaaggaattagatttagcaagagagcgaaggaaagctgagaggccaaaaacatctctgaggaaaactgactctgagagagaagaggtgacaagggcaaatgcactcaaggatgaagatgcttttaaagaagagcaaaaacttaaagcggaagaaggggaaacagagacagaagtaagagctgaggaagagacaaaagctcccccaaatgaaatgggatctgatgctgagaacgaagcacctgtggaggcttctgagttgtctgacaatccagggcttctaggagaagattcactaaaagagacagtggttcccatatttgaagcaacgcctggatttgaaaagtcgctggaaaacataacagctctgagg

SEQ ID NO: 2410 - protein, 1173 aa, Homo sapiens
MSHSHPAGLLAAYNSLMDKHLAGYFNNTRIRRHLLRSGLITRSGRILSEKEYKLNMMKRDHQKYIRECLAQAIFHKVLDMERYHQLEIKKKLETLARKERIQRFKGEHTRRSVENNMPILSPHPPVGPKSNRGHSVLVDEGHSSPLALTAPRPYTAPGNMQPPIRLQPLPSNPAVETVPKVTSRSRSKTSLLENEALFPIGGKKAVMKFRNSIGNSQRMNSYQLPNINSYMMPIPPPLPPTGKITRENRSETWRRRRFRPTTAPNGLEPLLTKDSRRIHKTSLHSNAAITMIYLGKNVHLSSDNPDFRDEIKVYQQHCGGENLCVYKGKLLEKETFQFISKRHHGFPFSLTFFLNGMQVNRLSSCCEYKHRKGSRLGGKRGYFGFVCVERSSPCYKCIIAMGLDKKPSLPKSRKEKSTEKGEELKKAEGKVRKEREYVIPKRNEIKENKTSVSAKFSAQEIKTGLKEVVTAVEEMTSKGKPGQEVLEDDQENTLKYEYEEDFEVDEEKQGEKSNEEGQADVQMNGIPQSPLDDKKDNLDPEKESETSSQKAPDARDNVKDENDGCSESELEEDKQDMKTASSTSSRSHPYSSDSEDESAVGDREAHTDSSTDESARRSSSQELSENDKPRKSHLPIEESLEIEIEDQEITKADVETKPMPIDESFENVLKEGTEKGTQEIAEGLSEKSGKHVSAEEKEKDKSKLWEESTAQVKDKKAGLPGLEEGGKDSLPLAYVLALGAPTMNFMVDETAAINSNKESQQLVQKTYTLEKKEAMEEDEAPQHRDADIVQGKGEAALWGEAGAVHEAPLRAWKPTAEQPELAEEFTEKREIPPGIERGAEGAAEAEGVRRLGEGGSDPIGQAAAKDAVGLSKDEAPEKQALMLTVLETDKAASEGEQGLEKAVLANEAAALNLEHLHEVAALREAATSEEGEAEGGVAVSDVGESEEEASIDLEDTGPMEDTASKREDGSEEAILGGEEPAKERKEVMRTETRLSPFTGEAEASRMQVSEGSPEEGSLAKEAFLCKEDVEGEEMVTEAEANREDDRKEILPKELDLARERRKAERPKTSLRKTDSEREEVTRANALKDEDAFKEEQKLKAEEGETETEVRAEEETKAPPNEMGSDAENEAPVEASELSDNPGLLGEDSLKETVVPIFEATPGFEKSLENITAL

SEQ ID NO: 2411 - DNA, 6467 bp, Homo sapiens
gagagcccccggtggggccggcggaggagcgcccttccccccgcgcgctgattgctgtggcgtcctgcccgtccccgcccgcgtgtgtgcgagggagggcgagtgcgccgggtcggcctgatgggggtaatcgagggtttcggggacgccgagcggcactttcctcttcccagcgagtgaaggagggcagtcggcggctctcgcgccccggccactttccctgcgcgattcccggagctccctgcaggaggtgagagtccccagcgggtccggatggcgtagttttgccgcggcgcagcagctgccggagctcgccgccgccgagcgctgggcggggaaacttgccgccgctttcctccaacttgctgcgggtggatctccgctggacacaccgcctccgaggcagtttgaaaattgcaaggagggactttaagactacttctgatttgcaaagattgtctgtgctctgagcaggctgaagtgactggacgagacgcactgttggagaaataaaaatgacttcccattatgtgattgccatctttgccctgatgagctcctgtttagccactgcaggtccagagcctggtgcactgtgtgaactgtcacctgtcagtgcctcccatcctgtccaggccttgatggagagcttcactgttttgtcaggctgtgccagcagaggcacaactgggctgccacaggaggtgcatgtcctgaatctccgcactgcaggccaggggcctggccagctacagagagaggtcacacttcacctgaatcccatctcctcagtccacatccaccacaagtctgttgtgttcctgctcaactccccacaccccctggtgtggcatctgaagacagagagacttgccactggggtctccagactgtttttggtgtctgagggttctgtggtccagttttcatcagcaaacttctccttgacagcagaaacagaagaaaggaacttcccccatggaaatgaacatctgttaaattgggcccgaaaagagtatggagcagttacttcattcaccgaactcaagatagcaagaaacatttatattaaagtgggggaagatcaagtgttccctccaaagtgcaacatagggaagaattttctctcactcaattaccttgctgagtaccttcaacccaaagcagcagaagggtgtgtgatgtccagccagccccagaatgaggaagtacacatcatcgagctaatcacccccaactctaacccctacagtgctttccaggtggatataacaattgatataagaccttctcaagaggatcttgaagtggtcaaaaatctcatcctgatcttgaagtgcaaaaagtctgtcaactgggtgatcaaatcttttgatgttaagggaagcctgaaaattattgctcctaacagtattggctttggaaaagagagtgaaagatctatgacaatgaccaaatcaataagagatgacattccttcaacccaagggaatctggtgaagtgggctttggacaatggctatagtccaataacttcatacacaatggctcctgtggctaatagatttcatcttcggcttgaaaataatgcagaggagatgggagatgaggaagtccacactattcctcctgagctacggatcctgctggaccctggtgccctgcctgccctgcagaacccgcccatccggggaggggaaggccaaaatggaggccttccgtttcctttcccagatatttccaggagagtctggaatgaagagggagaagatgggctccctcggccaaaggaccctgtcattcccagcatacaactgtttcctggtctcagagagccagaagaggtgcaagggagcgtggatattgccctgtctgtcaaatgtgacaatgagaagatgatcgtggctgtagaaaaagattcttttcaggccagtggctactcggggatggacgtcaccctgttggatcctacctgcaaggccaagatgaatggcacacactttgttttggagtctcctctgaatggctgcggtactcggccccggtggtcagcccttgatggtgtggtctactataactccattgtgatacaggttccagcccttggggacagtagtggttggccagatggttatgaagatctggagtcaggtgataatggatttccgggagatatggatgaaggagatgcttccctgttcacccgacctgaaatcgtggtgtttaattgcagccttcagcaggtgaggaaccccagcagcttccaggaacagccccacggaaacatcaccttcaacatggagctatacaacactgacctctttttggtgccctcccagggcgtcttctctgtgccagagaatggacacgtttatgttgaggtatctgttactaaggctgaacaagaactgggatttgccatccaaacgtgctttatctctccatattcgaaccctgataggatgtctcattacaccattattgagaatatttgtcctaaagatgaatctgtgaaattctacagtcccaagagagtgcactttcctatcccgcaagctgacatggataagaagcgattcagctttgtcttcaagcctgtcttcaacacctcactgctctttctacagtgtgagctgacgctgtgtacgaagatggagaagcacccccagaagttgcctaagtgtgtgcctcctgacgaagcctgcacctcgctggacgcctcgataatctgggccatgatgcagaataagaagacgttcactaagccccttgctgtgatccaccatgaagcagaatctaaagaaaaaggtccaagcatgaaggaaccaaatccaatttctccaccaattttccatggtctggacaccctaaccgtgatgggcattgcgtttgcagcctttgtgatcggagcactcctgacgggggccttgtggtacatctattctcacacaggggagacagcaggaaggcagcaagtccccacctccccgccagcctcggaaaacagcagtgctgcccacagcatcggcagcacgcagagcacgccttgctccagcagcagcacggcctagcccaacccagcccaacccggcccaacccagcccagcccagctcagctcagctactgccaagggcaggaccaatggctgagcctcgtgtccagactcagagggctggattttggttcccttgtaaagacagagtgaatttcagtataaagatcacccgttgtattcaccccacacccagggctagtataaacatgaccctgggcttctgtaccacactagaattcatgtgagaaagctaaaatggtggtcttctccaccagcccctcacaggcttgggggttttcaatgtgaaacacatgccagtttttaaaatgctgctttgtccaggtgagaacatccataatttggggccctgagttttacccagactcaaggagttggtaaagggttaatagccagatagtagaaccagtgaggagatgcggccaaagattctttatatctgaaccaagatgtaaaacaagaaatgctttgaggctttctaagcgatcctcctgtctaatttgcacctttgtctggatgcacacttctgaccttgctgccacaacctgtggggtctgatgtgtcccttgatgggtgctgccctcagggactgcaccctgacaagtgttaaggcaacattcctttcttgtgccctgggccaaaaccaatgctgatgaccttatcagcttcctgtttcttcccatacttgcatacaccactgcaaaatgtcttaatgcaaattttgtatttcttacaggcctacagaaattgaaaatgaccaaaatcaggaaccacagatttgtgcccattcctaatattttgttctgcaaattaatgtataatttgaggtgaaattcagttataaagtcaaggacgaatttgcacagtgatatatttctatgtgtatgcaagtacaagtatataatatgtcacctggcacattcattttctcagttgaagaagagaaaatttgaaaatgtccttatgcttttagagttgcaacttaagtatatttggtagggtgagtgtttccactcaaaatatgtcaacttaaaaaaaaataggccctttcataaaaaccaaactgtagcaagatgcaaatgcatggcaaatcctgtcggtctccagttggttatctgaatagtgtcaccaattccaccaagacagtgctgagattggaaaagggcactcatttggattgccttacttctcttgccttaaatatatcccatatatttaatatgtcaaaaagggcttgaggtgaatttcattaaatggaataatatgatgccactttgcagctaaaataagctcagtgatacctccttgttaaaaaaaaaaaaaaaaaaaaagaatgccaggggggaattatcatgctaaattattttactgctgaagatagcttcattgcaaattattctttttccagaatttcccccaaacaacttagaattccataagtagaacaagatagattctacccccaaaatattcataagcaaatcccactgcccttaaaataaggaagttatgcctggttgtctgtgaatggaacctcagtaggtaatcctgatgaagcttaaaaccttagggcagtgtctacatgggaaacaagtatgtggaaattgacaatcatttttaccaaatcgttgagtaataatatgacttacctgatagatatacacattcaataaggaacatttttttttttcaataaggaacattttaactaaaacattactttagggctgagatttccaggctatctacattgatctactgaaaaatttctagatttccatatacaaacgaagaagacatgagtttagagaatttttttcctttaatttttttttaacagaagggtatcagagtggaggacctagattacgctacctgtgtttgaaaatattgcgctttgcctaaccttcggtggaatgtattgtttcagcatattctatgtataaaaaagtttaaagatgtcttcaaagaagactagagtctttaagtcacttatagctatattttactacaaaatttgtgtataaagatatatttaagtgttttagataaatttaagttactccatatgaaatgtttaatttcagctactgtgaattctttcgatcagtcctttgcttttttaaaaaatcttttccatcgtgttaaaaagaaaattagctattaggagatattaaaagattgatgtcttagaaggacagggttaaaaccttctgtaatatatttaaatatatatttttaagagagatgctacattgccaatgattttataaataatttaaaattaatttacaaatttatagatgcaaaccaaaagatctttttaaaagagagagagaggaaaaaaatcaccttttatttgtttgggtctcattgtcagaattattattcagatcaagaaatctgtgtcgataaaacctaatctcatattggagagtgaatgtcgttaagtatttctgaaatgtttctaaaaaatgaacatgaaaaaaataaggtattttctccctagcttctcattacagtatttctaattgcttcacactttacagttttaatacaaagtacaagctctacttttataacgtgtactacaagtttctttaaaagtattgttgtatttcagctgaactcttgtatctgcagtcttttgttatttctgcaggctacacccttaatttgcagaggccattttgttgtttgtttgatgctgaagctgttgttaaaatgccccaaactccaaggcagattgtctgtataatacgctatagcttttcaccatgtggtgtttaccagctgttactctgtattttaaaaagccagagatttcttctgtctaaactgtttctatagcattttctaaacaaaaaaaatggtttttttctttgccttgtaataagattgtaaatccatttcctgcttgtgttcttagtgggcatgattgtgagtgtgtgtggggtgctcacacgcgtgccagtctttttgtactgtaactacctcatggtttgaatgatgattgtactgctggttgtgttaacagagcacattttgttgggtgagtcctatgtgatttttttcatgtttgttttatctgggggttgttcatgaaactgacagatgtttttctaaaaaggactattatcagtttccaaatacaatacttctctcttctggtttttcctgaatgagcctgattttgttgctggttttcatcatctatgagggtaaaacgagtacccttaaaatccctgtggccagtttgaacacccctgttgtattcttttctctgttcagtgtgtcagctattttgtgaagatgcttagatgtatagttttgataaccacagttttaaatcttttatctgtgcataataaaaagatatatatcagttattaa

SEQ ID NO: 2412 - protein, 851 aa, Homo sapiens; identical to SEQ ID NO: 89

SEQ ID NO: 2413 - DNA, 1459 bp, Homo sapiens
aaaaaaaaaaaaagaatgccaggggggaattatcatgctaaattattttactgctgaagatagcttcattgcaaattattctttttccagaatttcccccaaacaacttagaattccataagtagaacaagatagattctacccccaaaatattcataagcaaatcccactgcccttaaaataaggaagttatgcctggttgtctgtgaatggaacctcagtaggtaatcctgatgaagcttaaaaccttagggcagtgtctacatgggaaacaagtatgtggaaattgacaatcatttttaccaaatcgttgagtaataatatgacttacctgatagatatacacattcaataaggaacatttttttttttcaataaggaacattttaactaaaacattactttagggctgagatttccaggctatctacattgatctactgaaaaatttctagatttccatatacaaacgaagaagacatgagtttagagaatttttttcctttaatttttttttaacagaagggtatcagagtggaggacctagattacgctacctgtgtttgaaaatattgcgctttgcctaaccttcggtggaatgtattgtttcagcatattctatgtataaaaaagtttaaagatgtcttcaaagaagactagagtctttaagtcacttatagctatattttactacaaaatttgtgtataaagatatatttaagtgttttagataaatttaagttactccatatgaaatgtttaatttcagctactgtgaattctttcgatcagtcctttgcttttttaaaaaatcttttccatcgtgttaaaaagaaaattagctattaggagatattaaaagattgatgtcttagaaggacagggttaaaaccttctgtaatatatttaaatatatatttttaagagagatgctacattgccaatgattttataaataatttaaaattaatttacaaatttatagatgcaaaccaaaagatctttttaaaagagagagagaggaaaaaaatcaccttttatttgtttgggtctcattgtcagaattattattcagatcaagaaatctgtgtcgataaaacctaatctcatattggagagtgaatgtcgttaagtatttctgaaatgtttgttttatctgggggttgttcatgaaactgacagatgtttttctaaaaaggactattatcagtttccaaatacaatacttctctcttctggtttttcctgaatgagcctgattttgttgctggttttcatcatctatgagggtaaaacgagtacccttaaaatccctgtggccagtttgaacacccctgttgtattcttttctctgttcagtgtgtcagctattttgtgaagatgcttagatgtatagttttgataaccacagttttaaatcttttatctgtgcataataaaaagatatatatcagttatt

SEQ ID NO: 2414 - protein, 42 aa, Homo sapiens
MSLILLLVFIIYEGKTSTLKIPVASLNTPVVFFSLFSVSAIL

SEQ ID NO: 2415 - DNA, 747 bp, Homo sapiens
gactctaaatcatttatcctcaatgcagaccactggagtctgtgctttctgcctcaaggtgaattggaatagtcatttgaaaagagaactgcacctggccctcttctcccttttcataccatatcacattagtattcaaggtaacaccccaaataccctaatgattatgaactaaaaggaagatgaaggattttaggaaaaatgtctgttcacccaaaggattaagatgttgggaaatgtgtaacctgtttagcagagtattaaagttcaggagaagttctgtgattttcagtagtaactcagaaagcccagagaacataaatagtttatgcatattatggtttatgacaaaacatttaaaatagttgaggtggtgccatcctaccctattttctgaaattttgaagtataggcatattagtgctgtttgccttggattctgtgaccgctttttacagcatttgagaacacttgggcttatacagtaaaaatgattacaccacgtcggtgatgattttttttaaattgtgaaagagaggagtaaccatttctctgaaacagtgcacatacacagaagagcatggatgtggatgtcatcaggagcaataaatatcattccaaaatttgccgtgatttacatacctatagatgtgtttaattcttagcaagttaaatgtttgagatactgaattttctccgtattttcaccacctaactttaaaaaataaaaatgcctgcatatcttgg

SEQ ID NO: 2416 - protein, 50 aa, Homo sapiens [sequence omitted]

SEQ ID NO: 2417 - DNA, 2624 bp, Homo sapiens
gcggagtcgtgaaagtggagggggctgagggagggcggggaggaaggtctgggggcggacccagggggaggaggaggaggaagagtaactgctgaaaggaggtggcgaaggaggatccggagcagctgctgccagcccgcgggcactgaagtcctcccggctgccgctcgagtagccacgggcgcgatcgggaccagaagtctcctcctccatgatcactttggaagccgggggaagactttgccctgccctgagagctggtctgcgtttcccaggcgcggcggcggcggagcagcagctgcagcagccgagtccaaataggagcggccacagccaggggcgtgagcgccccgcgcggagcgagctcgggttcccctcggaatgtccccggggcgcccggcgcgctgaccccgaagccgcctccgccttcggcgcctgctgcctccctcggccaggcttgttgttcgggactgtgagcttcctggctcctgggcagtggggaagcccccgggggcgagtgacttcagctggccacgacccagccctcccccgtgcgtatctcgcttaagatggcagcggagtcaggggaactaatcggggcttgtgagttcatgaaagatcggttatattttgctactttaaggaatagaccaaaaagcacagtaaatacccactatttctccatcgatgaggagctggtctatgaaaatttctatgcagattttggaccgctgaacttggcaatggtgtacagatattgctgcaaactaaacaagaaactaaaatcatacagtttgtcaagaaagaaaatagtgcactacacctgttttgaccaacggaaaagagcaaatgcagcatttttgataggtgcctatgcagtaatctatttaaagaagacaccagaagaagcctacagagcactcctgtctggctcaaaccccccctatcttccattcagggatgcttcctttggaaattgcacttacaatctcaccattctcgactgtttgcagggaatcagaaagggattacaacatggattttttgactttgagacatttgatgtggatgaatatgaacattatgagcgagttgaaaatggtgacttcaactggattgttccaggaaaatttttagcatttagtggaccacatcctaaaagcaaaattgagaatggttatcctcttcacgcccctgaagcctactttccttatttcaaaaagcataatgtgactgcagttgtgaggctaaacaaaaagatttatgaggcaaagcgcttcacagacgctggcttcgagcactatgacctcttcttcatagatggcagcacacccagtgacaacatcgtgcgaaggttcctgaacatctgtgagaacaccgaaggggccatcgccgttcactgcaaagctggtcttggaagaacagggacattgatagcctgttatgtaatgaaacactacaggtttacacatgctgaaataattgcttggattagaatatgccggccaggctctattataggaccccagcagcacttcctggaagaaaaacaagcatcgttgtgggtccaaggagacattttccgatccaaactgaaaaatcgaccatccagtgaaggaagtattaataaaattctttctggcctagatgatatgtctattggtggaaatctttcaaaaacacaaaacatggaacgatttggagaggtaagttttccctaggagattctatcttcttaaaactgatgttctgcatttgtttctcagttggacctatataacatagcagtgtcttttctctggatgccacgagtaccaagtttttagaagtagagccatccgtctatatagcaagaagcagaggaaagaaaccaattgcccttaaaaaaaaaaaagctataatttaaggagtaaattataaaggaggctactctggtaaggggtaatatttatagaaaggaaacagaaaagcaaactttctatttgaaaattaaaataaatatcaagaagaaaaattttaatgtgacaattgaggaaataatacataccacaagtggtgctttgaaagcctcaaattcatgctgatttctaaagtaagtgccaacttgaaaacatgattagggcacttttttaaaaaaaaattaaggctctactgtaaacaaaccacggtaaatagttgatatatattgtctgattaatattcataactacctggtgagttaggtaatactatctctattttataggaaggaaattgcatatcagagatgttctaacctcagtgtcaaacatggttcaatccatgtctgtctgagtccaagcttgtgtttttttatatcacaccctgttacctctgaataaaaatagaagtgatttactaagaattaggattatgagcatttttggaactagaaacaacgttgaaacaccatttgtttggttccactattgtagagacaagaaactggggtcccagaaaatttgtgatttgtgtaaagttccagggttgtttagtagtggggccactttgacaactgggcattcaattcctagtttaggtctttctaccacgttatacctgaggtgaagctaagtatctggtttatacttttatatctctaaagg

SEQ ID NO: 2418 - protein, 383 aa, Homo sapiens; identical to SEQ ID NO: 95

SEQ ID NO: 2419 - DNA, 2439 bp, Homo sapiens
gcggagtcgtgaaagtggagggggctgagggagggcggggaggaaggtctgggggcggacccagggggaggaggaggaggaagagtaactgctgaaaggaggtggcgaaggaggatccggagcagctgctgccagcccgcgggcactgaagtcctcccggctgccgctcgagtagccacgggcgcgatcgggaccagaagtctcctcctccatgatcactttggaagccgggggaagactttgccctgccctgagagctggtctgcgtttcccaggcgcggcggcggcggagcagcagctgcagcagccgagtccaaataggagcggccacagccaggggcgtgagcgccccgcgcggagcgagctcgggttcccctcggaatgtccccggggcgcccggcgcgctgaccccgaagccgcctccgccttcggcgcctgctgcctccctcggccaggcttgttgttcgggactgtgagcttcctggctcctgggcagtggggaagcccccgggggcgagtgacttcagctggccacgacccagccctcccccgtgcgtatctcgcttaagatggcagcggagtcaggggaactaatcggggcttgtgagttcatgaaagatcggttatattttgctactttaaggaatagaccaaaaagcacagtaaatacccactatttctccatcgatgaggagctggtctatgaaaatttctatgcagattttggaccgctgaacttggcaatggtgtacagatattgctgcaaactaaacaagaaactaaaatcatacagtttgtcaagaaagaaaatagtgcactacacctgttttgaccaacggaaaagagcaaatgcagcatttttgataggtgcctatgcagtaatctatttaaagaagacaccagaagaagcctacagagcactcctgtctggctcaaaccccccctatcttccattcagggatgcttcctttggaaattgcacttacaatctcaccattctcgactgtttgcagggaatcagaaagggattacaacatggattttttgactttgagacatttgatgtggatgaatatgaacattatgaggttatcctcttcacgcccctgaagcctactttccttatttcaaaaagcataatgtgactgcagttgtgaggctaaacaaaaagatttatgaggcaaagcgcttcacagacgctggcttcgagcactatgacctcttcttcatagatggcagcacacccagtgacaacatcgtgcgaaggttcctgaacatctgtgagaacaccgaaggggccatcgccgttcactgcaaagctggtcttggaagaacagggacattgatagcctgttatgtaatgaaacactacaggtttacacatgctgaaataattgcttggattagaatatgccggccaggctctattataggaccccagcagcacttcctggaagaaaaacaagcatcgttgtgggtccaaggagacattttccgatccaaactgaaaaatcgaccatccagtgaaggaagtattaataaaattctttctggcctagatgatatgtctattggtggaaatctttcaaaaacacaaaacatggaacgatttggagaggataacttagaagatgatgatgtggaaatgaaaaatggtataacccagggagacaaactacgtgccttaaaaagtcagagacagccacgtacctcaccatcctgtgcatttaggtcagatgatacaaaaggacatccaagagcagtgtcccagcctttcagattaagttcatccctgcaaggatctgcagttactttgaagacatcaaaaatggcactgtccccttcagcaacggccaagaggatcaacagaacttctttgtcttcgggtgccactgtaagaagcttttccataaactcccggctagccagttctctagggaacttgaatgctgcaacagatgatccagagaacaaaaagacctcctcatcctctaaggcaggcttcacagccagcccgtttaccaacctcttgaatggcagctcccagccaactaccagaaattaccctgagctcaacaataatcagtacaacagaagcagcaacagcaacgggggcaacctgaacagccccccaggcccccacagcgccaagacagaggagcacaccaccatcctccgaccctcctacaccgggctttcttcttcttcagcgagattcctgagccgttctatccctgtaagtgcgcagacaccacctcctggtcctcagaaccctgaatgcaacttctgtgccttgccttcccagccgaggctgccaccaaagaaatttaatagtgccaaggaagccttctgagcgatgccttccctctgtgctgtgaaactgtctatgcactacattctgctagctcctcttcaagtaaacgccaagtcacaactggg

SEQ ID NO: 2420 - protein, 330 aa, Homo sapiens
MKHYRFTHAEIIAWIRICRPGSIIGPQQHFLEEKQASLWVQGDIFRSKLKNRPSSEGSINKILSGLDDMSIGGNLSKTQNMERFGEDNLEDDDVEMKNGITQGDKLRALKSQRQPRTSPSCAFRSDDTKGHPRAVSQPFRLSSSLQGSAVTLKTSKMALSPSATAKRINRTSLSSGATVRSFSINSRLASSLGNLNAATDDPENKKTSSSSKAGFTASPFTNLLNGSSQPTTRNYPELNNNQYNRSSNSNGGNLNSPPGPHSAKTEEHTTILRPSYTGLSSSSARFLSRSIPVSAQTPPPGPQNPECNFCALPSQPRLPPKKFNSAKEAF

SEQ ID NO: 2421 - DNA, 2527 bp, Homo sapiens
gcggagtcgtgaaagtggagggggctgagggagggcggggaggaaggtctgggggcggacccagggggaggaggaggaggaagagtaactgctgaaaggaggtggcgaaggaggatccggagcagctgctgccagcccgcgggcactgaagtcctcccggctgccgctcgagtagccacgggcgcgatcgggaccagaagtctcctcctccatgatcactttggaagccgggggaagactttgccctgccctgagagctggtctgcgtttcccaggcgcggcggcggcggagcagcagctgcagcagccgagtccaaataggagcggccacagccaggggcgtgagcgccccgcgcggagcgagctcgggttcccctcggaatgtccccggggcgcccggcgcgctgaccccgaagccgcctccgccttcggcgcctgctgcctccctcggccaggcttgttgttcgggactgtgagcttcctggctcctgggcagtggggaagcccccgggggcgagtgacttcagctggccacgacccagccctcccccgtgcgtatctcgcttaagatggcagcggagtcaggggaactaatcggggcttgtgagttcatgaaagatcggttatattttgctactttaaggaatagaccaaaaagcacagtaaatacccactatttctccatcgatgaggagctggtctatgaaaatttctatgcagattttggaccgctgaacttggcaatggtgtacagatattgctgcaaactaaacaagaaactaaaatcatacagtttgtcaagaaagaaaatagtgcactacacctgttttgaccaacggaaaagagcaaatgcagcatttttgataggtgcctatgcagtaatctatttaaagaagacaccagaagaagcctacagagcactcctgtctggctcaaaccccccctatcttccattcagggatgcttcctttggaaattgcacttacaatctcaccattctcgactgtttgcagggaatcagaaagggattacaacatggattttttgactttgagacatttgatgtggatgaatatgaacattatgagcgagttgaaaatggtgacttcaactggattgttccaggaaaatttttagcatttagtggaccacatcctaaaagcaaaattgagaatggttatcctcttcacgcccctgaagcctactttccttatttcaaaaagcataatgtgactgcagttgtgaggctaaacaaaaagatttatgaggcaaagcgcttcacagacgctggcttcgagcactatgacctcttcttcatagatggcagcacacccagtgacaacatcgtgcgaaggttcctgaacatctgtgagaacaccgaaggggccatcgccgttcactgcaaagctggtcttggaagaacagggacattgatagcctgttatgtaatgaaacactacaggtttacacatgctgaaataattgcttggattagaatatgccggccaggctctattataggaccccagcagcacttcctggaagaaaaacaagcatcgttgtgggtccaaggagacattttccgatccaaactgaaaaatcgaccatccagtgaaggaagtattaataaaattctttctggcctagatgatatgtctattggtggaaatctttcaaaaacacaaaacatggaacgatttggagaggataacttagaagatgatgatgtggaaatgaaaaatggtataacccagggagacaaactacgtgccttaaaaagtcagagacagccacgtacctcaccatcctgtgcatttaggtcagatgatacaaaaggacatccaagagcagtgtcccagcctttcagattaagttcatccctgcaaggatctgcagttactttgaagacatcaaaaatggcactgtccccttcagcaacggccaagaggatcaacagaacttctttgtcttcgggtgccactgtaagaagcttttccataaactcccggctagccagttctctagggaacttgaatgctgcaacagatgatccagagaacaaaaagacctcctcatcctctaaggcaggcttcacagccagcccgtttaccaacctcttgaatggcagctcccagccaactaccagaaattaccctgagctcaacaataatcagtacaacagaagcagcaacagcaacgggggcaacctgaacagccccccaggcccccacagcgccaagacagaggagcacaccaccatcctccgaccctcctacaccgggctttcttcttcttcagcgagattcctgagccgttctatccctgtaagtgcgcagacaccacctcctggtcctcagaaccctgaatgcaacttctgtgccttgccttcccagccgaggctgccaccaaagaaatttaatagtgccaaggaagccttctgagcgatgccttccctctgtgctgtgaaactgtctatgcactacattctgctagctcctcttcaagtaaacgccaagtcacaactggg

SEQ ID NO: 2422 - protein, 623 aa, Homo sapiens; identical to SEQ ID NO: 93

SEQ ID NO: 2423 - DNA, 4352 bp, Homo sapiens
gcggagtcgtgaaagtggagggggctgagggagggcggggaggaaggtctgggggcggacccagggggaggaggaggaggaagagtaactgctgaaaggaggtggcgaaggaggatccggagcagctgctgccagcccgcgggcactgaagtcctcccggctgccgctcgagtagccacgggcgcgatcgggaccagaagtctcctcctccatgatcactttggaagccgggggaagactttgccctgccctgagagctggtctgcgtttcccaggcgcggcggcggcggagcagcagctgcagcagccgagtccaaataggagcggccacagccaggggcgtgagcgccccgcgcggagcgagctcgggttcccctcggaatgtccccggggcgcccggcgcgctgaccccgaagccgcctccgccttcggcgcctgctgcctccctcggccaggcttgttgttcgggactgtgagcttcctggctcctgggcagtggggaagcccccgggggcgagtgacttcagctggccacgacccagccctcccccgtgcgtatctcgcttaagatggcagcggagtcaggggaactaatcggggcttgtgagttcatgaaagatcggttatattttgctactttaaggaatagaccaaaaagcacagtaaatacccactatttctccatcgatgaggagctggtctatgaaaatttctatgcagattttggaccgctgaacttggcaatggtgtacagatattgctgcaaactaaacaagaaactaaaatcatacagtttgtcaagaaagaaaatagtgcactacacctgttttgaccaacggaaaagagcaaatgcagcatttttgataggtgcctatgcagtaatctatttaaagaagacaccagaagaagcctacagagcactcctgtctggctcaaaccccccctatcttccattcagggatgcttcctttggaaattgcacttacaatctcaccattctcgactgtttgcagggaatcagaaagggattacaacatggattttttgactttgagacatttgatgtggatgaatatgaacattatgagcgagttgaaaatggtgacttcaactggattgttccaggaaaatttttagcatttagtggaccacatcctaaaagcaaaattgagaatggttatcctcttcacgcccctgaagcctactttccttatttcaaaaagcataatgtgactgcagttgtgaggctaaacaaaaagatttatgaggcaaagcgcttcacagacgctggcttcgagcactatgacctcttcttcatagatggcagcacacccagtgacaacatcgtgcgaaggttcctgaacatctgtgagaacaccgaaggggccatcgccgttcactgcaaagctggtcttggaagaacagggacattgatagcctgttatgtaatgaaacactacaggtttacacatgctgaaataattgcttggattagaatatgccggccaggctctattataggaccccagcagcacttcctggaagaaaaacaagcatcgttgtgggtccaaggagacattttccgatccaaactgaaaaatcgaccatccagtgaaggaagtattaataaaattctttctggcctagatgatatgtctattggtggaaatctttcaaaaacacaaaacatggaacgatttggagaggataacttagaagatgatgatgtggaaatgaaaaatggtataacccagggagacaaactacgtgccttaaaaagtcagagacagccacgtacctcaccatcctgtgcatttaggtcagatgatacaaaaggacatccaagagcagtgtcccagcctttcagattaagttcatccctgcaaggatctgcagttactttgaagacatcaaaaatggcactgtccccttcagcaacggccaagaggatcaacagaacttctttgtcttcgggtgccactgtaagaagcttttccataaactcccggctagccagttctctagggaacttgaatgctgcaacagatgatccagagaacaaaaagacctcctcatcctctaaggcaggcttcacagccagcccgtttaccaacctcttgaatggcagctcccagccaactaccagaaattaccctgagctcaacaataatcagtacaacagaagcagcaacagcaacgggggcaacctgaacagccccccaggcccccacagcgccaagacagaggagcacaccaccatcctccgaccctcctacaccgggctttcttcttcttcagcgagattcctgagccgttctatcccttcccttcagtctgaatatgttcattactaaggccttgccactccagtgaaagctgttcttctcttagacacaatttcttcatctggacgagcagtggagagggaaagcaacttcttgctggaagaatatctctgccttcttaccttaaattaaaaagagcactaagataacaccttcaagagacttgaaaacagaaaactggttaatgactactataaatgcactgaaactatgtttatggagatttccatacttttaaagacagttttaatgttgaatttggtattttgaagggttatttttaatgtattttggtaatacatttattattatatttacatgtacagtgttacattatatatgtattgtgaactttaaaagactattttgataaatttataaatatataaaattatgtaaaaactacactatattttgatttagattttcctgctgtttgctaccaaaaatttgtattttaaatctgtttagttttagtatggttttgtctctaatgaataaataattccttcttattaagaagaagtaagggagaaagtttttagaaagtgatttttatgctcgcactataaatatggcaggtcagttcattcttttgggaagtcagtttagttacactgagtttatccaagtttatctctaccaagagtataatggcatgggatggcttatttaggacaattccctttcctattgtttttgttgctgagccaatttgagttagttttgcatcctggggggctttaaaatacagcatgcagtgaaagatcagaattcactgaatatttcttctgagagcatggtttcatggtttttctctatgaaatgactcaatattccaaatgtttttttttccttcctcctttcaaaagagttcttaacccaattaggatatcctgctttgggtatgaggttgttgttgcctgtaatcacacatggtttgacatcagttttaaatcaatggagagaaaaaactgaaaaagatgctgctaagtagttctctgtattaaaggagatatttttaaaacagggtacaaccccctgctgcacacgctagcatatctggaacctactatgaaaatgaaaggacccttataggtactcacagccctttcatgtaagtatgatctgatatttaggtcttcagaagcctgtaggtttcatttctatgaggaatcgaggagcgttacatcctgatatccttccaggctgcttaagaatggactgcttcgacactgaaagtgctagttaaatggattcatatgaagtgctttactcccaaccattgagttatttataatgtatttattaggggagggtaccttgagtctattatatatgcttcatcaaaacatcttgttcatgttttatgtttttaaaaaaggcatttgaatgaatgtttgactcaggtttgttaaattaaccttcagtaactgcagtaccaaaaattacactcaactgatgaaaaaaacgaattgtatgatttaggaatcaaaaactaaaataagtggaattatgtatcttttctaaagttaaaaaagtaaaatattttattatgagttattataaaaattggttaattgtataggaagatgacagtatttttttcaagttatcataaaaagtaattcagatgacatttgagaagtaggggaaagggaatcatgttgacagttttagttctgtgaacactaatttgtgtgaagctattaaaatgattgtaaagttgactactgtaaatttcccataattatgtgtgtatatgtgtcatatgtatgtacatgtatatgtctaaaaattactttacacatgtgcctacatagacacaccaagaagtggatgtatataatatagaaagtatatagcaaagtaattttactctgataataaaaattgtttgacatgtattttgttatgaatagtttatcttccaaaagatattttgctctattttaaagtgtagaagaatacactgctaataaataataaaagttttattcaatttac

SEQ ID NO: 2424 - protein, 594 aa, Homo sapiens; identical to SEQ ID NO: 91

SEQ ID NO: 2425 - DNA, 591 bp, Homo sapiens
caaagaaaagtcaacaaaggctctaacatcaacatgaccttggataaggtgtacatttcatcaggacagatgactcgaatggccaccaccaccgaggccttgcacacacctttgcagtgaacggcgatggccccttcggtgttctcacagatgttcaggaaccttcgcacgatgttgtcactgggtgtgctgccatctatgaagaagaggtcatagtgctcgaagccagcgtctgtgaagcgctttgcctcataaatctttttgtttagcctcacaactgcagtcacattatgctttttgaaataaggaaagtaggcttcaggggcgtgaagaggataacctaaaggaacaaaggagcagtaagcaaaaggcatgcatttcatcttccacaacccagaaatacaaaactctcaacaatgaagtgtataaatctcaacaaagcttgggaggaaagtgtgttgtgtgagagaagaggtcacagcaagctcctacaagcatcaatctgcataactgtaagcaccacaggaggttaaaaagaaaacttctgtaagtactgaaaatacatcattaaagttcaaaatctcaacctct

SEQ ID NO: 2426 - protein, 38 aa, Homo sapiens
MKCINLNKAWEESVLCERRGHSKLLQASICITVSTTGG

SEQ ID NO: 2427 - DNA, 2097 bp, Homo sapiens
tttggctgttcatggggtgtaaaattcactgcagttttgaagctgagaaaagatagcttgaatcctttttcccttcagtctgaatatgttcattactaaggccttgccactccagtgaaagctgttcttctcttagacacaatttcttcatctggacgagcagtggagagggaaagcaacttcttgctggaagaatatctctgccttcttaccttaaattaaaaagagcactaagataacaccttcaagagacttgaaaacagaaaactggttaatgactactataaatgcactgaaactatgtttatggagatttccatacttttaaagacagttttaatgttgaatttggtattttgaagggttatttttaatgtattttggtaatacatttattattatatttacatgtacagtgttacattatatatgtattgtgaactttaaaagactattttgataaatttataaatatataaaattatgtaaaaactacactatattttgatttagattttcctgctgtttgctaccaaaaatttgtattttaaatctgtttagttttagtatggttttgtctctaatgaataaataattccttcttattaagaagaagtaagggagaaagtttttagaaagtgatttttatgctcgcactataaatatggcaggtcagttcattcttttgggaagtcagtttagttacactgagtttatccaagtttatctctaccaagagtataatggcatgggatggcttatttaggacaattccctttcctattgtttttgttgctgagccaatttgagttagttttgcatcctggggggctttaaaatacagcatgcagtgaaagatcagaattcactgaatatttcttctgagagcatggtttcatggtttttctctatgaaatgactcaatattccaaatgtttttttttccttcctcctttcaaaagagttcttaacccaattaggatatcctgctttgggtatgaggttgttgttgcctgtaatcacacatggtttgacatcagttttaaatcaatggagagaaaaaactgaaaaagatgctgctaagtagttctctgtattaaaggagatatttttaaaacagggtacaaccccctgctgcacacgctagcatatctggaacctactatgaaaatgaaaggacccttataggtactcacagccctttcatgtaagtatgatctgatatttaggtcttcagaagcctgtaggtttcatttctatgaggaatcgaggagcgttacatcctgatatccttccaggctgcttaagaatggactgcttcgacactgaaagtgctagttaaatggattcatatgaagtgctttactcccaaccattgagttatttataatgtatttattaggggagggtaccttgagtctattatatatgcttcatcaaaacatcttgttcatgttttatgtttttaaaaaaggcatttgaatgaatgtttgactcaggtttgttaaattaaccttcagtaactgcagtaccaaaaattacactcaactgatgaaaaaaacgaattgtatgatttaggaatcaaaaactaaaataagtggaattatgtatcttttctaaagttaaaaaagtaaaatattttattatgagttattataaaaattggttaattgtataggaagatgacagtatttttttcaagttatcataaaaagtaattcagatgacatttgagaagtaggggaaagggaatcatgttgacagttttagttctgtgaacactaatttgtgtgaagctattaaaatgattgtaaagttgactactgtaaatttcccataattatgtgtgtatatgtgtcatatgtatgtacatgtatatgtctaaaaattactttacacatgtgcctacatagacacaccaagaagtggatgtatataatatagaaagtatatagcaaagtaattttactctgataataaaaattgtttgacatgtattttgttatgaatagtttatcttccaaaagatattttgctctattttaaagtgtagaagaatacactgctaataaataataaaagttttattcaatttac

SEQ ID NO: 2428 - protein, 56 aa, Homo sapiens
MVFLYEMTQYSKCFFFLPPFKRVLNPIRISCFGYEVVVACNHTWFDISFKSMERKN

SEQ ID NO: 2429 - DNA, 2383 bp, Homo sapiens
tttggctgttcatggggtgtaaaattcactgcagttttgaagctgagaaaagatagcttgaatcctttttcccttcagtctgaatatgttcattactaaggccttgccactccagtgaaagctgttcttctcttagacacaatttcttcatctggacgagcagtggagagggaaagcaacttcttgctggaagaatatctctgccttcttaccttaaattaaaaagagcactaagataacaccttcaagagacttgaaaacagaaaactggttaatgactactataaatgcactgaaactatgtttatggagatttccatacttttaaagacagttttaatgttgaatttggtattttgaagggttatttttaatgtattttggtaatacatttattattatatttacatgtacagtgttacattatatatgtattgtgaactttaaaagactattttgataaatttataaatatataaaattatgtaaaaactacactatattttgatttagattttcctgctgtttgctaccaaaaatttgtattttaaatctgtttagttttagtatggttttgtctctaatgaataaataattccttcttattaagaagaagtaagggagaaagtttttagaaagtgatttttatgctcgcactataaatatggcaggtcagttcattcttttgggaagtcagtttagttacactgagtttatccaagtttatctctaccaagagtataatggcatgggatggcttatttaggacaattccctttcctattgtttttgttgctgagccaatttgagttagttttgcatcctggggggctttaaaatacagcatgcagtgaaagatcagaattcactgaatatttcttctgagagcatggtttcatggtttttctctatgaaatgactcaatattccaaatgtttttttttccttcctcctttcaaaagagttcttaacccaattaggatatcctgctttgggtatgaggttgttgttgcctgtaatcacacatggtttgacatcagttttaaatcaatggagagaaaaaactgaaaaagatgctgctaagtagttctctgtattaaaggagatatttttaaaacagggtacaaccccctgctgcacacgctagcatatctggaacctactatgaaaatgaaaggacccttataggtactcacagccctttcatgtaagtatgatctgatatttaggtcttcagaagcctgtaggtttcatttctatgaggaatcgaggagcgttacatcctgatatccttccaggctgcttaagaatggactgcttcgacactgaaagtgctagttaaatggattcatatgaagtgctttactcccaaccattgagttatttataatgtatttattaggggagggtaccttgagtctattatatatgcttcatcaaaacatcttgttcatgttttatgtttttaaaaaaggcatttgaatgaatgtttgactcaggtttgttaaattaaccttcagtaactgcagtaccaaaaattacactcaactgatgaaaaaaacgaattgtatgatttaggaatcaaaaactaaaataagtggaattatgtatcttttctaaagttaaaaaagtaaaatattttattatgagttattataaaaattggttaattgtataggaagatgacagtatttttttcaagttatcataaaaagtaattcagatgacatttgagaagtaggggaaagggaatcatgttgacagttttagttctgtgaacactaatttgtgtgaagctattaaaatgattgtaaagttgactactgtaaatttcccataattatgtgtgtatatgtgtcatatgtatgtacatgtatatgtctaaaaattactttacacatgtgcctacatagacacaccaagaagtggatgtatataatatagaaagtatatagcaaagtaattttactctgataataaaaattgtttgacatgtattttgttatgaatagtttatcttccaaaagatattttgctctattttaaagtgtagaagaatacactgctaataaataataaaagttttattcaatttacttattttttggtgtttataatttgaatttttgagttatcaatgtactgaagtctctttataattttatttttggttcagtgtggtcagtgccttgagtgtttcaagatctctattctggattttagtttagcttttattgactttctaggttgtggccattgcctgaaatacatgacagtgagctcacagaaaccttatactttgaatttcacaaaaatcatataatgttaggttcttgcttgctttccctttattttttttactgtcaataaaatactgatcctg

SEQ ID NO: 2430 - protein, 56 aa, Homo sapiens; identical to SEQ ID NO: 2428

SEQ ID NO: 2431 - DNA, 3499 bp, Homo sapiens
gggttcaccacatcagccaccactcctgcttctgagcacagggtgctctcctcttgagctcagcttctgcttttgcagccaagcattcttgctgctgctgcctgcctgcccacccgcctgggcttgcagcccgccactttactttctccagccctgataccagctgagaagtctccctgcagctgctagttcctgcccaggaccatgtgtgtggatgctgcttgggagaagcgggcacttgctcctggcactgatcccagctgagtttctcctgttgatttctggaccactgatgctgttgctgaggaggtatttcccggcatccctccccctgagacaccggctaaggaccagcctaaacgcaaggcaggacagtgtcaggatggaccgcgctgccagaagccgacgctagcgagggaggtgtgaagagttggccagaatgaccaactcctcctccacatccacctcctccaccaccggtggctcgctgctgctgctctgcgaggaagaggagtcgtgggcgggccggcgcatcccggtgtcactcctgtattcgggcctggccatcgggggcacgctggccaacggcatggtcatctatctcgtgtcgtccttccgaaagctgcagaccaccagcaacgccttcatcgtgaacggctgcgccgccgacctcagcgtctgcgccctctggatgccgcaggaggcggtgctcgggctcctgcccaccggctctgcggagccccccgcagactgggacggcgctgggggcagctaccgcctgctacggggtgggctgctgggcctcggactcacggtgtccctcctctcccactgcctcgtggccctgaaccgctacctgctcatcacccgggcgcccgccacctaccaggcgctgtaccagaggcgccacacggcgggcatgctggcgctgtcctgggcgctcgccctgggcctcgtgctgctgctcccgccctgggcaccgcggcccggcgccgcgccaccgcgagtccactacccggcgctgctggccgccgcggcgctgctggcgcagacagctctgctgctgcactgctacctgggcatcgtgcgccgcgtgcgtgtcagcgtcaagcgggtcagcgtgctcaacttccacctgctgcaccagttgcccggctgcgccgccgccgccgccgccttcccgggcgcccagcacgcgccgggccccggtggcgccgcgcacccggcgcaggcccagcccctgccgcccgcgctgcacccgcggcgggcacagcggcgtctcagcggcctgtcggtgctgctgctctgctgcgtcttcctgctggccacgcagccactggtgtgggtgagcctggccagcggcttctcgctgccggtgccctggggagtgcaggcggccagctggctcctgtgctgcgccctgtccgcgctcaatccgctgctctacacgtggaggaacgaggagttccgccgctccgtgcgctcagtcctgccgggcgtcggcgacgcggcggccgctgccgttgccgccacagccgtgcccgcagtgtcccaggcgcaactgggcacccgcgccgcgggccagcactggtaacctagccggggcccgagggaagcggagatccccggcttccgacgtccttgggcaccgtcgcctccttccctcctagggcatcccctgcctgaacgaagacttccgccgcgaagcccgatagatcgggggaaaatggggccttcgaccccagcgggctacctgaaccaaggcgtctctttaagtggggcgcccgaagtcattttggacggccacctgatttttaccctttgtttctgtgttttagaggaatcctaaagtcaaaacaccagagacttgaagaacttgcaaactggcgttttaaaataaccggttaatttatttccacacagtttgtttttgaaaaagagctttcataatgtataaccctttccactttcatcgtcttatatatgaagcgccttgagtgtgcatgaaccaaaggaaataacattgaagaaggaaaacaatatgtagaaagtattttagaaagtaacctgtctttgatgatgcttctcttaccatttagtttttgtatattaccctggggcagtgaagccctaggtgtgcccaccagtatgagttgccattaagacctcaagccctttattcttaaaagggtttttaataaagtctttctcaaatgaggtagaatcttagccagtgagaaaaaaaattattttatgctccttttttttcgcactcttaagactgaaaattggcgttgagtgttatagtgaaaattttccagtttgataattgatggtcagagccagcactggaattttgaaaacaaataaggtgattatctattttaggtaccgtttcacattttctatagcatgcacacttgttgctaccctcattttgtaaccaatttatttgccttatgaatgtgattgcagctttgaacattctgtactataatggttgctaagaagaataagtccttctgttttctctttaacatttaaaatatctcaatgcacatgatataattaaacactaataataccatgactgcatagctaatattagctgctattgcatgctcctagatgctagaacttattgggcatgtggtatactgaagcaatacccgttagacaaggatattttacttcttccagacaccagaagaaatggccttcaattatttgaaaagagacacagagacacctctggctacctagagttcttcctgtcttgacccaatttatgagaaagctcccagttgggactttatctcacaagtggaatcacagtcaagacggatcaataatatggtttggctcagcaaagccagctgtgctcttttagggtttaaacaagccacacgttagaaagcaacactgtttttatgtagttcatatatattaccatgacatttaacatcaatatcgtatatgttgaaggaggtataataaactcagtcatatatagtgaacagttcaaatgggaaagtgttctaaaacatattatttgagatttgtcatattcatctttggtttactaaatttacttagaaatatttgaaatgcaaaattgtgtgaaatcaccttatcaaattaaaatgggaagaaagtaattttaataatttttaataatcatatgtcagcattctgactacttaccacatcaaatctgggcccaaacagcctcagttaactgcataattcaggaacaaaaccagcttgctttgttgcacgcctgggcaatttcagccaggacattaggaccacttgttgtacatctgaataattatggaagttgggacatgttaaggaaaacaaatatgttcatcaccaacaatcagctgtcattttattaatctatcccttttgtgcatgcaccatttctctcttactaacagtttcatctgttcacattttccttgattcaaatattaaagttcagacaactattctg

SEQ ID NO: 2432 - protein, 65 aa, Homo sapiens
MLLGRSGHLLLALIPAEFLLLISGPLMLLLRRYFPASLPLRHRLRTSLNARQDSVRMDRAARSRR

SEQ ID NO: 2433 - DNA, 520 bp, Homo sapiens
agacctttgtgctgaaggatagtcctgtccgagacctgctgcccactgtgaacttctctgggttgaaagaagattaggggaaaagaggtcaccttccagcagtgaaatgaacaaatagaagatgagaagtacaggcaagtggtttgtctttatccacccccactgttgtggtcagccccagagaattttatcttcttccttggcattggttcactggacatttccacgtgagcggcctccgtagctaacctccctgccctctgaggagccatcttcctgaatcgcattctctactggactctggcctgcttggagaggtggcagcaggcacctggtcttcagaaattgtttcctgtgaattctgtgactcctaataggccagtttgtgataagcttactctatgagtcttcatttttctaaaataaagtgaatgtatttttatattctctgtatatctggaagtcgatcctgctcctatttctttctctttttttagacagaatcttgctctgtcaccca

SEQ ID NO: 2434 - protein, 40 aa, Homo sapiens
MRSTGKWFVFIHPHCCGQPQRILSSSLALVHWTFPRERPP

SEQ ID NO: 2435 - DNA, 416 bp, Homo sapiens
ctaactggactctcgctcctgctggctggacatggaggatttggaggaagatgtaaggtttatttggtcagccccagagaattttatcttcttccttggcattggttcactggacatttccacgtgagcggcctccgtagctaacctccctgccctctgaggagccatcttcctgaatcgcattctctactggactctggcctgcttggagaggtggcagcaggcacctggtcttcagaaattgtttcctgtgaattctgtgactcctaataggccagtttgtgataagcttactctatgagtcttcatttttctaaaataaagtgaatgtatttttatattctctgtatatctggaagtcgatcctgctcctatttctttctctttttttagacagaatcttgctctgtcaccca

SEQ ID NO: 2436 - protein, 31 aa, Homo sapiens
MEDLEEDVRFIWSAPENFIFFLGIGSLDIST

SEQ ID NO: 2437 - DNA, 1822 bp, Homo sapiens
gcgggagaaagcctgttgcgtggaagataaggcggcgcgggaagtggacacagggtgggctggagctgcgagccttgggcagaatggatacctgaggaaaggtatggtttctctccggctcagatctaactggactctcgctcctgctggctggacatggaggatttggaggaagatgtaaggtttattgtggatgagaccttggactttggggggctgtcaccatctgacagccgtgaggaggaagacataacagtgttggtgactccagagaaaccacttcgacggggcctctcccaccgaagtgacccaaatgcagtggcacctgccccccagggtgtgaggctcagcctaggccccctcagtccagagaagctggaggagatcctcgatgaggccaaccggctggccgctcagctggagcagtgtgccctgcaggatcgggagagcgcaggcgagggcctggggcctcgccgagtgaagcccagtcctcggcgggagacctttgtgctgaaggatagtcctgtccgagacctgctgcccactgtgaactctttgacgcggagcaccccctccccaagcagcctgacgcctcgactccggagtaatgataggaaggggtcagtcagggctctccgggctacatctggaaagaggccctccaacatgaagagggagtcacccacttgcaatctgttccctgcatccaaaagcccagcatcttctcctcttacccgatcgactcccccagtccgggggagagccgggcccagtgggagagcagcagccagcccacccacccccatcagatccgtcctggccccacagccttctaccagcaactctcaacgcctgccccggccgcagggagcagctgctaaatcttccagtcaactgcccattccctcggccatccccaggcctgccagccgaatgccactcaccagccggagtgtgccacctggcagaggtgccctacctccggattctctgtcaactcgaaaagggcttccaagaccaagcactgcaggacacagagtgcgggaaagtggacacaaggttcctgtttcccagcgactaaatcttcctgtcatgggtgccactcgcagcaatctgcagccccccaggaaagtggcagtcccaggacctaccaggtaaagagatcaggacagcaagcaagacttcagtagcaaaccactacagtcagtacctggactcgcctctacccagcagaccctgactccagcagattctggcccagggacaggaggaagagatgccaccagggctggtctcccaggagtagagaccatgggaaatggggtggattaggattgagctggagaagacttaaactctctgggttgaaagaagattaggggaaaagaggtcaccttccagcagtgaaatgaacaaatagaagatgagaagtacaggcaagtggtttgtctttatccacccccactgttgtggtcagccccagagaattttatcttcttccttggcattggttcactggacatttccacgtgagcggcctccgtagctaacctccctgccctctgaggagccatcttcctgaatcgcattctctactggactctggcctgcttggagaggtggcagcaggcacctggtcttcagaaattgtttcctgtgaattctgtgactcctaataggccagtttgtgataagcttactctatgagtcttcatttttctaaaataaagtgaatgtatttttatattctctgtatatctggaagtcgatcctgctcctatttctttctctttttttagacagaatcttgctctgtcaccca

SEQ ID NO: 2438 - protein, 333 aa, Homo sapiens; identical to SEQ ID NO: 103

SEQ ID NO: 2439 - DNA, 1799 bp, Homo sapiens
gcgggagaaagcctgttgcgtggaagataaggcggcgcgggaagtggacacagggtgggctggaggtgtgcttcgcgtgtgatgccaggggagtggaaagatctaactggactctcgctcctgctggctggacatggaggatttggaggaagatgtaaggtttattgtggatgagaccttggactttggggggctgtcaccatctgacagccgtgaggaggaagacataacagtgttggtgactccagagaaaccacttcgacggggcctctcccaccgaagtgacccaaatgcagtggcacctgccccccagggtgtgaggctcagcctaggccccctcagtccagagaagctggaggagatcctcgatgaggccaaccggctggccgctcagctggagcagtgtgccctgcaggatcgggagagcgcaggcgagggcctggggcctcgccgagtgaagcccagtcctcggcgggagacctttgtgctgaaggatagtcctgtccgagacctgctgcccactgtgaactctttgacgcggagcaccccctccccaagcagcctgacgcctcgactccggagtaatgataggaaggggtcagtcagggctctccgggctacatctggaaagaggccctccaacatgaagagggagtcacccacttgcaatctgttccctgcatccaaaagcccagcatcttctcctcttacccgatcgactcccccagtccgggggagagccgggcccagtgggagagcagcagccagcccacccacccccatcagatccgtcctggccccacagccttctaccagcaactctcaacgcctgccccggccgcagggagcagctgctaaatcttccagtcaactgcccattccctcggccatccccaggcctgccagccgaatgccactcaccagccggagtgtgccacctggcagaggtgccctacctccggattctctgtcaactcgaaaagggcttccaagaccaagcactgcaggacacagagtgcgggaaagtggacacaaggttcctgtttcccagcgactaaatcttcctgtcatgggtgccactcgcagcaatctgcagccccccaggaaagtggcagtcccaggacctaccaggtaaagagatcaggacagcaagcaagacttcagtagcaaaccactacagtcagtacctggactcgcctctacccagcagaccctgactccagcagattctggcccagggacaggaggaagagatgccaccagggctggtctcccaggagtagagaccatgggaaatggggtggattaggattgagctggagaagacttaaactctctgggttgaaagaagattaggggaaaagaggtcaccttccagcagtgaaatgaacaaatagaagatgagaagtacaggcaagtggtttgtctttatccacccccactgttgtggtcagccccagagaattttatcttcttccttggcattggttcactggacatttccacgtgagcggcctccgtagctaacctccctgccctctgaggagccatcttcctgaatcgcattctctactggactctggcctgcttggagaggtggcagcaggcacctggtcttcagaaattgtttcctgtgaattctgtgactcctaataggccagtttgtgataagcttactctatgagtcttcatttttctaaaataaagtgaatgtatttttatattctctgtatatctggaagtcgatcctgctcctatttctttctctttttttagacagaatcttgctctgtcaccca

SEQ ID NO: 2440 - protein, 333 aa, Homo sapiens; identical to SEQ ID NO: 103

SEQ ID NO: 2441 - DNA, 1685 bp, Homo sapiens
agctgattcccgggactaggttgcgggagaaagcctgttgcgtggaagataaggcggcgcgggaagtggacacagggtgggctggagatctaactggactctcgctcctgctggctggacatggaggatttggaggaagatgtaaggtttattgtggatgagaccttggactttggggggctgtcaccatctgacagccgtgaggaggaagacataacagtgttggtgactccagagaaaccacttcgacggggcctctcccaccgaagtgacccaaatgcagtggcacctgccccccagggtgtgaggctcagcctaggccccctcagtccagagaagctggaggagatcctcgatgaggccaaccggctggccgctcagctggagcagtgtgccctgcaggatcgggagagcgcaggcgagggcctggggcctcgccgagtgaagcccagtcctcggcgggagacctttgtgctgaaggatagtcctgtccgagacctgctgcccactgtgaactctttgacgcggagcaccccctccccaagcagcctgacgcctcgactccggagtaatgataggaaggggtcagtcagggctctccgggctacatctggaaagaggccctccaacatgaagagggagtcacccacttgcaatctgttccctgcatccaaaagcccagcatcttctcctcttacccgatcgactcccccagtccgggggagagccgggcccagtgggagagcagcagccagtgaggagaccagagcagccaagttgcgggcctgccagccgaatgccactcaccagccggagtgtgccacctggcagaggtgccctacctccggattctctgtcaactcgaaaagggcttccaagaccaagcactgcaggacacagagtgcgggaaagtggacacaaggttcctgtttcccagcgactaaatcttcctgtcatgggtgccactcgcagcaatctgcagccccccaggaaagtggcagtcccaggacctaccaggtaaagagatcaggacagcaagcaagacttcagtagcaaaccactacagtcagtacctggactcgcctctacccagcagaccctgactccagcagattctggcccagggacaggaggaagagatgccaccagggctggtctcccaggagtagagaccatgggaaatggggtggattaggattgagctggagaagacttaaactctctgggttgaaagaagattaggggaaaagaggtcaccttccagcagtgaaatgaacaaatagaagatgagaagtacaggcaagtggtttgtctttatccacccccactgttgtggtcagccccagagaattttatcttcttccttggcattggttcactggacatttccacgtgagcggcctccgtagctaacctccctgccctctgaggagccatcttcctgaatcgcattctctactggactctggcctgcttggagaggtggcagcaggcacctggtcttcagaaattgtttcctgtgaattctgtgactcctaataggccagtttgtgataagcttactctatgagtcttcatttttctaaaataaagtgaatgtatttttatattctctgtatatctggaagtcgatcctgctcctatttctttctctttttttagacagaatcttgctctgtcaccca

SEQ ID NO: 2442 - protein, 310 aa, Homo sapiens; identical to SEQ ID NO: 99

SEQ ID NO: 2443 - DNA, 1876 bp, Homo sapiens
agctgattcccgggactaggttgcgggagaaagcctgttgcgtggaagataaggcggcgcgggaagtggacacagggtgggctggagatctaactggactctcgctcctgctggctggacatggaggatttggaggaagatgtaaggtttattgtggatgagaccttggactttggggggctgtcaccatctgacagccgtgaggaggaagacataacagtgttggtgactccagagaaaccacttcgacggggcctctcccaccgaagtgacccaaatgcagtggcacctgccccccagggtgtgaggctcagcctaggccccctcagtccagagaagctggaggagatcctcgatgaggccaaccggctggccgctcagctggagcagtgtgccctgcaggatcgggagagcgcaggcgagggcctggggcctcgccgagtgaagcccagtcctcggcgggagacctttgtgctgaaggatagtcctgtccgagacctgctgcccactgtgaactctttgacgcggagcaccccctccccaagcagcctgacgcctcgactccggagtaatgataggaaggggtcagtcagggctctccgggctacatctggaaagaggccctccaacatgaagagggagtcacccacttgcaatctgttccctgcatccaaaagcccagcatcttctcctcttacccgatcgactcccccagtccgggggagagccgggcccagtgggagagcagcagccagtgaggagaccagagcagccaagttgcgggtgagtgggagtggggagtttgtgggattgaccctgaaatttctccacccctctccaccaggcccacccacccccatcagatccgtcctggccccacagccttctaccagcaactctcaacgcctgccccggccgcagggagcagctgctaaatcttccagtcaactgcccattccctcggccatccccaggcctgccagccgaatgccactcaccagccggagtgtgccacctggcagaggtgccctacctccggattctctgtcaactcgaaaagggcttccaagaccaagcactgcaggacacagagtgcgggaaagtggacacaaggttcctgtttcccagcgactaaatcttcctgtcatgggtgccactcgcagcaatctgcagccccccaggaaagtggcagtcccaggacctaccaggtaaagagatcaggacagcaagcaagacttcagtagcaaaccactacagtcagtacctggactcgcctctacccagcagaccctgactccagcagattctggcccagggacaggaggaagagatgccaccagggctggtctcccaggagtagagaccatgggaaatggggtggattaggattgagctggagaagacttaaactctctgggttgaaagaagattaggggaaaagaggtcaccttccagcagtgaaatgaacaaatagaagatgagaagtacaggcaagtggtttgtctttatccacccccactgttgtggtcagccccagagaattttatcttcttccttggcattggttcactggacatttccacgtgagcggcctccgtagctaacctccctgccctctgaggagccatcttcctgaatcgcattctctactggactctggcctgcttggagaggtggcagcaggcacctggtcttcagaaattgtttcctgtgaattctgtgactcctaataggccagtttgtgataagcttactctatgagtcttcatttttctaaaataaagtgaatgtatttttatattctctgtatatctggaagtcgatcctgctcctatttctttctctttttttagacagaatcttgctctgtcaccca

SEQ ID NO: 2444 - protein, 363 aa, Homo sapiens; identical to SEQ ID NO: 101

SEQ ID NO: 2445 - DNA, 1823 bp, Homo sapiens
gggcctgagagattcgaaaggagccccgccccctcggagctgattcccgggactaggttgcgggagaaagcctgttgcgtggaagataaggcggcgcgggaagtggacacagggtgggctggagatctaactggactctcgctcctgctggctggacatggaggatttggaggaagatgtaaggtttattgtggatgagaccttggactttggggggctgtcaccatctgacagccgtgaggaggaagacataacagtgttggtgactccagagaaaccacttcgacggggcctctcccaccgaagtgacccaaatgcagtggcacctgccccccagggtgtgaggctcagcctaggccccctcagtccagagaagctggaggagatcctcgatgaggccaaccggctggccgctcagctggagcagtgtgccctgcaggatcgggagagcgcaggcgagggcctggggcctcgccgagtgaagcccagtcctcggcgggagacctttgtgctgaaggatagtcctgtccgagacctgctgcccactgtgaactctttgacgcggagcaccccctccccaagcagcctgacgcctcgactccggagtaatgataggaaggggtcagtcagggctctccgggctacatctggaaagaggccctccaacatgaagagggagtcacccacttgcaatctgttccctgcatccaaaagcccagcatcttctcctcttacccgatcgactcccccagtccgggggagagccgggcccagtgggagagcagcagccagcccacccacccccatcagatccgtcctggccccacagccttctaccagcaactctcaacgcctgccccggccgcagggagcagctgctaaatcttccagtcaactgcccattccctcggccatccccaggcctgccagccgaatgccactcaccagccggagtgtgccacctggcagaggtgccctacctccggattctctgtcaactcgaaaagggcttccaagaccaagcactgcaggacacagagtgcgggaaagtggacacaaggttcctgtttcccagcgactaaatcttcctgtcatgggtgccactcgcagcaatctgcagccccccaggaaagtggcagtcccaggacctaccaggtaaagagatcaggacagcaagcaagacttcagtagcaaaccactacagtcagtacctggactcgcctctacccagcagaccctgactccagcagattctggcccagggacaggaggaagagatgccaccagggctggtctcccaggagtagagaccatgggaaatggggtggattaggattgagctggagaagacttaaactctctgggttgaaagaagattaggggaaaagaggtcaccttccagcagtgaaatgaacaaatagaagatgagaagtacaggcaagtggtttgtctttatccacccccactgttgtggtcagccccagagaattttatcttcttccttggcattggttcactggacatttccacgtgagcggcctccgtagctaacctccctgccctctgaggagccatcttcctgaatcgcattctctactggactctggcctgcttggagaggtggcagcaggcacctggtcttcagaaattgtttcctgtgaattctgtgactcctaataggccagtttgtgataagcttactctatgagtcttcatttttctaaaataaagtgaatgtatttttatattctctgtatatctggaagtcgatcctgctcctatttctttctctttttttagacagaatcttgctctgtcaccca

SEQ ID NO: 2446 - protein, 333 aa, Homo sapiens; identical to SEQ ID NO: 103

SEQ ID NO: 2447 - DNA, 454 bp, Homo sapiens
agacctttgtgctgaaggatagtcctgtccgagacctgctgcccactgtgaacttctctgggttgaaagaagattaggggaaaagaggtcaccttccagcagtgaaatgaacaaatagaagatgagaagtacaggcaagtggtttgtctttatccacccccactgttgtggtcagccccagagaattttatcttcttccttggcattggttcactggacatttccacgtgagcggcctccgtagctaacctccctgccctctgaggagccatcttcctgaatcgcattctctactggactctggcctgcttggagaggtggcagcaggcacctggtcttcagaaattgtttcctgtgaattctgtgactcctaataggccagtttgtgataagcttactctatgagtcttcatttttctaaaataaagtgaatgtatttttatattctctgtat

SEQ ID NO: 2448 - protein, 40 aa, Homo sapiens; identical to SEQ ID NO: 2434

SEQ ID NO: 2449 - DNA, 2212 bp, Homo sapiens
ggtttctctccggctcagatctaactggactctcgctcctgctggctggacatggaggatttggaggaaggtaaggaaaggagggagggaagaatgaaagggaggagtgagacccagcgatggagagctgcatcagggacccatgactggctttcattcttctttccccttcagatgtaaggtttattgtggatgagaccttggactttggggggctgtcaccatctgacaggtaccagcctctttatcccacttattttcctctaacagtacctctttgtctcgaatcccttactgctgaattattggcttgggttggtaacttagcaaggtttggcgcacttggggctgctgggcggctggctgactcgggcctctatgacactattggtagcggggagagaagggagaagctggagttagatttcagggtgttaagaagaaggataagtggatttgctgcatctccatcctggcatcatttctgatgtccgtaaatgctaaaggcctattaggccccatagaaccaggtatctcatcgcccagaggccacatctcacagccagcatgggcatcggggcctagggtcatgtccctggctctgttgtggggcttttatgcagtctcccttgcataatctcctgttcccttttgcatgggcatgatgcctggtttgtttcctgtctcagccgtgaggaggaagacataacagtgttggtgactccagagaaaccacttcgacggggcctctcccaccgaagtgacccaaatgcagtggcacctgccccccagggtgtgaggctcagcctaggccccctcagtccagagaagctggaggagatcctcgatgaggccaaccggctggccgctcagctggagcagtgtgccctgcaggatcgggagagcgcaggcgagggcctggggcctcgccgagtgaagcccagtcctcggcgggagacctttgtgctgaaggatagtcctgtccgagacctgctgcccactgtgaactctttgacgcggagcaccccctccccaagcagcctgacgcctcgactccggagtaatgataggaaggggtcagtcagggctctccgggctacatctggaaagaggccctccaacatgaagagggagtcacccacttgcaatctgttccctgcatccaaaagcccagcatcttctcctcttacccgatcgactcccccagtccgggggagagccgggcccagtgggagagcagcagccagcccacccacccccatcagatccgtcctggccccacagccttctaccagcaactctcaacgcctgccccggccgcagggagcagctgctaaatcttccagtcaactgcccattccctcggccatccccaggcctgccagccgaatgccactcaccagccggagtgtgccacctggcagaggtgccctacctccggattctctgtcaactcgaaaagggcttccaagaccaagcactgcaggacacagagtgcgggaaagtggacacaaggttcctgtttcccagcgactaaatcttcctgtcatgggtgccactcgcagcaatctgcagccccccaggaaagtggcagtcccaggacctaccaggtaaagagatcaggacagcaagcaagacttcagtagcaaaccactacagtcagtacctggactcgcctctacccagcagaccctgactccagcagattctggcccagggacaggaggaagagatgccaccagggctggtctcccaggagtagagaccatgggaaatggggtggattaggattgagctggagaagacttaaactctctgggttgaaagaagattaggggaaaagaggtcaccttccagcagtgaaatgaacaaatagaagatgagaagtacaggcaagtggtttgtctttatccacccccactgttgtggtcagccccagagaattttatcttcttccttggcattggttcactggacatttccacgtgagcggcctccgtagctaacctccctgccctctgaggagccatcttcctgaatcgcattctctactggactctggcctgcttggagaggtggcagcaggcacctggtcttcagaaattgtttcctgtgaattctgtgactcctaataggccagtttgtgataagcttactctatgagtcttcatttttctaaaataaagtgaatgtatttttatattctctgtat

SEQ ID NO: 2450 - protein, 163 aa, Homo sapiens
MKRESPTCNLFPASKSPASSPLTRSTPPVRGRAGPSGRAAASPPTPIRSVLAPQPSTSNSQRLPRPQGAAAKSSSQLPIPSAIPRPASRMPLTSRSVPPGRGALPPDSLSTRKGLPRPSTAGHRVRESGHKVPVSQRLNLPVMGATRSNLQPPRKVAVPGPTR

SEQ ID NO: 2451 - DNA, 1733 bp, Homo sapiens
gcgggagaaagcctgttgcgtggaagataaggcggcgcgggaagtggacacagggtgggctggaggtgtgcttcgcgtgtgatgccaggggagtggaaagatctaactggactctcgctcctgctggctggacatggaggatttggaggaagatgtaaggtttattgtggatgagaccttggactttggggggctgtcaccatctgacagccgtgaggaggaagacataacagtgttggtgactccagagaaaccacttcgacggggcctctcccaccgaagtgacccaaatgcagtggcacctgccccccagggtgtgaggctcagcctaggccccctcagtccagagaagctggaggagatcctcgatgaggccaaccggctggccgctcagctggagcagtgtgccctgcaggatcgggagagcgcaggcgagggcctggggcctcgccgagtgaagcccagtcctcggcgggagacctttgtgctgaaggatagtcctgtccgagacctgctgcccactgtgaactctttgacgcggagcaccccctccccaagcagcctgacgcctcgactccggagtaatgataggaaggggtcagtcagggctctccgggctacatctggaaagaggccctccaacatgaagagggagtcacccacttgcaatctgttccctgcatccaaaagcccagcatcttctcctcttacccgatcgactcccccagtccgggggagagccgggcccagtgggagagcagcagccagcccacccacccccatcagatccgtcctggccccacagccttctaccagcaactctcaacgcctgccccggccgcagggagcagctgctaaatcttccagtcaactgcccattccctcggccatccccaggcctgccagccgaatgccactcaccagccggagtgtgccacctggcagaggtgccctacctccggattctctgtcaactcgaaaagggcttccaagaccaagcactgcaggacacagagtgcgggaaagtggacacaaggttcctgtttcccagcgactaaatcttcctgtcatgggtgccactcgcagcaatctgcagccccccaggaaagtggcagtcccaggacctaccaggtaaagagatcaggacagcaagcaagacttcagtagcaaaccactacagtcagtacctggactcgcctctacccagcagaccctgactccagcagattctggcccagggacaggaggaagagatgccaccagggctggtctcccaggagtagagaccatgggaaatggggtggattaggattgagctggagaagacttaaactctctgggttgaaagaagattaggggaaaagaggtcaccttccagcagtgaaatgaacaaatagaagatgagaagtacaggcaagtggtttgtctttatccacccccactgttgtggtcagccccagagaattttatcttcttccttggcattggttcactggacatttccacgtgagcggcctccgtagctaacctccctgccctctgaggagccatcttcctgaatcgcattctctactggactctggcctgcttggagaggtggcagcaggcacctggtcttcagaaattgtttcctgtgaattctgtgactcctaataggccagtttgtgataagcttactctatgagtcttcatttttctaaaataaagtgaatgtatttttatattctctgtat

SEQ ID NO: 2452 - protein, 333 aa, Homo sapiens; identical to SEQ ID NO: 103

SEQ ID NO: 2453 - DNA, 1756 bp, Homo sapiens
gcgggagaaagcctgttgcgtggaagataaggcggcgcgggaagtggacacagggtgggctggagctgcgagccttgggcagaatggatacctgaggaaaggtatggtttctctccggctcagatctaactggactctcgctcctgctggctggacatggaggatttggaggaagatgtaaggtttattgtggatgagaccttggactttggggggctgtcaccatctgacagccgtgaggaggaagacataacagtgttggtgactccagagaaaccacttcgacggggcctctcccaccgaagtgacccaaatgcagtggcacctgccccccagggtgtgaggctcagcctaggccccctcagtccagagaagctggaggagatcctcgatgaggccaaccggctggccgctcagctggagcagtgtgccctgcaggatcgggagagcgcaggcgagggcctggggcctcgccgagtgaagcccagtcctcggcgggagacctttgtgctgaaggatagtcctgtccgagacctgctgcccactgtgaactctttgacgcggagcaccccctccccaagcagcctgacgcctcgactccggagtaatgataggaaggggtcagtcagggctctccgggctacatctggaaagaggccctccaacatgaagagggagtcacccacttgcaatctgttccctgcatccaaaagcccagcatcttctcctcttacccgatcgactcccccagtccgggggagagccgggcccagtgggagagcagcagccagcccacccacccccatcagatccgtcctggccccacagccttctaccagcaactctcaacgcctgccccggccgcagggagcagctgctaaatcttccagtcaactgcccattccctcggccatccccaggcctgccagccgaatgccactcaccagccggagtgtgccacctggcagaggtgccctacctccggattctctgtcaactcgaaaagggcttccaagaccaagcactgcaggacacagagtgcgggaaagtggacacaaggttcctgtttcccagcgactaaatcttcctgtcatgggtgccactcgcagcaatctgcagccccccaggaaagtggcagtcccaggacctaccaggtaaagagatcaggacagcaagcaagacttcagtagcaaaccactacagtcagtacctggactcgcctctacccagcagaccctgactccagcagattctggcccagggacaggaggaagagatgccaccagggctggtctcccaggagtagagaccatgggaaatggggtggattaggattgagctggagaagacttaaactctctgggttgaaagaagattaggggaaaagaggtcaccttccagcagtgaaatgaacaaatagaagatgagaagtacaggcaagtggtttgtctttatccacccccactgttgtggtcagccccagagaattttatcttcttccttggcattggttcactggacatttccacgtgagcggcctccgtagctaacctccctgccctctgaggagccatcttcctgaatcgcattctctactggactctggcctgcttggagaggtggcagcaggcacctggtcttcagaaattgtttcctgtgaattctgtgactcctaataggccagtttgtgataagcttactctatgagtcttcatttttctaaaataaagtgaatgtatttttatattctctgtat

SEQ ID NO: 2454 - protein, 333 aa, Homo sapiens; identical to SEQ ID NO: 103

SEQ ID NO: 2455 - DNA, 1619 bp, Homo sapiens
agctgattcccgggactaggttgcgggagaaagcctgttgcgtggaagataaggcggcgcgggaagtggacacagggtgggctggagatctaactggactctcgctcctgctggctggacatggaggatttggaggaagatgtaaggtttattgtggatgagaccttggactttggggggctgtcaccatctgacagccgtgaggaggaagacataacagtgttggtgactccagagaaaccacttcgacggggcctctcccaccgaagtgacccaaatgcagtggcacctgccccccagggtgtgaggctcagcctaggccccctcagtccagagaagctggaggagatcctcgatgaggccaaccggctggccgctcagctggagcagtgtgccctgcaggatcgggagagcgcaggcgagggcctggggcctcgccgagtgaagcccagtcctcggcgggagacctttgtgctgaaggatagtcctgtccgagacctgctgcccactgtgaactctttgacgcggagcaccccctccccaagcagcctgacgcctcgactccggagtaatgataggaaggggtcagtcagggctctccgggctacatctggaaagaggccctccaacatgaagagggagtcacccacttgcaatctgttccctgcatccaaaagcccagcatcttctcctcttacccgatcgactcccccagtccgggggagagccgggcccagtgggagagcagcagccagtgaggagaccagagcagccaagttgcgggcctgccagccgaatgccactcaccagccggagtgtgccacctggcagaggtgccctacctccggattctctgtcaactcgaaaagggcttccaagaccaagcactgcaggacacagagtgcgggaaagtggacacaaggttcctgtttcccagcgactaaatcttcctgtcatgggtgccactcgcagcaatctgcagccccccaggaaagtggcagtcccaggacctaccaggtaaagagatcaggacagcaagcaagacttcagtagcaaaccactacagtcagtacctggactcgcctctacccagcagaccctgactccagcagattctggcccagggacaggaggaagagatgccaccagggctggtctcccaggagtagagaccatgggaaatggggtggattaggattgagctggagaagacttaaactctctgggttgaaagaagattaggggaaaagaggtcaccttccagcagtgaaatgaacaaatagaagatgagaagtacaggcaagtggtttgtctttatccacccccactgttgtggtcagccccagagaattttatcttcttccttggcattggttcactggacatttccacgtgagcggcctccgtagctaacctccctgccctctgaggagccatcttcctgaatcgcattctctactggactctggcctgcttggagaggtggcagcaggcacctggtcttcagaaattgtttcctgtgaattctgtgactcctaataggccagtttgtgataagcttactctatgagtcttcatttttctaaaataaagtgaatgtatttttatattctctgtat

SEQ ID NO: 2456 - protein, 310 aa, Homo sapiens; identical to SEQ ID NO: 99

SEQ ID NO: 2457 - DNA, 1757 bp, Homo sapiens
gggcctgagagattcgaaaggagccccgccccctcggagctgattcccgggactaggttgcgggagaaagcctgttgcgtggaagataaggcggcgcgggaagtggacacagggtgggctggagatctaactggactctcgctcctgctggctggacatggaggatttggaggaagatgtaaggtttattgtggatgagaccttggactttggggggctgtcaccatctgacagccgtgaggaggaagacataacagtgttggtgactccagagaaaccacttcgacggggcctctcccaccgaagtgacccaaatgcagtggcacctgccccccagggtgtgaggctcagcctaggccccctcagtccagagaagctggaggagatcctcgatgaggccaaccggctggccgctcagctggagcagtgtgccctgcaggatcgggagagcgcaggcgagggcctggggcctcgccgagtgaagcccagtcctcggcgggagacctttgtgctgaaggatagtcctgtccgagacctgctgcccactgtgaactctttgacgcggagcaccccctccccaagcagcctgacgcctcgactccggagtaatgataggaaggggtcagtcagggctctccgggctacatctggaaagaggccctccaacatgaagagggagtcacccacttgcaatctgttccctgcatccaaaagcccagcatcttctcctcttacccgatcgactcccccagtccgggggagagccgggcccagtgggagagcagcagccagcccacccacccccatcagatccgtcctggccccacagccttctaccagcaactctcaacgcctgccccggccgcagggagcagctgctaaatcttccagtcaactgcccattccctcggccatccccaggcctgccagccgaatgccactcaccagccggagtgtgccacctggcagaggtgccctacctccggattctctgtcaactcgaaaagggcttccaagaccaagcactgcaggacacagagtgcgggaaagtggacacaaggttcctgtttcccagcgactaaatcttcctgtcatgggtgccactcgcagcaatctgcagccccccaggaaagtggcagtcccaggacctaccaggtaaagagatcaggacagcaagcaagacttcagtagcaaaccactacagtcagtacctggactcgcctctacccagcagaccctgactccagcagattctggcccagggacaggaggaagagatgccaccagggctggtctcccaggagtagagaccatgggaaatggggtggattaggattgagctggagaagacttaaactctctgggttgaaagaagattaggggaaaagaggtcaccttccagcagtgaaatgaacaaatagaagatgagaagtacaggcaagtggtttgtctttatccacccccactgttgtggtcagccccagagaattttatcttcttccttggcattggttcactggacatttccacgtgagcggcctccgtagctaacctccctgccctctgaggagccatcttcctgaatcgcattctctactggactctggcctgcttggagaggtggcagcaggcacctggtcttcagaaattgtttcctgtgaattctgtgactcctaataggccagtttgtgataagcttactctatgagtcttcatttttctaaaataaagtgaatgtatttttatattctctgtat

SEQ ID NO: 2458 - protein, 333 aa, Homo sapiens; identical to SEQ ID NO: 103

SEQ ID NO: 2459 - DNA, 1847 bp, Homo sapiens
gggcctgagagattcgaaaggagccccgccccctcggagctgattcccgggactaggttgcgggagaaagcctgttgcgtggaagataaggcggcgcgggaagtggacacagggtgggctggagatctaactggactctcgctcctgctggctggacatggaggatttggaggaagatgtaaggtttattgtggatgagaccttggactttggggggctgtcaccatctgacagccgtgaggaggaagacataacagtgttggtgactccagagaaaccacttcgacggggcctctcccaccgaagtgacccaaatgcagtggcacctgccccccagggtgtgaggctcagcctaggccccctcagtccagagaagctggaggagatcctcgatgaggccaaccggctggccgctcagctggagcagtgtgccctgcaggatcgggagagcgcaggcgagggcctggggcctcgccgagtgaagcccagtcctcggcgggagacctttgtgctgaaggatagtcctgtccgagacctgctgcccactgtgaactctttgacgcggagcaccccctccccaagcagcctgacgcctcgactccggagtaatgataggaaggggtcagtcagggctctccgggctacatctggaaagaggccctccaacatgaagagggagtcacccacttgcaatctgttccctgcatccaaaagcccagcatcttctcctcttacccgatcgactcccccagtccgggggagagccgggcccagtgggagagcagcagccagtgaggagaccagagcagccaagttgcgggtgagtgggagtggggagtttgtgggattgaccctgaaatttctccacccctctccaccaggcccacccacccccatcagatccgtcctggccccacagccttctaccagcaactctcaacgcctgccccggccgcagggagcagctgctaaatcttccagtcaactgcccattccctcggccatccccaggcctgccagccgaatgccactcaccagccggagtgtgccacctggcagaggtgccctacctccggattctctgtcaactcgaaaagggcttccaagaccaagcactgcaggacacagagtgcgggaaagtggacacaaggttcctgtttcccagcgactaaatcttcctgtcatgggtgccactcgcagcaatctgcagccccccaggaaagtggcagtcccaggacctaccaggtaaagagatcaggacagcaagcaagacttcagtagcaaaccactacagtcagtacctggactcgcctctacccagcagaccctgactccagcagattctggcccagggacaggaggaagagatgccaccagggctggtctcccaggagtagagaccatgggaaatggggtggattaggattgagctggagaagacttaaactctctgggttgaaagaagattaggggaaaagaggtcaccttccagcagtgaaatgaacaaatagaagatgagaagtacaggcaagtggtttgtctttatccacccccactgttgtggtcagccccagagaattttatcttcttccttggcattggttcactggacatttccacgtgagcggcctccgtagctaacctccctgccctctgaggagccatcttcctgaatcgcattctctactggactctggcctgcttggagaggtggcagcaggcacctggtcttcagaaattgtttcctgtgaattctgtgactcctaataggccagtttgtgataagcttactctatgagtcttcatttttctaaaataaagtgaatgtatttttatattctctgtat

SEQ ID NO: 2460 - protein, 363 aa, Homo sapiens; identical to SEQ ID NO: 101

SEQ ID NO: 2461 - DNA, 348 bp, Homo sapiens
ctaactggactctcgctcctgctggctggacatggaggatttggaggaagatgtaaggtttatttggtcagccccagagaattttatcttcttccttggcattggttcactggacatttccacgtgagcggcctccgtagctaacctccctgccctctgaggagccatcttcctgaatcgcattctctactggactctggcctgcttggagaggtggcagcaggcacctggtcttcagaaattgtttcctgtgaattctgtgactcctaataggccagtttgtgataagcttactctatgagtcttcatttttctaaaataaagtgaatgtatttttatattctctgt

SEQ ID NO: 2462 - protein, 31 aa, Homo sapiens; identical to SEQ ID NO: 2436

SEQ ID NO: 2463 - DNA, 1741 bp, Homo sapiens
aagataaggcggcgcgggaagtggacacagggtgggctggagcatgacccccgaccctggcttgcaccctgaatctagctgcgagccttgggcagaatggatacctgaggaaaggtatggtttctctccggctcagatctaactggactctcgctcctgctggctggacatggaggatttggaggaagatgtaaggtttattgtggatgagaccttggactttggggggctgtcaccatctgacagccgtgaggaggaagacataacagtgttggtgactccagagaaaccacttcgacggggcctctcccaccgaagtgacccaaatgcagtggcacctgccccccagggtgtgaggctcagcctaggccccctcagtccagagaagctggaggagatcctcgatgaggccaaccggctggccgctcagctggagcagtgtgccctgcaggatcgggagagcgcaggcgagggcctggggcctcgccgagtgaagcccagtcctcggcgggagacctttgtgctgaaggatagtcctgtccgagacctgctgcccactgtgaactctttgacgcggagcaccccctccccaagcagcctgacgcctcgactccggagtaatgataggaaggggtcagtcagggctctccgggctacatctggaaagaggccctccaacatgaagagggtgagttgagagagttgagttggaggtgtgccccagacatggtgtgtgccatgatgcagggagtggtttccttattggtaaaacagggatagcatttctacatctagaattgttggaattaaatgagaaccatgaaaaaagagaaccaaaactcttaccacagtgtctgagtatatgtctatgataaactcaataaatggtattggcaatagtgatggtgatggtgatgtggtgatgttagcagctaacttctacccttccttactgggatgtagacaactctccacctctatttcttaattccttaagccacagaacagatattttttccactctagtcttttttctctctctctttgtgtttcaggagtcacccacttgcaatctgttccctgcatccaaaagcccagcatcttctcctcttacccgatcgactcccccagtccgggggagagccgggcccagtgggagagcagcagccagtgaggagaccagagcagccaagttgcgggtgagtgggagtggggagtttgtgggattgaccctgaaatttctccacccctctccaccaggcccacccacccccatcagatccgtcctggccccacagccttctaccagcaactctcaacgcctgccccggccgcagggagcagctgctaaatcttccagtcaactgcccattccctcggccatccccaggcctgccagccgaatgccactcaccagccggagtgtgccacctggcagaggtgccctacctccggattctctgtcaactcgaaaagggcttccaagaccaagcactgcaggacacagagtgcgggaaagtggacacaagggtaagaggtcaggaggaagaatgcccgcccttgcccagcgtgtcctcaccctcccagagctgtcaacagtgaccacttttgccatccttattgcaattcaattggaagatggggagactgagttacagagaggatatggggctggacagagtctgagtcttagttttcaaatacctcatggtcagggggagagtactaatcccacactcgc

SEQ ID NO: 2464 - protein, 175 aa, Homo sapiens
MEDLEEDVRFIVDETLDFGGLSPSDSREEEDITVLVTPEKPLRRGLSHRSDPNAVAPAPQGVRLSLGPLSPEKLEEILDEANRLAAQLEQCALQDRESAGEGLGPRRVKPSPRRETFVLKDSPVRDLLPTVNSLTRSTPSPSSLTPRLRSNDRKGSVRALRATSGKRPSNMKRVS

SEQ ID NO: 2465 - DNA, 1791 bp, Homo sapiens
attcccgggactaggttgcgggagaaagcctgttgcgtggaagataaggcggcgcgggaagtggacacagggtgggctggagatctaactggactctcgctcctgctggctggacatggaggatttggaggaaggtaaggaaaggagggagggaagaatgaaagggaggagtgagacccagcgatggagagctgcatcagggacccatgactggctttcattcttctttccccttcagatgtaaggtttattgtggatgagaccttggactttggggggctgtcaccatctgacagccgtgaggaggaagacataacagtgttggtgactccagagaaaccacttcgacggggcctctcccaccgaagtgacccaaatgcagtggcacctgccccccagggtgtgaggctcagcctaggccccctcagtccagagaagctggaggagatcctcgatgaggccaaccggctggccgctcagctggagcagtgtgccctgcaggatcgggagagcgcaggcgagggcctggggcctcgccgagtgaagcccagtcctcggcgggagacctttgtgctgaaggatagtcctgtccgagacctgctgcccactgtgaactctttgacgcggagcaccccctccccaagcagcctgacgcctcgactccggagtaatgataggaaggggtcagtcagggctctccgggctacatctggaaagaggccctccaacatgaagagggtgagttgagagagttgagttggaggtgtgccccagacatggtgtgtgccatgatgcagggagtggtttccttattggtaaaacagggatagcatttctacatctagaattgttggaattaaatgagaaccatgaaaaaagagaaccaaaactcttaccacagtgtctgagtatatgtctatgataaactcaataaatggtattggcaatagtgatggtgatggtgatgtggtgatgttagcagctaacttctacccttccttactgggatgtagacaactctccacctctatttcttaattccttaagccacagaacagatattttttccactctagtcttttttctctctctctttgtgtttcaggagtcacccacttgcaatctgttccctgcatccaaaagcccagcatcttctcctcttacccgatcgactcccccagtccgggggagagccgggcccagtgggagagcagcagccagtgaggagaccagagcagccaagttgcgggtgagtgggagtggggagtttgtgggattgaccctgaaatttctccacccctctccaccaggcccacccacccccatcagatccgtcctggccccacagccttctaccagcaactctcaacgcctgccccggccgcagggagcagctgctaaatcttccagtcaactgcccattccctcggccatccccaggcctgccagccgaatgccactcaccagccggagtgtgccacctggcagaggtgccctacctccggattctctgtcaactcgaaaagggcttccaagaccaagcactgcaggacacagagtgcgggaaagtggacacaagggtaagaggtcaggaggaagaatgcccgcccttgcccagcgtgtcctcaccctcccagagctgtcaacagtgaccacttttgccatccttattgcaattcaattggaagatggggagactgagttacagagaggatatggggctggacagagtctgagtcttagttttcaaatacctcatggtcagggggagagtactaatcccacactcgc

SEQ ID NO: 2466 - protein, 111 aa, Homo sapiens
MPLTSRSVPPGRGALPPDSLSTRKGLPRPSTAGHRVRESGHKGKRSGGRMPALAQRVLTLPELSTVTTFAILIAIQLEDGETELQRGYGAGQSLSLSFQIPHGQGESTNPT

SEQ ID NO: 2467 - DNA, 1745 bp, Homo sapiens
attcccgggactaggttgcgggagaaagcctgttgcgtggaagataaggcggcgcgggaagtggacacagggtgggctggagctgcgagccttgggcagaatggatacctgaggaaaggtatggtttctctccggctcagatctaactggactctcgctcctgctggctggacatggaggatttggaggaagatgtaaggtttattgtggatgagaccttggactttggggggctgtcaccatctgacagccgtgaggaggaagacataacagtgttggtgactccagagaaaccacttcgacggggcctctcccaccgaagtgacccaaatgcagtggcacctgccccccagggtgtgaggctcagcctaggccccctcagtccagagaagctggaggagatcctcgatgaggccaaccggctggccgctcagctggagcagtgtgccctgcaggatcgggagagcgcaggcgagggcctggggcctcgccgagtgaagcccagtcctcggcgggagacctttgtgctgaaggatagtcctgtccgagacctgctgcccactgtgaactctttgacgcggagcaccccctccccaagcagcctgacgcctcgactccggagtaatgataggaaggggtcagtcagggctctccgggctacatctggaaagaggccctccaacatgaagagggtgagttgagagagttgagttggaggtgtgccccagacatggtgtgtgccatgatgcagggagtggtttccttattggtaaaacagggatagcatttctacatctagaattgttggaattaaatgagaaccatgaaaaaagagaaccaaaactcttaccacagtgtctgagtatatgtctatgataaactcaataaatggtattggcaatagtgatggtgatggtgatgtggtgatgttagcagctaacttctacccttccttactgggatgtagacaactctccacctctatttcttaattccttaagccacagaacagatattttttccactctagtcttttttctctctctctttgtgtttcaggagtcacccacttgcaatctgttccctgcatccaaaagcccagcatcttctcctcttacccgatcgactcccccagtccgggggagagccgggcccagtgggagagcagcagccagtgaggagaccagagcagccaagttgcgggtgagtgggagtggggagtttgtgggattgaccctgaaatttctccacccctctccaccaggcccacccacccccatcagatccgtcctggccccacagccttctaccagcaactctcaacgcctgccccggccgcagggagcagctgctaaatcttccagtcaactgcccattccctcggccatccccaggcctgccagccgaatgccactcaccagccggagtgtgccacctggcagaggtgccctacctccggattctctgtcaactcgaaaagggcttccaagaccaagcactgcaggacacagagtgcgggaaagtggacacaagggtaagaggtcaggaggaagaatgcccgcccttgcccagcgtgtcctcaccctcccagagctgtcaacagtgaccacttttgccatccttattgcaattcaattggaagatggggagactgagttacagagaggatatggggctggacagagtctgagtcttagttttcaaatacctcatggtcagggggagagtactaatcccacactcgc

SEQ ID NO: 2468 - protein, 175 aa, Homo sapiens; identical to SEQ ID NO: 2464

SEQ ID NO: 2469 - DNA, 2018 bp, Homo sapiens
attcccgggactaggttgcgggagaaagcctgttgcgtggaagataaggcggcgcgggaagtggacacagggtgggctggaggtgtgcttcgcgtgtgatgccaggggagtggaaaggtggcttggggagtgcagaaccctgaggatagtggcggggaggaagatggggcgtgcaggccgcccccagtgaggagaggccaggatgcagggcggctccagggcaatctgggcagttgggggagccctccgtatcgttcccggaggtagcaggagtagctgtgcgggaggtgccactcctgggcgcttgctttgcctccagcatgacccccgaccctggcttgcaccctgaatctagctgcgagccttgggcagaatggatacctgaggaaaggtatggtttctctccggctcagatctaactggactctcgctcctgctggctggacatggaggatttggaggaagatgtaaggtttattgtggatgagaccttggactttggggggctgtcaccatctgacagccgtgaggaggaagacataacagtgttggtgactccagagaaaccacttcgacggggcctctcccaccgaagtgacccaaatgcagtggcacctgccccccagggtgtgaggctcagcctaggccccctcagtccagagaagctggaggagatcctcgatgaggccaaccggctggccgctcagctggagcagtgtgccctgcaggatcgggagagcgcaggcgagggcctggggcctcgccgagtgaagcccagtcctcggcgggagacctttgtgctgaaggatagtcctgtccgagacctgctgcccactgtgaactctttgacgcggagcaccccctccccaagcagcctgacgcctcgactccggagtaatgataggaaggggtcagtcagggctctccgggctacatctggaaagaggccctccaacatgaagagggtgagttgagagagttgagttggaggtgtgccccagacatggtgtgtgccatgatgcagggagtggtttccttattggtaaaacagggatagcatttctacatctagaattgttggaattaaatgagaaccatgaaaaaagagaaccaaaactcttaccacagtgtctgagtatatgtctatgataaactcaataaatggtattggcaatagtgatggtgatggtgatgtggtgatgttagcagctaacttctacccttccttactgggatgtagacaactctccacctctatttcttaattccttaagccacagaacagatattttttccactctagtcttttttctctctctctttgtgtttcaggagtcacccacttgcaatctgttccctgcatccaaaagcccagcatcttctcctcttacccgatcgactcccccagtccgggggagagccgggcccagtgggagagcagcagccagtgaggagaccagagcagccaagttgcgggtgagtgggagtggggagtttgtgggattgaccctgaaatttctccacccctctccaccaggcccacccacccccatcagatccgtcctggccccacagccttctaccagcaactctcaacgcctgccccggccgcagggagcagctgctaaatcttccagtcaactgcccattccctcggccatccccaggcctgccagccgaatgccactcaccagccggagtgtgccacctggcagaggtgccctacctccggattctctgtcaactcgaaaagggcttccaagaccaagcactgcaggacacagagtgcgggaaagtggacacaagggtaagaggtcaggaggaagaatgcccgcccttgcccagcgtgtcctcaccctcccagagctgtcaacagtgaccacttttgccatccttattgcaattcaattggaagatggggagactgagttacagagaggatatggggctggacagagtctgagtcttagttttcaaatacctcatggtcagggggagagtactaatcccacactcgc

SEQ ID NO: 2470 - protein, 175 aa, Homo sapiens; identical to SEQ ID NO: 2464

SEQ ID NO: 2471 - DNA, 1723 bp, Homo sapiens
gattcccgggactaggttgcgggagaaagcctgttgcgtggaagataaggcggcgcgggaagtggacacagggtgggctggaggtgtgcttcgcgtgtgatgccaggggagtggaaagatctaactggactctcgctcctgctggctggacatggaggatttggaggaagatgtaaggtttattgtggatgagaccttggactttggggggctgtcaccatctgacagccgtgaggaggaagacataacagtgttggtgactccagagaaaccacttcgacggggcctctcccaccgaagtgacccaaatgcagtggcacctgccccccagggtgtgaggctcagcctaggccccctcagtccagagaagctggaggagatcctcgatgaggccaaccggctggccgctcagctggagcagtgtgccctgcaggatcgggagagcgcaggcgagggcctggggcctcgccgagtgaagcccagtcctcggcgggagacctttgtgctgaaggatagtcctgtccgagacctgctgcccactgtgaactctttgacgcggagcaccccctccccaagcagcctgacgcctcgactccggagtaatgataggaaggggtcagtcagggctctccgggctacatctggaaagaggccctccaacatgaagagggtgagttgagagagttgagttggaggtgtgccccagacatggtgtgtgccatgatgcagggagtggtttccttattggtaaaacagggatagcatttctacatctagaattgttggaattaaatgagaaccatgaaaaaagagaaccaaaactcttaccacagtgtctgagtatatgtctatgataaactcaataaatggtattggcaatagtgatggtgatggtgatgtggtgatgttagcagctaacttctacccttccttactgggatgtagacaactctccacctctatttcttaattccttaagccacagaacagatattttttccactctagtcttttttctctctctctttgtgtttcaggagtcacccacttgcaatctgttccctgcatccaaaagcccagcatcttctcctcttacccgatcgactcccccagtccgggggagagccgggcccagtgggagagcagcagccagtgaggagaccagagcagccaagttgcgggtgagtgggagtggggagtttgtgggattgaccctgaaatttctccacccctctccaccaggcccacccacccccatcagatccgtcctggccccacagccttctaccagcaactctcaacgcctgccccggccgcagggagcagctgctaaatcttccagtcaactgcccattccctcggccatccccaggcctgccagccgaatgccactcaccagccggagtgtgccacctggcagaggtgccctacctccggattctctgtcaactcgaaaagggcttccaagaccaagcactgcaggacacagagtgcgggaaagtggacacaagggtaagaggtcaggaggaagaatgcccgcccttgcccagcgtgtcctcaccctcccagagctgtcaacagtgaccacttttgccatccttattgcaattcaattggaagatggggagactgagttacagagaggatatggggctggacagagtctgagtcttagttttcaaatacctcatggtcagggggagagtactaatcccacactcgc

SEQ ID NO: 2472 - protein, 175 aa, Homo sapiens; identical to SEQ ID NO: 2464

SEQ ID NO: 2473 - DNA, 1688 bp, Homo sapiens
gattcccgggactaggttgcgggagaaagcctgttgcgtggaagataaggcggcgcgggaagtggacacagggtgggctggagatctaactggactctcgctcctgctggctggacatggaggatttggaggaagatgtaaggtttattgtggatgagaccttggactttggggggctgtcaccatctgacagccgtgaggaggaagacataacagtgttggtgactccagagaaaccacttcgacggggcctctcccaccgaagtgacccaaatgcagtggcacctgccccccagggtgtgaggctcagcctaggccccctcagtccagagaagctggaggagatcctcgatgaggccaaccggctggccgctcagctggagcagtgtgccctgcaggatcgggagagcgcaggcgagggcctggggcctcgccgagtgaagcccagtcctcggcgggagacctttgtgctgaaggatagtcctgtccgagacctgctgcccactgtgaactctttgacgcggagcaccccctccccaagcagcctgacgcctcgactccggagtaatgataggaaggggtcagtcagggctctccgggctacatctggaaagaggccctccaacatgaagagggtgagttgagagagttgagttggaggtgtgccccagacatggtgtgtgccatgatgcagggagtggtttccttattggtaaaacagggatagcatttctacatctagaattgttggaattaaatgagaaccatgaaaaaagagaaccaaaactcttaccacagtgtctgagtatatgtctatgataaactcaataaatggtattggcaatagtgatggtgatggtgatgtggtgatgttagcagctaacttctacccttccttactgggatgtagacaactctccacctctatttcttaattccttaagccacagaacagatattttttccactctagtcttttttctctctctctttgtgtttcaggagtcacccacttgcaatctgttccctgcatccaaaagcccagcatcttctcctcttacccgatcgactcccccagtccgggggagagccgggcccagtgggagagcagcagccagtgaggagaccagagcagccaagttgcgggtgagtgggagtggggagtttgtgggattgaccctgaaatttctccacccctctccaccaggcccacccacccccatcagatccgtcctggccccacagccttctaccagcaactctcaacgcctgccccggccgcagggagcagctgctaaatcttccagtcaactgcccattccctcggccatccccaggcctgccagccgaatgccactcaccagccggagtgtgccacctggcagaggtgccctacctccggattctctgtcaactcgaaaagggcttccaagaccaagcactgcaggacacagagtgcgggaaagtggacacaagggtaagaggtcaggaggaagaatgcccgcccttgcccagcgtgtcctcaccctcccagagctgtcaacagtgaccacttttgccatccttattgcaattcaattggaagatggggagactgagttacagagaggatatggggctggacagagtctgagtcttagttttcaaatacctcatggtcagggggagagtactaatcccacactcgc

SEQ ID NO: 2474 - protein, 175 aa, Homo sapiens; identical to SEQ ID NO: 2464

SEQ ID NO: 2475 - DNA, 1020 bp, Homo sapiens
gcgggagaaagcctgttgcgtggaagataaggcggcgcgggaagtggacacagggtgggctggaggtgtgcttcgcgtgtgatgccaggggagtggaaagatctaactggactctcgctcctgctggctggacatggaggatttggaggaagatgtaaggtttattgtggatgagaccttggactttggggggctgtcaccatctgacagccgtgaggaggaagacataacagtgttggtgactccagagaaaccacttcgacggggcctctcccaccgaagtgacccaaatgcagtggcacctgccccccagggtgtgaggctcagcctaggccccctcagtccagagaagctggaggagatcctcgatgaggccaaccggctggccgctcagctggagcagtgtgccctgcaggatcgggagagcgcaggcgagggcctggggcctcgccgagtgaagcccagtcctcggcgggagacctttgtgctgaaggatagtcctgtccgagacctgctgcccactgtgaactctttgacgcggagcaccccctccccaagcagcctgacgcctcgactccggagtaatgataggaaggggtcagtcagggctctccgggctacatctggaaagaggccctccaacatgaagagggagtcacccacttgcaatctgttccctgcatccaaaagcccagcatcttctcctcttacccgatcgactcccccagtccgggggagagccgggcccagtgggagagcagcagccagtgaggagaccagagcagccaagttgcggccttctaccagcaactctcaacgcctgccccggccgcagggagcagctgctaaatcttccagtcaactgcccattccctcggccatccccaggcctgccagccgaatgccactcaccagccggagtgtgccacctggcagaggtgccctacctccggattctctgtcaactcgaaaagggcttccaagaccaagcactgcaggacacagagtgcgggaaagtgg

SEQ ID NO: 2476 - protein, 294 aa, Homo sapiens
MEDLEEDVRFIVDETLDFGGLSPSDSREEEDITVLVTPEKPLRRGLSHRSDPNAVAPAPQGVRLSLGPLSPEKLEEILDEANRLAAQLEQCALQDRESAGEGLGPRRVKPSPRRETFVLKDSPVRDLLPTVNSLTRSTPSPSSLTPRLRSNDRKGSVRALRATSGKRPSNMKRESPTCNLFPASKSPASSPLTRSTPPVRGRAGPSGRAAASEETRAAKLRPSTSNSQRLPRPQGAAAKSSSQLPIPSAIPRPASRMPLTSRSVPPGRGALPPDSLSTRKGLPRPSTAGHRVRE

SEQ ID NO: 2477 - DNA, 897 bp, Homo sapiens
agctgattcccgggactaggttgcgggagaaagcctgttgcgtggaagataaggcggcgcgggaagtggacacagggtgggctggagatctaactggactctcgctcctgctggctggacatggaggatttggaggaagatgtaaggtttattgtggatgagaccttggactttggggggctgtcaccatctgacagccgtgaggaggaagacataacagtgttggtgactccagagaaaccacttcgacggggcctctcccaccgaagtgacccaaatgcagtggcacctgccccccagggtgtgaggctcagcctaggccccctcagtccagagaagctggaggagatcctcgatgaggccaaccggctggccgctcagctggagcagtgtgccctgcaggatcgggagagcgcaggcgagggcctggggcctcgccgagtgaagcccagtcctcggcgggagacctttgtgctgaaggatagtcctgtccgagacctgctgcccactgtgaactctttgacgcggagcaccccctccccaagcagcctgacgcctcgactccggagtaatgataggaaggggtcagtcagggctctccgggctacatctggaaagaggccctccaacatgaagagggagtcacccacttgcaatctgttccctgcatccaaaagcccagcatcttctcctcttacccgatcgactcccccagtccgggggagagccgggcccagtgggagagcagcagccagtgaggagaccagagcagccaagttgcggccttctaccagcaactctcaacgcctgccccggccgcagggagcagctgctaaatcttccagtcaactgcccattccctcggccatccccaggcctgccagccgaatgccactc

SEQ ID NO: 2478 - protein, 258 aa, Homo sapiens
MEDLEEDVRFIVDETLDFGGLSPSDSREEEDITVLVTPEKPLRRGLSHRSDPNAVAPAPQGVRLSLGPLSPEKLEEILDEANRLAAQLEQCALQDRESAGEGLGPRRVKPSPRRETFVLKDSPVRDLLPTVNSLTRSTPSPSSLTPRLRSNDRKGSVRALRATSGKRPSNMKRESPTCNLFPASKSPASSPLTRSTPPVRGRAGPSGRAAASEETRAAKLRPSTSNSQRLPRPQGAAAKSSSQLPIPSAIPRPASRMP

SEQ ID NO: 2479 - DNA, 769 bp, Homo sapiens
gattcccgggactaggttgcgggagaaagcctgttgcgtggaagataaggcggcgcgggaagtggacacagggtgggctggagatctaactggactctcgctcctgctggctggacatggaggatttggaggaagatgtaaggtttattgtggatgagaccttggactttggggggctgtcaccatctgacagccgtgaggaggaagacataacagtgttggtgactccagagaaaccacttcgacggggcctctcccaccgaagtgacccaaatgcagtggcacctgccccccagggtgtgaggctcagcctaggccccctcagtccagagaagctggaggagatcctcgatgaggccaaccggctggccgctcagctggagcagtgtgccctgcaggatcgggagagcgcaggcgagggcctggggcctcgccgagtgaagcccagtccccccctccccaagcagcctgacgcctcgactccggagtaatgataggaaggggtcagtcagggctctccgggctacatctggaaagaggccctccaacatgaagagggtgagttgagagagttgagttggaggtgtgccccagacatggtgtgtgccatgatgcagggagtggtttccttattggtaaaacagggatagcatttctacatctagaattgttggaattaaatgagaaccatgaaaaaagagaaccaaaactcttaccacagtgtctgagtatatgtctatgataaactcaataaatggtattggcaata

SEQ ID NO: 2480 - protein, 124 aa, Homo sapiens
MEDLEEDVRFIVDETLDFGGLSPSDSREEEDITVLVTPEKPLRRGLSHRSDPNAVAPAPQGVRLSLGPLSPEKLEEILDEANRLAAQLEQCALQDRESAGEGLGPRRVKPSPPLPKQPDASTPE

SEQ ID NO: 2481 - DNA, 615 bp, Homo sapiens
agcctgttgcgtggaagataaggcggcgcgggaagtggacacagggtgggctggaggtgtgcttcgcgtgtgatgccaggggagtggaaaggtggcttggggagtgcagaaccctgaggatagtggcggggaggaagatggggcgtgcaggccgcccccagtgaggagaggccaggatgcagggcggctccagggcaatctgggcagttgggggagccctccgtatcgttcccggaggtagcaggagtagctgtgcgggaggtgccactcctgggcgcttgctttgcctccagcatgacccccgaccctggcttgcaccctgaatctagctgcgagccttgggcagaatggatacctgaggaaaggtatggtttctctccggctcagatctaactggactctcgctcctgctggctggacatggaggatttggaggaaggtaaggaaaggagggagggaagaatgaaagggaggagtgagacccagcgatggagagctgcatcagggacccatgactggctttcattcttctttccccttcagatgtaaggtttattgtggatgagaccttggactttggggggctgtcaccatctgacagccgtgaggaggaag

SEQ ID NO: 2482 - protein, 48 aa, Homo sapiens
MQGGSRAIWAVGGALRIVPGGSRSSCAGGATPGRLLCLQHDPRPWLAP

SEQ ID NO: 2483 - DNA, 1022 bp, Homo sapiens
ccagcatggaggcagccacagctccggaggtggccgcaggatccaagctgaaggtgaaagaagccagcccagcggatgctgaaccaccccaggcttcacctggacagggggctggcagccccactccccagctcctgccccctatagaagcccaagatcatctggctgaagaacaagatggatatccaaggcaaccctaagtacagagccctgactcacctgggaatctgctccctagagatccgcaagccgggtccctttgatggaggcatctatacctgcaaggcggtgaaccccctaggggaggcatctgtggactgtcgggtggatgtgaaagttcctaattgaggacacctaagaaggcatggtactctgacaaaggtgtgtggtcccaagcagcacattattggcaaaagacagctcagctcatcatttagaaccggacagctcttttagattttccgtcattcacattagctatgttgtgaacaaagtgatgcataaggcgaaaaagaagcttgagacagaactaaagagaacaagttcccagtgtcctctctgacttgtagctgctggctgatggaaattggaaatgaatttgatcccataagacatttatttaaggctctcactggtatgtagcaaatgaaagcctaaaggggtgcgttacaagtacagacttctcaggaaagcgctctccgacagtcggcttgcagagacaactctccctccctcacctccctctctgtgttaatgatacttgtgttcgtgttagttgcccctttccctctctcacagccagtgcccagcaatgaagtgaattcatggcacaggagccagggaccgtgacaacggtgccctcagcagcctggtgtcctctggccatttgctgtcatggctacaaagtgctccctcttttcagtgcctccaggaagcccgccagtggtgagactgtgtcctcaaggagcttcggcaccatgtctggtttggattcatctaaataaatatgtggttccccagtg

SEQ ID NO: 2484 - protein, 64 aa, Homo sapiens
MEAATAPEVAAGSKLKVKEASPADAEPPQASPGQGAGSPTPQLLPPIEAQDHLAEEQDGYPRQP

SEQ ID NO: 2485 - DNA, 1372 bp, Homo sapiens
accagcagtgaaaatctagagctggagctcagcctctgggaaggcccagcatggaggcagccacagctccggaggtggccgcaggatccaagctgaaggtgaaagaagccagcccagcggatgctgaaccaccccaggcttcacctggacagggggctggcagccccactccccagctcctgccccctatagaagagcaccccaagatctggctacctcgggccctgaggcagacctacatccggaaggttggggacacagtgaacctactaatcccattccagggcaagcccaaacctcaagccatctggacacatgatggctgtgccttggacaccaggcgtgtgagtgtgcggaatggggagcaagactccatcctcttcatccgagaagcccaacgtgctgactcaggtcgctaccaactccgcgtgcagctgggtgggctggaggccaccgccaccattgacatcctggtgattgagaggccaggccctcctcagagtattaagctggtggacgtttggggcttcagcgctacactggaatggacaccgccccaagatacggggaatacagcacttctgggatacacggtgcagaaggctgacacaaaatccgggctgtggttcacggtgctggagcactatcaccgcaccagctgcatcgtctctgacctcatcatcggcaactcctatgccttccgtgtctttgctgaaaaccagtgcggactcagtgaaacagcccccatcactacggacctcgcccacatccagaaagcagctactgtttacaagaccaaggggtttgcccaacgagacttctctgaagccccaaagtttacccagcctctggccgactgcactacagtcaccggctataatacccagctcttctgctgtgtccgcgcctctccccggcccaagatcatctggctgaagaacaagatggatatccaaggcaaccctaagtacagagccctgactcacctgggaatctgctccctagagatccgcaagccgggtccctttgatggaggcatctatacctgcaaggcggtgaaccccctaggggaggcatctgtggactgtcgggtggatgtgaaagttcctaattgaggacacctaagaaggcatggtactctgacaaagccagtgcccagcaatgaagtgaattcatggcacaggagccagggaccgtgacaacggtgccctcagcagcctggtgtcctctggccatttgctgtcatggctacaaagtgctccctcttttcagtgcctccaggaagcccgccagtggtgagactgtgtcctcaaggagcttcggcaccatgtctggtttggattcatctaaataaatatgtggttccccagtg

SEQ ID NO: 2486 - protein, 354 aa, Homo sapiens
MEAATAPEVAAGSKLKVKEASPADAEPPQASPGQGAGSPTPQLLPPIEEHPKIWLPRALRQTYIRKVGDTVNLLIPFQGKPKPQAIWTHDGCALDTRRVSVRNGEQDSILFIREAQRADSGRYQLRVQLGGLEATATIDILVIERPGPPQSIKLVDVWGFSATLEWTPPQDTGNTALLGYTVQKADTKSGLWFTVLEHYHRTSCIVSDLIIGNSYAFRVFAENQCGLSETAPITTDLAHIQKAATVYKTKGFAQRDFSEAPKFTQPLADCTTVTGYNTQLFCCVRASPRPKIIWLKNKMDIQGNPKYRALTHLGICSLEIRKPGPFDGGIYTCKAVNPLGEASVDCRVDVKVPN

SEQ ID NO: 2487 - DNA, 612 bp, Homo sapiens
ctcagagtattaagctggtggacgtttggggcttcagcgctacactggaatggacaccgccccaagatacggggaatacagcacttctgggatacacggtgcagaaggctgacacaaaatccgggctgtggttcacggtgctggagcactatcaccgcaccagctgcatcgtctctgacctcatcatcggcaactcctatgccttccgtgtctttgctgaaaaccagtgcggactcagtgaaacagcccccatcactacggacctcgcccacatccagaaagcaggtaagggaggcatggggatcatgagctgggaagacttaaggataggccgggcacagtggctcacgcctctaattccagcactttgggaggccaaggcaggcggatcacctgaggtcaggagttcaagaccagcctggacaacatggtgaaacctcatctctactaaaaatacaaaaattagccaggcatggtggtgcacgcctgtactcccagctactcaggaggctaaggcaggagaattgcttgaacttgggagttggaggttgcagtgagctgagatcgtgccactgcactccagcctgggcaatagagtgagactccacctca

SEQ ID NO: 2488 - protein, 45 aa, Homo sapiens
MGIMSWEDLRIGRAQWLTPLIPALWEAKAGGSPEVRSSRPAWTTW

SEQ ID NO: 2489 - DNA, 7040 bp, Homo sapiens
ggcgggggtgggcgggcgcgccgggcggcaggtgtcggcgtcggcggcattcggcggcgatggagcggccctggggagctgcggacggcctctcgcgctggccccatggcctcggcctcctcctcctcctgcagctgctgccgccgtcgaccctcagccaggaccggctggacgcgccgccgccgcccgctgcgccgctgccgcgctggtctggccccatcggggtgagctgggggctgcgggcggccgcagccgggggcgcgtttccccgcggcggccgttggcgtcgcagcgcgccgggcgaggacgaggagtgcggccgggtccgggacttcgtcgccaagctggccaacaacacgcaccagcatgtgtttgatgatctcagaggctcagtatccttgtcctgggttggagatagcactggggtcattctagtcttgactaccttccatgtaccactggtaattatgacttttggacagtccaagctatatcgaagtgaggattatgggaagaactttaaggatattacagatctcatcaataacacctttattcggactgaatttggcatggctattggtcctgagaactctggaaaggtggtgttaacagcagaggtgtctggaggaagtcgtggaggaagaatctttagatcatcagattttgcgaagaattttgtgcaaacagatctcccttttcatcctctcactcagatgatgtatagccctcagaattctgattatcttttagctctcagcactgaaaatggcctgtgggtgtccaagaattttgggggaaaatgggaagaaatccacaaagcagtatgtttggccaaatggggatcagacaacaccatcttctttacaacctatgcaaatggctcctgcaaagctgaccttggggctctggaattatggagaacttcagacttgggaaaaagcttcaaaactattggtgtgaaaatctactcatttggtcttgggggacgtttcctttttgcctctgtgatggctgataaggatacaacaagaaggatccacgtttcaacagatcaaggggacacatggagcatggcccagctcccctccgtgggacaggaacagttctattctattctggcagcaaatgatgacatggtattcatgcatgtagatgaacctggagacactgggtttggcacaatctttacctcagatgatcgaggcattgtctattccaagtctttggaccgacatctctacactaccacaggcggagagacggactttaccaacgtgacctccctccgcggcgtctacataacaagcgtgctctccgaagataattctatccagaccatgatcacttttgaccaaggaggaaggtggacgcacctgaggaagcctgaaaacagtgaatgtgatgctacagcaaaaaacaagaatgagtgcagccttcatattcatgcttcctacagcatctcccagaaactgaatgttccaatggccccactctcagagccgaatgccgtaggcattgtcattgctcatggtagcgtgggggatgccatctcagtgatggttccagatgtgtacatctcagatgatgggggttactcctggacaaagatgctggaaggaccccactattacaccatcctggattctggaggcatcattgtggccattgagcacagcagccgtcctatcaatgtgattaagttctccacagacgaaggtcaatgctggcaaacctacacgttcaccagggaccccatctatttcactggcctagcttcagaacctggagctaggtccatgaatatcagcatttggggcttcacagaatctttcctgaccagccagtgggtctcctacaccattgattttaaagatatccttgaaaggaactgtgaagagaaggactataccatatggctggcacactccacagaccctgaagattatgaagatggctgcattttgggctacaaagaacagtttctgcggctacgcaagtcatccgtgtgtcagaatggtcgagactatgttgtgaccaagcagccctccatctgcctctgttccctggaggactttctctgtgattttggctactaccgtccagaaaatgactccaagtgtgtggaacagccagaactgaagggccacgacctggagttttgtctgtacggaagagaagaacacctaacaacaaatgggtaccggaaaattccaggggacaaatgccagggtggggtaaatccagttcgagaagtaaaagacttgaaaaagaaatgcacaagcaactttttgagtccggaaaaacagaattccaagtcaaattctgttccaattatcctggccatcgtgggattgatgctggtcacagtcgtagcaggagtgctcattgtgaagaaatatgtctgtgggggaaggttcctggtgcatcgatactctgtgctgcagcagcatgcagaggccaatggtgtggatggtgtggatgctttggacacagcctcccacactaataaaagtggttatcatgatgactcagatgaggacctcttggaatagctcttcagaggagctggacccagcatggatggtggaaccacagtacctcttacactccctgtggctccaacttcaggaaataaatttcccattgcgagggacccagctctgtttctgctgcttccatcaaagccaaaaggacctacactaaagaaatgcagggtgggggtggggaaccctgagcacttttttacaattggctctgagaaaaagggagacattttaaattctttaacttcttatttctcgtcctgtctctttgcaaagtatgggcttttttgtttttgttttttaagggaaacgaaatggaattcgaagggaccttttcactaaccccacttctgtgtgttctgcatggcgcctgccccagggcatctgccaactccagtatcagctctcacagtgtacttggtaccatccctgggctctgctggcgagacgaaacagctgtagagatgaaaacaggctgcagaggctggcacagcctggccggcttttctccatctggggacagtcctactccaagaacactgcacaccagctcctcacacagatcccacttactctttttttttttttcagagaccacagaccacagtgatttttcttttcccttgtttaattaggcaatacccttgttaattgccctttggcaactaacttaaccatgtgcttcccacacagtacatcaggaaaacttacagggcaatatttttaacttggggcaggaagaagggagcagcagagaattgactagatatagcacctattaaaagagaactcttgcttcttctgagatttttcaagctgtgctttgtgtgtgtgccagtagacttacgcaaggacagggtacaaacttagctggaagtctgcccaggctgaatgatctcttccctagagttgattgtcgggtacacagtgtgaacccccgaagacggaacctcacagtcttccatgttcccttcttaactgtcgtgtggctcgttgctaaatcatgacaatggctgcctatctgctgcttcttaggttgctgttgtacatggaaccaggactagagattttttcagatttatagacttaaaaaattagaattttattaccaggctttccttctcaccccttttttctgactttgccaagtaatttgttgacacgaaaattttggaggaaccaattgaaaacacacttccagtctagatgatgctttgtgtgatacattaagttcttattttggattaaaagaagttttccatttgatacctctctaaattaaataaattatagaatgtagttgggtggattttggggtggccatatagtaatggaaagctgcaataattagttttaatacagcttgaatatttgctatatagaaatatagtatggaaagtttttggtcttaatgtagctactgtgcgggtcacagtttctcccaatgattatgactgggacattctttggtagataccatttgctactagtttattttgtggctagaaagtcagttttgtgtgtttttttttttttttatttgaagtgccaaattaactttagtcagaatgtgagcagatggctaagttctctcctccccagaatggattaacagctgcgtggaaagtgggggagagagtggatggagacttttagagatgttaaaactgcagtagaatgaaatgagtcagggagcttcagttagaaaataaagttgaggcagtttttgtgaagataatatggttagggctggagtgcactagtctttttgcttattcattttgcatggttttaaaattaaaaataattccgaagatacaccagctcacaaatgaaaacgtcagcctctgccccaccctccctcctgcccaaagtgaatttggtactcagaaaagaactgtttataccactcacctttctcccagcatgtactcactgtgggcagatgcaccaatacatggtaatcctcttactcattttaagacgtaggaaactcaatattcttctctaaccatatacgatagggctcttcgcttttaatgatatctgggatttctgtggaacttggcaaattttcagagcaccttcactcacataatgtcatttgaacctcacaatgttcttgggatggagtcagttgttcagggtccccgtgtgtgtgataagcagtgctggctggctgtcttcagaactcttggaaatctttacacatgcgagtgctaaccactttgagcaaggctgccttcttgtagatgacttgctgttctttatgacagggatcagtggcatttgtttcctagcagtatttagcacctttttgccaccttggtgaacagaaaattgtattttcctgtctttcatggctgaaaacaaaagtaatgggaattttaaatacgtttgcagaaactgcccctcccctcattgagggtcactgctcaagagtgcaggagtggactctccactgatgggtctccctccccatcctggtttccaccccgggctggctagctctgttggtttgaagactgacagccagcctggctcattctcattattggctagttagctttctttatcaacctgctcactcacaaatgtgtgccctcagccagagagtaagaaagcccaaatctgttacagcttctaaaaaaatagatttctaatttgtcctactcatgttaggagcattatctttgaaggtaaaacatagtgtatcattgtgtaaactcccaggcttgatgtagcagaagagatcatttctggaggcttcagcaatggaatttagcattataagagagattggacaaaccagtccaaagtggtccgagttcttaaatccaggtagggaactcactcttctttcttctctggacctaattgggcattgggctttagtgagaccacagaccaggcccgtctctcctgtaggcttttaattcaatggcaactctatttcaaagaataaaagcctttggagagttgcggcagttctgggggcgggctcaggagagtccatagatcagccgtaactggaacgtagaatctacgtctgcctctgaatggacttcccacctcctctctcttgctctgatgcttgcctctgggcctctccatgcccaaggtggtctttcatccttgacaggctggtaatgtgctggccacctccagctcctgcatcgagtctgtaaaccagagctggttctcatggccttcgtcacgataccaggatacggaggggagcccagggccatccatacccaccccagggtaacggggctggcctggcattagtcattatttagtttccaggccaaccatccagatagagattccctctttcctttgagcagtgctctcaagagctccgtgcctgtccacaatgacctagagtgcatcctgctcattgtcagtgtagcccctcgcccctatattcatccaggatacttggaagtgctaaaataggaagggattcggctttcaactttgctaccatcttccctgaagcaggaaaatgaacatggacttaaatgttctttgaaaaaaccaaagttttaagatttgctgtgtgatgaagtgacagggagggccggagtcagcaggtgccagactttctgttctgtctgccatgggtttgtccagctcaggtagctctaggagcaccatcctgccctagcagagcccaggccttgccctcatgaagcatcattgaaatagcaggagcatgttgatttcttggttaggttgcattataataacaagagtcagaacattaattcgaaacaacttgcagtatgcatttcttcacaccagtacattcttaagtgtacttgtttataaggaataacataaactaatctgtacctttatatatatgtgtgtgtacatatatacatatataaactgtatagtgtacatggtaatgatttattgctatgccccagatccttaatgtagttctcatcctccgcatgccctcagccacaagcgggtgactgactgttccctgatgatttggcccacctcctgtgtttggacctctagggaggagggttttggtcatactctccttatcctcgtgcacagaaatgctcagggtccccatgtgcctgttgttcagccctctctcttgttccctttctgagcatgtggtccttccccaggctgtgggacagctgccttcccacgaaagtgtaaagcagtattaagatcattactgcatgtgccctaaaaacccaagttttctattcccttaggacagaaaattgcatgtgaggtgggataatcgagtttcagtgacccacgtcagttacacattaaagccagaccccatgataaaattccacaaaatggaaataaaactcaaatttctttagcattgtgtaaataaatctgaatgtgtttaactttgtactggtaattttctgtatatttggaatatttgggttaaaaataaaacagactggactttgttacctgacctactgaaatgactaa

SEQ ID NO: 2490 - protein, 831 aa, Homo sapiens; identical to SEQ ID NO: 109

SEQ ID NO: 2491 - DNA, 6954 bp, Homo sapiens
ggcgggggtgggcgggcgcgccgggcggcaggtgtcggcgtcggcggcattcggcggcgatggagcggccctggggagctgcggacggcctctcgcgctggccccatggcctcggcctcctcctcctcctgcagctgctgccgccgtcgaccctcagccaggaccggctggacgcgccgccgccgcccgctgcgccgctgccgcgctggtctggccccatcggggtgagctgggggctgcgggcggccgcagccgggggcgcgtttccccgcggcggccgttggcgtcgcagcgcgccgggcgaggacgaggagtgcggccgggtccgggacttcgtcgccaagctggccaacaacacgcaccagcatgtgtttgatgatctcagaggctcagtatccttgtcctgggttggagatagcactggggtcattctagtcttgactaccttccatgtaccactggtaattatgacttttggacagtccaagctatatcgaagtgaggattatgggaagaactttaaggatattacagatctcatcaataacacctttattcggactgaatttggcatggctattggtcctgagaactctggaaaggtggtgttaacagcagaggtgtctggaggaagtcgtggaggaagaatctttagatcatcagattttgcgaagaattttgtgcaaacagatctcccttttcatcctctcactcagatgatgtatagccctcagaattctgattatcttttagctctcagcactgaaaatggcctgtgggtgtccaagaattttgggggaaaatgggaagaaatccacaaagcagtatgtttggccaaatggggatcagacaacaccatcttctttacaacctatgcaaatggctcctgcaaagctgaccttggggctctggaattatggagaacttcagacttgggaaaaagcttcaaaactattggtgtgaaaatctactcatttggtcttgggggacgtttcctttttgcctctgtgatggctgataaggatacaacaagaaggatccacgtttcaacagatcaaggggacacatggagcatggcccagctcccctccgtgggacaggaacagttctattctattctggcagcaaatgatgacatggtattcatgcatgtagatgaacctggagacactgggtttggcacaatctttacctcagatgatcgaggcattgtctattccaagtctttggaccgacatctctacactaccacaggcggagagacggactttaccaacgtgacctccctccgcggcgtctacataacaagcgtgctctccgaagataattctatccagaccatgatcacttttgaccaaggaggaaggtggacgcacctgaggaagcctgaaaacagtgaatgtgatgctacagcaaaaaacaagaatgagtgcagccttcatattcatgcttcctacagcatctcccagaaactgaatgttccaatggccccactctcagagccgaatgccgtaggcattgtcattgctcatggtagcgtgggggatgccatctcagtgatggttccagatgtgtacatctcagatgatgggggttactcctggacaaagatgctggaaggaccccactattacaccatcctggattctggaggcatcattgtggccattgagcacagcagccgtcctatcaatgtgattaagttctccacagacgaaggtcaatgctggcaaacctacacgttcaccagggaccccatctatttcactggcctagcttcagaacctggagctaggtccatgaatatcagcatttggggcttcacagaatctttcctgaccagccagtgggtctcctacaccattgattttaaagatatccttgaaaggaactgtgaagagaaggactataccatatggctggcacactccacagaccctgaagattatgaagatggctgcattttgggctacaaagaacagtttctgcggctacgcaagtcatccgtgtgtcagaatggtcgagactatgttgtgaccaagcagccctccatctgcctctgttccctggaggactttctctgtgattttggctactaccgtccagaaaatgactccaagtgtgtggaacagccagaactgaagggccacgacctggagttttgtctgtacggaagagaagaacacctaacaacaaatgggtaccggaaaattccaggggacaaatgccagggtggggtaaatccagttcgagaagtaaaagacttgaaaaagaaatgcacaagcaactttttgagtccggaaaaacagaattccaagtcaaattctgttccaattatcctggccatcgtgggattgatgctggtcacagtcgtagcaggagtgctcattgtgaagaaatatgtctgtgggggaaggttcctggtgcatcgatactctgtgctgcagcagcatgcagaggccaatggtgtggatggtgtggatgctttggacacagcctcccacactaataaaagtggttatcatgatgactcagatgaggacctcttggaatagctcttcagaggagctggacccagcatggatggtggaaccacagtacctcttacactccctgtggctccaacttcaggaaataaatttcccattgcgagggacccagctctgtttctgctgcttccatcaaagccaaaaggacctacactaaagaaatgcagggtgggggtggggaaccctgagcacttttttacaattggctctgagaaaaagggagacattttaaattctttaacttcttatttctcgtcctgtctctttgcaaagtatgggcttttttgtttttgttttttaagggaaacgaaatggaattcgaagggaccttttcactaaccccacttctgtgtgttctgcatggcgcctgccccagggcatctgccaactccagtatcagctctcacagtgtacttggtaccatccctgggctctgctggcgagacgaaacagctgtagagatgaaaacaggctgcagaggctggcacagcctggccggcttttctccatctggggacagtcctactccaagaacactgcacaccagctcctcacacagatcccacttactctttttttttttttcagagaccacagaccacagtgatttttcttttcccttgtttaattaggcaatacccttgttaattgccctttggcaactaacttaaccatgtgcttcccacacagtacatcaggaaaacttacagggcaatatttttaacttggggcaggaagaagggagcagcagagaattgactagatatagcacctattaaaagagaactcttgcttcttctgagatttttcaagctgtgctttgtgtgtgtgccagtagacttacgcaaggacagggtacaaacttagctggaagtctgcccaggctgaatgatctcttccctagagttgattgtcgggtacacagtgtgaacccccgaagacggaacctcacagtcttccatgttcccttcttaactgtcgtgtggctcgttgctaaatcatgacaatggctgcctatctgctgcttcttaggttgctgttgtacatggaaccaggactagagattttttcagatttatagacttaaaaaattagaattttattaccaggctttccttctcaccccttttttctgactttgccaagtaatttgttgacacgaaaattttggaggaaccaattgaaaacacacttccagtctagatgatgctttgtgtgatacattaagttcttattttggattaaaagaagttttccatttgatacctctctaaattaaataaattatagaatgtagttgggtggattttggggtggccatatagtaatggaaagctgcaataattagttttaatacagcttgaatatttgctatatagaaatatagtatggaaagtttttggtcttaatgtagctactgtgcgggtcacagtttctcccaatgattatgactgggacattctttggtagataccatttgctactagtttattttgtggctagaaagtcagttttgtgtgtttttttttttttttatttgaagtgccaaattaactttagtcagaatgtgagcagatggctaagttctctcctccccagaatggattaacagctgcgtggaaagtgggggagagagtggatggagacttttagagatgttaaaactgcagtagaatgaaatgagtcagggagcttcagttagaaaataaagttgaggcagtttttgtgaagataatatggttagggctggagtgcactagtctttttgcttattcattttgcatggttttaaaattaaaaataattccgaagatacaccagctcacaaatgaaaacgtcagcctctgccccaccctccctcctgcccaaagtgaatttggtactcagaaaagaactgtttataccactcacctttctcccagcatgtactcactgtgggcagatgcaccaatacatggtaatcctcttactcattttaagacgtaggaaactcaatattcttctctaaccatatacgatagggctcttcgcttttaatgatatctgggatttctgtggaacttggcaaattttcagagcaccttcactcacataatgtcatttgaacctcacaatgttcttgggatggagtcagttgttcagggtccccgtgtgtgtgataagcagtgctggctggctgtcttcagaactcttggaaatctttacacatgcgagtgctaaccactttgagcaaggctgccttcttgtagatgacttgctgttctttatgacagggatcagtggcatttgtttcctagcagtatttagcacctttttgccaccttggtgaacagaaaattgtattttcctgtctttcatggctgaaaacaaaagtaatgggaattttaaatacgtttgcagaaactgcccctcccctcattgagggtcactgctcaagagtgcaggagtggactctccactgatgggtctccctccccatcctggtttccaccccgggctggctagctctgttggtttgaagactgacagccagcctggctcattctcattattggctagttagctttctttatcaacctgctcactcacaaatgtgtgccctcagccagagagtaagaaagcccaaatctgttacagcttctaaaaaaatagatttctaatttgtcctactcatgttaggagcattatctttgaaggtaaaacatagtgtatcattgtgtaaactcccaggcttgatgtagcagaagagatcatttctggaggcttcagcaatggaatttagcattataagagagattggacaaaccagtccaaagtggtccgagttcttaaatccaggtagggaactcactcttctttcttctctggacctaattgggcattgggctttagtgagaccacagaccaggcccgtctctcctgtaggcttttaattcaatggcaactctatttcaaagaataaaagcctttggagagttgcggcagttctgggggcgggctcaggagagtccatagatcagccgtaactggaacgtagaatctacgtctgcctctgaatggacttcccacctcctctctcttgctctgatgcttgcctctgggcctctccatgcccaaggtggtctttcatccttgacaggctggtaatgtgctggccacctccagctcctgcatcgagtctgtaaaccagagctggttctcatggccttcgtcacgataccaggatacggaggggagcccagggccatccatacccaccccagggtaacggggctggcctggcattagtcattatttagtttccaggccaaccatccagatagagattccctctttcctttgagcagtgctctcaagagctccgtgcctgtccacaatgacctagagtgcatcctgctcattgtcagtgtagcccctcgcccctatattcatccaggatacttggaagtgctaaaataggaagggattcggctttcaactttgctaccatcttccctgaagcaggaaaatgaacatggacttaaatgttctttgaaaaaaccaaagttttaagatttgctgtgtgatgaagtgacagggagggccggagtcagcaggtgccagactttctgttctgtctgccatgggtttgtccagctcaggtagctctaggagcaccatcctgccctagcagagcccaggccttgccctcatgaagcatcattgaaatagcaggagcatgttgatttcttggttaggttgcattataataacaagagtcagaacattaattcgaaacaacttgcagtatgcatttcttcacaccagtacattcttaagtgtacttgtttataaggaataacataaactaatctgtacctttatatatatgtgtgtgtacatatatacatatataaactgtatagtgtacatggtaatgatttattgctatgccccagatccttaatgtagttctcatcctccgcatgccctcagccacaagcgggtgactgactgttccctgatgatttggcccacctcctgtgtttggacctctagggaggagggttttggtcatactctccttatcctcgtgcacagaaatgctcagggtccccatgtgcctgttgttcagccctctctcttgttccctttctgagcatgtggtccttccccaggctgtgggacagctgccttcccacgaaagtgtaaagcagtattaagatcattactgcatgtgccctaaaaacccaagttttctattcccttaggacagaaaattgcatgtgaggtgggataatcgagtttcagtgacccacgtcagttacacattaaagccagaccccatgataaaattccacaaaatggaaataaaactcaaatttctttagcattgtgtaaataaatctgaatgtgtttaactttg

SEQ ID NO: 2492 - protein, 831 aa, Homo sapiens; identical to SEQ ID NO: 109

SEQ ID NO: 2493 - DNA, 2649 bp, Homo sapiens
ggcgggcgcgccgggcggcaggtgtcggcgtcggcggcattcggcggcgatggagcggccctggggagctgcggacggcctctcgcgctggccccatggcctcggcctcctcctcctcctgcagctgctgccgccgtcgaccctcagccaggaccggctggacgcgccgccgccgcccgctgcgccgctgccgcgctggtctggccccatcggggtgagctgggggctgcgggcggccgcagccgggggcgcgtttccccgcggcggccgttggcgtcgcagcgcgccgggcgaggacgaggagtgcggccgggtccgggacttcgtcgccaagctggccaacaacacgcaccagcatgtgtttgatgatctcagaggctcagtatccttgtcctgggttggagatagcactggggtcattctagtcttgactaccttccatgtaccactggtaattatgacttttggacagtccaagctatatcgaagtgaggattatgggaagaactttaaggatattacagatctcatcaataacacctttattcggactgaatttggcatggctattggtcctgagaactctggaaaggtggtgttaacagcagaggtgtctggaggaagtcgtggaggaagaatctttagatcatcagattttgcgaagaattttgtgcaaacagatctcccttttcatcctctcactcagatgatgtatagccctcagaattctgattatcttttagctctcagcactgaaaatggcctgtgggtgtccaagaattttgggggaaaatgggaagaaatccacaaagcagtatgtttggccaaatggggatcagacaacaccatcttctttacaacctatgcaaatggctcctgcaaagctgaccttggggctctggaattatggagaacttcagacttgggaaaaagcttcaaaactattggtgtgaaaatctactcatttggtcttgggggacgtttcctttttgcctctgtgatggctgataaggatacaacaagaaggatccacgtttcaacagatcaaggggacacatggagcatggcccagctcccctccgtgggacaggaacagttctattctattctggcagcaaatgatgacatggtattcatgcatgtagatgaacctggagacactgggtttggcacaatctttacctcagatgatcgaggcattgtctattccaagtctttggaccgacatctctacactaccacaggcggagagacggactttaccaacgtgacctccctccgcggcgtctacataacaagcgtgctctccgaagataattctatccagaccatgatcacttttgaccaaggaggaaggtggacgcacctgaggaagcctgaaaacagtgaatgtgatgctacagcaaaaaacaagaatgagtgcagccttcatattcatgcttcctacagcatctcccagaaactgaatgttccaatggccccactctcagagccgaatgccgtaggcattgtcattgctcatggtagcgtgggggatgccatctcagtgatggttccagatgtgtacatctcagatgatgggggttactcctggacaaagatgctggaaggaccccactattacaccatcctggattctggaggcatcattgtggccattgagcacagcagccgtcctatcaatgtgattaagttctccacagacgaaggtcaatgctggcaaacctacacgttcaccagggaccccatctatttcactggcctagcttcagaacctggagctaggtccatgaatatcagcatttggggcttcacagaatctttcctgaccagccagtgggtctcctacaccattgattttaaagatatccttgaaaggaactgtgaagagaaggactataccatatggctggcacactccacagaccctgaagattatgaagatggctgcattttgggctacaaagaacagtttctgcggctacgcaagtcatccgtgtgtcagaatggtcgagactatgttgtgaccaagcagccctccatctgcctctgttccctggaggactttctctgtgattttggctactaccgtccagaaaatgactccaagtgtgtggaacagccagaactgaagggccacgacctggagttttgtctgtacggaagagaagaacacctaacaacaaatgggtaccggaaaattccaggggacaaatgccagggtggggtaaatccagttcgagaagtaaaagacttgaaaaagaaatgcacaagcaactttttgagtccggaaaaacagaattccaagtcaaattctgttccaattatcctggccatcgtgggattgatgctggtcacagtcgtagcaggagtgctcattgtgaagaaatatgtctgtgggggaaggttcctggtgcatcgatactctgtgctgcagcagcatgcagaggccaatggtgtggatggtgtggatgctttggacacagcctcccacactaataaaagtggttatcatgatgactcagatgaggacctcttggaatagctcttcagaggagctggacccagcatggatggtggaaccacagtacctcttacactccctgtggctccaacttcaggaaataaatttcccattgcgagggaccc

SEQ ID NO: 2494 - protein, 831 aa, Homo sapiens; identical to SEQ ID NO: 109

SEQ ID NO: 2495 - DNA, 573 bp, Homo sapiens
gggcggcaggtgtcggcgtcggcggcattcggcggcgatggagcggccctggggagctgcggacggcctctcgcgctggccccatggcctcggcctcctcctcctcctgcagctgctgccgccgtcgaccctcagccaggaccggctggacgcgccgccgccgcccgctgcgccgctgccgcgctggtctggccccatcggggtgagctgggggctgcgggcggccgcagccgggggcgcgtttccccgcggcggccgttggcgtcgcagcgcgccgggcgaggacgaggagtgcggccgggtccgggacttcgtcgccaagctggccaacaacacgcaccagcatgtgtttgatgatctcagaggctcagtatccttgtcctgggttggagatagcactggggtcattctagtcttgactaccttccatgtaccactggtaattatgacttttggacagtccaagctatatcgaagtgaggattatgggaagaactttaaggatattacagatcatcagattttgcgaagaattttgtgcaaacagatctcccttttcatcctctcactcag

SEQ ID NO: 2496 - protein, 177 aa, Homo sapiens
MERPWGAADGLSRWPHGLGLLLLLQLLPPSTLSQDRLDAPPPPAAPLPRWSGPIGVSWGLRAAAAGGAFPRGGRWRRSAPGEDEECGRVRDFVAKLANNTHQHVFDDLRGSVSLSWVGDSTGVILVLTTFHVPLVIMTFGQSKLYRSEDYGKNFKDITDHQILRRILCKQISLFILS

SEQ ID NO: 2497 - DNA, 2238 bp, Homo sapiens
gccatttatcttaatatctcttattttttggttctagtctcgtccctttggagtagcattattatttggaggagttgatgagaaaggaccccagctgtttcatatggacccatctgggacctttgtacagtgtgatgctcgagcaattggctctgcttcagagggtgcccagagctccttgcaagaagtttaccacaagtctatgactttgaaagaagccatcaagtcttcactcatcatcctcaaacaagtaatggaggagaagctgaatgcaacaaacattgagctagccacagtgcagcctggccagaatttccacatgttcacaaaggaagaacttgaagaggttatcaaggacatttaaggaatcctgatcctcagaacttctctgggacaatttcagttctaataatgtccttaaattttatttccagctcctgttccttggaaaatctccattgtatgtgcattttttaaatgatgtctgtacataaaggcagttctgaaataaagaaaattttaaaatatttgttaatagactgttctcttctaatagtcttttttttttttttttttttaagagatgaggtctcactatattgcccaggctggtttcaaactcctgggttcaagtgatcttcccgcctctgcctcctgaagtgctaggattataggcgagagccactgtgcccagccattgtaatacagtcttttgtttgaaatgcaaatgttagtgggccaaaaggacagtgttattaatatccctattctatgaagatgtctgttctaaaactgttttagtgatgctctataacagaatcaactatatccattaatcccatggtgttgataaatgaactagtccagctcttcccagtggttaatagatgttaacagcactgtaaatccatttcggccctataatttctggagcaaacgtgtatttttgctgcttttcttataaggagatgctactaattgactatcagaagaacatgttttgaggtcctcctcaaaacattgatgggttggaatcagccatcaacagtgttgtaccagttcttgggtcttgatagacaatttggaaagagatttccttgtttacgaagtgaaggactaagaattaaattaatgaccttggcctcactggcaatcaattacaaatctctatatcagtaagagaattgtaaaattcagaagcagtttacattagactttggaatgaatgatgaactttccccattagagctgccatcatatgattggtggagattgtttaaagaatcattctatctcagcctcaaaaattaccacgggaagatggtatcagtatcactacttaacagatgaagaatctaatgctgtgtgcccatggacacacaaaattaagctgttgggacttgaacagctcaaattttcttgtttcagatcaccagctcttgagtaatagggaaatctggagatttgaaaagtacttgcactgtccacaacatggctaatccatatgtggatgatgcagaattgatttaattcactaacagggaccccataattatttgctgggctctgggtatattgatgtgtaggaagttgtactatatgttaataaattatgactatttggataggctgaattcatactaaatccatactgtagttcaacaaaaaacaacatgtttatatacatttggaaactgcaatgataggaaacatttggaagaaagggattttgccctagaataacacataaggaaagcagagaattagagtatattgttactgaatgttccagagacttctagtgattttaacacttattaagtatagcatgttgatggggagatttgtttctctaaagatcactttgttttattaaatcctaatagaaaatacccttgaaaatcctatctcatttattcctgtaacaaatttattgagcacctacctactatatgccaagaaatgtattagccatcaggcagagagctgttcaaatggtagatatgatctgtgctcctgtgaaacttctagtggggagagccaaacaataaacaatattcctttttaactctaggttaatgcagaaatggataaagcccatgttgcttttgggagaggtgagttgtgtctctgaatcacatgcatttcatagggggaaaaatgcccaaatactaaggagtagctcttagcctatgtccgttcgcctcagcttaagttgttttccctcccactggctgg

SEQ ID NO: 2498 - protein, 86 aa, Homo sapiens
MDPSGTFVQCDARAIGSASEGAQSSLQEVYHKSMTLKEAIKSSLIILKQVMEEKLNATNIELATVQPGQNFHMFTKEELEEVIKDI

SEQ ID NO: 2499 - DNA, 2650 bp, Homo sapiens
gttggtccttagtactgcggccgtgtgggtgagttggctgccggtgagttgggtgccggtggagtcgtgttggtcctcagaatccccgcgtagccgctgcctcctcctaccctcgccatgtttcttacccggtctgagtacgacagcttggttctacagccattgggatccagacatcagagggtgtgtgcctagctgtggagaagagaattacttccccactgatggagcccagcagcattgagaaaattgtagagattgatgctcacataggttgtgccatgagtgggctaattgctgatgctaagactttaattgataaagccagagtggagacacagaaccactggttcacctacaatgagacaatgacagtggagagtgtgacccaagctgtgtccaatctggctttgcagtttggagaagaagatgcagatccaggtgccatgtctcgtccctttggagtagcattattatttggaggagttgatgagaaaggaccccagctgtttcatatggacccatctgggacctttgtacagtgtgatgctcgagcaattggctctgcttcagagggtgcccagagctccttgcaagaagtttaccacaagtctatgactttgaaagaagccatcaagtcttcactcatcatcctcaaacaagtaatggaggagaagctgaatgcaacaaacattgagctagccacagtgcagcctggccagaatttccacatgttcacaaaggaagaacttgaagaggttatcaaggacatttaaggaatcctgatcctcagaacttctctgggacaatttcagttctaataatgtccttaaattttatttccagctcctgttccttggaaaatctccattgtatgtgcattttttaaatgatgtctgtacataaaggcagttctgaaataaagaaaattttaaaatatttgttaatagactgttctcttctaatagtcttttttttttttttttttttaagagatgaggtctcactatattgcccaggctggtttcaaactcctgggttcaagtgatcttcccgcctctgcctcctgaagtgctaggattataggcgagagccactgtgcccagccattgtaatacagtcttttgtttgaaatgcaaatgttagtgggccaaaaggacagtgttattaatatccctattctatgaagatgtctgttctaaaactgttttagtgatgctctataacagaatcaactatatccattaatcccatggtgttgataaatgaactagtccagctcttcccagtggttaatagatgttaacagcactgtaaatccatttcggccctataatttctggagcaaacgtgtatttttgctgcttttcttataaggagatgctactaattgactatcagaagaacatgttttgaggtcctcctcaaaacattgatgggttggaatcagccatcaacagtgttgtaccagttcttgggtcttgatagacaatttggaaagagatttccttgtttacgaagtgaaggactaagaattaaattaatgaccttggcctcactggcaatcaattacaaatctctatatcagtaagagaattgtaaaattcagaagcagtttacattagactttggaatgaatgatgaactttccccattagagctgccatcatatgattggtggagattgtttaaagaatcattctatctcagcctcaaaaattaccacgggaagatggtatcagtatcactacttaacagatgaagaatctaatgctgtgtgcccatggacacacaaaattaagctgttgggacttgaacagctcaaattttcttgtttcagatcaccagctcttgagtaatagggaaatctggagatttgaaaagtacttgcactgtccacaacatggctaatccatatgtggatgatgcagaattgatttaattcactaacagggaccccataattatttgctgggctctgggtatattgatgtgtaggaagttgtactatatgttaataaattatgactatttggataggctgaattcatactaaatccatactgtagttcaacaaaaaacaacatgtttatatacatttggaaactgcaatgataggaaacatttggaagaaagggattttgccctagaataacacataaggaaagcagagaattagagtatattgttactgaatgttccagagacttctagtgattttaacacttattaagtatagcatgttgatggggagatttgtttctctaaagatcactttgttttattaaatcctaatagaaaatacccttgaaaatcctatctcatttattcctgtaacaaatttattgagcacctacctactatatgccaagaaatgtattagccatcaggcagagagctgttcaaatggtagatatgatctgtgctcctgtgaaacttctagtggggagagccaaacaataaacaatattcctttttaactctaggttaatgcagaaatggataaagcccatgttgcttttgggagaggtgagttgtgtctctgaatcacatgcatttcatagggggaaaaatgcccaaatactaaggagtagctcttagcctatgtccgttcgcctcagcttaagttgttttccctcccactggctgg

SEQ ID NO: 2500 - protein, 183 aa, Homo sapiens
MEPSSIEKIVEIDAHIGCAMSGLIADAKTLIDKARVETQNHWFTYNETMTVESVTQAVSNLALQFGEEDADPGAMSRPFGVALLFGGVDEKGPQLFHMDPSGTFVQCDARAIGSASEGAQSSLQEVYHKSMTLKEAIKSSLIILKQVMEEKLNATNIELATVQPGQNFHMFTKEELEEVIKDI

SEQ ID NO: 2501 - DNA, 2730 bp, Homo sapiens
ggtcgcacgcgcagttggtccttagtactgcggccgtgtgggtgagttggctgccggtgagttgggtgccggtggagtcgtgttggtcctcagaatccccgcgtagccgctgcctcctcctaccctcgccatgtttcttacccggtctgagtacgacaggggcgtgaatactttttctcccgaaggaagattatttcaagtggaatatgccattgaggctatcaagcttggttctacagccattgggatccagacatcagagggtgtgtgcctagctgtggagaagagaattacttccccactgatggagcccagcagcattgagaaaattgtagagattgatgctcacataggttgtgccatgagtgggctaattgctgatgctaagactttaattgataaagccagagtggagacacagaaccactggttcacctacaatgagacaatgacagtggagagtgtgacccaagctgtgtccaatctggctttgcagtttggagaagaagatgcagatccaggtgccatgtctcgtccctttggagtagcattattatttggaggagttgatgagaaaggaccccagctgtttcatatggacccatctgggacctttgtacagtgtgatgctcgagcaattggctctgcttcagagggtgcccagagctccttgcaagaagtttaccacaagtctatgactttgaaagaagccatcaagtcttcactcatcatcctcaaacaagtaatggaggagaagctgaatgcaacaaacattgagctagccacagtgcagcctggccagaatttccacatgttcacaaaggaagaacttgaagaggttatcaaggacatttaaggaatcctgatcctcagaacttctctgggacaatttcagttctaataatgtccttaaattttatttccagctcctgttccttggaaaatctccattgtatgtgcattttttaaatgatgtctgtacataaaggcagttctgaaataaagaaaattttaaaatatttgttaatagactgttctcttctaatagtcttttttttttttttttttttaagagatgaggtctcactatattgcccaggctggtttcaaactcctgggttcaagtgatcttcccgcctctgcctcctgaagtgctaggattataggcgagagccactgtgcccagccattgtaatacagtcttttgtttgaaatgcaaatgttagtgggccaaaaggacagtgttattaatatccctattctatgaagatgtctgttctaaaactgttttagtgatgctctataacagaatcaactatatccattaatcccatggtgttgataaatgaactagtccagctcttcccagtggttaatagatgttaacagcactgtaaatccatttcggccctataatttctggagcaaacgtgtatttttgctgcttttcttataaggagatgctactaattgactatcagaagaacatgttttgaggtcctcctcaaaacattgatgggttggaatcagccatcaacagtgttgtaccagttcttgggtcttgatagacaatttggaaagagatttccttgtttacgaagtgaaggactaagaattaaattaatgaccttggcctcactggcaatcaattacaaatctctatatcagtaagagaattgtaaaattcagaagcagtttacattagactttggaatgaatgatgaactttccccattagagctgccatcatatgattggtggagattgtttaaagaatcattctatctcagcctcaaaaattaccacgggaagatggtatcagtatcactacttaacagatgaagaatctaatgctgtgtgcccatggacacacaaaattaagctgttgggacttgaacagctcaaattttcttgtttcagatcaccagctcttgagtaatagggaaatctggagatttgaaaagtacttgcactgtccacaacatggctaatccatatgtggatgatgcagaattgatttaattcactaacagggaccccataattatttgctgggctctgggtatattgatgtgtaggaagttgtactatatgttaataaattatgactatttggataggctgaattcatactaaatccatactgtagttcaacaaaaaacaacatgtttatatacatttggaaactgcaatgataggaaacatttggaagaaagggattttgccctagaataacacataaggaaagcagagaattagagtatattgttactgaatgttccagagacttctagtgattttaacacttattaagtatagcatgttgatggggagatttgtttctctaaagatcactttgttttattaaatcctaatagaaaatacccttgaaaatcctatctcatttattcctgtaacaaatttattgagcacctacctactatatgccaagaaatgtattagccatcaggcagagagctgttcaaatggtagatatgatctgtgctcctgtgaaacttctagtggggagagccaaacaataaacaatattcctttttaactctaggttaatgcagaaatggataaagcccatgttgcttttgggagaggtgagttgtgtctctgaatcacatgcatttcatagggggaaaaatgcccaaatactaaggagtagctcttagcctatgtccgttcgcctcagcttaagttgttttccctcccactggctgg

SEQ ID NO: 2502 - protein, 241 aa, Homo sapiens; identical to SEQ ID NO: 111

SEQ ID NO: 2503 - DNA, 2653 bp, Homo sapiens
acaggagggcgggctaaagaggtcgcggtcgcacgcgcagttggtccttagtactgcggccgtgtgggtgagttggctgccggggcgtgaatactttttctcccgaaggaagattatttcaagtggaatatgccattgaggctatcaagcttggttctacagccattgggatccagacatcagagggtgtgtgcctagctgtggagaagagaattacttccccactgatggagcccagcagcattgagaaaattgtagagattgatgctcacataggttgtgccatgagtgggctaattgctgatgctaagactttaattgataaagccagagtggagacacagaaccactggttcacctacaatgagacaatgacagtggagagtgtgacccaagctgtgtccaatctggctttgcagtttggagaagaagatgcagatccaggtgccatgtctcgtccctttggagtagcattattatttggaggagttgatgagaaaggaccccagctgtttcatatggacccatctgggacctttgtacagtgtgatgctcgagcaattggctctgcttcagagggtgcccagagctccttgcaagaagtttaccacaagtctatgactttgaaagaagccatcaagtcttcactcatcatcctcaaacaagtaatggaggagaagctgaatgcaacaaacattgagctagccacagtgcagcctggccagaatttccacatgttcacaaaggaagaacttgaagaggttatcaaggacatttaaggaatcctgatcctcagaacttctctgggacaatttcagttctaataatgtccttaaattttatttccagctcctgttccttggaaaatctccattgtatgtgcattttttaaatgatgtctgtacataaaggcagttctgaaataaagaaaattttaaaatatttgttaatagactgttctcttctaatagtcttttttttttttttttttttaagagatgaggtctcactatattgcccaggctggtttcaaactcctgggttcaagtgatcttcccgcctctgcctcctgaagtgctaggattataggcgagagccactgtgcccagccattgtaatacagtcttttgtttgaaatgcaaatgttagtgggccaaaaggacagtgttattaatatccctattctatgaagatgtctgttctaaaactgttttagtgatgctctataacagaatcaactatatccattaatcccatggtgttgataaatgaactagtccagctcttcccagtggttaatagatgttaacagcactgtaaatccatttcggccctataatttctggagcaaacgtgtatttttgctgcttttcttataaggagatgctactaattgactatcagaagaacatgttttgaggtcctcctcaaaacattgatgggttggaatcagccatcaacagtgttgtaccagttcttgggtcttgatagacaatttggaaagagatttccttgtttacgaagtgaaggactaagaattaaattaatgaccttggcctcactggcaatcaattacaaatctctatatcagtaagagaattgtaaaattcagaagcagtttacattagactttggaatgaatgatgaactttccccattagagctgccatcatatgattggtggagattgtttaaagaatcattctatctcagcctcaaaaattaccacgggaagatggtatcagtatcactacttaacagatgaagaatctaatgctgtgtgcccatggacacacaaaattaagctgttgggacttgaacagctcaaattttcttgtttcagatcaccagctcttgagtaatagggaaatctggagatttgaaaagtacttgcactgtccacaacatggctaatccatatgtggatgatgcagaattgatttaattcactaacagggaccccataattatttgctgggctctgggtatattgatgtgtaggaagttgtactatatgttaataaattatgactatttggataggctgaattcatactaaatccatactgtagttcaacaaaaaacaacatgtttatatacatttggaaactgcaatgataggaaacatttggaagaaagggattttgccctagaataacacataaggaaagcagagaattagagtatattgttactgaatgttccagagacttctagtgattttaacacttattaagtatagcatgttgatggggagatttgtttctctaaagatcactttgttttattaaatcctaatagaaaatacccttgaaaatcctatctcatttattcctgtaacaaatttattgagcacctacctactatatgccaagaaatgtattagccatcaggcagagagctgttcaaatggtagatatgatctgtgctcctgtgaaacttctagtggggagagccaaacaataaacaatattcctttttaactctaggttaatgcagaaatggataaagcccatgttgcttttgggagaggtgagttgtgtctctgaatcacatgcatttcatagggggaaaaatgcccaaatactaaggagtagctcttagcctatgtccgttcgcctcagcttaagttgttttccctcccactggctgg

SEQ ID NO: 2504 - protein, 183 aa, Homo sapiens; identical to SEQ ID NO: 2500

SEQ ID NO: 2505 - DNA, 335 bp, Homo sapiens
actttgctgctgcttttgtgatccctgttgaagtgacttcaagaagtgacaatgatgccaggcatttggttaagtatgatgtgctagccacagtgcagcctggccagaatttccacatgttcacaaaggaagaacttgaagaggttatcaaggacatttaaggaatcctgatcctcagaacttctctgggacaatttcagttctaataatgtccttaaattttatttccagctcctgttccttggaaaatctccattgtatgtgcattttttaaatgatgtctgtacataaaggcagttctgaaataaagaaaattttaaaatatttgttaatag

SEQ ID NO: 2506 - protein, 39 aa, Homo sapiens
SSELLWDNFSSNNVLKFYFQLLFLGKSPLYVHFLNDVCT

SEQ ID NO: 2507 - DNA, 539 bp, Homo sapiens
ggggttttttttcctgaaaaaatgtattctacttatttgccatttacttgagttctggagatacttgtaatgcaccatactaagtaagatgtttgacatacttgctaaatacttttttcagtgagataaagggaaaatctttgaaggaaggacggattgtgcataattaataggcatcttcttgccttctttgtttcaagtctatgactttgaaagaagccatcaagtcttcactcatcatcctcaaacaagtaatggaggagaagctgaatgcaacaaacattgagctagccacagtgcagcctggccagaatttccacatgttcacaaaggaagaacttgaagaggttatcaaggacatttaaggaatcctgatcctcagaacttctctgggacaatttcagttctaataatgtccttaaattttatttccagctcctgttccttggaaaatctccattgtatgtgcattttttaaatgatgtctgtacataaaggcagttctgaaataaagaaaattttaaaatatttgttaatag

SEQ ID NO: 2508 - protein, 53 aa, Homo sapiens
MTLKEAIKSSLIILKQVMEEKLNATNIELATVQPGQNFHMFTKEELEEVIKDI

SEQ ID NO: 2509 - DNA, 538 bp, Homo sapiens
gccatttatcttaatatctcttattttttggttctagtctcgtccctttggagtagcattattatttggaggagttgatgagaaaggaccccagctgtttcatatggacccatctgggacctttgtacagtgtgatgctcgagcaattggctctgcttcagagggtgcccagagctccttgcaagaagtttaccacaagtctatgactttgaaagaagccatcaagtcttcactcatcatcctcaaacaagtaatggaggagaagctgaatgcaacaaacattgagctagccacagtgcagcctggccagaatttccacatgttcacaaaggaagaacttgaagaggttatcaaggacatttaaggaatcctgatcctcagaacttctctgggacaatttcagttctaataatgtccttaaattttatttccagctcctgttccttggaaaatctccattgtatgtgcattttttaaatgatgtctgtacataaaggcagttctgaaataaagaaaattttaaaatatttgttaatag

SEQ ID NO: 2510 - protein, 86 aa, Homo sapiens; identical to SEQ ID NO: 2498

SEQ ID NO: 2511 - DNA, 1861 bp, Homo sapiens
tctgagtacgacaggtccgtgcagctgggggacgtcgggtgggaattatgggtgggcaggcccgggacctggccgcgcggcctgggttctgccgtgtcatggggctccccaggaacccgagactggccggacctggggatgttatgccctcctcaggcgcccgccgtccttccccaagctagaccacatcggcggcacttgtcctaccgctgagtcacccctgggtcctaactcggtgcggaagcgagaagctccggctggtgcttggtaaagaaggcgtgaggagccggaactcctaccttgaacccggagaaggccaagggtcactctttgctccgttcatcttttcgtgcctagtatgactgccttgaacaaacaaacaaaaagttaaacgtgcttcctggaagaaaaagcaactggtttgtagtagggcatgctgcggtgtatagtttcttcagaagcgcgaaggcagtcgtagctttggctggatatattgtctggagtctgattttataggaactggaatttagaatggttttcaagagatttctcatcatgccgattccaattgaccaaaattttttctgactttttaaaagtttaaagcaagttttaaaaaacttttgtggtatgaaaatgttcacaatattaagttgtacatatatatgctgtagacatttttactttcagtttctgttttcgtcagttaagtttttacatagctactcttttttaaagtcagggaaggcagacattttctttgtactgagtggtatgagatgctgcatttcctgtcaagtatatgctgatcctgtcgaagttttaccacctgcagttaccactttttcatcttttttactgactcgtagaagatgtgtgtgaagttttgacatatttccccactgtcctataaagtgactttgttggtcgatatttaacttccagaacattgaagagaatcatcttcgggtgacataattttgagttagggggcgtgaatactttttctcccgaaggaagattatttcaagtggaatatgccattgaggctatcaagcttggttctacagccattgggatccagacatcagagggtgtgtgcctagctgtggagaagagaattacttccccactgatggagcccagcagcattgagaaaattgtagagattgatgctcacataggttgtgccatgagtgggctaattgctgatgctaagactttaattgataaagccagagtggagacacagaaccactggttcacctacaatgagacaatgacagtggagagtgtgacccaagctgtgtccaatctggctttgcagtttggagaagaagatgcagatccaggtgccatgtctcgtccctttggagtagcattattatttggaggagttgatgagaaaggaccccagctgtttcatatggacccatctgggacctttgtacagtgtgatgctcgagcaattggctctgcttcagagggtgcccagagctccttgcaagaagtttaccacaagtctatgactttgaaagaagccatcaagtcttcactcatcatcctcaaacaagtaatggaggagaagctgaatgcaacaaacattgagctagccacagtgcagcctggccagaatttccacatgttcacaaaggaagaacttgaagaggttatcaaggacatttaaggaatcctgatcctcagaacttctctgggacaatttcagttctaataatgtccttaaattttatttccagctcctgttccttggaaaatctccattgtatgtgcattttttaaatgatgtctgtacataaaggcagttctgaaataaagaaaattttaaaatatttgttaatag

SEQ ID NO: 2512 - protein, 183 aa, Homo sapiens; identical to SEQ ID NO: 2500

SEQ ID NO: 2513 - DNA, 950 bp, Homo sapiens
gttggtccttagtactgcggccgtgtgggtgagttggctgccggtgagttgggtgccggtggagtcgtgttggtcctcagaatccccgcgtagccgctgcctcctcctaccctcgccatgtttcttacccggtctgagtacgacagcttggttctacagccattgggatccagacatcagagggtgtgtgcctagctgtggagaagagaattacttccccactgatggagcccagcagcattgagaaaattgtagagattgatgctcacataggttgtgccatgagtgggctaattgctgatgctaagactttaattgataaagccagagtggagacacagaaccactggttcacctacaatgagacaatgacagtggagagtgtgacccaagctgtgtccaatctggctttgcagtttggagaagaagatgcagatccaggtgccatgtctcgtccctttggagtagcattattatttggaggagttgatgagaaaggaccccagctgtttcatatggacccatctgggacctttgtacagtgtgatgctcgagcaattggctctgcttcagagggtgcccagagctccttgcaagaagtttaccacaagtctatgactttgaaagaagccatcaagtcttcactcatcatcctcaaacaagtaatggaggagaagctgaatgcaacaaacattgagctagccacagtgcagcctggccagaatttccacatgttcacaaaggaagaacttgaagaggttatcaaggacatttaaggaatcctgatcctcagaacttctctgggacaatttcagttctaataatgtccttaaattttatttccagctcctgttccttggaaaatctccattgtatgtgcattttttaaatgatgtctgtacataaaggcagttctgaaataaagaaaattttaaaatatttgttaatag

SEQ ID NO: 2514 - protein, 183 aa, Homo sapiens; identical to SEQ ID NO: 2500

SEQ ID NO: 2515 - DNA, 1030 bp, Homo sapiens
ggtcgcacgcgcagttggtccttagtactgcggccgtgtgggtgagttggctgccggtgagttgggtgccggtggagtcgtgttggtcctcagaatccccgcgtagccgctgcctcctcctaccctcgccatgtttcttacccggtctgagtacgacaggggcgtgaatactttttctcccgaaggaagattatttcaagtggaatatgccattgaggctatcaagcttggttctacagccattgggatccagacatcagagggtgtgtgcctagctgtggagaagagaattacttccccactgatggagcccagcagcattgagaaaattgtagagattgatgctcacataggttgtgccatgagtgggctaattgctgatgctaagactttaattgataaagccagagtggagacacagaaccactggttcacctacaatgagacaatgacagtggagagtgtgacccaagctgtgtccaatctggctttgcagtttggagaagaagatgcagatccaggtgccatgtctcgtccctttggagtagcattattatttggaggagttgatgagaaaggaccccagctgtttcatatggacccatctgggacctttgtacagtgtgatgctcgagcaattggctctgcttcagagggtgcccagagctccttgcaagaagtttaccacaagtctatgactttgaaagaagccatcaagtcttcactcatcatcctcaaacaagtaatggaggagaagctgaatgcaacaaacattgagctagccacagtgcagcctggccagaatttccacatgttcacaaaggaagaacttgaagaggttatcaaggacatttaaggaatcctgatcctcagaacttctctgggacaatttcagttctaataatgtccttaaattttatttccagctcctgttccttggaaaatctccattgtatgtgcattttttaaatgatgtctgtacataaaggcagttctgaaataaagaaaattttaaaatatttgttaatag

SEQ ID NO: 2516 - protein, 241 aa, Homo sapiens; identical to SEQ ID NO: 111

SEQ ID NO: 2517 - DNA, 953 bp, Homo sapiens
acaggagggcgggctaaagaggtcgcggtcgcacgcgcagttggtccttagtactgcggccgtgtgggtgagttggctgccggggcgtgaatactttttctcccgaaggaagattatttcaagtggaatatgccattgaggctatcaagcttggttctacagccattgggatccagacatcagagggtgtgtgcctagctgtggagaagagaattacttccccactgatggagcccagcagcattgagaaaattgtagagattgatgctcacataggttgtgccatgagtgggctaattgctgatgctaagactttaattgataaagccagagtggagacacagaaccactggttcacctacaatgagacaatgacagtggagagtgtgacccaagctgtgtccaatctggctttgcagtttggagaagaagatgcagatccaggtgccatgtctcgtccctttggagtagcattattatttggaggagttgatgagaaaggaccccagctgtttcatatggacccatctgggacctttgtacagtgtgatgctcgagcaattggctctgcttcagagggtgcccagagctccttgcaagaagtttaccacaagtctatgactttgaaagaagccatcaagtcttcactcatcatcctcaaacaagtaatggaggagaagctgaatgcaacaaacattgagctagccacagtgcagcctggccagaatttccacatgttcacaaaggaagaacttgaagaggttatcaaggacatttaaggaatcctgatcctcagaacttctctgggacaatttcagttctaataatgtccttaaattttatttccagctcctgttccttggaaaatctccattgtatgtgcattttttaaatgatgtctgtacataaaggcagttctgaaataaagaaaattttaaaatatttgttaatag

SEQ ID NO: 2518 - protein, 183 aa, Homo sapiens; identical to SEQ ID NO: 2500

SEQ ID NO: 2519 - DNA, 414 bp, Homo sapiens
atagaaaaatgttgaaagagttgggcgcagtggcctgtaatcccagcactttgggaggctgagacaggtggatcgcttgagggcaggagttcaagaccagcctgcccaacatggtgaaaccccatctctactaaaaatacaaaaattagccaggcgtggtggtggacgcctgtaatcccagctacttgggaagctgaggcatgagaatcacttgaacccgggaggtggaggttacagtgagccgagattgcaccactgcactccagcctgggcgacagaacgagactccgtcccgaaaaaaaaaaaagctgaaagaaataaaaggagaggtatggaccagcttgggaatgtccttttttagtatgctaagagtagacaggagcaaaggaagtaatgacgagtaaagataggtgg

SEQ ID NO: 2520 - protein, 44 aa, Homo sapiens
SQHFGRLRQVDRLRAGVQDQPAQHGETPSLLKIQKLARRGGGRL

SEQ ID NO: 2521 - DNA, 850 bp, Homo sapiens
ggtcgcacgcgcagttggtccttagtactgcggccgtgtgggtgagttggctgccggtgagttgggtgccggtggagtcgtgttggtcctcagaatccccgcgtagccgctgcctcctcctaccctcgccatgtttcttacccggtctgagtacgacaggggcgtgaatactttttctcccgaaggaagattatttcaagtggaatatgccattgaggctatcaagcttggttctacagccattgggatccagacatcagagggtgtgtgcctagctgtggagaagagaattacttccccactgatggagcccagcagcattgagaaaattgtagagattgatgctcacataggttgtgccatgagtgggctaattgctgatgctaagactttaattgataaagccagagtggagacacagaaccactggttcacctacaatgagacaatgacagtggagagtgtgacccaagctgtgtccaatctggctttgcagtttggagaagaagatgcagatccaggtgccatgtctcgtccctttggagtagcattattatttggaggagttgatgagaaaggaccccagctgtttcatatggacccatctgggacctttgtacagtgtgatgctcgagcaattggctctgcttcagagggtgcccagagctccttgcaagaagtttaccacaagtctatgactttgaaagaagccatcaagtcttcactcatcatcctcaaacaagtaatggaggagaagctgaatgcaacaaacattgagagatggggtcttgctgtgttgcccagactggtcttaaactcctggcctcaggcaattctcctgcctcagcct

SEQ ID NO: 2522 - protein, 239 aa, Homo sapiens
MFLTRSEYDRGVNTFSPEGRLFQVEYAIEAIKLGSTAIGIQTSEGVCLAVEKRITSPLMEPSSIEKIVEIDAHIGCAMSGLIADAKTLIDKARVETQNHWFTYNETMTVESVTQAVSNLALQFGEEDADPGAMSRPFGVALLFGGVDEKGPQLFHMDPSGTFVQCDARAIGSASEGAQSSLQEVYHKSMTLKEAIKSSLIILKQVMEEKLNATNIERWGLAVLPRLVLNSWPQAILLPQ

SEQ ID NO: 2523 - DNA, 640 bp, Homo sapiens
ggtcgcacgcgcagttggtccttagtactgcggccgtgtgggtgagttggctgccggtgagttgggtgccggtggagtcgtgttggtcctcagaatccccgcgtagccgctgcctcctcctaccctcgccatgtttcttacccggtctgagtacgacaggggcgtgaatactttttctcccgaaggaagattatttcaagtggaatatgccattgaggctatcaagcttggttctacagccattgggatccagacatcagagggtgtgtgcctagctgtggagaagagaattacttccccactgatggagcccagcagcattgagaaaattgtagagattgatgctcacataggttgtgccatgagtgggctaattgctgatgctaagactttaattgataaagccagagtggagacacagaaccactggttcacctacaatgagacaatgacagtggagagtgtgacccaagctgtgtccaatctggctttgcagtttggagaagaagatgcagatccaggtgccatgtctcgtccctttggagtagcattattatttggaggagttgatgagaaaggaccccagctgtaagtaccattttgtaattttcccccatgcttttgcagggaattattttaa

SEQ ID NO: 2524 - protein, 153 aa, Homo sapiens
MFLTRSEYDRGVNTFSPEGRLFQVEYAIEAIKLGSTAIGIQTSEGVCLAVEKRITSPLMEPSSIEKIVEIDAHIGCAMSGLIADAKTLIDKARVETQNHWFTYNETMTVESVTQAVSNLALQFGEEDADPGAMSRPFGVALLFGGVDEKGPQL

SEQ ID NO: 2525 - DNA, 926 bp, Homo sapiens
agttggtccttagtactgcggccgtgtgggtgagttggctgccggtgagttgggtgccggtggagtcgtgttggtcctcagaatccccgcgtagccgctgcctcctcctaccctcgccatgtttcttacccggtctgagtacgacaggggcgtgaatactttttctcccgaaggaagattatttcaagtggaatatgccattgaggctatcaagcttggttctacagccattgggatccagacatcagagggtgtgtgcctagctgtggagaagagaattacttccccactgatggagcccagcagcattgagaaaattgtagagattgatgctcacataggttgtgccatgagtgggctaattgctgatgctaagactttaattgataaagccagagtggagacacaggtaaaattggcattatctcctttttaccaggatgcttgagttccttgtttagtgattatctagctgcctgggctatactgcaggtacctgtgtcaatattagatgtggctcttgggagtaattttgggtagaattcccagttagaacttcctggggcttggagtttagctgtccaatcattgcagttttaaagaggctctggtcagtagtgctgacagtgtcttccttttttttttggctttgcctatatataaagcatgcattgtttcctaattgactttgtgtgggagcatcatggcaggaggtggacgtagttaaaggatattctcccctcagctgcctttgctgccaggcttgtaaataacagcccgcctttggtgagtaataacttgtaccaactgacaaatactggtcagggatactgttttttttttttttaaactttgtagctgctgcttgaagataggctagtaagaaaaatacatcacatggtaaaattttttgtacttatttgcaa

SEQ ID NO: 2526 - protein, 109 aa, Homo sapiens
MFLTRSEYDRGVNTFSPEGRLFQVEYAIEAIKLGSTAIGIQTSEGVCLAVEKRITSPLMEPSSIEKIVEIDAHIGCAMSGLIADAKTLIDKARVETQVKLALSPFYQDA

SEQ ID NO: 2527 - DNA, 551 bp, Homo sapiens
agtactgcggccgtgtgggtgagttggctgccggggcgtgaatactttttctcccgaaggaagattatttcaagtggaatatgccattgaggctatcaagcttggttctacagccattgggatccagacatcagagggtgtgtgcctagctgtggagaagagaattacttccccactgatggagcccagcagcattgagaaaattgtagagattgatgctcacataggttgtgccatgagtgggctaattgctgatgctaagactttaattgataaagccagagtggagacacaggtaaaattggcattatctcctttttaccaggatgcttgagttccttgtttagtgattatctagctgcctgggctatactgcaggtacctgtgtcaatattagatgtggctcttgggagtaattttgggtagaattcccagttagaacttcctggggcttggagtttagctgtccaatcattgcagttttaaagaggctctggtcagtagtgctgacagtgtcttccttttttttttggctttgcctatatataaag

SEQ ID NO: 2528 - protein, 51 aa, Homo sapiens
MEPSSIEKIVEIDAHIGCAMSGLIADAKTLIDKARVETQVKLALSPFYQDA

SEQ ID NO: 2529 - DNA, 1868 bp, Homo sapiens
acaaacaaacaaaaagttaaacgtgcttcctggaagaaaaagcaactggtttgtagtagggcatgctgcggtgtatagtttcttcagaagcgcgaaggcagtcgtagctttggctggatatattgtctggagtctgattttataggaactggaatttagaatggttttcaagagatttctcatcatgccgattccaattgaccaaaattttttctgactttttaaaagtttaaagcaagttttaaaaaacttttgtggtatgaaaatgttcacaatattaagttgtacatatatatgctgtagacatttttactttcagtttctgttttcgtcagttaagtttttacatagctactcttttttaaagtcagggaaggcagacattttctttgtactgagtggtatgagatgctgcatttcctgtcaagtatatgctgatcctgtcgaagttttaccacctgcagttaccactttttcatcttttttactgactcgtagaagatgtgtgtgaagttttgacatatttccccactgtcctataaagtgactttgttggtcgatatttaacttccagaacattgaagagaatcatcttcgggtgacataattttgagttagggtgtgtatgatagaaattgttatgcttatcagaaggcatttattaaattttgtggccatttacttgtctccaaaaaaaaaaaagaattgtttacagaagtaactatagtgtgagtcagaaatatattaatgccattagagaaattcaaatcaattaataaagacagtgagatcaatagttgtgggttggagaatatgggataaatgaaggaggggcaatggaaaagcacaatacattttgggaaaagtccagtctgactggcacatatgatacgtgtatgggaacagcaggagataatgggaaaaacaggatgctgctagatattgaatggtttttaatacgaggctaaggagtttgggtcctatttctgtaggcaactgtgtgctgttaaataataattgtgttttacagagattaattgtctgaattaggggaaagtgagtcaatacctgttagtgttaggctattaacaatagttaggtgaaaggtaatgagggcattgagaaggaagagtgatgtgttactgtggaggaggaattgatatgaattggtatgacttagcatatagttggatatgggaaaagatggggaggaatgagtcagatcatttagaacttcgtatgttgggaacactggaagatttgagatgttttaaattaaaactgaaattggaatggcaggagatgaagtcaattttgcaaggtggctggatttaaagagataatatttcaaactggaaaacgttaagtgttaagtgctaataggatatgcaagtggaaatgttcagcaaacatttaaattagttaggaaagaggtgaaactggtagtagagatttggaagtaacttgtgcttagcactctaaaagcactactatatgacatgttacctgttgtaaagtctggactccataaaccacggattgcaaccatctcattcatttgttcacatattttttgtgtccattgtgtgctcaaagcttttatagctgagaccatgattggtgcctcttctccgtagggatttccagcacacttgagcaaggaaaggtggaaagtgttaagtgttaaggggaagtgtttagagaggaaagcagtctgacatgtaagttatataaatattgagtgaatgaactaggttagaattaggaactacatggatctcagtctgttaagataacaatagtaattcatacaaataagtagagaaatgtacctgtgactaacttttagtaaaaagtaataattaggc

SEQ ID NO: 2530 - protein, 31 aa, Homo sapiens
MIEIVMLIRRHLLNFVAIYLSPKKKKNCLQK

SEQ ID NO: 2531 - DNA, 1034 bp, Homo sapiens
gtactgcggccgtgtgggtgagttggctgccggtgagttgggtgccggtggagtcgtgttggtcctcagaatccccgcgtagccgctgcctcctcctaccctcgccatgtttcttacccggtctgagtacgacaggcgcccgccgtccttccccaagctagaccacatcggcggcacttgtcctaccgctgagtcacccctgggtcctaactcggtgcggaagcgagaagctccggctggtgcttggtaaagaaggcgtgaggagccggaactcctaccttgaacccggagaaggccaagggtcactctttgctccgttcatcttttcgtgcctagtatgactgccttgaacaaacaaacaaaaagttaaacgtgcttcctggaagaaaaagcaactggtttgtagtagggcatgctgcggtgtatagtttcttcagaagcgcgaaggcagtcgtagctttggctggatatattgtctggagtctgattttataggaactggaatttagaatggttttcaagagatttctcatcatgccgattccaattgaccaaaattttttctgactttttaaaagtttaaagcaagttttaaaaaacttttgtggtatgaaaatgttcacaatattaagttgtacatatatatgctgtagacatttttactttcagtttctgttttcgtcagttaagtttttacatagctactcttttttaaagtcagggaaggcagacattttctttgtactgagtggtatgagatgctgcatttcctgtcaagtatatgctgatcctgtcgaagttttaccacctgcagttaccactttttcatcttttttactgactcgtagaagatgtgtgtgaagttttgacatatttccccactgtcctataaagtgactttgttggtcgatatttaacttccagaacattgaagagaatcatcttcgggtgacataattttgagttagggtgtgtatgatagaaattgttatgcttatcagaaggcatttattaaattttgtggccatttactt

SEQ ID NO: 2532 - protein, 47 aa, Homo sapiens
MFLTRSEYDRRPPSFPKLDHIGGTCPTAESPLGPNSVRKREAPAGAW

SEQ ID NO: 2533 - DNA, 5147 bp, Homo sapiens
aaggtgcccggcgagcggagaaagggagcagagggggcgggaggagggttcgggagcgcacgccacgtgacccggcggccaagttcgctgcgagtttgacagaagtttgaatccgagtcgggggctttctgctgccggcggggcaccgcggcggccgcagcctctgagagcacgaacagcagcgcccccgcgtcccagccagccagccagccagactggactccggcccaccgacggccgctcgcgctccggccccgctcgcctgctctgccccggacctgcagctccccgctcccccgccgtgtccgccgcctcccggccagagagccaagccaccacgccgcgcccagcgctcgccgcgccagcatgtcctcgaccgagagcgccggccgcacggcggacaagtcgccgcgccagcaggtggaccgcctactcgtggggctgcgctggcggcggctggaggagccgctgggcttcatcaaagttctccagtggctctttgctattttcgccttcgggtcctgtggctcctacagcggggagacaggagcaatggttcgctgcaacaacgaagccaaggacgtgagctccatcatcgttgcatttggctatcccttcaggttgcaccggatccaatatgagatgcccctctgcgatgaagagtccagctccaagaccatgcacctcatgggggacttctctgcacccgccgagttcttcgtgacccttggcatcttttccttcttctataccatggctgccctagttatctacctgcgcttccacaacctctacacagagaacaaacgcttcccgctggtggacttctgtgtgactgtctccttcaccttcttctggctggtagctgcagctgcctggggcaagggcctgaccgatgtcaagggggccacacgaccatccagcttgacagcagccatgtcagtgtgccatggagaggaagcagtgtgcagtgccggggccacgccctctatgggcctggccaacatctccgtggtgagacctgtggccactgcaggaagcagcaccagccctgctgcccaggcctgtcccagctagcaggtcctgaaaggaaagagagggtgtcccagagctggtgtcccctgcacctggagctggtgccctcactgcgcttcatgctggctgctggctcctggctgaccctgagaggacattttgggatgaggggaacccaaaagccacttagccttctgttccttcctccttctgcactctgcctccaattcccttctcatttccccacctctaggcacgctctctgtgatgtctcccctcctcctgcctgttctacacaatgtgtgtgaacacataaaggggagcctggggctgtggctgagcttgaagctgcgagcagacccagcatgagtgggaaggggcttactgtcactcagccctccagcctggaaaggggctttggagcagtagtgggtctgctggatgcatatggatttggccatcccagttgttagaatgttgaaatatgtccatatccattggtaaagagctgaggtcttgagcttctcaaatgctgcccgtcatcccagccacctcagccctgctctgaaaatgacttgttcccacatctgaaatgtttaatggctggcacaccaggaacacacgtctggaacttgctggaaccctgcttatggttcccccccaaaaaaattttattgtagaaatgttcacaggtacaacaaagttgaaagaattttacagtgaatacccatgcactcaccacctagactgtgccattaactttttactagacttgctttatcacatatttattcacttcttcatccatcaatccgtcttgtttttagtgcatttcaaagataatttgggacatcagtacacttccctctaagtacttcctgctgtgaggtttttaaaatatgttgaataactatttgaacatagccctggctaggtgcctgatcacagggaaggagcaccttggacagctcctgccacacctacctggcggaaggtgctccgaacagggcctcacgcgtgctgtgggaggcgccccagggctgacttttgcttggctccttgctatgctttgcacgatgctcctctaaagggtcagattctgctagtgaccaagctacagcttgggtgcatggtgtggacagaattagacactttcacctgggattcccctaaacagttgatggtcctgagccctgcctctataccgagctctctgtcttagtctttctagtcctctgtgcttcttccctgcacaagccccaaccccaactgcaataggaactccccctccctgttcccacaatgaccccctgactattctcacaaattcccctgatgtctttgcagctctttggctttatcaacttcttcctgtgggccgggaactgttggtttgtgttcaaggagaccccgtggcatggacagggccagggccaggaccaggaccaggaccaggaccagggccagggtcccagccaggagagtgcagctgagcagggagcagtggagaagcagtaagcagccccccacctggctattcccgaactggacagcacctcttcaaccacctccggcttccaggacctttctcttcctcctcctccaattcccctcccccatcattctggtctttgagctttgagacgatgggcaggcatcagctgttggaaacctgggcagccctctcagtggcttcctatcctccttcttgctggagccatgaatggcaggagctcagtgcttcttgtgcagtgcctggacccaggtatcttacttggggtcttacttgtacccttacagtctctgagaaccagcctctgctgcaggtgagggttgggggcaggaaaccagtgctctgagactggttcctagcagccacctttctgtcaacctgtccggcttcaacaatattagggggaagggaaatcagctagtagccttcccctctggtcccttgtgtggaggccccaatagtggtttggcgacccctcctcagtggctgtcatctagtccctgcgtctgatctccagtcatcccatgactcagtgtgccttccactgtcttctctggcctctgcctgcccacagaatccaccatgtgtgaaccagagaggtccaccagcctagaaaacagcccttcagagggtcctgatgaggccttcctggactcagctgggagcaagataaattgcaactgagttgcagcttcaagaaagtaaagccagtaagcttgctggcagaatcaatttcttctatcccctcaatcctcccacccaccaggctggggcactttccaccaacactctaaactctactttagaaacgccctatcttcctccctgtcctccttcttggtctcacacttgggactcaaaaatgtggagtcaggacctgcctcctaatccccttacttctctgtccatctcccttccccagcatcgtgcatctgaggcatttgagatcctttttgaagtctgtccaggccttccttttattcctgtggggccagacaggggcttaggaagggccaaaggaccatcatgaggctaagttgccccagagccccaggatggatgggcccattttttccttattccctgctcagttttttcccctgctccttctctagtccttctttcatatttctccttctcatcttgaaaacaggatgttccctcttcccttgctgtcccatttctcccctgtgtccttatttctcccagtctctatcccctctcaagtccagggcaggccgatgctattggtgcttcttcactttgggacccagttccatatttgtctttagtgtatatcctcttcctgatacctccttcagtccctctctgggccccaaggctgagaatcagtgttaactgggtaaggatcatttgcttcctacccagctcaatctgccctggccatagggcttcccagggaaggaagaagagggaagaatccgaccactttccaatccagtgccaattggcccactaagcatcctaaaggtgaatgtgccctgtgccaatctctcctcaggactgagtcaacccccttcaacctcctcacctctctaaacaccatccatagtaacatgtgcattactggggtacctaggagtcaggacttttgacttcaggccagtcatttcctcccgatggggaaagggtgagatttacatccccaaatgcttgagtccctcagtgaaagaattagtttttgtttgtttgtttaagattttggggaagagatttgaggaggaaagaaaggagatggggtgagagggtttttaagtctgaaactctctgtcatgagctgtccccatggttactcaaggacaaggggggacagttttgcctacagctccagagacacagagaacaaaggggtgaccttcatttttcttcaagccggcctctgtgggggtctgtgagcagcttctactggatctttgtttggattctgtgtctgtatttataatttatttgaaatgtgctgggtagtgttctcatttgggggctgaagttagcaactgggccttcagctagggaaagcagttgcgggcagggggtggggggagattatattcactcctgccaaggactcccagcccaggactctctttagagcaaggaagcctcgttctctttcttctcaagaggctctcttgttctccatcaggagagccttgatttaggctacggcctcactctctatggccaccctaagaggaaaggctacttcacctcattacctccagagggctgggcagggccaagtgcctcataggactcatgttctctccaaccagggctggcatcactgctttgcaaagtggggcctgaggtagaagaaggtgtctggtttctccagctgctgtaggaggctaatgggcagggtacttgccctttgtcccactagactctaacccagcaccagggtgcccacctaggacctttcctggacatgagtttccttcactatcatagtcatgagcctcctacttctgggattgcagatcaggggtggggggagaatgttgcatgttgttttctggtgcttgttattatatatttgaataaacagtgctgcaagtacttgccatgaaggatctga

SEQ ID NO: 2534 - protein, 236 aa, Homo sapiens
MSSTESAGRTADKSPRQQVDRLLVGLRWRRLEEPLGFIKVLQWLFAIFAFGSCGSYSGETGAMVRCNNEAKDVSSIIVAFGYPFRLHRIQYEMPLCDEESSSKTMHLMGDFSAPAEFFVTLGIFSFFYTMAALVIYLRFHNLYTENKRFPLVDFCVTVSFTFFWLVAAAAWGKGLTDVKGATRPSSLTAAMSVCHGEEAVCSAGATPSMGLANISVVRPVATAGSSTSPAAQACPS

SEQ ID NO: 2535 - DNA, 2662 bp, Homo sapiens
aggaccaggaccaggaccagggccagggtcccagccaggagagtgcagctgagcagggagcagtggagaagcagtaagcagccccccacctggctattcccgaactggacagcacctcttcaaccacctccggcttccaggacctttctcttcctcctcctccaattcccctcccccatcattctggtctttgagctttgagacgatgggcaggcatcagctgttggaaacctgggcagccctctcagtggcttcctatcctccttcttgctggagccatgaatggcaggagctcagtgcttcttgtgcagtgcctggacccaggtatcttacttggggtcttacttgtacccttacagtctctgagaaccagcctctgctgcaggtgagggttgggggcaggaaaccagtgctctgagactggttcctagcagccacctttctgtcaacctgtccggcttcaacaatattagggggaagggaaatcagctagtagccttcccctctggtcccttgtgtggaggccccaatagtggtttggcgacccctcctcagtggctgtcatctagtccctgcgtctgatctccagtcatcccatgactcagtgtgccttccactgtcttctctggcctctgcctgcccacagaatccaccatgtgtgaaccagagaggtccaccagcctagaaaacagcccttcagagggtcctgatgaggccttcctggactcagctgggagcaagataaattgcaactgagttgcagcttcaagaaagtaaagccagtaagcttgctggcagaatcaatttcttctatcccctcaatcctcccacccaccaggctggggcactttccaccaacactctaaactctactttagaaacgccctatcttcctccctgtcctccttcttggtctcacacttgggactcaaaaatgtggagtcaggacctgcctcctaatccccttacttctctgtccatctcccttccccagcatcgtgcatctgaggcatttgagatcctttttgaagtctgtccaggccttccttttattcctgtggggccagacaggggcttaggaagggccaaaggaccatcatgaggctaagttgccccagagccccaggatggatgggcccattttttccttattccctgctcagttttttcccctgctccttctctagtccttctttcatatttctccttctcatcttgaaaacaggatgttccctcttcccttgctgtcccatttctcccctgtgtccttatttctcccagtctctatcccctctcaagtccagggcaggccgatgctattggtgcttcttcactttgggacccagttccatatttgtctttagtgtatatcctcttcctgatacctccttcagtccctctctgggccccaaggctgagaatcagtgttaactgggtaaggatcatttgcttcctacccagctcaatctgccctggccatagggcttcccagggaaggaagaagagggaagaatccgaccactttccaatccagtgccaattggcccactaagcatcctaaaggtgaatgtgccctgtgccaatctctcctcaggactgagtcaacccccttcaacctcctcacctctctaaacaccatccatagtaacatgtgcattactggggtacctaggagtcaggacttttgacttcaggccagtcatttcctcccgatggggaaagggtgagatttacatccccaaatgcttgagtccctcagtgaaagaattagtttttgtttgtttgtttaagattttggggaagagatttgaggaggaaagaaaggagatggggtgagagggtttttaagtctgaaactctctgtcatgagctgtccccatggttactcaaggacaaggggggacagttttgcctacagctccagagacacagagaacaaaggggtgaccttcatttttcttcaagccggcctctgtgggggtctgtgagcagcttctactggatctttgtttggattctgtgtctgtatttataatttatttgaaatgtgctgggtagtgttctcatttgggggctgaagttagcaactgggccttcagctagggaaagcagttgcgggcagggggtggggggagattatattcactcctgccaaggactcccagcccaggactctctttagagcaaggaagcctcgttctctttcttctcaagaggctctcttgttctccatcaggagagccttgatttaggctacggcctcactctctatggccaccctaagaggaaaggctacttcacctcattacctccagagggctgggcagggccaagtgcctcataggactcatgttctctccaaccagggctggcatcactgctttgcaaagtggggcctgaggtagaagaaggtgtctggtttctccagctgctgtaggaggctaatgggcagggtacttgccctttgtcccactagactctaacccagcaccagggtgcccacctaggacctttcctggacatgagtttccttcactatcatagtcatgagcctcctacttctgggattgcagatcaggggtggggggagaatgttgcatgttgttttctggtgcttgttattatatatttgaataaacagtgctgcaagtacttgccatga

SEQ ID NO: 2536 - protein, 110 aa, Homo sapiens
MRLSCPRAPGWMGPFFPYSLLSFFPCSFSSPSFIFLLLILKTGCSLFPCCPISPLCPYFSQSLSPLKSRAGRCYWCFFTLGPSSIFVFSVYPLPDTSFSPSLGPKAENQC

SEQ ID NO: 2537 - DNA, 302 bp, Homo sapiens
tacggcctcactctctatggccaccctaagaggaaaggctacttcacctcattacctccactgctgtaggaggctaatgggcagggtacttgccctttgtcccactagactctaacccagcaccagggtgcccacctaggacctttcctggacatgagtttccttcactatcatagtcatgagcctcctacttctgggattgcagatcaggggtggggggagaatgttgcatgttgttttctggtgcttgttattatatatttgaataaacagtgctgcaagtacttgccatgaaggatctg

SEQ ID NO: 2538 - protein, 32 aa, Homo sapiens [sequence omitted]

SEQ ID NO: 2539 - DNA, 2316 bp, Homo sapiens
gcgtccgcggcggtgatggcggtgcgtgaacgcgcggcggcagcaatggccgctctggagcggcgggtgccgagtctcgatgacttcgcgggacagagctggagctcgtgggtggagcgggccgacctgcccgcggctgacggggctgagctggaggagagtagcaaaaacacgaagaagttggatgccatgaccctcattaaagaagacatgtccatcttcgggcactgccctgcccatgatgacttctacttggttgtgtgtaaccactgcagccaagtggtgaagcctcaagctttccagaagcactgcgaaagaagacatgggcccctcagcaagctttatggccgggccccacccccacctccagcccctgccagctctcagaaatgccatgtagtgaatgggcagggcccagcttgtagggccccaggttccacgaaaacctcctccagggagaagggccaggggtcccggagccgtggccaccagcctcctgagaagacccagaaggacaacctctgccagccagggggcctcaccaaggactcccctggaaaacctcccatggctcccccttctaaagaacctcctggcagagagaacatcgagatcatccccagtgaggggtccagtcactgggctgaaggcagccctcctgaaaaggagcccagtgggaccaggctgccccctaaaacccaccggaagatggctcggaaggagtgcgacctcaacaggcagtgtggggtaataaatccagagaccaaaaagatctgtacccgcctgttgacctgcaagatccactcagtacaccagcgccgggaagtccagggccgggccaaggactttgacgtgctggtggcagagctgaaggccaactcccgcaaaggggagtctcccaaggagaagagcccagggcgcaaggagcaagttctcgagcgcccctcccaggagctcccctcctcagtccaggttgtagcagcggtggctgctcccagcagcaccttctctgttcgtgccaagcagacctacccatactgtgcactgcccaggtcccgggcctcctccgagagtgaattggatgatgaaggcccctgtggtggtgatggggacccaggcctgttccccttccccatgccccggggtgggacccaggcctccagcgaagagagtgaggaggaggggacatctgacgacctccacccaccccctgactgccattatgcaacccggcccccacggccacaggcgttctgcacctttgggagccggctggtgagcccaggatgctatgtgtttagccgccggctggaccggttctgctcagcactcagctccatgctggaacggcacctcagcacacacatgtggaagaagatcccaccggcagctgaacctccagctcaccttgtcaactccccgttatctgctcccctgagcccatcctctacaggcacctgcccccgccttccaggtccaaccctgagacctgcctgcccagcctccatgccccccaccaaggacaaccttgtccccagctaccctgcaggctcccccagcgtggcggctgcctgtagccaggcagagtgcatgggcgggagccaggctatcacctcaccactgcctgccaacacgccatccccgtccttcagcaagctgccgccttccaaggccagcaagtcatccaaaggcaaggacggggtggaggtggaggccccttctcgaaagcggaagttatcccctggccctaccactcttaaacggacctgcatcctggagcccactggaaaagggaaaccctctggctgtaggggcctctcggccaaaactaaaacagccctgagcatggggcttaatgggacaatggggccaagagtgaagcgggcagggcccctggactgtcgtggctcccctcatcagctccccacaccagtcaaggcttctcagctggagaaccggggagcagctggacacccagccaaggccctgccaaccaactgcctctctgaggaggaggtggccaagaagcggaaaaacctggccacttattgccggccagtgaaggccaagcactgtcaggctggtgcccctgctgatgtggcctgctctgtgcgccgcaagaagccaggcccggccctggcctttgaggagaagtgctctacactgaagtcaaaagcccattaacgagaaagtgcctgcccactgcaacggagccgccagcacctcctcccctccagatccgggccccaggctgctgccgctttttataactttatattatttttttttaagaaaaaaagctctttaaaatacctc

SEQ ID NO: 2540 - protein, 722 aa, Homo sapiens; identical to SEQ ID NO: 113

SEQ ID NO: 2541 - DNA, 750 bp, Homo sapiens
cggcagcaatggccgctctggagcggcgggtgccgagtctcgatgacttcgcgggacagagctggagctcgtgggtggagcgggccgacctgcccgcggctgacggggctgagctggaggagagtagcaaaaacacgaagaagttggatgccatgaccctcattaaagaagacatgtccatcttcgggcactgccctgcccatgatgacttctacttggttgtgtgtaaccactgcagccaagtggtgaagcctcaagctttccagaagcactgcgaaagaagacatgggcccctcagcaagctttatggccgggccccacccccacctccagcccctgccagctctcagaaatgccatgtagtgaatgggcagggcccagcttgtagggccccaggttccacgaaaacctcctccagggagaagggccaggggtcccggagccgtggccaccagcctcctgagaagacccagaaggacaacctctgccttttcgtgcctgtggtgaatctggagaagatgtccagtctcccgaagcctgatggacatggaatcagggtggccccaccctctgcttttctcagccagccagggggcctcaccaaggactcccctggaaaacctcccatggctcccccttctaaagaacctcctggcagagagaacatcgagatcatccccagtgaggggtccagtcactgggctgaaggcagccctcctgaaaaggagcccagtgggaccaggctgcccc

SEQ ID NO: 2542 - protein, 246 aa, Homo sapiens
MAALERRVPSLDDFAGQSWSSWVERADLPAADGAELEESSKNTKKLDAMTLIKEDMSIFGHCPAHDDFYLVVCNHCSQVVKPQAFQKHCERRHGPLSKLYGRAPPPPPAPASSQKCHVVNGQGPACRAPGSTKTSSREKGQGSRSRGHQPPEKTQKDNLCLFVPVVNLEKMSSLPKPDGHGIRVAPPSAFLSQPGGLTKDSPGKPPMAPPSKEPPGRENIEIIPSEGSSHWAEGSPPEKEPSGTRL

SEQ ID NO: 2543 - DNA, 4370 bp, Homo sapiens
ggggacctgggagagtatctatttgggatgccacatagtagcagaaaggacccatcgagaaatctcaagaagagactcagggacttatagaaacattggttaaggacggtttcccctttaaatggggaagcaggcccagaaaagagatgatacttacccacaatcacccaactagttagcagtggaaccctaaactgcaccttgaagtgaagggtcccataagaaaggtggatggattcttcttagtggggccatcttagtccagatgcagcaggtgaaggaagatgggcatttgagaatggacccactgaaaggttccccaagtggtcctagcaccaggagcttgtcacggagtgtgggcttcatactgttgagctgcaggccctgcttggggcttctggaaaggggacaacctctgggttgtcttctgggaagaacagtctctggtaaggagaggctggagactctctaaaactggccctgacccttctgagctgtgtttctcctctaggggctgagctggaggagagtagcaaaaacacgaagaagttggatgccatgaccctcattaaagaaggtgggagtcgacacacattagggctgggacccagggcagacaggaccacgctccacttttccaccacactacagaaggaggtggctgcttgaagcagctgtctggggaccctcattttgataggtccgagtcggccggttgttctggctcctgtgacctgtcgttggagatcataatcataggtgattgcccactcacctgaaagcgtataccctttgggactgcttagatcgaactctggaagctggaagcattcagcatggagcttgttatatcagcggggaggtgaagtgccttctgagtgtggggtgggagtgctctccgatcttccagagaaaccctgggatcttcagccccagtgacatgggcttctgtcattgcagacatgtccatcttcgggcactgccctgcccatgatgacttctacttggttgtgtgtaaccactgcagccaagtggtgaagcctcaagctttccagaagcactgcgaaagaagacatgggcccctcagcaagctttatggccgggccccacccccacctccagcccctgccagctctcagaaatgccatgtagtgaatgggcagggcccagcttgtagggccccaggttccacgaaaacctcctccagggagaagggccaggggtcccggagccgtggccaccagcctcctgagaagacccagaaggacaacctctgccttttcgtgcctgtggtgaatctggagaagatgtccagtctcccgaagcctgatggacatggaatcagggtggccccaccctctgcttttctcagccagccagggggcctcaccaaggactcccctggaaaacctcccatggctcccccttctaaagaacctcctggcagagagaacatcgagatcatccccagtgaggggtccagtcactgggctgaaggcagccctcctgaaaaggagcccagtgggaccaggctgccccctaaaacccaccggaagatggctcggaaggagtgcgacctcaacaggcagtgtggggtaataaatccagagaccaaaaagatctgtacccgcctgttgacctgcaagatccactcagtacaccagcgccgggaagtccagggccgggccaaggactttgacgtgctggtggcagagctgaaggccaactcccgcaaaggggagtctcccaaggagaagagcccagggcgcaaggagcaagttctcgagcgcccctcccaggagctcccctcctcagtccaggttgtagcagcggtggctgctcccagcagcaccttctctgttcgtgccaagcagacctacccatactgtgcactgcccaggtacgtctagaatccaacccctacctcacctgggggtacttggcccctaagccatcaggggcccctggaaacaggctcagggagtgtcctggaagaggcactccctcagccctgagtgtgggggtattcctggggctcctgacagtggtgtggaagcaggagactcccctgtttccaaccaggcataccacagcaccccagcctctcggcagtgtgccagatccaacactcaggatatgaacattttcccagctgcctccaacagaccgaaacttgtcactggggagctgaaagggtcacactcctgggcaaggcagccctatgtgtattcactcactggccccttcgcgtgcagaggctatgccggaccccagggagagcctgacttgctgaaggagacacacatgcatctctgcctgtcacacaaggggcagacacgaaacacaggctcagctcacagacaggctcacaggaatatgtgatgcaagaagggggttgagcgagttgactgggctgaccagagctgggtacagttttaactgtgaagattttctggaggaggcggatctgcagcagattatcccctgaggaggaaggggctgggaggtgaaggggctggggagagaatcccttgggagcagtctctctgtctcttactctgtgagctgtgtcgttccctcctgtccttcccttccctctgtcctcttctgattgccctgcagggtgtctgccctggtgccctgctctttgagctcggcaggttcaaggatgcccctactctgaccccacaacagtcacattcccctggcatcccttttggcccttccaggtcccgggcctcctccgagagtgaattggatgatgaaggcccctgtggtggtgatggggacccaggcctgttccccttccccatgccccggggtgggacccaggcctccagcgaagagagtgaggaggaggggacatctgacgacctccacccaccccctgactgccattatgcaacccggcccccacggccacaggcgttctgcacctttgggagccggctggtgagcccaggatgctatgtgtttagccgccggctggaccggttctgctcagcactcagctccatgctggaacggcacctcagcacacacatgtggaagaagatcccaccggcagctgaacctccagctcaccttgtcaactccccgttatctgctcccctgagcccatcctctacaggcacctgcccccgccttccaggtccaaccctgagacctgcctgcccagcctccatgccccccaccaaggacaaccttgtccccagctaccctgcaggctcccccagcgtggcggctgcctgtagccaggcagagtgcatgggcgggagccaggctatcacctcaccactgcctgccaacacgccatccccgtccttcagcaagctgccgccttccaaggccagcaagtcatccaaaggcaaggacggggtggaggtggaggccccttctcgaaagcggaagttatcccctggccctaccactcttaaacggacctgcatcctggagcccactggaaaagggaaaccctctggctgtaggggcctctcggccaaaactaaaacagccctgagcatggggcttaatgggacaatggggccaagagtgaagcgggcagggcccctggactgtcgtggctcccctcatcagctccccacaccagtcaaggcttctcagctggagaaccggggagcagctggacacccagccaaggccctgccaaccaactgcctctctgaggaggaggtggccaagaagcggaaaaacctggccacttattgccggccagtgaaggccaagcactgtcaggctggtgcccctgctgatgtggcctgctctgtgcgccgcaagaagccaggcccggccctggcctttgaggagaagtgctctacactgaaggtaccagccaggctccctgaagattgatgagggtggggcacacagggggtacctgatacagagaagatgctacattggtgtttgtgcagggaaagggaggaaggggaagttgagagagttcctggactgttttctttaggaagaggtaggtcagttcttagcaaagtgactccagctttttgcctggtgaaccttcccctatccctaaccctttcccttgggctgaggagatgcggcacccctccacccctgcttttgctataatcaaagggctacttctttctgaattggctgtgaccctcattccaggtactggagctacctctgttccctgaaggaaagggagtttgagtccctgggtcacagcctaacatgccgagcagcaagtcaaaagcccattaacgagaaagtgcctgcccactgcaacggagccgccagcacctcctcccctccagatccgggccccaggctgctgccgctttttataactttatattatttttttttaagaaaaaaagctcttt

SEQ ID NO: 2544 - protein, 353 aa, Homo sapiens
MPRGGTQASSEESEEEGTSDDLHPPPDCHYATRPPRPQAFCTFGSRLVSPGCYVFSRRLDRFCSALSSMLERHLSTHMWKKIPPAAEPPAHLVNSPLSAPLSPSSTGTCPRLPGPTLRPACPASMPPTKDNLVPSYPAGSPSVAAACSQAECMGGSQAITSPLPANTPSPSFSKLPPSKASKSSKGKDGVEVEAPSRKRKLSPGPTTLKRTCILEPTGKGKPSGCRGLSAKTKTALSMGLNGTMGPRVKRAGPLDCRGSPHQLPTPVKASQLENRGAAGHPAKALPTNCLSEEEVAKKRKNLATYCRPVKAKHCQAGAPADVACSVRRKKPGPALAFEEKCSTLKVPARLPED

SEQ ID NO: 2545 - DNA, 1561 bp, Homo sapiens
cgggaagtccagggccgggccaaggactttgacgtgctggtggcagagctgaaggccaactcccgcaaaggggagtctcccaaggagaagagcccagggcgcaaggagcaagttctcgagcgcccctcccaggagctcccctcctcagtccaggttgtagcagcggtggctgctcccagcagcaccttctctgttcgtgccaagcagacctacccatactgtgcactgcccaggtcccgggcctcctccgagagtgaattggatgatgaaggcccctgtggtggtgatggggacccaggcctgttccccttccccatgccccggggtgggacccaggcctccagcgaagagagtgaggaggaggggacatctgacgacctccacccaccccctgactgccattatgcaacccggcccccacggccacaggcgttctgcacctttgggagccggctggtgagcccaggatgctatgtgtttagccgccggctggaccggttctgctcagcactcagctccatgctggaacggcacctcagcacacacatgtggaagaagatcccaccggcagctgaacctccagctcaccttgtcaactccccgttatctgctcccctgagcccatcctctacaggcacctgcccccgccttccaggtccaaccctgagacctgcctgcccagcctccatgccccccaccaaggacaaccttgtccccagctaccctgcaggctcccccagcgtggcggctgcctgtagccaggcagagtgcatgggcgggagccaggctatcacctcaccactgcctgccaacacgccatccccgtccttcagcaagctgccgccttccaaggccagcaagtcatccaaaggcaaggacggggtggaggtggaggccccttctcgaaagcggaagttatcccctggccctaccactcttaaacggacctgcatcctggagcccactggaaaagggaaaccctctggctgtaggggcctctcggccaaaactaaaacagccctgagcatggggcttaatgggacaatggggccaagagtgaagcgggcagggcccctggactgtcgtggctcccctcatcagctccccacaccagtcaaggcttctcagctggagaaccggggagcagctggacacccagccaaggccctgccaaccaactgcctctctgaggaggaggtggccaagaagcggaaaaacctggccacttattgccggccagtgaaggccaagcactgtcaggctggtgcccctgctgatgtggcctgctctgtgcgccgcaagaagccaggcccggccctggcctttgaggagaagtgctctacactgaagtcaaaagcccattaacgagaaagtgcctgcccactgcaacggagccgccagcacctcctcccctccagatccgggccccaggctgctgccgctttttataactttatattatttttttttaagaaaaaaagctctttaaaatacctcaagactgtctccctgttctgttgctgctatgaaaatataaaaacagaaacatagaaaaggaagg

SEQ ID NO: 2546 - protein, 349 aa, Homo sapiens
MPRGGTQASSEESEEEGTSDDLHPPPDCHYATRPPRPQAFCTFGSRLVSPGCYVFSRRLDRFCSALSSMLERHLSTHMWKKIPPAAEPPAHLVNSPLSAPLSPSSTGTCPRLPGPTLRPACPASMPPTKDNLVPSYPAGSPSVAAACSQAECMGGSQAITSPLPANTPSPSFSKLPPSKASKSSKGKDGVEVEAPSRKRKLSPGPTTLKRTCILEPTGKGKPSGCRGLSAKTKTALSMGLNGTMGPRVKRAGPLDCRGSPHQLPTPVKASQLENRGAAGHPAKALPTNCLSEEEVAKKRKNLATYCRPVKAKHCQAGAPADVACSVRRKKPGPALAFEEKCSTLKSKAH

SEQ ID NO: 2547 - DNA, 1707 bp, Homo sapiens
cagctcacagacaggctcacaggaatatgtgatgcaagaagggggttgagcgagttgactgggctgaccagagctgggtacagttttaactgtgaagattttctggaggaggcggatctgcagcagattatcccctgaggaggaaggggctgggaggtgaaggggctggggagagaatcccttgggagcagtctctctgtctcttactctgtgagctgtgtcgttccctcctgtccttcccttccctctgtcctcttctgattgccctgcagggtgtctgccctggtgccctgctctttgagctcggcaggttcaaggatgcccctactctgaccccacaacagtcacattcccctggcatcccttttggcccttccaggtcccgggcctcctccgagagtgaattggatgatgaaggcccctgtggtggtgatggggacccaggcctgttccccttccccatgccccggggtgggacccaggcctccagcgaagagagtgaggaggaggggacatctgacgacctccacccaccccctgactgccattatgcaacccggcccccacggccacaggcgttctgcacctttgggagccggctggtgagcccaggatgctatgtgtttagccgccggctggaccggttctgctcagcactcagctccatgctggaacggcacctcagcacacacatgtggaagaagatcccaccggcagctgaacctccagctcaccttgtcaactccccgttatctgctcccctgagcccatcctctacaggcacctgcccccgccttccaggtccaaccctgagacctgcctgcccagcctccatgccccccaccaaggacaaccttgtccccagctaccctgcaggctcccccagcgtggcggctgcctgtagccaggcagagtgcatgggcgggagccaggctatcacctcaccactgcctgccaacacgccatccccgtccttcagcaagctgccgccttccaaggccagcaagtcatccaaaggcaaggacggggtggaggtggaggccccttctcgaaagcggaagttatcccctggccctaccactcttaaacggacctgcatcctggagcccactggaaaagggaaaccctctggctgtaggggcctctcggccaaaactaaaacagccctgagcatggggcttaatgggacaatggggccaagagtgaagcgggcagggcccctggactgtcgtggctcccctcatcagctccccacaccagtcaaggcttctcagctggagaaccggggagcagctggacacccagccaaggccctgccaaccaactgcctctctgaggaggaggtggccaagaagcggaaaaacctggccacttattgccggccagtgaaggccaagcactgtcaggctggtgcccctgctgatgtggcctgctctgtgcgccgcaagaagccaggcccggccctggcctttgaggagaagtgctctacactgaagtcaaaagcccattaacgagaaagtgcctgcccactgcaacggagccgccagcacctcctcccctccagatccgggccccaggctgctgccgctttttataactttatattatttttttttaagaaaaaaagctctttaaaatacctcaagactgtctccctgttctgttgctgctatgaaaatataaaaacagaaacatagaaaaggaagg

SEQ ID NO: 2548 - protein, 349 aa, Homo sapiens; identical to SEQ ID NO: 2546

SEQ ID NO: 2549 - DNA, 4788 bp, Homo sapiens
ctctcctgcagccgccaccgcctccgcgatcgcaaacccggaagacgtgttcgggcagctggagtgtacgggcccgcgggccacggccatgcagcccctggagttctgcctctgcatggctgaagccatcctactcttctcacctgaacactccctgttcttcttctgctcccgaaaagcacggatccggctccactgggcagggcagaccctagccatcctctgtgcagctctgggcctgggcttcatcatctccagcaggacccgcagtgagctgcctcatctggtgtcctggcacagctgggtgggagccctgacactgctggccactgctgtccaggcactgtgtgggctctgcctcctttgtccccgggcagccagggtctcaagggtggctcgcctcaagctctaccatctgacatgtggactggtggtctacctgatggctacagtaacggtgcttctgggcatgtactcagtatggttccaggcccagatcaaaggtgcggcctggtacctgtgcctggcactgcccgtctatccagccctggtgatcatgcaccagatttccagatcctacttgccgaggaagaaaatggaaatgtgagttcctgcgaacgctgaatctaggtgggacgcttgccttgaacatcatggttcctttggtgatctataagggatctatttaagaagtggtcaggttttcgcacttcttggctggtccagggactgcagaaaccaaagctgctattgttgaggaataattcagtgggtcaaaatggggagatgtactgggtatgagtggaaggtgatggagagcctgatcctgaagcctctacttgatgagagacagagttttgggtggtgatagtgatgtgctggtggtcatttcttgcttgtgtgcctgatgaaaaactgggttcctgtaagttatgaatggcatccagggatatttgggttacttttaagaaagcagtgtgatgtagtggagagagcccatgggtcttatttatgggatatggtcctcttaggctctgttgtacaaccttaggtacattccatatcttaagaccactgtttcttcatctgtgaaatgtttctaaacaatctctaagtcccttccttctctaatatacagcgtctgtcaggtcgatgtctcagaacactctcccagctgtggaccacgtggaccacttagcagactcagggggtagttctttactctccctttactaccctggagggacagctctgcccttgaggcccttcagaaatttgtgctgatttggtccctgtgccagggcacagggggtcaggcactgtggaaagaagggactcaggtgagggtcttctggactctaagacggtaaaggcactaaagtcactttaaagcttttggagaagcaggagggcattggcttaaccaagccgaaggctgctggctgggctgcctagcccagctaagatcttccttcagcccacctcaggatccgggcttgagggctgcagggcctgcgtgcgctccctcccccgaaatcacttctcagggcaaaggagccccaggcatctcatgctttgcccttcttagggctcaggttcttgccttagcacatagcttctgggagcttttttgaagcatttcataagggccaaggaagtggggcagggcttttctgatccaaagaaaacaaagtttctctggttacccctcttcccttgttatctaagctttcctcagttgtcatctcttcccagctctttggtccaagagggggctgagtttggtgccagctggcaaatgagggctggactctcttccctccagagaccaccccgctccttgctgcagctgaaagtagttccccaggctgccctcggtggtgaggactggatgctagactgctgagctgtggtctgggctcagttgagaagataggatctccctagatcatggcaaggcctgacaacagctgagccaggaaagtgctgctgaggcaagtcgacatagctcacagggaactctgggaagcctgggatgtaggcgctggagctccagttcccaggagcaggggcaggtgttcctagatgttagtgttgtggatgtccttggtcttctgaagattcaggtcctcctctccgggtagcttagaagtaaggaggttggtttgattcaatagtatggggacagaatggggacagcaagggcagaagtgtcctctccacgtaactcattatgcccctcctgggggagattgcatctccaggacaagcatctaaaggaggcccctgctgtgcagaggggtattgttcctgtctctttcattgtcctccctcctctcaaactctccagtgtggtgtgaactcagaagaaacggttactggggctgcatggagaatttcacctgcggtgattttgatccagggactgcatctcctctttcctcatcacagccagtgctgagaggctccttctacctgccgcagggtaggagggccaggcaaagttcaccagcttgctctaagagcaagcaggcaatgccgtaaagcctgagcctgcctgaggtgctgcctcctcccaggtggtgcgggggctggtgggcgggcgggcaggcgtgctgacagccggcagtttgcgtgggctgtgccatctgatgtctattcccagccctgggaggaagggggagtcatttatattctgcaggaggaaggggccccagctgtcgcctttctgaccagcaggcctggagggcaggggcacagagcagagaggagggcactggtggtctcctgcttagcctggtctgactgcagtgtagggaataggtcaccaggaggagcccttcatcctggcaggccggattgtggagggacttccctccccctcttttccatttctccctccatcaccacctgccctcacatcctggggcagcagctggacagccattagacctcagtgccagggcactcttcctccagctgggatctcagtggctcccagctgcatgggctcctgcttgtgtgttccctcctccgccatcctctgttccccgcacctcccttattctgctcatgtctggggtattcacttggctcctcagcaaggaagcaaacgccttggaggagaagcacatggttgcccttttgtccttgctccctggctagggaaagctgctagtggtcagcctgttttgcctttttttaaaaaaaaaaaaaaagccagggcagggtgcttagattttaaaaatttgcgtgtcatttgcacaaattttcatatcaagctaagtcctgattccaaatttgattatattccaaatttgattatattccaaatttgattatattcagattcaaccttgaggacattagaaatatagatggcttctgtatccaaatctgaatggaaatgagattacccttctgggttcagatacccctcccaagcccccgtcttttctgtaaccacccctcctctgagccccatcatggctggggttggtatggaatgggagcagctctgtatctggggaagtcctccagcctcaccttcttggctcttaagtggtaggctgttaccacttgccagcctgggcctcctctctccccaccctttcacaaggcaggctgcccttccgcactcactggcccatcccttctttctcatcgtcccacccttccacccccgtgcatggctgctgtaggtctggtttttttggtttttgttttttttaagacggagtctcactctgccgccaggctggagtgcagtggcagaatcttggctcactgcaacctctgcctcccaggttcaagcgattctcctgcctcagcctcccgagtagctgggactacaggcacgtgccaccatatccagctaatttttgtatttttagtagagatggggtttcaccatgttggccaggatctcttgacctcgtgatctgcccgcctcggcctcccaaagtgctgtgattacaggcgtgagccaccgtgcctagccaggtcttgttttgaaaacctcactgtgggagattcaggcatcctccctaagccagctggccgctgtgctaaagcctgttcagagttaataataatcattagctgaatggtgctggggcctttcagcttcagatctctaagcacttgcaggctgagtcagtcagccctcaccttccccctccttcctgggctgcagagtgtaacagaatgggaaggcactgtgggaaggaagtcaggaatcttgctgctagccacgccttgcagtgacttctcgtctgggagtgggcactgagtcctctcagtaaactaataagacttgcacctgacaaaggtcaagatatgtagggaacacagtgtatgctaggctgagacctatggtggtggcaggggtggctgttgagcctgaacttccagtactcctgcccttccttctgtttacctggcttggcctacagggggcacccctggtcttgatgcctcaagcccagcatttctgggtcccctctgcaagctcagagagcagggaggcttctggtagtgctcttgatgctcctgtgtctggttggcacaaagatcctgtgtaacatgaaatgaaaggtgcatcagcttgggggctgggaaacctgcagtatgggtttactccgtccctatcactggtgtggctgtgggcaaaccacttattgcctgacctacctcacagggatgttgtgagggtttgatgagagaatgaatgttaataggaattggaaaattcaaagcattaaacacatgtaaacaggtggtattatt

SEQ ID NO: 2550 - protein, 172 aa, Homo sapiens
MQPLEFCLCMAEAILLFSPEHSLFFFCSRKARIRLHWAGQTLAILCAALGLGFIISSRTRSELPHLVSWHSWVGALTLLATAVQALCGLCLLCPRAARVSRVARLKLYHLTCGLVVYLMATVTVLLGMYSVWFQAQIKGAAWYLCLALPVYPALVIMHQISRSYLPRKKMEM

SEQ ID NO: 2551 - DNA, 5009 bp, Homo sapiens
gatcgcaaacccggaagacgtgttcgggcagctggagtgtacgggcccgcgggccacggccatgcagcccctggaggtaggtctggttcccgctccagctggggagccgagactgacccgctggctgcggagaggcagtgggatcttggcgcacctggtagctttgggcttcaccatctttctgacagcgctgtcccggccaggaaccagtcttttctcctggcaccctgtattcatggccttggcggatgtatgagagcacctcctttttctcaggcctccaagccagacatgaggcttactggctctctcctatgttcacagttctgcctctgcatggctgaagccatcctactcttctcacctgaacactccctgttcttcttctgctcccgaaaagcacggatccggctccactgggcagggcagaccctagccatcctctgtgcagctctgggcctgggcttcatcatctccagcaggacccgcagtgagctgcctcatctggtgtcctggcacagctgggtgggagccctgacactgctggccactgctgtccaggcactgtgtgggctctgcctcctttgtccccgggcagccagggtctcaagggtggctcgcctcaagctctaccatctgacatgtggactggtggtctacctgatggctacagtaacggtgcttctgggcatgtactcagtatggttccaggcccagatcaaaggtgcggcctggtacctgtgcctggcactgcccgtctatccagccctggtgatcatgcaccagatttccagatcctacttgccgaggaagaaaatggaaatgtgagttcctgcgaacgctgaatctaggtgggacgcttgccttgaacatcatggttcctttggtgatctataagggatctatttaagaagtggtcaggttttcgcacttcttggctggtccagggactgcagaaaccaaagctgctattgttgaggaataattcagtgggtcaaaatggggagatgtactgggtatgagtggaaggtgatggagagcctgatcctgaagcctctacttgatgagagacagagttttgggtggtgatagtgatgtgctggtggtcatttcttgcttgtgtgcctgatgaaaaactgggttcctgtaagttatgaatggcatccagggatatttgggttacttttaagaaagcagtgtgatgtagtggagagagcccatgggtcttatttatgggatatggtcctcttaggctctgttgtacaaccttaggtacattccatatcttaagaccactgtttcttcatctgtgaaatgtttctaaacaatctctaagtcccttccttctctaatatacagcgtctgtcaggtcgatgtctcagaacactctcccagctgtggaccacgtggaccacttagcagactcagggggtagttctttactctccctttactaccctggagggacagctctgcccttgaggcccttcagaaatttgtgctgatttggtccctgtgccagggcacagggggtcaggcactgtggaaagaagggactcaggtgagggtcttctggactctaagacggtaaaggcactaaagtcactttaaagcttttggagaagcaggagggcattggcttaaccaagccgaaggctgctggctgggctgcctagcccagctaagatcttccttcagcccacctcaggatccgggcttgagggctgcagggcctgcgtgcgctccctcccccgaaatcacttctcagggcaaaggagccccaggcatctcatgctttgcccttcttagggctcaggttcttgccttagcacatagcttctgggagcttttttgaagcatttcataagggccaaggaagtggggcagggcttttctgatccaaagaaaacaaagtttctctggttacccctcttcccttgttatctaagctttcctcagttgtcatctcttcccagctctttggtccaagagggggctgagtttggtgccagctggcaaatgagggctggactctcttccctccagagaccaccccgctccttgctgcagctgaaagtagttccccaggctgccctcggtggtgaggactggatgctagactgctgagctgtggtctgggctcagttgagaagataggatctccctagatcatggcaaggcctgacaacagctgagccaggaaagtgctgctgaggcaagtcgacatagctcacagggaactctgggaagcctgggatgtaggcgctggagctccagttcccaggagcaggggcaggtgttcctagatgttagtgttgtggatgtccttggtcttctgaagattcaggtcctcctctccgggtagcttagaagtaaggaggttggtttgattcaatagtatggggacagaatggggacagcaagggcagaagtgtcctctccacgtaactcattatgcccctcctgggggagattgcatctccaggacaagcatctaaaggaggcccctgctgtgcagaggggtattgttcctgtctctttcattgtcctccctcctctcaaactctccagtgtggtgtgaactcagaagaaacggttactggggctgcatggagaatttcacctgcggtgattttgatccagggactgcatctcctctttcctcatcacagccagtgctgagaggctccttctacctgccgcagggtaggagggccaggcaaagttcaccagcttgctctaagagcaagcaggcaatgccgtaaagcctgagcctgcctgaggtgctgcctcctcccaggtggtgcgggggctggtgggcgggcgggcaggcgtgctgacagccggcagtttgcgtgggctgtgccatctgatgtctattcccagccctgggaggaagggggagtcatttatattctgcaggaggaaggggccccagctgtcgcctttctgaccagcaggcctggagggcaggggcacagagcagagaggagggcactggtggtctcctgcttagcctggtctgactgcagtgtagggaataggtcaccaggaggagcccttcatcctggcaggccggattgtggagggacttccctccccctcttttccatttctccctccatcaccacctgccctcacatcctggggcagcagctggacagccattagacctcagtgccagggcactcttcctccagctgggatctcagtggctcccagctgcatgggctcctgcttgtgtgttccctcctccgccatcctctgttccccgcacctcccttattctgctcatgtctggggtattcacttggctcctcagcaaggaagcaaacgccttggaggagaagcacatggttgcccttttgtccttgctccctggctagggaaagctgctagtggtcagcctgttttgcctttttttaaaaaaaaaaaaaaagccagggcagggtgcttagattttaaaaatttgcgtgtcatttgcacaaattttcatatcaagctaagtcctgattccaaatttgattatattccaaatttgattatattccaaatttgattatattcagattcaaccttgaggacattagaaatatagatggcttctgtatccaaatctgaatggaaatgagattacccttctgggttcagatacccctcccaagcccccgtcttttctgtaaccacccctcctctgagccccatcatggctggggttggtatggaatgggagcagctctgtatctggggaagtcctccagcctcaccttcttggctcttaagtggtaggctgttaccacttgccagcctgggcctcctctctccccaccctttcacaaggcaggctgcccttccgcactcactggcccatcccttctttctcatcgtcccacccttccacccccgtgcatggctgctgtaggtctggtttttttggtttttgttttttttaagacggagtctcactctgccgccaggctggagtgcagtggcagaatcttggctcactgcaacctctgcctcccaggttcaagcgattctcctgcctcagcctcccgagtagctgggactacaggcacgtgccaccatatccagctaatttttgtatttttagtagagatggggtttcaccatgttggccaggatctcttgacctcgtgatctgcccgcctcggcctcccaaagtgctgtgattacaggcgtgagccaccgtgcctagccaggtcttgttttgaaaacctcactgtgggagattcaggcatcctccctaagccagctggccgctgtgctaaagcctgttcagagttaataataatcattagctgaatggtgctggggcctttcagcttcagatctctaagcacttgcaggctgagtcagtcagccctcaccttccccctccttcctgggctgcagagtgtaacagaatgggaaggcactgtgggaaggaagtcaggaatcttgctgctagccacgccttgcagtgacttctcgtctgggagtgggcactgagtcctctcagtaaactaataagacttgcacctgacaaaggtcaagatatgtagggaacacagtgtatgctaggctgagacctatggtggtggcaggggtggctgttgagcctgaacttccagtactcctgcccttccttctgtttacctggcttggcctacagggggcacccctggtcttgatgcctcaagcccagcatttctgggtcccctctgcaagctcagagagcagggaggcttctggtagtgctcttgatgctcctgtgtctggttggcacaaagatcctgtgtaacatgaaatgaaaggtgcatcagcttgggggctgggaaacctgcagtatgggtttactccgtccctatcactggtgtggctgtgggcaaaccacttattgcctgacctacctcacagggatgttgtgagggtttgatgagagaatgaatgttaataggaattggaaaattcaaagcattaaacacatgtaaacaggtggtattatt

SEQ ID NO: 2552 - protein, 64 aa, Homo sapiens
MQPLEVGLVPAPAGEPRLTRWLRRGSGILAHLVALGFTIFLTALSRPGTSLFSWHPVFMALADV

SEQ ID NO: 2553 - DNA, 4929 bp, Homo sapiens
cgcaaacccggaagacgtgttcgggcagctggagtgtacgggcccgcgggccacggccatgcagcccctggaggtaggtctggttcccgctccagctggggagccgagactgacccgctggctgcggagaggcagtgggatcttggcgcacctggtagctttgggcttcaccatctttctgacagcgctgtcccggccaggaaccagtcttttctcctggcaccctgtattcatggccttggcgttctgcctctgcatggctgaagccatcctactcttctcacctgaacactccctgttcttcttctgctcccgaaaagcacggatccggctccactgggcagggcagaccctagccatcctctgtgcagctctgggcctgggcttcatcatctccagcaggacccgcagtgagctgcctcatctggtgtcctggcacagctgggtgggagccctgacactgctggccactgctgtccaggcactgtgtgggctctgcctcctttgtccccgggcagccagggtctcaagggtggctcgcctcaagctctaccatctgacatgtggactggtggtctacctgatggctacagtaacggtgcttctgggcatgtactcagtatggttccaggcccagatcaaaggtgcggcctggtacctgtgcctggcactgcccgtctatccagccctggtgatcatgcaccagatttccagatcctacttgccgaggaagaaaatggaaatgtgagttcctgcgaacgctgaatctaggtgggacgcttgccttgaacatcatggttcctttggtgatctataagggatctatttaagaagtggtcaggttttcgcacttcttggctggtccagggactgcagaaaccaaagctgctattgttgaggaataattcagtgggtcaaaatggggagatgtactgggtatgagtggaaggtgatggagagcctgatcctgaagcctctacttgatgagagacagagttttgggtggtgatagtgatgtgctggtggtcatttcttgcttgtgtgcctgatgaaaaactgggttcctgtaagttatgaatggcatccagggatatttgggttacttttaagaaagcagtgtgatgtagtggagagagcccatgggtcttatttatgggatatggtcctcttaggctctgttgtacaaccttaggtacattccatatcttaagaccactgtttcttcatctgtgaaatgtttctaaacaatctctaagtcccttccttctctaatatacagcgtctgtcaggtcgatgtctcagaacactctcccagctgtggaccacgtggaccacttagcagactcagggggtagttctttactctccctttactaccctggagggacagctctgcccttgaggcccttcagaaatttgtgctgatttggtccctgtgccagggcacagggggtcaggcactgtggaaagaagggactcaggtgagggtcttctggactctaagacggtaaaggcactaaagtcactttaaagcttttggagaagcaggagggcattggcttaaccaagccgaaggctgctggctgggctgcctagcccagctaagatcttccttcagcccacctcaggatccgggcttgagggctgcagggcctgcgtgcgctccctcccccgaaatcacttctcagggcaaaggagccccaggcatctcatgctttgcccttcttagggctcaggttcttgccttagcacatagcttctgggagcttttttgaagcatttcataagggccaaggaagtggggcagggcttttctgatccaaagaaaacaaagtttctctggttacccctcttcccttgttatctaagctttcctcagttgtcatctcttcccagctctttggtccaagagggggctgagtttggtgccagctggcaaatgagggctggactctcttccctccagagaccaccccgctccttgctgcagctgaaagtagttccccaggctgccctcggtggtgaggactggatgctagactgctgagctgtggtctgggctcagttgagaagataggatctccctagatcatggcaaggcctgacaacagctgagccaggaaagtgctgctgaggcaagtcgacatagctcacagggaactctgggaagcctgggatgtaggcgctggagctccagttcccaggagcaggggcaggtgttcctagatgttagtgttgtggatgtccttggtcttctgaagattcaggtcctcctctccgggtagcttagaagtaaggaggttggtttgattcaatagtatggggacagaatggggacagcaagggcagaagtgtcctctccacgtaactcattatgcccctcctgggggagattgcatctccaggacaagcatctaaaggaggcccctgctgtgcagaggggtattgttcctgtctctttcattgtcctccctcctctcaaactctccagtgtggtgtgaactcagaagaaacggttactggggctgcatggagaatttcacctgcggtgattttgatccagggactgcatctcctctttcctcatcacagccagtgctgagaggctccttctacctgccgcagggtaggagggccaggcaaagttcaccagcttgctctaagagcaagcaggcaatgccgtaaagcctgagcctgcctgaggtgctgcctcctcccaggtggtgcgggggctggtgggcgggcgggcaggcgtgctgacagccggcagtttgcgtgggctgtgccatctgatgtctattcccagccctgggaggaagggggagtcatttatattctgcaggaggaaggggccccagctgtcgcctttctgaccagcaggcctggagggcaggggcacagagcagagaggagggcactggtggtctcctgcttagcctggtctgactgcagtgtagggaataggtcaccaggaggagcccttcatcctggcaggccggattgtggagggacttccctccccctcttttccatttctccctccatcaccacctgccctcacatcctggggcagcagctggacagccattagacctcagtgccagggcactcttcctccagctgggatctcagtggctcccagctgcatgggctcctgcttgtgtgttccctcctccgccatcctctgttccccgcacctcccttattctgctcatgtctggggtattcacttggctcctcagcaaggaagcaaacgccttggaggagaagcacatggttgcccttttgtccttgctccctggctagggaaagctgctagtggtcagcctgttttgcctttttttaaaaaaaaaaaaaaagccagggcagggtgcttagattttaaaaatttgcgtgtcatttgcacaaattttcatatcaagctaagtcctgattccaaatttgattatattccaaatttgattatattccaaatttgattatattcagattcaaccttgaggacattagaaatatagatggcttctgtatccaaatctgaatggaaatgagattacccttctgggttcagatacccctcccaagcccccgtcttttctgtaaccacccctcctctgagccccatcatggctggggttggtatggaatgggagcagctctgtatctggggaagtcctccagcctcaccttcttggctcttaagtggtaggctgttaccacttgccagcctgggcctcctctctccccaccctttcacaaggcaggctgcccttccgcactcactggcccatcccttctttctcatcgtcccacccttccacccccgtgcatggctgctgtaggtctggtttttttggtttttgttttttttaagacggagtctcactctgccgccaggctggagtgcagtggcagaatcttggctcactgcaacctctgcctcccaggttcaagcgattctcctgcctcagcctcccgagtagctgggactacaggcacgtgccaccatatccagctaatttttgtatttttagtagagatggggtttcaccatgttggccaggatctcttgacctcgtgatctgcccgcctcggcctcccaaagtgctgtgattacaggcgtgagccaccgtgcctagccaggtcttgttttgaaaacctcactgtgggagattcaggcatcctccctaagccagctggccgctgtgctaaagcctgttcagagttaataataatcattagctgaatggtgctggggcctttcagcttcagatctctaagcacttgcaggctgagtcagtcagccctcaccttccccctccttcctgggctgcagagtgtaacagaatgggaaggcactgtgggaaggaagtcaggaatcttgctgctagccacgccttgcagtgacttctcgtctgggagtgggcactgagtcctctcagtaaactaataagacttgcacctgacaaaggtcaagatatgtagggaacacagtgtatgctaggctgagacctatggtggtggcaggggtggctgttgagcctgaacttccagtactcctgcccttccttctgtttacctggcttggcctacagggggcacccctggtcttgatgcctcaagcccagcatttctgggtcccctctgcaagctcagagagcagggaggcttctggtagtgctcttgatgctcctgtgtctggttggcacaaagatcctgtgtaacatgaaatgaaaggtgcatcagcttgggggctgggaaacctgcagtatgggtttactccgtccctatcactggtgtggctgtgggcaaaccacttattgcctgacctacctcacagggatgttgtgagggtttgatgagagaatgaatgttaataggaattggaaaattcaaagcattaaacacatgtaaacaggtggtattatt

SEQ ID NO: 2554 - protein, 229 aa, Homo sapiens; identical to SEQ ID NO: 115

SEQ ID NO: 2555 - DNA, 723 bp, Homo sapiens
gcaaacccggaagacgtgttcgggcagctggagtgtacgggcccgcgggccacggccatgcagcccctggaggtaggtctggttcccgctccagctggggagccgagactgacccgctggctgcggagaggcagtgggatcttggcgcacctggtagctttgggcttcaccatctttctgacagcgctgtcccggccaggaaccaaaacaggtcccctgatggaggatagaagtgaaggaggccgggcgcggtgggtcatgcctgaaatcccagcactttgggaggccgacgcgggtggatcacttgaggtcttttctcctggcaccctgtattcatggccttggcgttctgcctctgcatggctgaagccatcctactcttctcacctgaacactccctgttcttcttctgctcccgaaaagcacggatccggctccactgggcagggcagaccctagccatcctctgtgcagctctgggcctgggcttcatcatctccagcaggacccgcagtgagctgcctcatctggtgtcctggcacagctgggtgggagccctgacactgctggccactgctgtccaggcactgtgtgggctctgcctcctttgtccccgggcagccagggtctcaagggtggctcgcctcaagctctaccatctgacatgtggactggtggtctacctgatggctacagtaacggtgcttctgggcatgtactcag

SEQ ID NO: 2556 - protein, 133 aa, Homo sapiens
MQPLEVGLVPAPAGEPRLTRWLRRGSGILAHLVALGFTIFLTALSRPGTKTGPLMEDRSEGGRARWVMPEIPALWEADAGGSLEVFSPGTLYSWPWRSASAWLKPSYSSHLNTPCSSSAPEKHGSGSTGQGRP

SEQ ID NO: 2557 - DNA, 577 bp, Homo sapiens
gtgtacgggcccgcgggccacggccatgcagcccctggaggtaggtctggttcccgctccagctggggagccgagactgacccgctggctgcggagaggcagtgggatcttggcgcacctggtagctttgggcttcaccatctttctgacagcgctgtcccggccaggaaccaaaacaggtcccctgatggaggatagaagtgaaggaggccgggcgcggtgggtcatgcctgaaatcccagcactttgggaggccgacgcgggtggatcacttgaggtcttttctcctggcaccctgtattcatggccttggcggatgtatgagagcacctcctttttctcaggcctccaagccagacatgaggcttactggctctctcctatgttcacagttctgcctctgcatggctgaagccatcctactcttctcacctgaacactccctgttcttcttctgctcccgaaaagcacggatccggctccactgggcagggcagaccctagccatcctctgtgcagctctgggcctgggcttcatcatctccagcaggacccgcagtgagctgcctcatctggt

SEQ ID NO: 2558 - protein, 128 aa, Homo sapiens
MQPLEVGLVPAPAGEPRLTRWLRRGSGILAHLVALGFTIFLTALSRPGTKTGPLMEDRSEGGRARWVMPEIPALWEADAGGSLEVFSPGTLYSWPWRMYESTSFFSGLQARHEAYWLSPMFTVLPLHG

SEQ ID NO: 2559 - DNA, 2013 bp, Homo sapiens
caaggcctgacaacagctgagccaggaaagtgctgctgaggcaagtcgacatagctcacagggaactctgggaagcctgggatgtaggcgctggagctccagttcccaggagcaggggcaggtgttcctagatgttagtgttgtggatgtccttggtcttctgaagattcaggtcctcctctccgggtagcttagaagtaaggaggttggtttgattcaatagtatggggacagaatggggacagcaagggcagaagtgtcctctccacgtaactcattatgcccctcctgggggagattgcatctccaggacaagcatctaaaggaggcccctgctgtgcagaggggtattgttcctgtctctttcattgtcctccctcctctcaaactctccagtgtggtgtgaactcagaagaaacggttactggggctgcatggagaatttcacctgcggtgattttgatccagggactgcatctcctctttcctcatcacagccagtgctgagaggctccttctacctgccgcagggtaggagggccaggcaaagttcaccagcttgctctaagagcaagcaggcaatgccgtaaagcctgagcctgcctgaggtgctgcctcctcccaggtggtgcgggggctggtgggcgggcgggcaggcgtgctgacagccggcagtttgcgtgggctgtgccatctgatgtctattcccagccctgggaggaagggggagtcatttatattctgcaggaggaaggggccccagctcctcaccttcttggctcttaagtggtaggctgttaccacttgccagcctgggcctcctctctccccaccctttcacaaggcaggctgcccttccgcactcactggcccatcccttctttctcatcgtcccacccttccacccccgtgcatggctgctgtaggtctggtttttttggtttttgttttttttaagacggagtctcactctgccgccaggctggagtgcagtggcagaatcttggctcactgcaacctctgcctcccaggttcaagcgattctcctgcctcagcctcccgagtagctgggactacaggcacgtgccaccatatccagctaatttttgtatttttagtagagatggggtttcaccatgttggccaggatctcttgacctcgtgatctgcccgcctcggcctcccaaagtgctgtgattacaggcgtgagccaccgtgcctagccaggtcttgttttgaaaacctcactgtgggagattcaggcatcctccctaagccagctggccgctgtgctaaagcctgttcagagttaataataatcattagctgaatggtgctggggcctttcagcttcagatctctaagcacttgcaggctgagtcagtcagccctcaccttccccctccttcctgggctgcagagtgtaacagaatgggaaggcactgtgggaaggaagtcaggaatcttgctgctagccacgccttgcagtgacttctcgtctgggagtgggcactgagtcctctcagtaaactaataagacttgcacctgacaaaggtcaagatatgtagggaacacagtgtatgctaggctgagacctatggtggtggcaggggtggctgttgagcctgaacttccagtactcctgcccttccttctgtttacctggcttggcctacagggggcacccctggtcttgatgcctcaagcccagcatttctgggtcccctctgcaagctcagagagcagggaggcttctggtagtgctcttgatgctcctgtgtctggttggcacaaagatcctgtgtaacatgaaatgaaaggtgcatcagcttgggggctgggaaacctgcagtatgggtttactccgtccctatcactggtgtggctgtgggcaaaccacttattgcctgacctacctcacagggatgttgtgagggtttgatgagagaatgaatgttaataggaattggaaaattcaaagcattaaacacatgtaaacaggtggtattatt

SEQ ID NO: 2560 - protein, 31 aa, Homo sapiens
MSIPSPGRKGESFIFCRRKGPQLLTFLALKW

SEQ ID NO: 2561 - DNA, 5115 bp, Homo sapiens
gctccctccgctgggatcgctgcgcctccggctccccgcaccgatccgcgccaggcctgcggacctggaggcagcgaccgcggtcggtgggctccggcgggctcagcggtcgaggcggtggcagggtgagcggagcggggccccgcaagtccccgggaggcgacggtgccgggcgcgggcccctgcgtaaggtgggcgcagtgacaggccggccggtgaggcgccgccgggagaggccgcgacggagctcccagaccggccatgggctgagacacgtcctcgccgagcagtgacccttccgtaccccaccagaacatgcccgggtgacctcctcccagatcttccttgtggccttcctcgcccactccagtgacactatgcacccccaccgtgacccgagaggcctctggctcctgctgccgtccttgtccctgctgctttttgaggtggccagagctggccgagccgtggttagctgtcctgccgcctgcttgtgcgccagcaacatcctcagctgctccaagcagcagctgcccaatgtgccccattccttgcccagttacacagcactactggacctcagtcacaacaacctgagccgcctgcgggccgagtggacccccacgcgcctgacccaactgcactccctgctgctgagccacaaccacctgaacttcatctcctctgaggccttttccccggtacccaacctgcgctacctggacctctcctccaaccagctgcgtacactggatgagttcctgttcagtgacctgcaagtactggaggtgctgctgctctacaataaccacatcatggcggtggaccggtgcgccttcgatgacatggcccagctgcagaaactctacttgagccagaaccagatctctcgcttccctctggaactggtcaaggaaggagccaagctacccaaactaacgctcctggatctctcttctaacaagctgaagaacttgccattgcctgacctgcagaagctgccggcctggatcaagaatgggctgtacctacataacaaccccctgaactgcgactgtgagctctaccagctgttttcacactggcagtatcggcagctgagctccgtgatggactttcaagaggatctgtactgcatgaactccaagaagctgcacaatgtcttcaacctgagtttcctcaactgtggcgagtacaaggagcgtgcctgggaggcccacctgggtgacaccttgatcatcaagtgtgacaccaagcagcaagggatgaccaaggtgtgggtgacaccaagtaatgaacgggtgctagatgaggtgaccaatggcacagtgagtgtgtctaaggatggcagtcttcttttccagcaggtgcaggtcgaggacggtggtgtgtatacctgctatgccatgggagagactttcaatgagacactgtctgtggaattgaaagtgcacaatttcaccttgcacggacaccatgacaccctcaacacagcctataccaccctagtgggctgtatccttagtgtggtcctggtcctcatatacctatacctcaccccttgccgctgctggtgccggggtgtagagaagccttccagccatcaaggagacagcctcagctcttccatgcttagtaccacacccaaccatgatcctatggctggtggggacaaagatgatggttttgaccggcgggtggctttcctggaacctgctggacctgggcagggtcaaaacggcaagctcaagccaggcaacaccctgccagtgcctgaggccacaggcaagggccaacggaggatgtcggatccagaatcagtcagctcggtcttctctgatacgcccattgtggtgtgagcaggatgggttggtggggagattctgccccaggagaggtaatgcacccctgaaggatatgaggggatggaagagagggctggctgcccaagggaatggattcctcctgacctcaagggaattggtcccaggtacaacagagagcaagaccccaaacagggcgtggctgccacgattttcaaatgggggtatattaatcctcaggcaaatgctacacccgtacccaaagccctgccaattctcagtgtggtagaggaagagaagcatgtctgagttggatgggaatgaggaaggagtgaggggaagaacagattccctaaactttcatgaggtcatccctagctccttaagagaaaaacatttagaaaaaaaaattttttctatctctgcccacccacacctgtgatgttgtgtgtgttgggggagcttccacaggagccacactggggaaaagctgtagtatcttctttgtttagcaagtcaaacttcacagctggggaagttgaaaacctttggaaaatgagtcaggaaaaggctgagacctcaatcggtaacaattccccaaagctgttgtaagactttgcattaaagccttcctttttcctgatgtgccctgggtggatggatctttgcaggagcctggcctgctgccttttagttacaacagcaatgtgggatgtggtatctgtgccttgtcctgggaccaatggcacagagggttatagcatgaactgaagggtccatgtcacagcataggtgccagcacgaaacttgtagatggggggtgaattccagataggctaattccctggttggtgaaacccttggttagtatttgattcccagcatctgtgtgtcaggccagagtgggggctgctgaaggcagagcttttatggatgcctgccacagacgtggtacatgggcccacttcacgatagaaggatgaaggtaaatcagcctctattatgtagcatccagctggacctagctgattctcaatgtatgccatctcttcatccagtctccttatcaagctcaggtgggattctgaattttccctaatatgctgctctgtaaagggaggagtccaagaaagcctggccccagctggcttagagtaggcttggcgatagtgaaaatccagtatatatctcctctgtgtggacaaggttgccttgctcctctcagagataccacctctgctgcaaagtcaaagcatggggttttgacatcagaagggttggaattgggtggtctctaccccagaatggcaatttggagtgcagcttcaagttctgccctctccacagattccaggcaatcctgaagcagagataatcagtagtactaaactttcagaaggggagttctgccaccccattcctccatcgagaggtctttgcagttgtggttgtgaggccagaggaacttaagaagaatgagctcaacattccattccatccaaggttgcagaatactttgagtatggagatgaccgatccctttaacctttccctttgactacactgcatgccctgtgagtggctgctctgagctttggcgggggatgagcagggtgaaggtgaaaatgttctctgatgttggtttttcttagggtctcttctctcccacgtttctagtccattggaagttctccagatcctctagatttctgacctctttttacattctaagaggtgtcatttacctgtgggtgaggggcttggagggcctgactattaagcttcctattatgattggggaaggggactcaacatcttccccttgtctggtcctgggaactcaagactgctgtccatcctttattagtaacctagttttgttgagagagaggtgcagcatttccctcaagtacctgcatgctcataggtatgcatgcttataggtatgcatgcacaccagcaccttgacttccaccaggacagtgaatctgtagtccccattaatgatactctcagaatggtctccaccaatgtgcacaacttcatgcacacaattgtattcctctttaggagagacagtgaccatgccaggctcttcaaatacacactcctgtattttcatttctgaactccctgaagcttcacccacatctccatggcactgaatcacttttctgcccaggctggagttagaagaaccatgggttgaaggccttgggagaagaggtggtaaggagctacctggttctttggactcctcagaaacctcccgtgaagactatatatatgagcaatatatgagcaattaagatagaactaggtcattgaaggactcagaaggaaactggcaaggggctaagtagctgtgagctgctcttcctgttaactgtcctcaggagagaaaagttgtcttgatttattccagagactcctgagaattttgttactggagctataggaactaggactccctcctcagactcatcaggaaatctgggaaaatctcatctccatgctgcagtctccccgcttggcaccatctagggctctgaagatctttaaagtgagcgttaaatgaagcaggccttctggggcatcgtgatggagctcctgaggactgggagggccgttttcttcataattcctacccagtttagggaatgagaaaaggccctgtggctcttaagtctcctgactatatccactagtttggccttgagtttgagacacctggtagatgtacctggctgccctaccaagagatttgatttgtttcttcccgtggtttcaggtgatagaacccaaaggtagctttttaattggagaattgaataatcagcatatgtaagcgcactagaaccctgtgttgaaaactgccaggtgtgggtataagaaaaggccgagagatcaccacctcctcttaccctaccccacacccataaaccagacatgtctcccaggaagcaggtgtccctggagacagaggatgacagggctctacaatctgtgtaattattattattattattattttgtatttatggggcccaagaaaggggccaggagagggtacaccccagctggggagagcaaagcagatggatccagttttctgtgtgttcttacctctgtacttcctcgtagctctgctgacaaagcaagcaggcctcccgtgtccaagaccccattcctcccacttgtgtacacctaggctggcaaatcttggagcctctgggctctgaaaactagacaatgatcattaaacctggcttgagtctctgttctggcacaa

SEQ ID NO: 2562 - protein, 493 aa, Homo sapiens; identical to SEQ ID NO: 117

SEQ ID NO: 2563 - DNA, 2465 bp, Homo sapiens
gctccctccgctgggatcgctgcgcctccggctccccgcaccgatccgcgccaggcctgcggacctggaggcagcgaccgcggtcggtgggctccggcgggctcagcggtcgaggcggtggcagggtgagcggagcggggccccgcaagtccccgggaggcgacggtgccgggcgcgggcccctgcgtaaggtgggcgcagtgacaggccggccggtgaggcgccgccgggagaggccgcgacggagctcccagaccggccatgggctgagacacgtcctcgccgagcagtgacccttccgtaccccaccagaacatgcccgggtgacctcctcccagatcttccttgtggccttcctcgcccactccagtgacactatgcacccccaccgtgacccgagaggcctctggctcctgctgccgtccttgtccctgctgctttttgaggtggccagagctggccgagccgtggttagctgtcctgccgcctgcttgtgcgccagcaacatcctcagctgctccaagcagcagctgcccaatgtgccccattccttgcccagttacacagcactactggacctcagtcacaacaacctgagccgcctgcgggccgagtggacccccacgcgcctgacccaactgcactccctgctgctgagccacaaccacctgaacttcatctcctctgaggccttttccccggtacccaacctgcgctacctggacctctcctccaaccagctgcgtacactggatgagttcctgttcagtgacctgcaagtactggaggtgctgctgctctacaataaccacatcatggcggtggaccggtgcgccttcgatgacatggcccagctgcagaaactctacttgagccagaaccagatctctcgcttccctctggaactggtcaaggaaggagccaagctacccaaactaacgctcctggatctctcttctaacaagctgaagaacttgccattgcctgacctgcagaagctgccggcctggatcaagaatgggctgtacctacataacaaccccctgaactgcgactgtgagctctaccagctgttttcacactggcagtatcggcagctgagctccgtgatggactttcaagaggatctgtactgcatgaactccaagaagctgcacaatgtcttcaacctgagtttcctcaactgtggcgagtacaaggagcgtgcctgggaggcccacctgggtgacaccttgatcatcaagtgtgacaccaagcagcaagggatgaccaaggtgtgggtgacaccaagtaatgaacgggtgctagatgaggtgaccaatggcacagtgagtgtgtctaaggatggcagtcttcttttccagcaggtgcaggtcgaggacggtggtgtgtatacctgctatgccatgggagagactttcaatgagacactgtctgtggaattgaaagtgcacaatttcaccttgcacggacaccatgacaccctcaacacagcctataccaccctagtgggctgtatccttagtgtggtcctggtcctcatatacctatacctcaccccttgccgctgctggtgccggggtgtagagaagccttccagccatcaaggagacagcctcagctcttccatgcttagtaccacacccaaccatgatcctatggctggtggggacaaagatgatggttttgaccggcgggtggctttcctggaacctgctggacctgggcagggtcaaaacggcaagctcaagccaggcaacaccctgccagtgcctgaggccacaggcaagggccaacggaggatgtcggatccagaatcagtcagctcggtcttctctgatacgcccattgtggtgtgagcaggatgggttggtggggagattctgccccaggagaggtaatgcacccctgaaggatatgaggggatggaagagagggctggctgcccaagggaatggattcctcctgacctcaagggaattggtcccaggtacaacagagagcaagaccccaaacagggcgtggctgccacgattttcaaatgggggtatattaatcctcaggcaaatgctacacccgtacccaaagccctgccaattctcagtgtggtagaggaagagaagcatgtctgagttggatgggaatgaggaaggagtgaggggaagaacagattccctaaactttcatgaggtcatccctagctccttaagagaaaaacatttagaaaaaaaaattttttctatctctgcccacccacacctgtgatgttgtgtgtgttgggggagcttccacaggagccacactggggaaaagctgtagtatcttctttgtttagcaagtcaaacttcacagctggggaagttgaaaacctttggaaaatgagtcaggaaaaggctgagacctcaatcggtaacaattccccaaagctgttgtaagactttgcattaaagccttcctttttcctg

SEQ ID NO: 2564 - protein, 493 aa, Homo sapiens; identical to SEQ ID NO: 117

SEQ ID NO: 2565 - DNA, 370 bp, Homo sapiens
gctgcccccacgccgctccctccgctgggatcgctgcgcctccggctccccgcaccgatccgcgccaggcctgcggaccggacgcgtcctacccagcccggtgccctgttgaccttccctcagctcctcccaaaaggcacaccgaccccacctccaaaccctgcccgtgccatccctgtgactcccagcagtccctgccatcctgtgcatacctgcagcctgcacccctgtgaccccagcccagtaggccctcgggccacctcctcttcggccgatatttacagcccactgcctgcacagtgcctggaaactacccagcatctctctctcctagcccaaagggggtggaggtaagggtgggaggggaagt

SEQ ID NO: 2566 - protein, 117 aa, Homo sapiens
AAPTPLPPLGSLRLRLPAPIRARPADRTRPTQPGALLTFPQLLPKGTPTPPPNPARAIPVTPSSPCHPVHTCSLHPCDPSPVGPRATSSSADIYSPLPAQCLETTQHLSLLAQRGWR

SEQ ID NO: 2567 - DNA, 580 bp, Homo sapiens
attaaccccaggagctggggtttggccggagacgctgagagacggcaggaatgggagcctgtgggcctgccgcatggctcagcactgtcagggaatagctcctctgccctgctccctgggggcacaagggtccagttggcacagagatgtgtgtaccaaggtgtttaccgaagcattgcttacagcaaggggaaatgaaaagcgtttccagtttccactcagcagcaaatgagagtgttgcctgcagcccttccagtagaagagtaattctcaaaccggaaagtgtaaaggcaaattccagaagaacgtggagcgcagccatgaggaggtggtggaagcatctggccacattcgagttctggttttagaggaatctcctcggaactcggggatgtgattgcagaactactgtccgtgatttctgagaaatttgggaaaggagccaacagccagggaagtgtgaaatgtttgtcagttttcaaaacggaggaatgtctaaatggggtaaatttaacgacctctgacttccaaacaacattaattcatggtacaagtgtgaactagatttgtaatggagtgc

SEQ ID NO: 2568 - protein, 73 aa, Homo sapiens
MCVPRCLPKHCLQQGEMKSVSSFHSAANESVACSPSSRRVILKPESVKANSRRTWSAAMRRWWKHLATFEFWF

SEQ ID NO: 2569 - DNA, 450 bp, Homo sapiens
gggcctcaatggattctgacccatggatttgttcctgagggaagaatgcatgttgcattttgccaagttgctctcagctttttcctgcctgtatgccatctttctgcaaactaccagcgctggccgcctcgcacagcgataatcagcctgtcagtcaataaactgaagatgttggtggtgtgctggggttggtggccagcagtgagagccctgagagttataaattcaagatgagaattgagatgttgccaaggcttcacagagtccctgatttactaggaaattgttccctagccttgactgctggccctgttatgcaagggactttgtgtgggctggggggatggttgaaggaaagacaaaaaataaaagaccagaagccagtgtttaggcacagtggataggacattccctaccccactgcatttggtcacctatggtctgctattt

SEQ ID NO: 2570 - protein, 39 aa, Homo sapiens
MDLFLREECMLHFAKLLSAFSCLYAIFLQTTSAGRLAQR

SEQ ID NO: 2571 - DNA, 1842 bp, Homo sapiens
tgctgaaggcttggaagtgcagcgcagaagacagagggtgactaggaagacgcgcgagcggggctggccggccggcgggtgggggaggggaggcgggggaaggcggctgagtgggcctctggagtgtgtgtgtctgtgtcagtgtgtgtgtgtgtgtgtgtatgtgtgtgtctggcgcctggccagggtgatttcccataaaccacatgccccccagtcctctcttaaaaggctgtgccgagggctggccagtgaggctcggcccggggaaagtgaaagtttgcctgggtcctctcggcgccagagccgctctccgcatcccaggacagcggtgcggccctcggccggggcgcccactccgcagcagccagcgagcgagcgagcgagcgagggcggccgacgcgcccggccgggacccagctgcccgtatgaccgcgccgggcgccgccgggcgctgccctcccacgattgacagtcagatggagacctcgtgccaaattacatttgagtttgtagaccaggaacagttgaaagatccagtgtgctaccttaagaaggcatttctcctggtacaagacataatggaggacaccatgcgcttcagagataacacccccaatgccatcgccattgtgcagctgcaggaactctctttgaggctgaagagctgcttcaccaaggattatgaagagcatgacaaggcctgcgtccgaactttctatgagacacctctccagttgctggagaaggtcaagaatgtctttaatgaaacaaagaatctccttgacaaggactggaatattttcagcaagaactgcaacaacagctttgctgaatgctccagccaagatgtggtgaccaagcctgattgcaactgcctgtaccccaaagccatccctagcagtgacccggcctctgtctcccctcatcagcccctcgccccctccatggcccctgtggctggcttgacctgggaggactctgagggaactgagggcagctccctcttgcctggtgagcagcccctgcacacagtggatccaggcagtgccaagcagcggccacccaggagcacctgccagagctttgagccgccagagaccccagttgtcaaggacagcaccatcggtggctcaccacagcctcgcccctctgtcggggccttcaaccccgggatggaggatattcttgactctgcaatgggcactaattgggtcccagaagaagcctctggagaggccagtgagattcccgtaccccaagggacagagctttccccctccaggccaggagggggcagcatgcagacagagcccgccagacccagcaacttcctctcagcatcttctccactccctgcatcagcaaagggccaacagccggcagatgtaactggtaccgccttgcccagggtgggccccgtgaggcccactggccaggactggaatcacaccccccagaagacagaccatccatctgccctgctcagagaccccccggagccaggctctcccaggatctcatcactgcgcccccagggcctcagcaacccctccaccctctctgctcagccacagctttccagaagccactcctcgggcagcgtgctgccccttggggagctggagggcaggaggagcaccagggatcggaggagccccgcagagccagaaggaggaccagcaagtgaaggggcagccaggcccctgccccgttttaactccgttcctttgactgacacaggccatgagaggcagtccgagggatccttcagcccgcagctccaggagtctgtcttccacctgctggtgcccagtgtcatcctggtcttgctggccgtcg

SEQ ID NO: 2572 - protein, 544 aa, Homo sapiens
MPPSPLLKGCAEGWPVRLGPGKVKVCLGPLGARAALRIPGQRCGPRPGRPLRSSQRASERARAADAPGRDPAARMTAPGAAGRCPPTIDSQMETSCQITFEFVDQEQLKDPVCYLKKAFLLVQDIMEDTMRFRDNTPNAIAIVQLQELSLRLKSCFTKDYEEHDKACVRTFYETPLQLLEKVKNVFNETKNLLDKDWNIFSKNCNNSFAECSSQDVVTKPDCNCLYPKAIPSSDPASVSPHQPLAPSMAPVAGLTWEDSEGTEGSSLLPGEQPLHTVDPGSAKQRPPRSTCQSFEPPETPVVKDSTIGGSPQPRPSVGAFNPGMEDILDSAMGTNWVPEEASGEASEIPVPQGTELSPSRPGGGSMQTEPARPSNFLSASSPLPASAKGQQPADVTGTALPRVGPVRPTGQDWNHTPQKTDHPSALLRDPPEPGSPRISSLRPQGLSNPSTLSAQPQLSRSHSSGSVLPLGELEGRRSTRDRRSPAEPEGGPASEGAARPLPRFNSVPLTDTGHERQSEGSFSPQLQESVFHLLVPSVILVLLA

SEQ ID NO: 2573 - DNA, 2598 bp, Homo sapiens
cttggaagtgcagcgcagaagacagaggtcctctcttaaaaggctgtgccgagggctggccagtgaggctcggcccggggaaagtgaaagtttgcctgggtcctctcggcgccagagccgctctccgcatcccaggacagcggtgcggccctcggccggggcgcccactccgcagcagccagcgagcgagcgagcgagcgagggcggccgacgcgcccggccgggacccagctgcccgtatgaccgcgccgggcgccgccgggcgctgccctcccacgacatggctgggctccctgctgttgttggtctgtctcctggcgagcaggagtatcaccgaggaggtgtcggagtactgtagccacatgattgggagtggacacctgcagtctctgcagcggctgattgacagtcagatggagacctcgtgccaaattacatttgagtttgtagaccaggaacagttgaaagatccagtgtgctaccttaagaaggcatttctcctggtacaagacataatggaggacaccatgcgcttcagagataacacccccaatgccatcgccattgtgcagctgcaggaactctctttgaggctgaagagctgcttcaccaaggattatgaagagcatgacaaggcctgcgtccgaactttctatgagacacctctccagttgctggagaaggtcaagaatgtctttaatgaaacaaagaatctccttgacaaggactggaatattttcagcaagaactgcaacaacagctttgctgaatgctccagccaagatgtggtgaccaagcctgattgcaactgcctgtaccccaaagccatccctagcagtgacccggcctctgtctcccctcatcagcccctcgccccctccatggcccctgtggctggcttgacctgggaggactctgagggaactgagggcagctccctcttgcctggtgagcagcccctgcacacagtggatccaggcagtgccaagcagcggccacccaggagcacctgccagagctttgagccgccagagaccccagttgtcaaggacagcaccatcggtggctcaccacagcctcgcccctctgtcggggccttcaaccccgggatggaggatattcttgactctgcaatgggcactaattgggtcccagaagaagcctctggagaggccagtgagattcccgtaccccaagggacagagctttccccctccaggccaggagggggcagcatgcagacagagcccgccagacccagcaacttcctctcagcatcttctccactccctgcatcagcaaagggccaacagccggcagatgtaactggtaccgccttgcccagggtgggccccgtgaggcccactggccaggactggaatcacaccccccagaagacagaccatccatctgccctgctcagagaccccccggagccaggctctcccaggatctcatcactgcgcccccagggcctcagcaacccctccaccctctctgctcagccacagctttccagaagccactcctcgggcagcgtgctgccccttggggagctggagggcaggaggagcaccagggatcggaggagccccgcagagccagaaggaggaccagcaagtgaaggggcagccaggcccctgccccgttttaactccgttcctttgactgacacaggccatgagaggcagtccgagggatccttcagcccgcagctccaggagtctgtcttccacctgctggtgcccagtgtcatcctggtcttgctggccgtcggaggcctcttgttctacaggtggaggcggcggagccatcaagagcctcagagagcggattctcccttggagcaaccagagggcagccccctgactcaggatgacagacaggtggaactgccagtgtagagggaattctaagacccctcaccatcctggacacactcgtttgtcaatgtccctctgaaaatgtgacgcccagccccggacacagtactccagatgttgtctgaccagctcagagagagtacagtgggactgttaccttccttgatatggacagtattcttctatttgtgcagattaagattgcattagtttttttcttaacaactgcatcatactgttgtcatatgttgagcctgtggtctattaaaacccctagttccatttcccataaacttctgtcaagccagaccatctctaccctgtacttggacaacttaacttttttaaccaaagtgcagtttatgttcacctttgttaaagccaccttgttggtttctgcccatcacctgaacctactgaagttgtgtgaaatcctaattctgtcatctccgtagccctcccagttgtgcctcctgcacattgatgagtgcctgctgttgtctttgcccatgttgttgatgtagctgtgaccctattgttcctcacccctgccccccgccaaccccagctggcccacctcttccccctcccacccaagcccacagccagcccatcaggaagccttcctggcttctccacaaccttctgactgctcttttcagtcatgctcctcctgctcttttgtatttggctaatagtatatcaatttgcactt

SEQ ID NO: 2574 - protein, 554 aa, Homo sapiens
MTAPGAAGRCPPTTWLGSLLLLVCLLASRSITEEVSEYCSHMIGSGHLQSLQRLIDSQMETSCQITFEFVDQEQLKDPVCYLKKAFLLVQDIMEDTMRFRDNTPNAIAIVQLQELSLRLKSCFTKDYEEHDKACVRTFYETPLQLLEKVKNVFNETKNLLDKDWNIFSKNCNNSFAECSSQDVVTKPDCNCLYPKAIPSSDPASVSPHQPLAPSMAPVAGLTWEDSEGTEGSSLLPGEQPLHTVDPGSAKQRPPRSTCQSFEPPETPVVKDSTIGGSPQPRPSVGAFNPGMEDILDSAMGTNWVPEEASGEASEIPVPQGTELSPSRPGGGSMQTEPARPSNFLSASSPLPASAKGQQPADVTGTALPRVGPVRPTGQDWNHTPQKTDHPSALLRDPPEPGSPRISSLRPQGLSNPSTLSAQPQLSRSHSSGSVLPLGELEGRRSTRDRRSPAEPEGGPASEGAARPLPRFNSVPLTDTGHERQSEGSFSPQLQESVFHLLVPSVILVLLAVGGLLFYRWRRRSHQEPQRADSPLEQPEGSPLTQDDRQVELPV

SEQ ID NO: 2575 - DNA, 4060 bp, Homo sapiens
cttggaagtgcagcgcagaagacagaggtcctctcttaaaaggctgtgccgagggctggccagtgaggctcggcccggggaaagtgaaagtttgcctgggtcctctcggcgccagagccgctctccgcatcccaggacagcggtgcggccctcggccggggcgcccactccgcagcagccagcgagcgagcgagcgagcgagggcggccgacgcgcccggccgggacccagctgcccgtatgaccgcgccgggcgccgccgggcgctgccctcccacgacatggctgggctccctgctgttgttggtctgtctcctggcgagcaggagtatcaccgaggaggtgtcggagtactgtagccacatgattgggagtggacacctgcagtctctgcagcggctgattgacagtcagatggagacctcgtgccaaattacatttgagtttgtagaccaggaacagttgaaagatccagtgtgctaccttaagaaggcatttctcctggtacaagacataatggaggacaccatgcgcttcagagataacacccccaatgccatcgccattgtgcagctgcaggaactctctttgaggctgaagagctgcttcaccaaggattatgaagagcatgacaaggcctgcgtccgaactttctatgagacacctctccagttgctggagaaggtcaagaatgtctttaatgaaacaaagaatctccttgacaaggactggaatattttcagcaagaactgcaacaacagctttgctgaatgctccagccaagatgtggtgaccaagcctgattgcaactgcctgtaccccaaagccatccctagcagtgacccggcctctgtctcccctcatcagcccctcgccccctccatggcccctgtggctggcttgacctgggaggactctgagggaactgagggcagctccctcttgcctggtgagcagcccctgcacacagtggatccaggcagtgccaagcagcggccacccaggagcacctgccagagctttgagccgccagagaccccagttgtcaaggacagcaccatcggtggctcaccacagcctcgcccctctgtcggggccttcaaccccgggatggaggatattcttgactctgcaatgggcactaattgggtcccagaagaagcctctggagaggccagtgagattcccgtaccccaagggacagagctttccccctccaggccaggagggggcagcatgcagacagagcccgccagacccagcaacttcctctcagcatcttctccactccctgcatcagcaaagggccaacagccggcagatgtaactggtaccgccttgcccagggtgggccccgtgaggcccactggccaggactggaatcacaccccccagaagacagaccatccatctgccctgctcagagaccccccggagccaggctctcccaggatctcatcactgcgcccccagggcctcagcaacccctccaccctctctgctcagccacagctttccagaagccactcctcgggcagcgtgctgccccttggggagctggagggcaggaggagcaccagggatcggaggagccccgcagagccagaaggaggaccagcaagtgaaggggcagccaggcccctgccccgttttaactccgttcctttgactgacacaggccatgagaggcagtccgagggatccttcagcccgcagctccaggagtctgtcttccacctgctggtgcccagtgtcatcctggtcttgctggccgtcggaggcctcttgttctacaggtggaggcggcggagccatcaagagcctcagagagcggattctcccttggagcaaccagagggcagccccctgactcaggatgacagacaggtggaactgccagtgtagagggaattctaagctggacgcacagaacagtctctccgtgggaggagacattatggggcgtccaccaccacccctccctggccatcctcctggaatgtggtctgccctccaccagagctcctgcctgccaggactggaccagagcagccaggctggggcccctctgtctcaacccgcagacccttgactgaatgagagaggccagaggatgctccccatgctgccactatttattgtgagccctggaggctcccatgtgcttgaggaaggctggtgagcccggctcaggaccctcttccctcaggggctgcaccctcctctcactcccttccatgccggaacccaggccagggacccaccggcctgtggtttgtgggaaagcagggtggacgctgaggagtgaaagaaccctgcacccagagggcctgcctggtgccaaggtatcccagcctggacaggcatggacctgtctccagagagaggagcctgaagttcgtggggcgggacagcgtcggcctgatttcccgtaaaggtgtgcagcctgagagacgggaagaggaggcctctggacctgctggtctgcactgacagcctgaagggtctacaccctcggctcacctaagtgccctgtgctggttgccaggcgcagaggggaggccagccctgccctcaggacctgcctgacctgccagtgatgccaagagggggatcaagcactggcctctgcccctcctccttccagcacctgccagagcttctccaggaggccaagcagaggctcccctcatgaaggaagccattgcactgtgaacactgtacctgcctgctgaacagcctgcccccgtccatccatgagccagcatccgtccgtcctccactctccagcctctccccagcctcctgcactgagctggcctcaccagtcgactgagggagcccctcagccctgaccttctcctgacctggcctttgactccccggagtggagtggggtgggagaacctcctgggccgccagccagagccggtctttaggctgtgttgttcgcccaggtttctgcatcttgcactttgacattcccaagagggaagggactagtgggagagagcaagggaggggagggcacagacagagaggctacagggcgagctctgactgaagatgggcctttgaaatataggtatgcacctgaggttgggggagggtctgcactcccaaaccccagcgcagtgtcctttccctgctgccgacaggaacctggggctgaacaggttatccctgtcaggagccctggactgggctgcatctcagccccacctgcatggtatccagctcccatccacttctcacccttctttcctcctgaccttggtcagcagtgatgacctccaactctcacccaccccctctaccatcacctctaaccaggcaagccagggtgggagagcaatcaggagagccaggcctcagcttccaatgcctggagggcctccactttgtggccagcctgtggtggtggctctgaggcctaggcaacgagcgacagggctgccagttgcccctgggttcctttgtgctgctgtgtgcctcctctcctgccgccctttgtcctccgctaagagaccctgccctacctggccgctgggccccgtgactttcccttcctgcccaggaaagtgagggtcggctggccccaccttccctgtcctgatgccgacagcttagggaagggcagtgaacttgcatatggggcttagccttctagtcacagcctctatatttgatgctagaaaacacatatttttaaatggaagaaaaataaaaaggcattcccccttcatccccctaccttaaacatataatattttaaaggtcaaaaaagcaatccaacccactgcagaagctctttttgagcacttggtggcatcagagcaggaggagccccagagccacctctggtgtccccccaggctacctgctcaggaaccccttctgttctctgagaagtcaagagaggacattggctcacgcactgtgagattttgtttttatacttggaagtggtgaattattttatataaagtcatttaaatatctatttaaaagataggaagctgcttatatatttaataataaaagaagtgcacaagctgcca

SEQ ID NO: 2576 - protein, 554 aa, Homo sapiens; identical to SEQ ID NO: 2574

SEQ ID NO: 2577 - DNA, 3712 bp, Homo sapiens
cttggaagtgcagcgcagaagacagaggtcctctcttaaaaggctgtgccgagggctggccagtgaggctcggcccggggaaagtgaaagtttgcctgggtcctctcggcgccagagccgctctccgcatcccaggacagcggtgcggccctcggccggggcgcccactccgcagcagccagcgagcgagcgagcgagcgagggcggccgacgcgcccggccgggacccagctgcccgtatgaccgcgccgggcgccgccgggcgctgccctcccacgacatggctgggctccctgctgttgttggtctgtctcctggcgagcaggagtatcaccgaggaggtgtcggagtactgtagccacatgattgggagtggacacctgcagtctctgcagcggctgattgacagtcagatggagacctcgtgccaaattacatttgagtttgtagaccaggaacagttgaaagatccagtgtgctaccttaagaaggcatttctcctggtacaagacataatggaggacaccatgcgcttcagagataacacccccaatgccatcgccattgtgcagctgcaggaactctctttgaggctgaagagctgcttcaccaaggattatgaagagcatgacaaggcctgcgtccgaactttctatgagacacctctccagttgctggagaaggtcaagaatgtctttaatgaaacaaagaatctccttgacaaggactggaatattttcagcaagaactgcaacaacagctttgctgaatgctccagccaagatgtggtgaccaagcctgattgcaactgcctgtaccccaaagccatccctagcagtgacccggcctctgtctcccctcatcagcccctcgccccctccatggcccctgtggctggcttgacctgggaggactctgagggaactgagggcagctccctcttgcctggtgagcagcccctgcacacagtggatccaggcagtgccaagcagcggccacccaggagcacctgccagagctttgagccgccagagaccccagttgtcaaggacagcaccatcggtggctcaccacagcctcgcccctctgtcggggccttcaaccccgggatggaggatattcttgactctgcaatgggcactaattgggtcccagaagaagcctctggagaggccagtgagattcccgtaccccaagggacagagctttccccctccaggccaggagggggcagcatgcagacagagcccgccagacccagcaacttcctctcagcatcttctccactccctgcatcagcaaagggccaacagccggcagatgtaactggccatgagaggcagtccgagggatccttcagcccgcagctccaggagtctgtcttccacctgctggtgcccagtgtcatcctggtcttgctggccgtcggaggcctcttgttctacaggtggaggcggcggagccatcaagagcctcagagagcggattctcccttggagcaaccagagggcagccccctgactcaggatgacagacaggtggaactgccagtgtagagggaattctaagctggacgcacagaacagtctctccgtgggaggagacattatggggcgtccaccaccacccctccctggccatcctcctggaatgtggtctgccctccaccagagctcctgcctgccaggactggaccagagcagccaggctggggcccctctgtctcaacccgcagacccttgactgaatgagagaggccagaggatgctccccatgctgccactatttattgtgagccctggaggctcccatgtgcttgaggaaggctggtgagcccggctcaggaccctcttccctcaggggctgcaccctcctctcactcccttccatgccggaacccaggccagggacccaccggcctgtggtttgtgggaaagcagggtggacgctgaggagtgaaagaaccctgcacccagagggcctgcctggtgccaaggtatcccagcctggacaggcatggacctgtctccagagagaggagcctgaagttcgtggggcgggacagcgtcggcctgatttcccgtaaaggtgtgcagcctgagagacgggaagaggaggcctctggacctgctggtctgcactgacagcctgaagggtctacaccctcggctcacctaagtgccctgtgctggttgccaggcgcagaggggaggccagccctgccctcaggacctgcctgacctgccagtgatgccaagagggggatcaagcactggcctctgcccctcctccttccagcacctgccagagcttctccaggaggccaagcagaggctcccctcatgaaggaagccattgcactgtgaacactgtacctgcctgctgaacagcctgcccccgtccatccatgagccagcatccgtccgtcctccactctccagcctctccccagcctcctgcactgagctggcctcaccagtcgactgagggagcccctcagccctgaccttctcctgacctggcctttgactccccggagtggagtggggtgggagaacctcctgggccgccagccagagccggtctttaggctgtgttgttcgcccaggtttctgcatcttgcactttgacattcccaagagggaagggactagtgggagagagcaagggaggggagggcacagacagagaggctacagggcgagctctgactgaagatgggcctttgaaatataggtatgcacctgaggttgggggagggtctgcactcccaaaccccagcgcagtgtcctttccctgctgccgacaggaacctggggctgaacaggttatccctgtcaggagccctggactgggctgcatctcagccccacctgcatggtatccagctcccatccacttctcacccttctttcctcctgaccttggtcagcagtgatgacctccaactctcacccaccccctctaccatcacctctaaccaggcaagccagggtgggagagcaatcaggagagccaggcctcagcttccaatgcctggagggcctccactttgtggccagcctgtggtggtggctctgaggcctaggcaacgagcgacagggctgccagttgcccctgggttcctttgtgctgctgtgtgcctcctctcctgccgccctttgtcctccgctaagagaccctgccctacctggccgctgggccccgtgactttcccttcctgcccaggaaagtgagggtcggctggccccaccttccctgtcctgatgccgacagcttagggaagggcagtgaacttgcatatggggcttagccttctagtcacagcctctatatttgatgctagaaaacacatatttttaaatggaagaaaaataaaaaggcattcccccttcatccccctaccttaaacatataatattttaaaggtcaaaaaagcaatccaacccactgcagaagctctttttgagcacttggtggcatcagagcaggaggagccccagagccacctctggtgtccccccaggctacctgctcaggaaccccttctgttctctgagaagtcaagagaggacattggctcacgcactgtgagattttgtttttatacttggaagtggtgaattattttatataaagtcatttaaatatctatttaaaagataggaagctgcttatatatttaataataaaagaagtgcacaagctgcca

SEQ ID NO: 2578 - protein, 438 aa, Homo sapiens
MTAPGAAGRCPPTTWLGSLLLLVCLLASRSITEEVSEYCSHMIGSGHLQSLQRLIDSQMETSCQITFEFVDQEQLKDPVCYLKKAFLLVQDIMEDTMRFRDNTPNAIAIVQLQELSLRLKSCFTKDYEEHDKACVRTFYETPLQLLEKVKNVFNETKNLLDKDWNIFSKNCNNSFAECSSQDVVTKPDCNCLYPKAIPSSDPASVSPHQPLAPSMAPVAGLTWEDSEGTEGSSLLPGEQPLHTVDPGSAKQRPPRSTCQSFEPPETPVVKDSTIGGSPQPRPSVGAFNPGMEDILDSAMGTNWVPEEASGEASEIPVPQGTELSPSRPGGGSMQTEPARPSNFLSASSPLPASAKGQQPADVTGHERQSEGSFSPQLQESVFHLLVPSVILVLLAVGGLLFYRWRRRSHQEPQRADSPLEQPEGSPLTQDDRQVELPV

SEQ ID NO: 2579 - DNA, 3166 bp, Homo sapiens
cttggaagtgcagcgcagaagacagaggtcctctcttaaaaggctgtgccgagggctggccagtgaggctcggcccggggaaagtgaaagtttgcctgggtcctctcggcgccagagccgctctccgcatcccaggacagcggtgcggccctcggccggggcgcccactccgcagcagccagcgagcgagcgagcgagcgagggcggccgacgcgcccggccgggacccagctgcccgtatgaccgcgccgggcgccgccgggcgctgccctcccacgacatggctgggctccctgctgttgttggtctgtctcctggcgagcaggagtatcaccgaggaggtgtcggagtactgtagccacatgattgggagtggacacctgcagtctctgcagcggctgattgacagtcagatggagacctcgtgccaaattacatttgagtttgtagaccaggaacagttgaaagatccagtgtgctaccttaagaaggcatttctcctggtacaagacataatggaggacaccatgcgcttcagagataacacccccaatgccatcgccattgtgcagctgcaggaactctctttgaggctgaagagctgcttcaccaaggattatgaagagcatgacaaggcctgcgtccgaactttctatgagacacctctccagttgctggagaaggtcaagaatgtctttaatgaaacaaagaatctccttgacaaggactggaatattttcagcaagaactgcaacaacagctttgctgaatgctccagccaaggccatgagaggcagtccgagggatccttcagcccgcagctccaggagtctgtcttccacctgctggtgcccagtgtcatcctggtcttgctggccgtcggaggcctcttgttctacaggtggaggcggcggagccatcaagagcctcagagagcggattctcccttggagcaaccagagggcagccccctgactcaggatgacagacaggtggaactgccagtgtagagggaattctaagctggacgcacagaacagtctctccgtgggaggagacattatggggcgtccaccaccacccctccctggccatcctcctggaatgtggtctgccctccaccagagctcctgcctgccaggactggaccagagcagccaggctggggcccctctgtctcaacccgcagacccttgactgaatgagagaggccagaggatgctccccatgctgccactatttattgtgagccctggaggctcccatgtgcttgaggaaggctggtgagcccggctcaggaccctcttccctcaggggctgcaccctcctctcactcccttccatgccggaacccaggccagggacccaccggcctgtggtttgtgggaaagcagggtggacgctgaggagtgaaagaaccctgcacccagagggcctgcctggtgccaaggtatcccagcctggacaggcatggacctgtctccagagagaggagcctgaagttcgtggggcgggacagcgtcggcctgatttcccgtaaaggtgtgcagcctgagagacgggaagaggaggcctctggacctgctggtctgcactgacagcctgaagggtctacaccctcggctcacctaagtgccctgtgctggttgccaggcgcagaggggaggccagccctgccctcaggacctgcctgacctgccagtgatgccaagagggggatcaagcactggcctctgcccctcctccttccagcacctgccagagcttctccaggaggccaagcagaggctcccctcatgaaggaagccattgcactgtgaacactgtacctgcctgctgaacagcctgcccccgtccatccatgagccagcatccgtccgtcctccactctccagcctctccccagcctcctgcactgagctggcctcaccagtcgactgagggagcccctcagccctgaccttctcctgacctggcctttgactccccggagtggagtggggtgggagaacctcctgggccgccagccagagccggtctttaggctgtgttgttcgcccaggtttctgcatcttgcactttgacattcccaagagggaagggactagtgggagagagcaagggaggggagggcacagacagagaggctacagggcgagctctgactgaagatgggcctttgaaatataggtatgcacctgaggttgggggagggtctgcactcccaaaccccagcgcagtgtcctttccctgctgccgacaggaacctggggctgaacaggttatccctgtcaggagccctggactgggctgcatctcagccccacctgcatggtatccagctcccatccacttctcacccttctttcctcctgaccttggtcagcagtgatgacctccaactctcacccaccccctctaccatcacctctaaccaggcaagccagggtgggagagcaatcaggagagccaggcctcagcttccaatgcctggagggcctccactttgtggccagcctgtggtggtggctctgaggcctaggcaacgagcgacagggctgccagttgcccctgggttcctttgtgctgctgtgtgcctcctctcctgccgccctttgtcctccgctaagagaccctgccctacctggccgctgggccccgtgactttcccttcctgcccaggaaagtgagggtcggctggccccaccttccctgtcctgatgccgacagcttagggaagggcagtgaacttgcatatggggcttagccttctagtcacagcctctatatttgatgctagaaaacacatatttttaaatggaagaaaaataaaaaggcattcccccttcatccccctaccttaaacatataatattttaaaggtcaaaaaagcaatccaacccactgcagaagctctttttgagcacttggtggcatcagagcaggaggagccccagagccacctctggtgtccccccaggctacctgctcaggaaccccttctgttctctgagaagtcaagagaggacattggctcacgcactgtgagattttgtttttatacttggaagtggtgaattattttatataaagtcatttaaatatctatttaaaagataggaagctgcttatatatttaataataaaagaagtgcacaagctgcca

SEQ ID NO: 2580 - protein, 256 aa, Homo sapiens
MTAPGAAGRCPPTTWLGSLLLLVCLLASRSITEEVSEYCSHMIGSGHLQSLQRLIDSQMETSCQITFEFVDQEQLKDPVCYLKKAFLLVQDIMEDTMRFRDNTPNAIAIVQLQELSLRLKSCFTKDYEEHDKACVRTFYETPLQLLEKVKNVFNETKNLLDKDWNIFSKNCNNSFAECSSQGHERQSEGSFSPQLQESVFHLLVPSVILVLLAVGGLLFYRWRRRSHQEPQRADSPLEQPEGSPLTQDDRQVELPV

SEQ ID NO: 2581 - DNA, 2893 bp, Homo sapiens
ctgctcagtgtcaaattaacaggaaagtcagcttaaaggacactccttgcagggactgagctggcacctactccttagagcttgctgataccaggcctgccacgcgacatctgcaaggacagttgtttggtgttttgcttcaggttatagatggagagacctataaaggactccatgttttcgttggccctgaaatgccttatcagtctgtccaccatcatccttttgggcttgatcatcgcctaccacacacgtgaagtccagctcttcgtgatcgacaatggcgcggatgactggcggatagccatgacctacgagcgcatcctgtacatcagcctggagatgctggtgtgcgccatccaccccattcctggcgagtacaagttcttctggacggcacgcctggccttctcctacacaccctcccgggcggaggccgatgtggacatcatcctgtctatccccatgttcctgcgcctgtacctgatcgcccgagtcatgctgctgcacagcaagctcttcaccgatgcctcgtcccgcagcatcggggccctcaacaagatcaacttcaacacccgctttgtcatgaagacgctcatgaccatctgccctggcactgtgctgctcgtgttcagcatctctctgtggatcattgctgcctggaccgtccgtgtctgtgaaaggtaccatgaccagcaggacgtaactagtaactttctgggtgccatgtggctcatctccatcacattcctttccattggttatggggacatggtgccccacacatactgtgggaaaggtgtctgtctcctcactggcatcatgggtgcaggctgcactgcccttgtggtggccgtggtggcccgaaagctggaactcaccaaagcggagaagcacgttcataacttcatgatggacactcagctcaccaagcggatcaagaatgctgcagccaatgtccttcgggaaacatggttaatctataaacacacaaagctgctaaagaagattgaccatgccaaagtgaggaaacaccagaggaagttcctccaagctatccaccagttgaggagcgtcaagatggaacagaggaagctgagtgaccaagccaacactctggtggacctttccaagatgcagaatgtcatgtatgacttaatcacagaactcaatgaccggagcgaagacctggagaagcagattggcagcctggagtcgaagctggagcatctcaccgccagcttcaactccctgccgctgctcatcgccgacaccctgcgccagcagcagcagcagctcctgtctgccatcatcgaggcccggggtgtcagcgtggcagtgggcaccacccacaccccaatctccgatagccccattggggtcagctccacctccttcccgaccccgtacacaagttcaagcagttgctaaataaatctccccactccagaagcattacccataggtcttaagatgcaaatcaactctctcctggtcgctttgccatcaagaaacattcagaccagggaacggaaagaagagagaccgagctaattaactaactcatgttcattcagcgtgcttggtccgacatgccttgaaaccagaaatctaatctctgtttaggtgcctctacttgggagcgggaagaggagatgacaggaagcgacgcctctggcagggcccttgctgcagagttggtggagaacagaaatccacgctcaatctcaggtcttcacgcggggggtgggggtcagatgcactgaagtagccaacagcgaagccagtccagaagaggggtccgctgggagggagggttgtgtcaggcttgggggatgggctcttcgccatgggggtctttgaacacacctctctcctttccttttgtctacggaagcctctgggtgacaaaagtaaaagagagctgcccacaacttgccaaaacagatatactcgaatcagactgaaaaaaaaaaaaaaagacacagacaaataaaaagccagattttccactcgatattaatacccacataaacctgtgtgtttgcaaacgtgtacatgtacacacatacacatcccacgttcgcttcaggtcctttcttatttgagcttaatccaaataaaaagggacttgacaccttaccctgcatacaataggcaccccttacatgtgttttgagttggtctgaatctgaacatggggtgctttcagttcaggtagttagctagttctggccacattctgagtttcactgaagatgtggatcccttcagacataatgcacattgctttgtcctggatatgcaccttgcttgatttgaaatggatgccaagccaaaattgttggcattcaggagggataagcaggcttctaaaaataacagcatctgcagagttttcttcttccatccaaacaagttgtgtttcgatggtccacatgaccaggtgtatgtctgtaagtgtggagggagaggacaagaaattgtgcatgtgtgtgcagacatgcacaaacaggagcaatccaataacaccttagtgaatagaaatatggttggggatttgctgagctgtatttatccagcaacaggtttccagccccagatgttagtagtgcaaaagggccaagtgcctcaattgtgagcctctgagctaggaggagaagtgatgaagagtggcctatgtggtcccttctacctgaccttaagtcatctcaaaatgaaatattgtgagaatgaagggaacccttagggaaccttgtgggtaaggtaagtggacatggatttgtcagtagcctgttcctactgtgccatgttaatcttggtgcgaaaaactattccaatacatctcaaactccaagagacttcagaaacatcaagatttagtgtaatgagc

SEQ ID NO: 2582 - protein, 426 aa, Homo sapiens; identical to SEQ ID NO: 129

SEQ ID NO: 2583 - DNA, 3096 bp, Homo sapiens
gaggactcagaataaacctgctgctgcttcgtaaacatctcctgataaaaatggctacaggtgttacctgggcagagcagctgggcgccgccttggaatcagctgggggagcacctctccttgggacgggatgacagggcttcccaggcggtccccacaagcccgcgccccagctcagccccagttctcccctcccacctcaactcctccttgggataaataaagatgagtgtgtgtgtgagtgcgcgcccggatggagaacagcaggcactggctttagcggggagctggccccactgctccagcctctcagtccagccccaagacggaggagggggtttccctcccagagggagtggagatggaggaaggactccatgttttcgttggccctgaaatgccttatcagtctgtccaccatcatccttttgggcttgatcatcgcctaccacacacgtgaagtccagctcttcgtgatcgacaatggcgcggatgactggcggatagccatgacctacgagcgcatcctgtacatcagcctggagatgctggtgtgcgccatccaccccattcctggcgagtacaagttcttctggacggcacgcctggccttctcctacacaccctcccgggcggaggccgatgtggacatcatcctgtctatccccatgttcctgcgcctgtacctgatcgcccgagtcatgctgctgcacagcaagctcttcaccgatgcctcgtcccgcagcatcggggccctcaacaagatcaacttcaacacccgctttgtcatgaagacgctcatgaccatctgccctggcactgtgctgctcgtgttcagcatctctctgtggatcattgctgcctggaccgtccgtgtctgtgaaaggtaccatgaccagcaggacgtaactagtaactttctgggtgccatgtggctcatctccatcacattcctttccattggttatggggacatggtgccccacacatactgtgggaaaggtgtctgtctcctcactggcatcatgggtgcaggctgcactgcccttgtggtggccgtggtggcccgaaagctggaactcaccaaagcggagaagcacgttcataacttcatgatggacactcagctcaccaagcggatcaagaatgctgcagccaatgtccttcgggaaacatggttaatctataaacacacaaagctgctaaagaagattgaccatgccaaagtgaggaaacaccagaggaagttcctccaagctatccaccagttgaggagcgtcaagatggaacagaggaagctgagtgaccaagccaacactctggtggacctttccaagatgcagaatgtcatgtatgacttaatcacagaactcaatgaccggagcgaagacctggagaagcagattggcagcctggagtcgaagctggagcatctcaccgccagcttcaactccctgccgctgctcatcgccgacaccctgcgccagcagcagcagcagctcctgtctgccatcatcgaggcccggggtgtcagcgtggcagtgggcaccacccacaccccaatctccgatagccccattggggtcagctccacctccttcccgaccccgtacacaagttcaagcagttgctaaataaatctccccactccagaagcattacccataggtcttaagatgcaaatcaactctctcctggtcgctttgccatcaagaaacattcagaccagggaacggaaagaagagagaccgagctaattaactaactcatgttcattcagcgtgcttggtccgacatgccttgaaaccagaaatctaatctctgtttaggtgcctctacttgggagcgggaagaggagatgacaggaagcgacgcctctggcagggcccttgctgcagagttggtggagaacagaaatccacgctcaatctcaggtcttcacgcggggggtgggggtcagatgcactgaagtagccaacagcgaagccagtccagaagaggggtccgctgggagggagggttgtgtcaggcttgggggatgggctcttcgccatgggggtctttgaacacacctctctcctttccttttgtctacggaagcctctgggtgacaaaagtaaaagagagctgcccacaacttgccaaaacagatatactcgaatcagactgaaaaaaaaaaaaaaagacacagacaaataaaaagccagattttccactcgatattaatacccacataaacctgtgtgtttgcaaacgtgtacatgtacacacatacacatcccacgttcgcttcaggtcctttcttatttgagcttaatccaaataaaaagggacttgacaccttaccctgcatacaataggcaccccttacatgtgttttgagttggtctgaatctgaacatggggtgctttcagttcaggtagttagctagttctggccacattctgagtttcactgaagatgtggatcccttcagacataatgcacattgctttgtcctggatatgcaccttgcttgatttgaaatggatgccaagccaaaattgttggcattcaggagggataagcaggcttctaaaaataacagcatctgcagagttttcttcttccatccaaacaagttgtgtttcgatggtccacatgaccaggtgtatgtctgtaagtgtggagggagaggacaagaaattgtgcatgtgtgtgcagacatgcacaaacaggagcaatccaataacaccttagtgaatagaaatatggttggggatttgctgagctgtatttatccagcaacaggtttccagccccagatgttagtagtgcaaaagggccaagtgcctcaattgtgagcctctgagctaggaggagaagtgatgaagagtggcctatgtggtcccttctacctgaccttaagtcatctcaaaatgaaatattgtgagaatgaagggaacccttagggaaccttgtgggtaaggtaagtggacatggatttgtcagtagcctgttcctactgtgccatgttaatcttggtgcgaaaaactattccaatacatctcaaactccaagagacttcagaaacatcaagatttagtgtaatgagc

SEQ ID NO: 2584 - protein, 418 aa, Homo sapiens
MFSLALKCLISLSTIILLGLIIAYHTREVQLFVIDNGADDWRIAMTYERILYISLEMLVCAIHPIPGEYKFFWTARLAFSYTPSRAEADVDIILSIPMFLRLYLIARVMLLHSKLFTDASSRSIGALNKINFNTRFVMKTLMTICPGTVLLVFSISLWIIAAWTVRVCERYHDQQDVTSNFLGAMWLISITFLSIGYGDMVPHTYCGKGVCLLTGIMGAGCTALVVAVVARKLELTKAEKHVHNFMMDTQLTKRIKNAAANVLRETWLIYKHTKLLKKIDHAKVRKHQRKFLQAIHQLRSVKMEQRKLSDQANTLVDLSKMQNVMYDLITELNDRSEDLEKQIGSLESKLEHLTASFNSLPLLIADTLRQQQQQLLSAIIEARGVSVAVGTTHTPISDSPIGVSSTSFPTPYTSSSSC

SEQ ID NO: 2585 - DNA, 1660 bp, Homo sapiens
gaggactcagaataaacctgctgctgcttcgtaaacatctcctgataaaaatggctacaggtgttacctgggcagagcagctgggcgccgccttggaatcagctgggggagcacctctccttgggacgggatgacagggcttcccaggcggtccccacaagcccgcgccccagctcagccccagttctcccctcccacctcaactcctccttgggataaataaagatgagtgtgtgtgtgagtgcgcgcccggatggagaacagcaggcactggctttagcggggagctggccccactgctccagcctctcagtccagccccaagacggaggagggggtttccctcccagagggagtggagatggaggaaggactccatgttttcgttggccctgaaatgccttatcagtctgtccaccatcatccttttgggcttgatcatcgcctaccacacacgtgaagtccagctcttcgtgatcgacaatggcgcggatgactggcggatagccatgacctacgagcgcatcctgtacatcagcctggagatgctggtgtgcgccatccaccccattcctggcgagtacaagttcttctggacggcacgcctggccttctcctacacaccctcccgggcggaggccgatgtggacatcatcctgtctatccccatgttcctgcgcctgtacctgatcgcccgagtcatgctgctgcacagcaagctcttcaccgatgcctcgtcccgcagcatcggggccctcaacaagatcaacttcaacacccgctttgtcatgaagacgctcatgaccatctgccctggcactgtgctgctcgtgttcagcatctctctgtggatcattgctgcctggaccgtccgtgtctgtgaaaggtaccatgaccagcaggacgtaactagtaactttctgggtgccatgtggctcatctccatcacattcctttccattggttatggggacatggtgccccacacatactgtgggaaaggtgtctgtctcctcactggcatcatgggtgcaggctgcactgcccttgtggtggccgtggtggcccgaaagctggaactcaccaaagcggagaagcacgttcataacttcatgatggacactcagctcaccaagcggatcaagaatgctgcagccaatgtccttcgggaaacatggttaatctataaacacacaaagctgctaaagaagattgaccatgccaaagtgaggaaacaccagaggaagttcctccaagctatccaccagttgaggagcgtcaagatggaacagaggaagctgagtgaccaagccaacactctggtggacctttccaagatgcagaatgtcatgtatgacttaatcacagaactcaatgaccggagcgaagacctggagaagcagattggcagcctggagtcgaagctggagcatctcaccgccagcttcaactccctgccgctgctcatcgccgacaccctgcgccagcagcagcagcagctcctgtctgccatcatcgaggcccggggtgtcagcgtggcagtgggcaccacccacaccccaatctccgatagccccattggggtcagctccacctccttcccgaccccgtacacaagttcaagcagttgctaaataaatctccccactccagaagcatt

SEQ ID NO: 2586 - protein, 418 aa, Homo sapiens; identical to SEQ ID NO: 2584

SEQ ID NO: 2587 - DNA, 1090 bp, Homo sapiens
gacaggactagggagagaattgcctaatcagaagcaaagggaaagagaggcgaggggcgagaggagaggggagaggggagggagaagaggaggggtacaggataaagagggggtggagagggaagggagagaatgggaggccggagaggggagggagtcaggcaggaagcaggcagcgttagagagtcctagcatgggaatgggactctgagacagctgcggaggttccctggcctccatggaggcacctcccctcttctctgctcctcacagacagcttccaggagattttaggaattactctgttcttaaatgggagaagcgctaatgcccaaatgctgagaaggagtaaagcggagaaaacagagaaaaacagtcacaaatagagagaagtaggcaggaaaggcgggaaagggaactgtcgataaaagagaggcaagcaggatgagaatgagagaaggaaagggggctggggagagggccaggactgtcacatccagcaggggctctccctgagtgccccacactcaccctactaccttctgtgcacatggaggatggaggcaacctgaaggtgatacttaactatcaggaaacatttacagatgaagaaagaagaacatctgaacacagactgagcttactggatattgatgccagtggcaatattggcaaacaaatcttgaagatagatggccagagaaatgatggaaactgtgtctgagtcactgcttggaagagagccaccaaaccaggagcacttacatccgactggaatcccagatggacacaggtgacctaggcttgccctgtcagatgcttccaagggaggcttgatttagaagtcatcaacatgagaacctggctctccatggagtttccatcttgctgatgcggctggcttcagacatctgggttttaggcaatagcagcaattgcgaagtacatacggaagtggcatttgttctgtagatttagcaattgcagtgtagtcaggtcttggcattatatgtttagggagcagaaacagtgaacttatccagaatagttttgttgcctggtttggtgtgtgtgtatgtgggtggaggga

SEQ ID NO: 2588 - protein, 57 aa, Homo sapiens [sequence omitted]

SEQ ID NO: 2589 - DNA, 821 bp, Homo sapiens
aaatggtttgctccgagcgccctatttaatccccgcgactgcagcagcgccggctccctcccggtccccacctcggccccgggctccgaagcggctcgggggcgccctttcggtcaacatcgtagtccaccccctccccatccccagcccccggggattcaggctcgccagcgcccagccagggagccggccgggaagcgcgatgggggccccagccgcctcgctcctgctcctgctcctgctgttcgcctgctgctgggcgcccggcggggccaacctctcccaggacgacagccagccctggacatctgatgaaacagtggtggctggtggcaccgtggtgctcaagtgccaagtgaaagatcacgaggactcatccctgcaatggtctaaccctgctcagcagactctctactttggggagaagagagcccttcgagataatcgaattcagctggttacctctacgccccacgagctcagcatcagcatcagcaatgtggccctggcagacgagggcgagtacacctgctcaatcttcactatgcctgtgcgaactgccaagtccctcgtcactgtgctaggtgagactcccaaaccccagtgtctctacagcatgcttccttgcaaacaaacctccctagatgggtccctgaagcagctgggagccaggcaagtctccaagcactttaggaaagttcagcctgtgttcccctggcaatgggataaaatgtaaaaagaaatgggttttaatcctttgtgctctacttgctgtttgatctaggacaaggttcttactctctttgagtctgaattttctc

SEQ ID NO: 2590 - protein, 177 aa, Homo sapiens
MGAPAASLLLLLLLFACCWAPGGANLSQDDSQPWTSDETVVAGGTVVLKCQVKDHEDSSLQWSNPAQQTLYFGEKRALRDNRIQLVTSTPHELSISISNVALADEGEYTCSIFTMPVRTAKSLVTVLGETPKPQCLYSMLPCKQTSLDGSLKQLGARQVSKHFRKVQPVFPWQWDKM

SEQ ID NO: 2591 - DNA, 1722 bp, Homo sapiens
aaatggtttgctccgagcgccctatttaatccccgcgactgcagcagcgccggctccctcccggtccccacctcggccccgggctccgaagcggctcgggggcgccctttcggtcaacatcgtagtccaccccctccccatccccagcccccggggattcaggctcgccagcgcccagccagggagccggccgggaagcgcgatgggggccccagccgcctcgctcctgctcctgctcctgctgttcgcctgctgctgggcgcccggcggggccaacctctcccaggacgacagccagccctggacatctgatgaaacagtggtggctggtggcaccgtggtgctcaagtgccaagtgaaagatcacgaggactcatccctgcaatggtctaaccctgctcagcagactctctactttggggagaagagagcccttcgagataatcgaattcagctggttacctctacgccccacgagctcagcatcagcatcagcaatgtggccctggcagacgagggcgagtacacctgctcaatcttcactatgcctgtgcgaactgccaagtccctcgtcactgtgctaggaattccacagaagcccatcatcactggttataaatcttcattacgggaaaaagacacagccaccctaaactgtcagtcttctgggagcaagcctgcagcccggctcacctggagaaagggtgaccaagaactccacggagaaccaacccgcatacaggaagatcccaatggtaaaaccttcactgtcagcagctcggtgacattccaggttacccgggaggatgatggggcgagcatcgtgtgctctgtgaaccatgaatctctaaagggagctgacagatccacctctcaacgcattgaagttttatacacaccaactgcgatgattaggccagaccctccccatcctcgtgagggccagaagctgttgctacactgtgagggtcgcggcaatccagtcccccagcagtacctatgggagaaggagggcagtgtgccacccctgaagatgacccaggagagtgccctgatcttccctttcctcaacaagagtgacagtggcacctacggctgcacagccaccagcaacatgggcagctacaaggcctactacaccctcaatgttaatgaccccagtccggtgccctcctcctccagcacctaccacgccatcatcggtgggatcgtggctttcattgtcttcctgctgctcatcatgctcatcttccttggccactacttgatccggcacaaaggaacctacctgacacatgaggcaaaaggctccgacgatgctccagacgcggacacggccatcatcaatgcagaaggcgggcagtcaggaggggacgacaagaaggaatatttcatctagaggcgcctgcccacttcctgcgccccccaggggccctgtggggactgctggggccgtcaccaacccggacttgtacagagcaaccgcagggccgcccctcccgcttgctccccagcccacccacccccctgtacagaatgtctgctttgggtgcggttttgtactcggtttggaatggggagggaggagggcggggggaggggagggttgccctcagccctttccgtggcttctctgcatttgggttattattatttttgtaacaatcccaaatcaaatctgtctccaggctggagaggcaggagccctggggtgagaaaagc

SEQ ID NO: 2592 - protein, 398 aa, Homo sapiens
MGAPAASLLLLLLLFACCWAPGGANLSQDDSQPWTSDETVVAGGTVVLKCQVKDHEDSSLQWSNPAQQTLYFGEKRALRDNRIQLVTSTPHELSISISNVALADEGEYTCSIFTMPVRTAKSLVTVLGIPQKPIITGYKSSLREKDTATLNCQSSGSKPAARLTWRKGDQELHGEPTRIQEDPNGKTFTVSSSVTFQVTREDDGASIVCSVNHESLKGADRSTSQRIEVLYTPTAMIRPDPPHPREGQKLLLHCEGRGNPVPQQYLWEKEGSVPPLKMTQESALIFPFLNKSDSGTYGCTATSNMGSYKAYYTLNVNDPSPVPSSSSTYHAIIGGIVAFIVFLLLIMLIFLGHYLIRHKGTYLTHEAKGSDDAPDADTAIINAEGGQSGGDDKKEYFI

SEQ ID NO: 2593 - DNA, 5434 bp, Homo sapiens
aaatggtttgctccgagcgccctatttaatccccgcgactgcagcagcgccggctccctcccggtccccacctcggccccgggctccgaagcggctcgggggcgccctttcggtcaacatcgtagtccaccccctccccatccccagcccccggggattcaggctcgccagcgcccagccagggagccggccgggaagcgcgatgggggccccagccgcctcgctcctgctcctgctcctgctgttcgcctgctgctgggcgcccggcggggccaacctctcccaggacgacagccagccctggacatctgatgaaacagtggtggctggtggcaccgtggtgctcaagtgccaagtgaaagatcacgaggactcatccctgcaatggtctaaccctgctcagcagactctctactttggggagaagagagcccttcgagataatcgaattcagctggttacctctacgccccacgagctcagcatcagcatcagcaatgtggccctggcagacgagggcgagtacacctgctcaatcttcactatgcctgtgcgaactgccaagtccctcgtcactgtgctaggaattccacagaagcccatcatcactggttataaatcttcattacgggaaaaagacacagccaccctaaactgtcagtcttctgggagcaagcctgcagcccggctcacctggagaaagggtgaccaagaactccacggagaaccaacccgcatacaggaagatcccaatggtaaaaccttcactgtcagcagctcggtgacattccaggttacccgggaggatgatggggcgagcatcgtgtgctctgtgaaccatgaatctctaaagggagctgacagatccacctctcaacgcattgaagttttatacacaccaactgcgatgattaggccagaccctccccatcctcgtgagggccagaagctgttgctacactgtgagggtcgcggcaatccagtcccccagcagtacctatgggagaaggagggcagtgtgccacccctgaagatgacccaggagagtgccctgatcttccctttcctcaacaagagtgacagtggcacctacggctgcacagccaccagcaacatgggcagctacaaggcctactacaccctcaatgttaatgaccccagtccggtgccctcctcctccagcacctaccacgccatcatcggtgggatcgtggctttcattgtcttcctgctgctcatcatgctcatcttccttggccactacttgatccggcacaaaggaacctacctgacacatgaggcaaaaggctccgacgatgctccagacgcggacacggccatcatcaatgcagaaggcgggcagtcaggaggggacgacaagaaggaatatttcatctagaggcgcctgcccacttcctgcgccccccaggggccctgtggggactgctggggccgtcaccaacccggacttgtacagagcaaccgcagggccgcccctcccgcttgctccccagcccacccacccccctgtacagaatgtctgctttgggtgcggttttgtactcggtttggaatggggagggaggagggcggggggaggggagggttgccctcagccctttccgtggcttctctgcatttgggttattattatttttgtaacaatcccaaatcaaatctgtctccaggctggagaggcaggagccctggggtgagaaaagcaaaaaacaaacaaaaaacaaaaccctggagtgttaggaggagagtgaaggtagaggggtgaggaagggtaaggggcagggctggtttcagctgggggctctcaccagccctcctttcagcctctacaacagagcagcttcccagacttctccaggaacccagaaacgggatggttgtcggcaaaggttgggagtggcttttcctctggtagccacacacctgagcactacggacagggaggcaggtgccaccttgacacctctcttccatagcaatgggaaagtgatgagtgcgggagtcctgaggagatgtggcctgcagacaacatgcagccatgcagggacccaggactgtaacctggggaggacgcgggtccctgcaaggaagagtagatttggagaggaaggatggaggtggactctcaccccattccccccggaaatgaacaaagccgggccctttccataggaactgcccttggagatagcagagtgtggctgcccctccttgctccagcagcagtgggagaggcactgctctggggcctgaactgcctctgcttccccccctgaggggcccctcactcttacccaagactctggattgttgcacggcaaccactcctcccatggcattgctcagcaactacttctcccttcccggccaccctgtgcccccttcctggtcccaacgccagcccttcatccttcctccctcagcagccaggcagacataacaacaaaactactaaaaggagcttcactgcagtgagctgtttcctgcccaaactaagggaataatgtgaactgtgtgcatgtgtgtggtgtgtatgcatgtgtgcatgtgtgtgtgtgtgtgtgcatgtgtgtgagtgagtgagaggcagagcgaggaactgaggaggagggctaagagccaggggtcctgggcaagtggacagggctgtgggacatgttggggaggctttgggaatggggtattcctagtcagggttcacacctcacctgggatgttgttccatgctggtatttcctctgccacccccaatgcccatcggtcttggagaaaggagtccccgggtgtgtgtttgcccagctgtccattctatctctcccttaaacacagagcattcagcccttccctggatttccctcctctgagccatggagtcagtgccacagcctttgctatgcacctctcaggcctctccttggcgttgaccctggaaagacctaccaccacctattttttcccatagtctgtacccagtgagttgaaggctgggtccccacccttccttttgatttcctgtcttccttctcgtggccccagctggttgctgtggagatgaggttcctggtcctccctgtcctggctggactgccccgcctcagatccaggatgcccttggcatcgctcccaccctcccccagcttttcctccctggtctgacaatgggcatgcaaaaaggggcagctgcaatctagcaggcctgcccacccccttcagttcaggtaatacagttgtgaatcttccagccgctggttagggccttgggcaccacaggcagcccctcacctaagccggggcctactcctcttacaacagcaagagagccctggggccccaggcctgttgagcttcttgtctcccagcacccgcttttgggaaaatgacttttcctcttcaagctgaaccactctgtccatattacacagaagccatatttgtacgggggggtgggagggagaggggctgttgtgctgtgtgtgtctgtccaggggtgggggggtgggggaagggagcagggaggggaccgtgtatctttataatctttctaactctcctgtgctaatctcagaggggtcaccctcaatatatctggattatccgtgtcattcagctgcctcctttctggtcctcttgctgctgctgggatgtgtgtatgtgagggtcttcttcccataccccttgcacctggtgcctggtgcctcaaaaggtggtgtgtcccttgccaggccactctcaagaatatctatgtacagcaacaatataactctacaagggagagaagtgtgttcacttccttttgctaagcccttcctttccagagagtgtcttggggggcatctgactgcttccccccaccctctgccaggcattgctggagaatgttaagacggcgatggagatgccatcaaccccaccctgcagagcatcaccagacaccaccagaccaaattcactttccagccccttcatgttgaacctgaaacttgagctagtgtcttgggagaaaagggggaaatctctacgaggtacccatccttctgcaccttaggtctgaggtgcttggccccctaggaagccctacatgaatgggacagaaggtccttaacaacactggagatgaagcagccgatgctgttttggacaaatgaaacagcgtcccctaaccagccctttctatctcattgttctgacttggacacgccatggctcaccgctcccaaagtccccactatgtctccctagctgaggaaataaaagcagagaggggtgatgaaacagtgacgatcctggggaaacagctgaggaggggagggagggggaagaagccactaaaaaagtgaaatgtgcttgggagaatcggcctgcctgcagggtagatgccctttctctctgctggccagctctgcccctcagtgagaaactttacatattgctaagatgcctggccaatgaaacagttccagagactttatgtcccccagtagaaatatgaatagaaatcaccctgtgggcaatggtcccattttaaaatatgctgtcccattgtcccctagagcctactttaacttgtcagaccatgtattccacttcatatgcaagaggcatgcactgagcccataggtggctaggcaaacacccaatagctccctgaaatggcttcattatgcagcctcgacagccaccccaaccctcccactctcacactgaaacacccagacctagagatagctagacacacccagacacccgccaagcccctcacatacagatatgtgcacaatgatacacagcaaacgtacacagagttcagtacacacaaagagctcacgcccacgtgcacacacccctcagttgggacagagttgaccaccaccacctttctcccaaacacatggcttttgaactgcctttccttggatccagttcaaggggatggaggagcagtgagagtcagccgcccttccactccaatttcccagcacctcccttatctctgcctcacaagtcacccagcccccctctcttccttccttgtgcttgaagaatctctccttgctggaaagccccctgttttctcaatctccctttccacttcggtaaaatctctacttgctggaaagccccctgttttctcaatctccctttccacttcggtaaaatgcccactttctggtccccacctttttcctgagtgtagtcccaaccagccaaatccaacctcaaaacaggaagacccaaggccagtgacccccataggcctgaggcttgtgcaggcagtgggcgtggggtaaggcttcctgatgccccctgtccctgcccagaacctgatggccctcattagtccttggctcttatcttggaagcacaggcgctgacagccgtcccagcccttctgtctgcgggcctgaaccaaacggtg

SEQ ID NO: 2594 - protein, 398 aa, Homo sapiens; identical to SEQ ID NO: 2592

SEQ ID NO: 2595 - DNA, 566 bp, Homo sapiens
ctatttaatccccgcgactgcagcagcgccggctccctcccggtccccacctcggccccgggctccgaagcggctcgggggcgccctttcggtcaacatcgtagtccaccccctccccatccccagcccccggggattcaggctcgccagcgcccagccagggagccggccgggaagcgcgatgggggccccagccgcctcgctcctgctcctgctcctgctgttcgcctgctgctgggcgcccggcggggccaacctctcccaggacgaaaaaagatgcctgtgaaatgcaggaggaggggagggatgaaagaaatatgagcaaggagaaaagcaactgaggaggatgcagaaaaaagcacagatgaaagaagaagcagcagagtgaagactaagcccatgctgttggacagaatacatgctctgcctgattaacaatatacatagcacagtgccaagtgtggctgaatgaattaccagagccaattaaatgtaccgagagcccactaggggctaagtgctaacgacacaacggtgaataacttaaggctcctgctcttaaccag

SEQ ID NO: 2596 - protein, 34 aa, Homo sapiens
MGAPAASLLLLLLLFACCWAPGGANLSQDEKRCL

SEQ ID NO: 2597 - DNA, 2567 bp, Homo sapiens
atttaatccccgcgactgcagcagcgccggctccctcccggtccccacctcggccccgggctccgaagcggctcgggggcgccctttcggtcaacatcgtagtccaccccctccccatccccagcccccggggattcaggctcgccagcgcccagccagggagccggccgggaagcgcgatgggggccccagccgcctcgctcctgctcctgctcctgctgttcgcctgctgctgggcgcccggcggggccaacctctcccaggacggctactggcaggagcaggatttggagctgggaactctggctccactcgacgaggccatcagctccacagtctggagcagccctgacatgctggccagtcaagacagccagccctggacatctgatgaaacagtggtggctggtggcaccgtggtgctcaagtgccaagtgaaagatcacgaggactcatccctgcaatggtctaaccctgctcagcagactctctactttggggagaagagagcccttcgagataatcgaattcagctggttacctctacgccccacgagctcagcatcagcatcagcaatgtggccctggcagacgagggcgagtacacctgctcaatcttcactatgcctgtgcgaactgccaagtccctcgtcactgtgctaggaattccacagaagcccatcatcactggttataaatcttcattacgggaaaaagacacagccaccctaaactgtcagtcttctgggagcaagcctgcagcccggctcacctggagaaagggtgaccaagaactccacggagaaccaacccgcatacaggaagatcccaatggtaaaaccttcactgtcagcagctcggtgacattccaggttacccgggaggatgatggggcgagcatcgtgtgctctgtgaaccatgaatctctaaagggagctgacagatccacctctcaacgcattgaagttttatacacaccaactgcgatgattaggccagaccctccccatcctcgtgagggccagaagctgttgctacactgtgagggtcgcggcaatccagtcccccagcagtacctatgggagaaggagggcagtgtgccacccctgaagatgacccaggagagtgccctgatcttccctttcctcaacaagagtgacagtggcacctacggctgcacagccaccagcaacatgggcagctacaaggcctactacaccctcaatgttaatgaccccagtccggtgccctcctcctccagcacctaccacgccatcatcggtgggatcgtggctttcattgtcttcctgctgctcatcatgctcatcttccttggccactacttgatccggcacaaaggaacctacctgacacatgaggcaaaaggctccgacgatgctccagacgcggacacggccatcatcaatgcagaaggcgggcagtcaggaggggacgacaagaaggaatatttcatctagaggcgcctgcccacttcctgcgccccccaggggccctgtggggactgctggggccgtcaccaacccggacttgtacagagcaaccgcagggccgcccctcccgcttgctccccagcccacccacccccctgtacagaatgtctgctttgggtgcggttttgtactcggtttggaatggggagggaggagggcggggggaggggagggttgccctcagccctttccgtggcttctctgcatttgggttattattatttttgtaacaatcccaaatcaaatctgtctccaggctggagaggcaggagccctggggtgagaaaagcaaaaaacaaacaaaaaacaaaaccctggagtgttaggaggagagtgaaggtagaggggtgaggaagggtaaggggcagggctggtttcagctgggggctctcaccagccctcctttcagcctctacaacagagcagcttcccagacttctccaggaacccagaaacgggatggttgtcggcaaaggttgggagtggcttttcctctggtagccacacacctgagcactacggacagggaggcaggtgccaccttgacacctctcttccatagcaatgggaaagtgatgagtgcgggagtcctgaggagatgtggcctgcagacaacatgcagccatgcagggacccaggactgtaacctggggaggacgcgggtccctgcaaggaagagtagatttggagaggaaggatggaggtggactctcaccccattccccccggaaatgaacaaagccgggccctttccataggaactgcccttggagatagcagagtgtggctgcccctccttgctccagcagcagtgggagaggcactgctctggggcctgaactgcctctgcttccccccctgaggggcccctcactcttacccaagactctggattgttgcacggcaaccactcctcccatggcattgctcagcaactacttctcccttcccggccaccctgtgcccccttcctggtcccaacgccagcccttcatccttcctccctcagcagccaggcagacataacaacaaaactactaaaaggagcttcactgc

SEQ ID NO: 2598 - protein, 432 aa, Homo sapiens; identical to SEQ ID NO: 131

SEQ ID NO: 2599 - DNA, 5000 bp, Homo sapiens
agctccctggcctatgctctcctgagctcttctgatttgtctgcctcgacagcccccagcagtacctatgggagaaggagggcagtgtgccacccctgaagatgacccaggagagtgccctgatcttccctttcctcaacaagagtgacagtggcacctacggctgcacagccaccagcaacatgggcagctacaaggcctactacaccctcaatgttaatggtaagccctcctcagttctcttcctccagaatctcctttctctgtccatcttattcccttttttaaaatgcttcctgataacatccccaaactgtgacggggagtggagtaaaggaaaaccagcccaccactggggtccctgagggcttaggtcccaggtccactctagaatgtgtaatggccgcttagtgaaaaaacattagaagggtgggctctcatctgcctttctttggtagtggtggcctgggtgacaccatcttccatcccctgcacttgtctgacaacaagaacaataattctgtgtgcagaggccccaaagcctctcaagtgcaggcgcaggtgcatttccttctctaactggctcttctcagagttgcttctcctaagactaggtattgggtgcatgcaactgctgtcatttttttttctgcccaccttaagcacagtgtactgggtctggacagaaaatagagagaagcttgtactatgccaagagacagaatcttttctcagatgccatatcttctagaaggaccaggtgatgctccttctctgaagttcttctcaaagctgtgaccacaaaacccagcttcaggagtagtgacagggtgacacagaggcccctttatggagagttgacgggcgatttttttgaagatcccaatggctgtgggtcccgccagaaagtcttatcttttctcagaataggggaaatgcattgtcggggaaacatcagaggctcccttacttgagacactcattaaaacagttgaggggataagagccaggcctcccagcgataagaggtctgagttcttgggatcagaatgtctggatgggtgattcccactccaggggcagacctcagcatgtgggagctgcctcagcacaacaaggctattgtaggatgccaagagcaaggacaatgcactgagctccggtctctgcccccagatctctccagaccaatctgatgatgattggcagtgagagaaagttcttgtgcccttgtggttggtatcttgctgatctcccctctgctttgtgctcaacagccaggcagagggagtcctgttggactgcgtctgtttccagtgctgacgcctggtggtagaaggagctactgcatcttcttccaggaatatccttaagtgggcgggacacgccatcatcggtgggatcgtggctttcattgtcttcctgctgctcatcatgctcatcttccttggccactacttgatccggcacaaaggaacctacctgacacatgaggcaaaaggctccgacgatgctccagacgcggacacggccatcatcaatgcagaaggcgggcagtcaggaggggacgacaagaaggaatatttcatctagaggcgcctgcccacttcctgcgccccccaggggccctgtggggactgctggggccgtcaccaacccggacttgtacagagcaaccgcagggccgcccctcccgcttgctccccagcccacccacccccctgtacagaatgtctgctttgggtgcggttttgtactcggtttggaatggggagggaggagggcggggggaggggagggttgccctcagccctttccgtggcttctctgcatttgggttattattatttttgtaacaatcccaaatcaaatctgtctccaggctggagaggcaggagccctggggtgagaaaagcaaaaaacaaacaaaaaacaaaaccctggagtgttaggaggagagtgaaggtagaggggtgaggaagggtaaggggcagggctggtttcagctgggggctctcaccagccctcctttcagcctctacaacagagcagcttcccagacttctccaggaacccagaaacgggatggttgtcggcaaaggttgggagtggcttttcctctggtagccacacacctgagcactacggacagggaggcaggtgccaccttgacacctctcttccatagcaatgggaaagtgatgagtgcgggagtcctgaggagatgtggcctgcagacaacatgcagccatgcagggacccaggactgtaacctggggaggacgcgggtccctgggatgttgttccatgctggtatttcctctgccacccccaatgcccatcggtcttggagaaaggagtccccgggtgtgtgtttgcccagctgtccattctatctctcccttaaacacagagcattcagcccttccctggatttccctcctctgagccatggagtcagtgccacagcctttgctatgcacctctcaggcctctccttggcgttgaccctggaaagacctaccaccacctattttttcccatagtctgtacccagtgagttgaaggctgggtccccacccttccttttgatttcctgtcttccttctcgtggccccagctggttgctgtggagatgaggttcctggtcctccctgtcctggctggactgccccgcctcagatccaggatgcccttggcatcgctcccaccctcccccagcttttcctccctggtctgacaatgggcatgcaaaaaggggcagctgcaatctagcaggcctgcccacccccttcagttcaggtaatacagttgtgaatcttccagccgctggttagggccttgggcaccacaggcagcccctcacctaagccggggcctactcctcttacaacagcaagagagccctggggccccaggcctgttgagcttcttgtctcccagcacccgcttttgggaaaatgacttttcctcttcaagctgaaccactctgtccatattacacagaagccatatttgtacgggggggtgggagggagaggggctgttgtgctgtgtgtgtctgtccaggggtgggggggtgggggaagggagcagggaggggaccgtgtatctttataatctttctaactctcctgtgctaatctcagaggggtcaccctcaatatatctggattatccgtgtcattcagctgcctcctttctggtcctcttgctgctgctgggatgtgtgtatgtgagggtcttcttcccataccccttgcacctggtgcctggtgcctcaaaaggtggtgtgtcccttgccaggccactctcaagaatatctatgtacagcaacaatataactctacaagggagagaagtgtgttcacttccttttgctaagcccttcctttccagagagtgtcttggggggcatctgactgcttccccccaccctctgccaggcattgctggagaatgttaagacggcgatggagatgccatcaaccccaccctgcagagcatcaccagacaccaccagaccaaattcactttccagccccttcatgttgaacctgaaacttgagctagtgtcttgggagaaaagggggaaatctctacgaggtacccatccttctgcaccttaggtctgaggtgcttggccccctaggaagccctacatgaatgggacagaaggtccttaacaacactggagatgaagcagccgatgctgttttggacaaatgaaacagcgtcccctaaccagccctttctatctcattgttctgacttggacacgccatggctcaccgctcccaaagtccccactatgtctccctagctgaggaaataaaagcagagaggggtgatgaaacagtgacgatcctggggaaacagctgaggaggggagggagggggaagaagccactaaaaaagtgaaatgtgcttgggagaatcggcctgcctgcagggtagatgccctttctctctgctggccagctctgcccctcagtgagaaactttacatattgctaagatgcctggccaatgaaacagttccagagactttatgtcccccagtagaaatatgaatagaaatcaccctgtgggcaatggtcccattttaaaatatgctgtcccattgtcccctagagcctactttaacttgtcagaccatgtattccacttcatatgcaagaggcatgcactgagcccataggtggctaggcaaacacccaatagctccctgaaatggcttcattatgcagcctcgacagccaccccaaccctcccactctcacactgaaacacccagacctagagatagctagacacacccagacacccgccaagcccctcacatacagatatgtgcacaatgatacacagcaaacgtacacagagttcagtacacacaaagagctcacgcccacgtgcacacacccctcagttgggacagagttgaccaccaccacctttctcccaaacacatggcttttgaactgcctttccttggatccagttcaaggggatggaggagcagtgagagtcagccgcccttccactccaatttcccagcacctcccttatctctgcctcacaagtcacccagcccccctctcttccttccttgtgcttgaagaatctctccttgctggaaagccccctgttttctcaatctccctttccacttcggtaaaatctctacttgctggaaagccccctgttttctcaatctccctttccacttcggtaaaatgcccactttctggtccccacctttttcctgagtgtagtcccaaccagccaaatccaacctcaaaacaggaagacccaaggccagtgacccccataggcctgaggcttgtgcaggcagtgggcgtggggtaaggcttcctgatgccccctgtccctgcccagaacctgatggccctcattagtccttggctcttatcttggaagcacaggcgctgacagccgtcccagcccttctgtctgcgggcctgaaccaaacggtg

SEQ ID NO: 2600 - protein, 114 aa, Homo sapiens
MSAGVLRRCGLQTTCSHAGTQDCNLGRTRVPGMLFHAGISSATPNAHRSWRKESPGVCLPSCPFYLSLKHRAFSPSLDFPPLSHGVSATAFAMHLSGLSLALTLERPTTTYFFP

SEQ ID NO: 2601 - DNA, 787 bp, Homo sapiens
tccctggcctatgctctcctgagctcttctgatttgtctgcctcgacagcccccagcagtacctatgggagaaggagggcagtgtgccacccctgaagatgacccaggagagtgccctgatcttccctttcctcaacaagagtgacagtggcacctacggctgcacagccaccagcaacatgggcagctacaaggcctactacaccctcaatgttaatgaccccagtccggtgccctcctcctccagcacctaccacgccatcatcggtgggatcgtggctttcattgtcttcctgctgctcatcatgctcatcttccttggccactacttgatccggcacaaaggaacctacctgacacatgaggcaaaaggctccgacgatgctccagacgcggacacggccatcatcaatgcagaaggcgggcagtcaggaggggacgacaagaaggaatatttcatctagaggcgcctgcccacttcctgcgccccccaggggccctgtggggactgctggggccgtcaccaacccggacttgtacagagcaaccgcagggccgcccctcccgcttgctccccagcccacccacccccctgtacagaatgtctgctttgggtgcggttttgtactcggtttggaatggggagggaggagggcggggggaggggagggttgccctcagccctttccgtggcttctctgcatttgggttattattatttttgtaacaatcccaaatcaaatctgtctccaggctggagaggcaggagccctggggtgagaaaagc

SEQ ID NO: 2602 - protein, 121 aa, Homo sapiens
MTQESALIFPFLNKSDSGTYGCTATSNMGSYKAYYTLNVNDPSPVPSSSSTYHAIIGGIVAFIVFLLLIMLIFLGHYLIRHKGTYLTHEAKGSDDAPDADTAIINAEGGQSGGDDKKEYFI

SEQ ID NO: 2603 - DNA, 532 bp, Homo sapiens
acgccatcatcggtgggatcgtggctttcattgtcttcctgctgctcatcatgctcatcttccttggccactacttgatccggcacaaaggaacctacctgacacatgaggcaaaaggctccgacgatgctccagacgcggacacggccatcatcaatgcagaaggcgggcagtcaggaggggacgacaagaaggaatatttcatctagaggcgcctgcccacttcctgcgccccccaggggccctgtggggactgctggggccgtcaccaacccggacttgtacagagcaaccgcagggccgcccctcccgcttgctccccagcccacccacccccctgtacagaatgtctgctttgggtgcggttttgtactcggtttggaatggggagggaggagggcggggggaggggagggttgccctcagccctttccgtggcttctctgcatttgggttattattatttttgtaacaatcccaaatcaaatctgtctccaggctggagaggcaggagccctggggtgagaaaagc

SEQ ID NO: 2604 - protein, 52 aa, Homo sapiens
MLIFLGHYLIRHKGTYLTHEAKGSDDAPDADTAIINAEGGQSGGDDKKEYFI

SEQ ID NO: 2605 - DNA, 1298 bp, Homo sapiens
acgccatcatcggtgggatcgtggctttcattgtcttcctgctgctcatcatgctcatcttccttggccactacttgatccggcacaaaggaacctacctgacacatgaggcaaaaggctccgacgatgctccagacgcggacacggccatcatcaatgcagaaggcgggcagtcaggaggggacgacaagaaggaatatttcatctagaggcgcctgcccacttcctgcgccccccaggggccctgtggggactgctggggccgtcaccaacccggacttgtacagagcaaccgcagggccgcccctcccgcttgctccccagcccacccacccccctgtacagaatgtctgctttgggtgcggttttgtactcggtttggaatggggagggaggagggcggggggaggggagggttgccctcagccctttccgtggcttctctgcatttgggttattattatttttgtaacaatcccaaatcaaatctgtctccaggctggagaggcaggagccctggggtgagaaaagcaaaaaacaaacaaaaaacaaaaccctggagtgttaggaggagagtgaaggtagaggggtgaggaagggtaaggggcagggctggtttcagctgggggctctcaccagccctcctttcagcctctacaacagagcagcttcccagacttctccaggaacccagaaacgggatggttgtcggcaaaggttgggagtggcttttcctctggtagccacacacctgagcactacggacagggaggcaggtgccaccttgacacctctcttccatagcaatgggaaagtgatgagtgcgggagtcctgaggagatgtggcctgcagacaacatgcagccatgcagggacccaggactgtaacctggggaggacgcgggtccctgcaaggaagagtagatttggagaggaaggatggaggtggactctcaccccattccccccggaaatgaacaaagccgggccctttccataggaactgcccttggagatagcagagtgtggctgcccctccttgctccagcagcagtgggagaggcactgctctggggcctgaactgcctctgcttccccccctgaggggcccctcactcttacccaagactctggattgttgcacggcaaccactcctcccatggcattgctcagcaactacttctcccttcccggccaccctgtgcccccttcctggtcccaacgccagcccttcatccttcctccctcagcagccaggcagacataacaacaaaactactaaaaggagcttcactgc

SEQ ID NO: 2606 - protein, 52 aa, Homo sapiens; identical to SEQ ID NO: 2604

SEQ ID NO: 2607 - DNA, 4244 bp, Homo sapiens
acgccatcatcggtgggatcgtggctttcattgtcttcctgctgctcatcatgctcatcttccttggccactacttgatccggcacaaaggaacctacctgacacatgaggcaaaaggctccgacgatgctccagacgcggacacggccatcatcaatgcagaaggcgggcagtcaggaggggacgacaagaaggaatatttcatctagaggcgcctgcccacttcctgcgccccccaggggccctgtggggactgctggggccgtcaccaacccggacttgtacagagcaaccgcagggccgcccctcccgcttgctccccagcccacccacccccctgtacagaatgtctgctttgggtgcggttttgtactcggtttggaatggggagggaggagggcggggggaggggagggttgccctcagccctttccgtggcttctctgcatttgggttattattatttttgtaacaatcccaaatcaaatctgtctccaggctggagaggcaggagccctggggtgagaaaagcaaaaaacaaacaaaaaacaaaaccctggagtgttaggaggagagtgaaggtagaggggtgaggaagggtaaggggcagggctggtttcagctgggggctctcaccagccctcctttcagcctctacaacagagcagcttcccagacttctccaggaacccagaaacgggatggttgtcggcaaaggttgggagtggcttttcctctggtagccacacacctgagcactacggacagggaggcaggtgccaccttgacacctctcttccatagcaatgggaaagtgatgagtgcgggagtcctgaggagatgtggcctgcagacaacatgcagccatgcagggacccaggactgtaacctggggaggacgcgggtccctgcaaggaagagtagatttggagaggaaggatggaggtggactctcaccccattccccccggaaatgaacaaagccgggccctttccataggaactgcccttggagatagcagagtgtggctgcccctccttgctccagcagcagtgggagaggcactgctctggggcctgaactgcctctgcttccccccctgaggggcccctcactcttacccaagactctggattgttgcacggcaaccactcctcccatggcattgctcagcaactacttctcccttcccggccaccctgtgcccccttcctggtcccaacgccagcccttcatccttcctccctcagcagccaggcagacataacaacaaaactactaaaaggagcttcactgcagtgagctgtttcctgcccaaactaagggaataatgtgaactgtgtgcatgtgtgtggtgtgtatgcatgtgtgcatgtgtgtgtgtgtgtgtgcatgtgtgtgagtgagtgagaggcagagcgaggaactgaggaggagggctaagagccaggggtcctgggcaagtggacagggctgtgggacatgttggggaggctttgggaatggggtattcctagtcagggttcacacctcacctgggatgttgttccatgctggtatttcctctgccacccccaatgcccatcggtcttggagaaaggagtccccgggtgtgtgtttgcccagctgtccattctatctctcccttaaacacagagcattcagcccttccctggatttccctcctctgagccatggagtcagtgccacagcctttgctatgcacctctcaggcctctccttggcgttgaccctggaaagacctaccaccacctattttttcccatagtctgtacccagtgagttgaaggctgggtccccacccttccttttgatttcctgtcttccttctcgtggccccagctggttgctgtggagatgaggttcctggtcctccctgtcctggctggactgccccgcctcagatccaggatgcccttggcatcgctcccaccctcccccagcttttcctccctggtctgacaatgggcatgcaaaaaggggcagctgcaatctagcaggcctgcccacccccttcagttcaggtaatacagttgtgaatcttccagccgctggttagggccttgggcaccacaggcagcccctcacctaagccggggcctactcctcttacaacagcaagagagccctggggccccaggcctgttgagcttcttgtctcccagcacccgcttttgggaaaatgacttttcctcttcaagctgaaccactctgtccatattacacagaagccatatttgtacgggggggtgggagggagaggggctgttgtgctgtgtgtgtctgtccaggggtgggggggtgggggaagggagcagggaggggaccgtgtatctttataatctttctaactctcctgtgctaatctcagaggggtcaccctcaatatatctggattatccgtgtcattcagctgcctcctttctggtcctcttgctgctgctgggatgtgtgtatgtgagggtcttcttcccataccccttgcacctggtgcctggtgcctcaaaaggtggtgtgtcccttgccaggccactctcaagaatatctatgtacagcaacaatataactctacaagggagagaagtgtgttcacttccttttgctaagcccttcctttccagagagtgtcttggggggcatctgactgcttccccccaccctctgccaggcattgctggagaatgttaagacggcgatggagatgccatcaaccccaccctgcagagcatcaccagacaccaccagaccaaattcactttccagccccttcatgttgaacctgaaacttgagctagtgtcttgggagaaaagggggaaatctctacgaggtacccatccttctgcaccttaggtctgaggtgcttggccccctaggaagccctacatgaatgggacagaaggtccttaacaacactggagatgaagcagccgatgctgttttggacaaatgaaacagcgtcccctaaccagccctttctatctcattgttctgacttggacacgccatggctcaccgctcccaaagtccccactatgtctccctagctgaggaaataaaagcagagaggggtgatgaaacagtgacgatcctggggaaacagctgaggaggggagggagggggaagaagccactaaaaaagtgaaatgtgcttgggagaatcggcctgcctgcagggtagatgccctttctctctgctggccagctctgcccctcagtgagaaactttacatattgctaagatgcctggccaatgaaacagttccagagactttatgtcccccagtagaaatatgaatagaaatcaccctgtgggcaatggtcccattttaaaatatgctgtcccattgtcccctagagcctactttaacttgtcagaccatgtattccacttcatatgcaagaggcatgcactgagcccataggtggctaggcaaacacccaatagctccctgaaatggcttcattatgcagcctcgacagccaccccaaccctcccactctcacactgaaacacccagacctagagatagctagacacacccagacacccgccaagcccctcacatacagatatgtgcacaatgatacacagcaaacgtacacagagttcagtacacacaaagagctcacgcccacgtgcacacacccctcagttgggacagagttgaccaccaccacctttctcccaaacacatggcttttgaactgcctttccttggatccagttcaaggggatggaggagcagtgagagtcagccgcccttccactccaatttcccagcacctcccttatctctgcctcacaagtcacccagcccccctctcttccttccttgtgcttgaagaatctctccttgctggaaagccccctgttttctcaatctccctttccacttcggtaaaatctctacttgctggaaagccccctgttttctcaatctccctttccacttcggtaaaatgcccactttctggtccccacctttttcctgagtgtagtcccaaccagccaaatccaacctcaaaacaggaagacccaaggccagtgacccccataggcctgaggcttgtgcaggcagtgggcgtggggtaaggcttcctgatgccccctgtccctgcccagaacctgatggccctcattagtccttggctcttatcttggaagcacaggcgctgacagccgtcccagcccttctgtctgcgggcctgaaccaaacggtg

SEQ ID NO: 2608 - protein, 52 aa, Homo sapiens; identical to SEQ ID NO: 2604

SEQ ID NO: 2609 - DNA, 499 bp, Homo sapiens
tcttcctgctgctcatcatgctcatcttccttggccactacttgatccggcacaaaggaacctacctgacacatgaggcaaaaggctccgacgatgctccagacgcggacacggccatcatcaatgcagaaggcgggcagtcaggaggggacgacaagaaggaatatttcatctagaggcgcctgcccacttcctgcgccccccaggggccctgtggggactgctggggccgtcaccaacccggacttgtacagagcaaccgcagggccgcccctcccgcttgctccccagcccacccacccccctgtacagaatgtctgctttgggtgcggttttgtactcggtttggaatggggagggaggagggcggggggaggggagggttgccctcagccctttccgtggcttctctgcatttgggttattattatttttgtaacaatcccaaatcaaatctgtctccaggctggagaggcaggagccctggggtgagaaaagc

SEQ ID NO: 2610 - protein, 52 aa, Homo sapiens; identical to SEQ ID NO: 2604

SEQ ID NO: 2611 - DNA, 654 bp, Homo sapiens
tcctgggtccctgcatggctgcatgttgtctgcaggccacatctcctcaggactcccgcactcatcactttcccattgctatggaagagaggtgtcaaggtggcacctgcctccctgtccgtagtgctcaggtgtgtggctaccagaggaaaagccactcccaacctttgccgacaaccatcccgtttctgggttcctggagaagtctgggaagctgctctgttgtagaggctgaaaggagggctggtgagagcccccagctgaaaccagccctgccccttacccttcctcacccctctaccttcattgtcgtcccctcctgactgcccgccttctgcattgatgatggccgtgtccgcgtctggagcatcgtcggagccttttgcctcatgtgtcaggtaggttcctgtgtagagacagaggcttctcctctcaggagcagcttcccaacctctgagtccaccctgcccactttctcacccacccactcacacactgctcaagtaatttttctcttgccaatagctctcttctactccaccttacctaattcgcattttgcttccaacatgcctcacctgaccacacccttcatgaataatgaatcctacccctaagtagaatctcatctataatacaaagcaagaaagagaa

SEQ ID NO: 2612 - protein, 102 aa, Homo sapiens
MAACCLQATSPQDSRTHHFPIAMEERCQGGTCLPVRSAQVCGYQRKSHSQPLPTTIPFLGSWRSLGSCSVVEAERRAGESPQLKPALPLTLPHPSTFIVVPS

SEQ ID NO: 2613 - DNA, 2587 bp, Homo sapiens
cacaggaacctacctgacacatgaggcaaaaggctccgacgatgctccagacgcggacacggccatcatcaatgcagaaggcgggcagtcaggaggggacgacaagaaggaatatttcatctagaggcgcctgcccacttcctgcgccccccaggggccctgtggggactgctggggccgtcaccaacccggacttgtacagagcaaccgcagggccgcccctcccgcttgctccccagcccacccacccccctgtacagaatgtctgctttgggtgcggttttgtactcggtttggaatggggagggaggagggcggggggaggggagggttgccctcagccctttccgtggcttctctgcatttgggttattattatttttgtaacaatcccaaatcaaatctgtctccaggctggagaggcaggagccctggggtgagaaaagcaaaaaacaaacaaaaaacaaaaccctggagtgttaggaggagagtgaaggtagaggggtgaggaagggtaaggggcagggctggtttcagctgggggctctcaccagccctcctttcagcctctacaacagagcagcttcccagacttctccaggaacccagaaacgggatggttgtcggcaaaggttgggagtggcttttcctctggtagccacacacctgagcactacggacagggaggggaccgtgtatctttataatctttctaactctcctgtgctaatctcagaggggtcaccctcaatatatctggattatccgtgtcattcagctgcctcctttctggtcctcttgctgctgctgggatgtgtgtatgtgagggtcttcttcccataccccttgcacctggtgcctggtgcctcaaaaggtggtgtgtcccttgccaggccactctcaagaatatctatgtacagcaacaatataactctacaagggagagaagtgtgttcacttccttttgctaagcccttcctttccagagagtgtcttggggggcatctgactgcttccccccaccctctgccaggcattgctggagaatgttaagacggcgatggagatgccatcaaccccaccctgcagagcatcaccagacaccaccagaccaaattcactttccagccccttcatgttgaacctgaaacttgagctagtgtcttgggagaaaagggggaaatctctacgaggtacccatccttctgcaccttaggtctgaggtgcttggccccctaggaagccctacatgaatgggacagaaggtccttaacaacactggagatgaagcagccgatgctgttttggacaaatgaaacagcgtcccctaaccagccctttctatctcattgttctgacttggacacgccatggctcaccgctcccaaagtccccactatgtctccctagctgaggaaataaaagcagagaggggtgatgaaacagtgacgatcctggggaaacagctgaggaggggagggagggggaagaagccactaaaaaagtgaaatgtgcttgggagaatcggcctgcctgcagggtagatgccctttctctctgctggccagctctgcccctcagtgagaaactttacatattgctaagatgcctggccaatgaaacagttccagagactttatgtcccccagtagaaatatgaatagaaatcaccctgtgggcaatggtcccattttaaaatatgctgtcccattgtcccctagagcctactttaacttgtcagaccatgtattccacttcatatgcaagaggcatgcactgagcccataggtggctaggcaaacacccaatagctccctgaaatggcttcattatgcagcctcgacagccaccccaaccctcccactctcacactgaaacacccagacctagagatagctagacacacccagacacccgccaagcccctcacatacagatatgtgcacaatgatacacagcaaacgtacacagagttcagtacacacaaagagctcacgcccacgtgcacacacccctcagttgggacagagttgaccaccaccacctttctcccaaacacatggcttttgaactgcctttccttggatccagttcaaggggatggaggagcagtgagagtcagccgcccttccactccaatttcccagcacctcccttatctctgcctcacaagtcacccagcccccctctcttccttccttgtgcttgaagaatctctccttgctggaaagccccctgttttctcaatctccctttccacttcggtaaaatctctacttgctggaaagccccctgttttctcaatctccctttccacttcggtaaaatgcccactttctggtccccacctttttcctgagtgtagtcccaaccagccaaatccaacctcaaaacaggaagacccaaggccagtgacccccataggcctgaggcttgtgcaggcagtgggcgtggggtaaggcttcctgatgccccctgtccctgcccagaacctgatggccctcattagtccttggctcttatcttggaagcacaggcgctgacagccgtcccagcccttctgtctgcgggcctgaaccaaacggtg

SEQ ID NO: 2614 - protein, 212 aa, Homo sapiens [sequence omitted]

SEQ ID NO: 2615 - DNA, 4095 bp, Homo sapiens
cacaggaacctacctgacacatgaggcaaaaggctccgacgatgctccagacgcggacacggccatcatcaatgcagaaggcgggcagtcaggaggggacgacaagaaggaatatttcatctagaggcgcctgcccacttcctgcgccccccaggggccctgtggggactgctggggccgtcaccaacccggacttgtacagagcaaccgcagggccgcccctcccgcttgctccccagcccacccacccccctgtacagaatgtctgctttgggtgcggttttgtactcggtttggaatggggagggaggagggcggggggaggggagggttgccctcagccctttccgtggcttctctgcatttgggttattattatttttgtaacaatcccaaatcaaatctgtctccaggctggagaggcaggagccctggggtgagaaaagcaaaaaacaaacaaaaaacaaaaccctggagtgttaggaggagagtgaaggtagaggggtgaggaagggtaaggggcagggctggtttcagctgggggctctcaccagccctcctttcagcctctacaacagagcagcttcccagacttctccaggaacccagaaacgggatggttgtcggcaaaggttgggagtggcttttcctctggtagccacacacctgagcactacggacagggaggcaggtgccaccttgacacctctcttccatagcaatgggaaagtgatgagtgcgggagtcctgaggagatgtggcctgcagacaacatgcagccatgcagggacccaggactgtaacctggggaggacgcgggtccctgcaaggaagagtagatttggagaggaaggatggaggtggactctcaccccattccccccggaaatgaacaaagccgggccctttccataggaactgcccttggagatagcagagtgtggctgcccctccttgctccagcagcagtgggagaggcactgctctggggcctgaactgcctctgcttccccccctgaggggcccctcactcttacccaagactctggattgttgcacggcaaccactcctcccatggcattgctcagcaactacttctcccttcccggccaccctgtgcccccttcctggtcccaacgccagcccttcatccttcctccctcagcagccaggcagacataacaacaaaactactaaaaggagcttcactgcagtgagctgtttcctgcccaaactaagggaataatgtgaactgtgtgcatgtgtgtggtgtgtatgcatgtgtgcatgtgtgtagccaggggtcctgggcaagtggacagggctgtgggacatgttggggaggctttgggaatggggtattcctagtcagggttcacacctcacctgggatgttgttccatgctggtatttcctctgccacccccaatgcccatcggtcttggagaaaggagtccccgggtgtgtgtttgcccagctgtccattctatctctcccttaaacacagagcattcagcccttccctggatttccctcctctgagccatggagtcagtgccacagcctttgctatgcacctctcaggcctctccttggcgttgaccctggaaagacctaccaccacctattttttcccatagtctgtacccagtgagttgaaggctgggtccccacccttccttttgatttcctgtcttccttctcgtggccccagctggttgctgtggagatgaggttcctggtcctccctgtcctggctggactgccccgcctcagatccaggatgcccttggcatcgctcccaccctcccccagcttttcctccctggtctgacaatgggcatgcaaaaaggggcagctgcaatctagcaggcctgcccacccccttcagttcaggtaatacagttgtgaatcttccagccgctggttagggccttgggcaccacaggcagcccctcacctaagccggggcctactcctcttacaacagcaagagagccctggggccccaggcctgttgagcttcttgtctcccagcacccgcttttgggaaaatgacttttcctcttcaagctgaaccactctgtccatattacacagaagccatatttgtacgggggggtgggagggagaggggctgttgtgctgtgtgtgtctgtccaggggtgggggggtgggggaagggagcagggaggggaccgtgtatctttataatctttctaactctcctgtgctaatctcagaggggtcaccctcaatatatctggattatccgtgtcattcagctgcctcctttctggtcctcttgctgctgctgggatgtgtgtatgtgagggtcttcttcccataccccttgcacctggtgcctggtgcctcaaaaggtggtgtgtcccttgccaggccactctcaagaatatctatgtacagcaacaatataactctacaagggagagaagtgtgttcacttccttttgctaagcccttcctttccagagagtgtcttggggggcatctgactgcttccccccaccctctgccaggcattgctggagaatgttaagacggcgatggagatgccatcaaccccaccctgcagagcatcaccagacaccaccagaccaaattcactttccagccccttcatgttgaacctgaaacttgagctagtgtcttgggagaaaagggggaaatctctacgaggtacccatccttctgcaccttaggtctgaggtgcttggccccctaggaagccctacatgaatgggacagaaggtccttaacaacactggagatgaagcagccgatgctgttttggacaaatgaaacagcgtcccctaaccagccctttctatctcattgttctgacttggacacgccatggctcaccgctcccaaagtccccactatgtctccctagctgaggaaataaaagcagagaggggtgatgaaacagtgacgatcctggggaaacagctgaggaggggagggagggggaagaagccactaaaaaagtgaaatgtgcttgggagaatcggcctgcctgcagggtagatgccctttctctctgctggccagctctgcccctcagtgagaaactttacatattgctaagatgcctggccaatgaaacagttccagagactttatgtcccccagtagaaatatgaatagaaatcaccctgtgggcaatggtcccattttaaaatatgctgtcccattgtcccctagagcctactttaacttgtcagaccatgtattccacttcatatgcaagaggcatgcactgagcccataggtggctaggcaaacacccaatagctccctgaaatggcttcattatgcagcctcgacagccaccccaaccctcccactctcacactgaaacacccagacctagagatagctagacacacccagacacccgccaagcccctcacatacagatatgtgcacaatgatacacagcaaacgtacacagagttcagtacacacaaagagctcacgcccacgtgcacacacccctcagttgggacagagttgaccaccaccacctttctcccaaacacatggcttttgaactgcctttccttggatccagttcaaggggatggaggagcagtgagagtcagccgcccttccactccaatttcccagcacctcccttatctctgcctcacaagtcacccagcccccctctcttccttccttgtgcttgaagaatctctccttgctggaaagccccctgttttctcaatctccctttccacttcggtaaaatctctacttgctggaaagccccctgttttctcaatctccctttccacttcggtaaaatgcccactttctggtccccacctttttcctgagtgtagtcccaaccagccaaatccaacctcaaaacaggaagacccaaggccagtgacccccataggcctgaggcttgtgcaggcagtgggcgtggggtaaggcttcctgatgccccctgtccctgcccagaacctgatggccctcattagtccttggctcttatcttggaagcacaggcgctgacagccgtcccagcccttctgtctgcgggcctgaaccaaacggtg

SEQ ID NO: 2616 - protein, 35 aa, Homo sapiens
MCVVCMHVCMCVARGPGQVDRAVGHVGEALGMGYS

SEQ ID NO: 2617 - DNA, 2418 bp, Homo sapiens
ggccttgggcaccacaggcagcccctcacctaagccggggcctactcctcttacaacagcaagagagccctggggccccaggcctgttgagcttcttgtctcccagcacccgcttttgggaaaatgacttttcctcttcaagctgaaccactctgtccatattacacagaagccatatttgtacgggggggtgggagggagaggggctgttgtgctgtgtgtgtctgtccaggggtgggggggtgggggaagggagcagggaggggaccgtgtatctttataatctttctaactctcctgtgctaatctcagaggggtcaccctcaatatatctggattatccgtgtcattcagctgcctcctttctggtcctcttgctgctgctgggatgtgtgtatgtgagggtcttcttcccataccccttgcacctggtgcctggtgcctcaaaaggtggtgtgtcccttgccaggccactctcaagaatatctatgtacagcaacaatataactctacaagggagagaagtgtgttcacttccttttgctaagcccttcctttccagagagtgtcttggggggcatctgactgcttccccccaccctctgccaggcattgctggagaatgttaagacggcgatggagatgccatcaaccccaccctgcagagcatcaacccagacacccgccaagcccctcacatacagatatgtgcacaatgatacacagcaaacgtacacagagttcagtacacacaaagagctcacgcccacgtgcacacacccctcagttgggacagagttgaccaccaccacctttctcccaaacacatggcttttgaactgcctttccttggatccagttcaaggggatggaggagcagtgagagtcagccgcccttccactccaatttcccagcacctcccttatctctgcctcacaagtcacccagcccccctctcttccttccttgtgcttgaagaatctctccttgctggaaagccccctgttttctcaatctccctttccacttcggtaaaatctctacttgctggaaagccccctgttttctcaatctccctttccacttcggtaaaatgcccactttctggtccccacctttttcctgagtgtagtcccaaccagccaaatccaacctcaaaacaggaagacccaaggccagtgacccccataggcctgaggcttgtgcaggcagtgggcgtggggtaaggcttcctgatgccccctgtccctgcccagaacctgatggccctcattagtccttggctcttatcttggaagcacaggcgctgacagccgtcccagcccttctgtctgcgggcctgaaccaaacggtgccatggggaactgtctgcacagggcggagctctccccctcaactgagaactcaagtcagctggacttcgaagatgtatggaattcttcctatggtgtgaatgattccttcccagatggagactatggtgccaacctggaagcagctgccccctgccactcctgtaacctgctggatgactctgcactgcccttcttcatcctcaccagtgtcctgggtatcctagctagcagcactgtcctcttcatgcttttcagacctctcttccgctggcagctctgccctggctggcctgtcctggcacagctggctgtgggcagtgccctcttcagcattgtggtgcccgtcttggccccagggctaggtagcactcgcagctctgccctgtgtagcctgggctactgtgtctggtatggctcagcctttgcccaggctttgctgctagggtgccatgcctccctgggccacagactgggtgcaggccaggtcccaggcctcaccctggggctcactgtgggaatttggggagtggctgccctactgacactgcctgtcaccctggccagtggtgcttctggtggactctgcaccctgatatacagcacggagctgaaggctttgcaggccacacacactgtagcctgtcttgccatctttgtcttgttgccattgggtttgtttggagccaaggggctgaagaaggcattgggtatggggccaggcccctggatgaatatcctgtgggcctggtttattttctggtggcctcatggggtggttctaggactggatttcctggtgaggtccaagctgttgctgttgtcaacatgtctggcccagcaggctctggacctgctgctgaacctggcagaagccctggcaattttgcactgtgtggctacgcccctgctcctcgccctattctgccaccaggccacccgcaccctcttgccctctctgcccctccctgaaggatggtcttctcatctggacacccttggaagcaaatcctagttctcttcccacctgtcaacctgaattaaagtctacactgcctttgtgaa

SEQ ID NO: 2618 - protein, 336 aa, Homo sapiens; identical to SEQ ID NO: 133

SEQ ID NO: 2619 - DNA, 1554 bp, Homo sapiens
gcacctcccttatctctgcctcacaagtcacccagcccccctctcttccttccttgtgcttgaagaatctctccttgctggaaagccccctgttttctcaatctccctttccacttcggtaaaatctctacttgctggaaagccccctgttttctcaatctccctttccacttcggtaaaatgcccactttctggtccccacctttttcctgagtgtagtcccaaccagccaaatccaacctcaaaacaggaagacccaaggccagtgacccccataggcctgaggcttgtgcaggcagtgggcgtggggtaaggcttcctgatgccccctgtccctgcccagaacctgatggccctcattagtccttggctcttatcttggaagcacaggcgctgacagccgtcccagcccttctgtctgcgggcctgaaccaaacggtgccatggggaactgtctgcacagggagactcttccggtgtaactctgatggcctcctctgggtatgtcctccaggcggagctctccccctcaactgagaactcaagtcagctggacttcgaagatgtatggaattcttcctatggtgtgaatgattccttcccagatggagactatggtgccaacctggaagcagctgccccctgccactcctgtaacctgctggatgactctgcactgcccttcttcatcctcaccagtgtcctgggtatcctagctagcagcactgtcctcttcatgcttttcagacctctcttccgctggcagctctgccctggctggcctgtcctggcacagctggctgtgggcagtgccctcttcagcattgtggtgcccgtcttggccccagggctaggtagcactcgcagctctgccctgtgtagcctgggctactgtgtctggtatggctcagcctttgcccaggctttgctgctagggtgccatgcctccctgggccacagactgggtgcaggccaggtcccaggcctcaccctggggctcactgtgggaatttggggagtggctgccctactgacactgcctgtcaccctggccagtggtgcttctggtggactctgcaccctgatatacagcacggagctgaaggctttgcaggccacacacactgtagcctgtcttgccatctttgtcttgttgccattgggtttgtttggagccaaggggctgaagaaggcattgggtatggggccaggcccctggatgaatatcctgtgggcctggtttattttctggtggcctcatggggtggttctaggactggatttcctggtgaggtccaagctgttgctgttgtcaacatgtctggcccagcaggctctggacctgctgctgaacctggcagaagccctggcaattttgcactgtgtggctacgcccctgctcctcgccctattctgccaccaggccacccgcaccctcttgccctctctgcccctccctgaaggatggtcttctcatctggacacccttggaagcaaatcctagttctcttcccacctgtcaacctgaattaaagtctacactgcctttgtgaa

SEQ ID NO: 2620 - protein, 338 aa, Homo sapiens
MASSGYVLQAELSPSTENSSQLDFEDVWNSSYGVNDSFPDGDYGANLEAAAPCHSCNLLDDSALPFFILTSVLGILASSTVLFMLFRPLFRWQLCPGWPVLAQLAVGSALFSIVVPVLAPGLGSTRSSALCSLGYCVWYGSAFAQALLLGCHASLGHRLGAGQVPGLTLGLTVGIWGVAALLTLPVTLASGASGGLCTLIYSTELKALQATHTVACLAIFVLLPLGLFGAKGLKKALGMGPGPWMNILWAWFIFWWPHGVVLGLDFLVRSKLLLLSTCLAQQALDLLLNLAEALAILHCVATPLLLALFCHQATRTLLPSLPLPEGWSSHLDTLGSKS

SEQ ID NO: 2621 - DNA, 645 bp, Homo sapiens
atgctgttggcttgtatctctgatcaggtaccaccactggaaggtacacagagctatcagcaaggtttgttcagtgttcatgctgttacccgctgtactccttgtgaggtgaagaagcccctgaagaacttcaagctttgcctgaaaaccttcacagacttcacctgcccttatagcctcttctacagcactcggtcccaggacaatgagctgcttctccttgtcaacaaaatgggaatgtatctgctgcacattggaaatgctgcagtcactttcaatggccccaccccctgccctcgatctccttatgcttcgacccatgtcaatgtgagctgggagtctgcctctggaattgctacactctgggcaaatgggaagctggtggggaggaagggtgtgtggaaggggtactctgtgggagaagaggctaagatcatcctgggacaagagcaggattcctttgggggacattttgatgaaaatcaatcctttgttggggtgatatgggatgtgtttttgtgggatcatgtgctccctccaaaggagatgtgtgactcctgttacagcggcagcctcctgaatcggcataccctgacttatgaagataatggctatgtggtaactaagcccaaggtgtgggcttaa

SEQ ID NO: 2622 - protein, 214 aa, Homo sapiens
MLLACISDQVPPLEGTQSYQQGLFSVHAVTRCTPCEVKKPLKNFKLCLKTFTDFTCPYSLFYSTRSQDNELLLLVNKMGMYLLHIGNAAVTFNGPTPCPRSPYASTHVNVSWESASGIATLWANGKLVGRKGVWKGYSVGEEAKIILGQEQDSFGGHFDENQSFVGVIWDVFLWDHVLPPKEMCDSCYSGSLLNRHTLTYEDNGYVVTKPKVWA

SEQ ID NO: 2623 - DNA, 660 bp, Homo sapiens; identical to SEQ ID NO: 134

SEQ ID NO: 2624 - protein, 219 aa, Homo sapiens; identical to SEQ ID NO: 135

SEQ ID NO: 2625 - DNA, 1164 bp, Homo sapiens
agtctccagcatcctccacctgtctaccaccgagcatgggcctatatttgaagccttagatctctccagcacagtaagcaccaggagtccatgaagaagatggctcctgccatggaatcccctactctactgtgtgtagccttactgttcttcgctccagatggcgtgttagcagtccctcagaaacctaaggtctccttgaaccctccatggaatagaatatttaaaggagagaatgtgactcttacatgtaatgggaacaatttctttgaagtcagttccaccaaatggttccacaatggcagcctttcagaagagacaaattcaagtttgaatattgtgaatgccaaatttgaagacagtggagaatacaaatgtcagcaccaacaagttaatgagagtgaacctgtgtacctggaagtcttcagtgactggctgctccttcaggcctctgctgaggtggtgatggagggccagcccctcttcctcaggtgccatggttggaggaactgggatgtgtacaaggtgatctattataaggatggtgaagctctcaagtactggtatgagaaccacaacatctccattacaaatgccacagttgaagacagtggaacctactactgtacgggcaaagtgtggcagctggactatgagtctgagcccctcaacattactgtaataaaagctccgcgtgagaagtactggctacaattttttatcccattgttggtggtgattctgtttgctgtggacacaggattatttatctcaactcagcagcaggtcacatttctcttgaagattaagagaaccaggaaaggcttcagacttctgaacccacatcctaagccaaaccccaaaaacaactgatataattactcaagaaatatttgcaacattagtttttttccagcatcagcaattgctactcaattgtcaaacacagcttgcaatatacatagaaacgtctgtgctcaaggatttatagaaatgcttcattaaactgagtgaaactggttaagtggcatgtaatagtaagtgctcaattaacattggttgaataaatgagagaatgaatagattcatttattagcatttgtaaaagagatgttcaatttcaataaaataaatataaaaccatgtaacagaatgcttctgagt

SEQ ID NO: 2626 - protein, 260 aa, Homo sapiens
MKKMAPAMESPTLLCVALLFFAPDGVLAVPQKPKVSLNPPWNRIFKGENVTLTCNGNNFFEVSSTKWFHNGSLSEETNSSLNIVNAKFEDSGEYKCQHQQVNESEPVYLEVFSDWLLLQASAEVVMEGQPLFLRCHGWRNWDVYKVIYYKDGEALKYWYENHNISITNATVEDSGTYYCTGKVWQLDYESEPLNITVIKAPREKYWLQFFIPLLVVILFAVDTGLFISTQQQVTFLLKIKRTRKGFRLLNPHPKPNPKNN

SEQ ID NO: 2627 - DNA, 982 bp, Homo sapiens
acagtaagcaccaggagtccatgaagaagatggctcctgccatggaatcccctactctactgtgtgtagccttactgttcttcgctccagatggcgtgttagcagtcagttccaccaaatggttccacaatggcagcctttcagaagagacaaattcaagtttgaatattgtgaatgccaaatttgaagacagtggagaatacaaatgtcagcaccaacaagttaatgagagtgaacctgtgtacctggaagtcttcagtgactggctgctccttcaggcctctgctgaggtggtgatggagggccagcccctcttcctcaggtgccatggttggaggaactgggatgtgtacaaggtgatctattataaggatggtgaagctctcaagtactggtatgagaaccacaacatctccattacaaatgccacagttgaagacagtggaacctactactgtacgggcaaagtgtggcagctggactatgagtctgagcccctcaacattactgtaataaaagctccgcgtgagaagtactggctacaattttttatcccattgttggtggtgattctgtttgctgtggacacaggattatttatctcaactcagcagcaggtcacatttctcttgaagattaagagaaccaggaaaggcttcagacttctgaacccacatcctaagccaaaccccaaaaacaactgatataattactcaagaaatatttgcaacattagtttttttccagcatcagcaattgctactcaattgtcaaacacagcttgcaatatacatagaaacgtctgtgctcaaggatttatagaaatgcttcattaaactgagtgaaactggttaagtggcatgtaatagtaagtgctcaattaacattggttgaataaatgagagaatgaatagattcatttattagcatttgtaaaagagatgttcaatttcaataaaataaatataaaaccatgtaacag

SEQ ID NO: 2628 - protein, 227 aa, Homo sapiens
MKKMAPAMESPTLLCVALLFFAPDGVLAVSSTKWFHNGSLSEETNSSLNIVNAKFEDSGEYKCQHQQVNESEPVYLEVFSDWLLLQASAEVVMEGQPLFLRCHGWRNWDVYKVIYYKDGEALKYWYENHNISITNATVEDSGTYYCTGKVWQLDYESEPLNITVIKAPREKYWLQFFIPLLVVILFAVDTGLFISTQQQVTFLLKIKRTRKGFRLLNPHPKPNPKNN

SEQ ID NO: 2629 - DNA, 990 bp, Homo sapiens; identical to SEQ ID NO: 138

SEQ ID NO: 2630 - protein, 329 aa, Homo sapiens; identical to SEQ ID NO: 139

SEQ ID NO: 2631 - DNA, 553 bp, Homo sapiens
attctccttcctgacaccctgtgaagaaggtgccttgcttcccctttgccttccaccacaatgctaagtttcttgaggcctcccgagacatgctgaactgtgagtcagtcaactaagcctctttcctttataaattacccagtttcaggcaattctttatagcaatgtgaaaatggactaatatacaactgaagtcatttggtaaaataagcttcaagattcctcttttcatctctcactgaagaaatataccccttttcataagaaaatctacaaagagtatttataagaaattggtgcatggctgtgcttcaactcctcagtgcatgatatgaaagaaaatcagatgaggttgcaagaaataaattttgtgttagacatcagagaccatttcttgacaggaaaagttgtttgtgatgtgtgcagcatgctctttcaaacctagacctaccttgatgccaaagctaaattccacttttgtgactgagttcctctttgaaggtttctccagcttcaggcggcagcacaaacttgtcttctttgttgtcttcct

SEQ ID NO: 2632 - protein, 44 aa, Homo sapiens
MCAACSFKPRPTLMPKLNSTFVTEFLFEGFSSFRRQHKLVFFVV

SEQ ID NO: 2633 - DNA, 1058 bp, Homo sapiens
cctgtgaagaaggtgccttgcttcccctttgccttccaccacaatgctaagtttcttgaggcctcccgagacatgctgaactgtgagtcagtcaactaagcctctttcctttataaattacccagtttcaggcaattctttatagcaatgtgaaaatggactaatatacaactgaagtcatttggtaaaataagcttcaagattcctcttttcatctctcactgaagaaatataccccttttcataagaaaatctacaaagagtatttataagaaattggtgcatggctgtgcttcaactcctcagtgcatgatatgaaagaaaatcagatgaggttgcaagaaataaattttgtgttagacatcagagaccatttcttgacaggaaaagttgtttgtgatgtgtgcagcatggtttctcaagatctggctgtataaacaatggacagggctgagaaccaggaagtgcagtgtctctgggatctatgcttgatgcctctaactctgcttagcactgagtatgtaggatagtccccatgtattgacaactcatattaaactgtatatggaagcacaaacattgaagaatagccaaacattcttgaagaaaagaaacaaatggagagaacttgtccttcaaatatcatttactataataaagctgtagtaattaagaaggcatggttttggcacagggataagcactcaaaccaatgagagaaaatggaattctaaaatatgaaaattattcaaacggggctggcattcctgattgatggaaagcacagactagtcaattaatgcaatagttggtcattcatatgaggaaaaaatgaaattaggttagcttataccatacaaaattcaatcacaaatggattaaaaacctataaacaaacaaaaaactctattaaatatttagaagacactatgtgagaatatttttaaaacttgagataaatgattccttaaggtacaaaacagcaaaaaatgacaacctttattatataaaaattaatttgtgttttccagaatcacaaaaaagaaaaaaagcaaggt

SEQ ID NO: 2634 - protein, 40 aa, Homo sapiens
MKENQMRLQEINFVLDIRDHFLTGKVVCDVCSMVSQDLAV

SEQ ID NO: 2635 - DNA, 1090 bp, Homo sapiens
tgtgcttctactgctttactgggactatgtgacttttatgcttttatgtttcagatttgggaaccaatccatgaaaagagagaactttactctcatcactgactttgttttccaaggtttctctagcttccatgagcagcagatcaccctttttggcgtgttccttgcactatacatcttaaccttagcaggcaatatcatcattgtgaccatcatccgaatggatcttcatcttcacacacccatgtacttcttcctgagcatgctgtccacttcagagactgtatatacattggtcattctcccaagaatgctctccagcctcgtaggtatgagccagcccatatcattggcagggtgtgccacacagatgttcttttttgtaacctttggcatcactaactgcttcctgctcacagcaatgggatatgaccgctatgtggccatctgcaaccccctgagatacatggttattatgaacaagaggctgcgtatccaacttgtcctgggggcctgcagcattgggctgattgtagcaataacgcaagtgacatctgtattcaggttacccttctgtgctagaaaggtgccccacttcttctgtgacatccgccctgtgatgaagctctcctgcattgacaccactgtcaatgaaatcctgactttgattatcagtgtgctggtgcttgttgtacctatgggtctggttttcatttcttatgttctcattatctctacaatcctcaagattgcttcagttgagggccggaagaaggcttttgccacctgtgcatcccacctcactgtggtcattgtccactacagctgtgcctccattgcctacctcaagcccaagtcagagaacaccagagaacatgaccagctgatctcggtgacctacactgtcatcactcccctactgaaccctgtggtatacaccctgagaaataaagaggtcaaagatgctctgtgcagggctgttggtgggaagttttcctgaccatgtaggaagagttctcctgaggctgtcaacatccacactaggcaggaatatgaggtgtaaactcacaaacacttggctcctagagac

SEQ ID NO: 2636 - protein, 320 aa, Homo sapiens
MLLCFRFGNQSMKRENFTLITDFVFQGFSSFHEQQITLFGVFLALYILTLAGNIIIVTIIRMDLHLHTPMYFFLSMLSTSETVYTLVILPRMLSSLVGMSQPISLAGCATQMFFFVTFGITNCFLLTAMGYDRYVAICNPLRYMVIMNKRLRIQLVLGACSIGLIVAITQVTSVFRLPFCARKVPHFFCDIRPVMKLSCIDTTVNEILTLIISVLVLVVPMGLVFISYVLIISTILKIASVEGRKKAFATCASHLTVVIVHYSCASIAYLKPKSENTREHDQLISVTYTVITPLLNPVVYTLRNKEVKDALCRAVGGKFS

SEQ ID NO: 2637 - DNA, 783 bp, Homo sapiens
tgtggacttcaactctgacaagtctgaatcccagtggaaatgcaagttagcctcaaactgagaacctcatactacattcagaatatgttttcatgtttccaaaatgtcaccaacaatgagatgacaggaacctgaaccaaaaggatgagagtagagatggaaagtaaatgttgttacaaaggctaaatcagaaatttgtcccagatctagtatggatcatgaagaagaagatagaatgaaagaacactcttaccattctgagtgccgaaagcaggaggtggttcctaaaaatatgaagtttgggtatcctatacaatgagagaagaatgtctatcttcattatgttcaagtacccagataaatgaacctgctgttataagggggagacatgacaagctttacgtgttgaaaatacaaagagcctgaccctacaggaatctttctttctggcctttttcatcgtgagtacatgcttttgattttgatcatggttaaatagaaaatatttaaattataatttctatccacaaggataaaatttctatccacaatttctaaccaacaagagtccccgtgactcacctggcacagaggttgggaaacttcaagttgattcccaggcctaagtatggaacagtctttatcactttccaaaatgtagcctgtccacattttcttgtgctgcataagcccatcatcccaatataatacagtagagaaaaagaaactgatgctgaaattctcatgggctttgatgagcagaaacttggtaatataattttg

SEQ ID NO: 2638 - protein, 36 aa, Homo sapiens
MREECLSSLCSSTQINEPAVIRGRHDKLYVLKIQRA

SEQ ID NO: 2639 - DNA, 1284 bp, Homo sapiens
aagcttgtctcttaaaacccactggacgttggcacagtgctgggatgactatggagacccaaatgtctcagaatgtatgtcccagaaacctgtggctgcttcaaccattgacagttttgctgctgctggcttctgcagacagtcaagctgctcccccaaaggctgtgctgaaacttgagcccccgtggatcaacgtgctccaggaggactctgtgactctgacatgccagggggctcgcagccctgagagcgactccattcagtggttccacaatgggaatctcattcccacccacacgcagcccagctacaggttcaaggccaacaacaatgacagcggggagtacacgtgccagactggccagaccagcctcagcgaccctgtgcatctgactgtgctttccgaatggctggtgctccagacccctcacctggagttccaggagggagaaaccatcatgctgaggtgccacagctggaaggacaagcctctggtcaaggtcacattcttccagaatggaaaatcccagaaattctcccatttggatcccaccttctccatcccacaagcaaaccacagtcacagtggtgattaccactgcacaggaaacataggctacacgctgttctcatccaagcctgtgaccatcactgtccaagccaattccactgatcctgtgaaggctgcccaatttgagccacctggacgtcaaatgattgccatcagaaagagacaacttgaagaaaccaacaatgactatgaaacagctgacggcggctacatgactctgaaccccagggcacctactgacgatgataaaaacatctacctgactcttcctcccaacgaccatgtcaacagtaataactaaagagtaacgttatgccatgtggtcatactctcagcttgctgagtggatgacaaaaagaggggaattgttaaaggaaaatttaaatggagactggaaaaatcctgagcaaacaaaaccacctggcccttagaaatagctttaactttgcttaaactacaaacacaagcaaaacttcacggggtcatactacatacaagcataagcaaaacttaacttggatcatttctggtaaatgcttatgttagaaataagacaaccccagccaatcacaagcagcctactaacatataattaggtgactagggactttctaagaagatacctacccccaaaaaacaattatgtaattgaaaaccaaccgattgcctttattttgcttccacattttcccaataaatacttgcctgtgaca

SEQ ID NO: 2640 - protein, 275 aa, Homo sapiens
MTMETQMSQNVCPRNLWLLQPLTVLLLLASADSQAAPPKAVLKLEPPWINVLQEDSVTLTCQGARSPESDSIQWFHNGNLIPTHTQPSYRFKANNNDSGEYTCQTGQTSLSDPVHLTVLSEWLVLQTPHLEFQEGETIMLRCHSWKDKPLVKVTFFQNGKSQKFSHLDPTFSIPQANHSHSGDYHCTGNIGYTLFSSKPVTITVQANSTDPVKAAQFEPPGRQMIAIRKRQLEETNNDYETADGGYMTLNPRAPTDDDKNIYLTLPPNDHVNSNN

SEQ ID NO: 2641 - DNA, 1425 bp, Homo sapiens
aagcttgtctcttaaaacccactggacgttggcacagtgctgggatgactatggagacccaaatgtctcagaatgtatgtcccagaaacctgtggctgcttcaaccattgacagttttgctgctgctggcttctgcagacagtcaagctgctcccccaaaggctgtgctgaaacttgagcccccgtggatcaacgtgctccaggaggactctgtgactctgacatgccagggggctcgcagccctgagagcgactccattcagtggttccacaatgggaatctcattcccacccacacgcagcccagctacaggttcaaggccaacaacaatgacagcggggagtacacgtgccagactggccagaccagcctcagcgaccctgtgcatctgactgtgctttccgaatggctggtgctccagacccctcacctggagttccaggagggagaaaccatcatgctgaggtgccacagctggaaggacaagcctctggtcaaggtcacattcttccagaatggaaaatcccagaaattctcccatttggatcccaccttctccatcccacaagcaaaccacagtcacagtggtgattaccactgcacaggaaacataggctacacgctgttctcatccaagcctgtgaccatcactgtccaagtgcccagcatgggcagctcttcaccaatggggatcattgtggctgtggtcattgcgactgctgtagcagccattgttgctgctgtagtggccttgatctactgcaggaaaaagcggatttcagccaattccactgatcctgtgaaggctgcccaatttgagccacctggacgtcaaatgattgccatcagaaagagacaacttgaagaaaccaacaatgactatgaaacagctgacggcggctacatgactctgaaccccagggcacctactgacgatgataaaaacatctacctgactcttcctcccaacgaccatgtcaacagtaataactaaagagtaacgttatgccatgtggtcatactctcagcttgctgagtggatgacaaaaagaggggaattgttaaaggaaaatttaaatggagactggaaaaatcctgagcaaacaaaaccacctggcccttagaaatagctttaactttgcttaaactacaaacacaagcaaaacttcacggggtcatactacatacaagcataagcaaaacttaacttggatcatttctggtaaatgcttatgttagaaataagacaaccccagccaatcacaagcagcctactaacatataattaggtgactagggactttctaagaagatacctacccccaaaaaacaattatgtaattgaaaaccaaccgattgcctttattttgcttccacattttcccaataaatacttgcctgtgacattttgccactggaacact

SEQ ID NO: 2642 - protein, 316 aa, Homo sapiens; identical to SEQ ID NO: 143

SEQ ID NO: 2643 - DNA, 2346 bp, Homo sapiens
aagcttgtctcttaaaacccactggacgttggcacagtgctgggatgactatggagacccaaatgtctcagaatgtatgtcccagaaacctgtggctgcttcaaccattgacagttttgctgctgctggcttctgcagacagtcaagctgctcccccaaaggctgtgctgaaacttgagcccccgtggatcaacgtgctccaggaggactctgtgactctgacatgccagggggctcgcagccctgagagcgactccattcagtggttccacaatgggaatctcattcccacccacacgcagcccagctacaggttcaaggccaacaacaatgacagcggggagtacacgtgccagactggccagaccagcctcagcgaccctgtgcatctgactgtgctttccgaatggctggtgctccagacccctcacctggagttccaggagggagaaaccatcatgctgaggtgccacagctggaaggacaagcctctggtcaaggtcacattcttccagaatggaaaatcccagaaattctcccatttggatcccaccttctccatcccacaagcaaaccacagtcacagtggtgattaccactgcacaggaaacataggctacacgctgttctcatccaagcctgtgaccatcactgtccaagtgcccagcatgggcagctcttcaccaatggggatcattgtggctgtggtcattgcgactgctgtagcagccattgttgctgctgtagtggccttgatctactgcaggaaaaagcggatttcagccaattccactgatcctgtgaaggctgcccaatttgagccacctggacgtcaaatgattgccatcagaaagagacaacttgaagaaaccaacaatgactatgaaacagctgacggcggctacatgactctgaaccccagggcacctactgacgatgataaaaacatctacctgactcttcctcccaacgaccatgtcaacagtaataactaaagagtaacgttatgccatgtggtcatactctcagcttgctgagtggatgacaaaaagaggggaattgttaaaggaaaatttaaatggagactggaaaaatcctgagcaaacaaaaccacctggcccttagaaatagctttaactttgcttaaactacaaacacaagcaaaacttcacggggtcatactacatacaagcataagcaaaacttaacttggatcatttctggtaaatgcttatgttagaaataagacaaccccagccaatcacaagcagcctactaacatataattaggtgactagggactttctaagaagatacctacccccaaaaaacaattatgtaattgaaaaccaaccgattgcctttattttgcttccacattttcccaataaatacttgcctgtgacattttgccactggaacactaaacttcatgaattgcgcctcagatttttcctttaacatcttttttttttttgacagagtctcaatctgttacccaggctggagtgcagtggtgctatcttggctcactgcaaacccgcctcccaggtttaagcgattctcatgcctcagcctcccagtagctgggattagaggcatgtgccatcatacccagctaatttttgtattttttattttttttttttagtagagacagggtttcgcaatgttggccaggccgatctcgaacttctggcctctagcgatctgcccgcctcggcctcccaaagtgctgggatgaccagcatcagccccaatgtccagcctctttaacatcttctttcctatgccctctctgtggatccctactgctggtttctgccttctccatgctgagaacaaaatcacctattcactgcttatgcagtcggaagctccagaagaacaaagagcccaattaccagaaccacattaagtctccattgttttgccttgggatttgagaagagaattagagaggtgaggatctggtatttcctggactaaattccccttggggaagacgaagggatgctgcagttccaaaagagaaggactcttccagagtcatctacctgagtcccaaagctccctgtcctgaaagccacagacaatatggtcccaaatgactgactgcaccttctgtgcctcagccgttcttgacatcaagaatcttctgttccacatccacacagccaatacaattagtcaaaccactgttattaacagatgtagcaacatgagaaacgcttatgttacaggttacatgagagcaatcatgtaagtctatatgacttcagaaatgttaaaatagactaacctctaacaacaaattaaaagtgattgtttcaaggtgatgcaatt

SEQ ID NO: 2644 - protein, 316 aa, Homo sapiens; identical to SEQ ID NO: 143

SEQ ID NO: 2645 - DNA, 2223 bp, Homo sapiens
aagcttgtctcttaaaacccactggacgttggcacagtgctgggatgactatggagacccaaatgtctcagaatgtatgtcccagaaacctgtggctgcttcaaccattgacagttttgctgctgctggcttctgcagacagtcaagctgctcccccaaaggctgtgctgaaacttgagcccccgtggatcaacgtgctccaggaggactctgtgactctgacatgccagggggctcgcagccctgagagcgactccattcagtggttccacaatgggaatctcattcccacccacacgcagcccagctacaggttcaaggccaacaacaatgacagcggggagtacacgtgccagactggccagaccagcctcagcgaccctgtgcatctgactgtgctttccgaatggctggtgctccagacccctcacctggagttccaggagggagaaaccatcatgctgaggtgccacagctggaaggacaagcctctggtcaaggtcacattcttccagaatggaaaatcccagaaattctcccatttggatcccaccttctccatcccacaagcaaaccacagtcacagtggtgattaccactgcacaggaaacataggctacacgctgttctcatccaagcctgtgaccatcactgtccaagccaattccactgatcctgtgaaggctgcccaatttgagccacctggacgtcaaatgattgccatcagaaagagacaacttgaagaaaccaacaatgactatgaaacagctgacggcggctacatgactctgaaccccagggcacctactgacgatgataaaaacatctacctgactcttcctcccaacgaccatgtcaacagtaataactaaagagtaacgttatgccatgtggtcatactctcagcttgctgagtggatgacaaaaagaggggaattgttaaaggaaaatttaaatggagactggaaaaatcctgagcaaacaaaaccacctggcccttagaaatagctttaactttgcttaaactacaaacacaagcaaaacttcacggggtcatactacatacaagcataagcaaaacttaacttggatcatttctggtaaatgcttatgttagaaataagacaaccccagccaatcacaagcagcctactaacatataattaggtgactagggactttctaagaagatacctacccccaaaaaacaattatgtaattgaaaaccaaccgattgcctttattttgcttccacattttcccaataaatacttgcctgtgacattttgccactggaacactaaacttcatgaattgcgcctcagatttttcctttaacatcttttttttttttgacagagtctcaatctgttacccaggctggagtgcagtggtgctatcttggctcactgcaaacccgcctcccaggtttaagcgattctcatgcctcagcctcccagtagctgggattagaggcatgtgccatcatacccagctaatttttgtattttttattttttttttttagtagagacagggtttcgcaatgttggccaggccgatctcgaacttctggcctctagcgatctgcccgcctcggcctcccaaagtgctgggatgaccagcatcagccccaatgtccagcctctttaacatcttctttcctatgccctctctgtggatccctactgctggtttctgccttctccatgctgagaacaaaatcacctattcactgcttatgcagtcggaagctccagaagaacaaagagcccaattaccagaaccacattaagtctccattgttttgccttgggatttgagaagagaattagagaggtgaggatctggtatttcctggactaaattccccttggggaagacgaagggatgctgcagttccaaaagagaaggactcttccagagtcatctacctgagtcccaaagctccctgtcctgaaagccacagacaatatggtcccaaatgactgactgcaccttctgtgcctcagccgttcttgacatcaagaatcttctgttccacatccacacagccaatacaattagtcaaaccactgttattaacagatgtagcaacatgagaaacgcttatgttacaggttacatgagagcaatcatgtaagtctatatgacttcagaaatgttaaaatagactaacctctaacaacaaattaaaagtgattgtttcaaggtgatgcaatt

SEQ ID NO: 2646 - protein, 275 aa, Homo sapiens; identical to SEQ ID NO: 2640

SEQ ID NO: 2647 - DNA, 2411 bp, Homo sapiens
aagcttgtctcttaaaacccactggacgttggcacagtgctgggatgactatggagacccaaatgtctcagaatgtatgtcccagaaacctgtggctgcttcaaccattgacagttttgctgctgctggcttctgcagacagtcaagctgctcccccaaaggctgtgctgaaacttgagcccccgtggatcaacgtgctccaggaggactctgtgactctgacatgccagggggctcgcagccctgagagcgactccattcagtggttccacaatgggaatctcattcccacccacacgcagcccagctacaggttcaaggccaacaacaatgacagcggggagtacacgtgccagactggccagaccagcctcagcgaccctgtgcatctgactgtgctttccgaatggctggtgctccagacccctcacctggagttccaggagggagaaaccatcatgctgaggtgccacagctggaaggacaagcctctggtcaaggtcacattcttccagaatggaaaatcccagaaattctcccatttggatcccaccttctccatcccacaagcaaaccacagtcacagtggtgattaccactgcacaggaaacataggctacacgctgttctcatccaagcctgtgaccatcactgtccaagtgcccagcatgggcagctcttcaccaatggggatcattgtggctgtggtcattgcgactgctgtagcagccattgttgctgctgtagtggccttgatctactgcaggaaaaagcggatttcagccaattccactgatcctgtgaaggctgcccaatttgagccacctggacgtcaaatgattgccatcagaaagagacaacttgaagaaaccaacaatgactatgaaacagctgacggcggctacatgactctgaaccccagggcacctactgacgatgataaaaacatctacctgactcttcctcccaacgaccatgtcaacagtaataactaaagagtaacgttatgccatgtggtcatactctcagcttgctgagtggatgacaaaaagaggggaattgttaaaggaaaatttaaatggagactggaaaaatcctgagcaaacaaaaccacctggcccttagaaatagctttaactttgcttaaactacaaacacaagcaaaacttcacggggtcatactacatacaagcataagcaaaacttaacttggatcatttctggtaaatgcttatgttagaaataagacaaccccagccaatcacaagcagcctactaacatataattaggtgactagggactttctaagaagatacctacccccaaaaaacaattatgtaattgaaaaccaaccgattgcctttattttgcttccacattttcccaataaatacttgcctgtgacattttgccactggaacactaaacttcatgaattgcgcctcagatttttcctttaacatcttttttttttttgacagagtctcaatctgttacccaggctggagtgcagtggtgctatcttggctcactgcaaacccgcctcccaggtttaagcgattctcatgcctcagcctcccagtagctgggattagaggcatgtgccatcatacccagctaatttttgtattttttattttttttttttagtagagacagggtttcgcaatgttggccaggccgatctcgaacttctggcctctagcgatctgcccgcctcggcctcccaaagtgctgggatgaccagcatcagccccaatgtccagcctctttaacatcttctttcctatgccctctctgtggatccctactgctggtttctgccttctccatgctgagaacaaaatcacctattcactgcttatgcagtcggaagctccagaagaacaaagagcccaattaccagaaccacattaagtctccattgttttgccttgggatttgagaagagaattagagaggtgaggatctggtatttcctggactaaattccccttggggaagacgaagggatgctgcagttccaaaagagaaggactcttccagagtcatctacctgagtcccaaagctccctgtcctgaaagccacagacaatatggtcccaaatgactgactgcaccttctgtgcctcagccgttcttgacatcaagaatcttctgttccacatccacacagccaatacaattagtcaaaccactgttattaacagatgtagcaacatgagaaacgcttatgttacaggttacatgagagcaatcatgtaagtctatatgacttcagaaatgttaaaatagactaacctctaacaacaaattaaaagtgattgtttcaaggtgatgcaattattgatgacctattttatttttctataatgatcatatattacctttgtaataaaacattataacc

SEQ ID NO: 2648 - protein, 316 aa, Homo sapiens; identical to SEQ ID NO: 143

SEQ ID NO: 2649 - DNA, 2288 bp, Homo sapiens
aagcttgtctcttaaaacccactggacgttggcacagtgctgggatgactatggagacccaaatgtctcagaatgtatgtcccagaaacctgtggctgcttcaaccattgacagttttgctgctgctggcttctgcagacagtcaagctgctcccccaaaggctgtgctgaaacttgagcccccgtggatcaacgtgctccaggaggactctgtgactctgacatgccagggggctcgcagccctgagagcgactccattcagtggttccacaatgggaatctcattcccacccacacgcagcccagctacaggttcaaggccaacaacaatgacagcggggagtacacgtgccagactggccagaccagcctcagcgaccctgtgcatctgactgtgctttccgaatggctggtgctccagacccctcacctggagttccaggagggagaaaccatcatgctgaggtgccacagctggaaggacaagcctctggtcaaggtcacattcttccagaatggaaaatcccagaaattctcccatttggatcccaccttctccatcccacaagcaaaccacagtcacagtggtgattaccactgcacaggaaacataggctacacgctgttctcatccaagcctgtgaccatcactgtccaagccaattccactgatcctgtgaaggctgcccaatttgagccacctggacgtcaaatgattgccatcagaaagagacaacttgaagaaaccaacaatgactatgaaacagctgacggcggctacatgactctgaaccccagggcacctactgacgatgataaaaacatctacctgactcttcctcccaacgaccatgtcaacagtaataactaaagagtaacgttatgccatgtggtcatactctcagcttgctgagtggatgacaaaaagaggggaattgttaaaggaaaatttaaatggagactggaaaaatcctgagcaaacaaaaccacctggcccttagaaatagctttaactttgcttaaactacaaacacaagcaaaacttcacggggtcatactacatacaagcataagcaaaacttaacttggatcatttctggtaaatgcttatgttagaaataagacaaccccagccaatcacaagcagcctactaacatataattaggtgactagggactttctaagaagatacctacccccaaaaaacaattatgtaattgaaaaccaaccgattgcctttattttgcttccacattttcccaataaatacttgcctgtgacattttgccactggaacactaaacttcatgaattgcgcctcagatttttcctttaacatcttttttttttttgacagagtctcaatctgttacccaggctggagtgcagtggtgctatcttggctcactgcaaacccgcctcccaggtttaagcgattctcatgcctcagcctcccagtagctgggattagaggcatgtgccatcatacccagctaatttttgtattttttattttttttttttagtagagacagggtttcgcaatgttggccaggccgatctcgaacttctggcctctagcgatctgcccgcctcggcctcccaaagtgctgggatgaccagcatcagccccaatgtccagcctctttaacatcttctttcctatgccctctctgtggatccctactgctggtttctgccttctccatgctgagaacaaaatcacctattcactgcttatgcagtcggaagctccagaagaacaaagagcccaattaccagaaccacattaagtctccattgttttgccttgggatttgagaagagaattagagaggtgaggatctggtatttcctggactaaattccccttggggaagacgaagggatgctgcagttccaaaagagaaggactcttccagagtcatctacctgagtcccaaagctccctgtcctgaaagccacagacaatatggtcccaaatgactgactgcaccttctgtgcctcagccgttcttgacatcaagaatcttctgttccacatccacacagccaatacaattagtcaaaccactgttattaacagatgtagcaacatgagaaacgcttatgttacaggttacatgagagcaatcatgtaagtctatatgacttcagaaatgttaaaatagactaacctctaacaacaaattaaaagtgattgtttcaaggtgatgcaattattgatgacctattttatttttctataatgatcatatattacctttgtaataaaacattataacc

SEQ ID NO: 2650 - protein, 275 aa, Homo sapiens; identical to SEQ ID NO: 2640

SEQ ID NO: 2651 - DNA, 2674 bp, Homo sapiens
aagcttgtctcttaaaacccactggacgttggcacagtgctgggatgactatggagacccaaatgtctcagaatgtatgtcccagaaacctgtggctgcttcaaccattgacagttttgctgctgctggcttctgcagacagtcaagctgctcccccaaaggctgtgctgaaacttgagcccccgtggatcaacgtgctccaggaggactctgtgactctgacatgccagggggctcgcagccctgagagcgactccattcagtggttccacaatgggaatctcattcccacccacacgcagcccagctacaggttcaaggccaacaacaatgacagcggggagtacacgtgccagactggccagaccagcctcagcgaccctgtgcatctgactgtgctttccgaatggctggtgctccagacccctcacctggagttccaggagggagaaaccatcatgctgaggtgccacagctggaaggacaagcctctggtcaaggtcacattcttccagaatggaaaatcccagaaattctcccatttggatcccaccttctccatcccacaagcaaaccacagtcacagtggtgattaccactgcacaggaaacataggctacacgctgttctcatccaagcctgtgaccatcactgtccaagtgcccagcatgggcagctcttcaccaatggggatcattgtggctgtggtcattgcgactgctgtagcagccattgttgctgctgtagtggccttgatctactgcaggaaaaagcggatttcagccaattccactgatcctgtgaaggctgcccaatttgagccacctggacgtcaaatgattgccatcagaaagagacaacttgaagaaaccaacaatgactatgaaacagctgacggcggctacatgactctgaaccccagggcacctactgacgatgataaaaacatctacctgactcttcctcccaacgaccatgtcaacagtaataactaaagagtaacgttatgccatgtggtcatactctcagcttgctgagtggatgacaaaaagaggggaattgttaaaggaaaatttaaatggagactggaaaaatcctgagcaaacaaaaccacctggcccttagaaatagctttaactttgcttaaactacaaacacaagcaaaacttcacggggtcatactacatacaagcataagcaaaacttaacttggatcatttctggtaaatgcttatgttagaaataagacaaccccagccaatcacaagcagcctactaacatataattaggtgactagggactttctaagaagatacctacccccaaaaaacaattatgtaattgaaaaccaaccgattgcctttattttgcttccacattttcccaataaatacttgcctgtgacattttgccactggaacactaaacttcatgaattgcgcctcagatttttcctttaacatcttttttttttttgacagagtctcaatctgttacccaggctggagtgcagtggtgctatcttggctcactgcaaacccgcctcccaggtttaagcgattctcatgcctcagcctcccagtagctgggattagaggcatgtgccatcatacccagctaatttttgtattttttattttttttttttagtagagacagggtttcgcaatgttggccaggccgatctcgaacttctggcctctagcgatctgcccgcctcggcctcccaaagtgctgggatgaccagcatcagccccaatgtccagcctctttaacatcttctttcctatgccctctctgtggatccctactgctggtttctgccttctccatgctgagaacaaaatcacctattcactgcttatgcagtcggaagctccagaagaacaaagagcccaattaccagaaccacattaagtctccattgttttgccttgggatttgagaagagaattagagaggtgaggatctggtatttcctggactaaattccccttggggaagacgaagggatgctgcagttccaaaagagaaggactcttccagagtcatctacctgagtcccaaagctccctgtcctgaaagccacagacaatatggtcccaaatgactgactgcaccttctgtgcctcagccgttcttgacatcaagaatcttctgttccacatccacacagccaatacaattagtcaaaccactgttattaacagatgtagcaacatgagaaacgcttatgttacaggttacatgagagcaatcatgtaagtctatatgacttcagaaatgttaaaatagactaacctctaacaacaaattaaaagtgattgtttcaaggtgatgcaattattgatgacctattttatttttctataatgatcatatattacctttgtaataaaacattataaccaaaacattctgtttaccttttcagggctgtattgattggggtgtagactgaactatccggggtctgtttcttttcggtgatgaaagtcttgagaaggtagtaatggataagatgtgagggagaggagagagggagatttggagtgtagggtgagtgcccctcttcttagaactgaatactcttcttctaatgaacttgtattcttgtttccatgtcttcttccctttccttctatagcaaataaagcattcactttgttttgg

SEQ ID NO: 2652 - protein, 316 aa, Homo sapiens; identical to SEQ ID NO: 143

SEQ ID NO: 2653 - DNA, 2551 bp, Homo sapiens
aagcttgtctcttaaaacccactggacgttggcacagtgctgggatgactatggagacccaaatgtctcagaatgtatgtcccagaaacctgtggctgcttcaaccattgacagttttgctgctgctggcttctgcagacagtcaagctgctcccccaaaggctgtgctgaaacttgagcccccgtggatcaacgtgctccaggaggactctgtgactctgacatgccagggggctcgcagccctgagagcgactccattcagtggttccacaatgggaatctcattcccacccacacgcagcccagctacaggttcaaggccaacaacaatgacagcggggagtacacgtgccagactggccagaccagcctcagcgaccctgtgcatctgactgtgctttccgaatggctggtgctccagacccctcacctggagttccaggagggagaaaccatcatgctgaggtgccacagctggaaggacaagcctctggtcaaggtcacattcttccagaatggaaaatcccagaaattctcccatttggatcccaccttctccatcccacaagcaaaccacagtcacagtggtgattaccactgcacaggaaacataggctacacgctgttctcatccaagcctgtgaccatcactgtccaagccaattccactgatcctgtgaaggctgcccaatttgagccacctggacgtcaaatgattgccatcagaaagagacaacttgaagaaaccaacaatgactatgaaacagctgacggcggctacatgactctgaaccccagggcacctactgacgatgataaaaacatctacctgactcttcctcccaacgaccatgtcaacagtaataactaaagagtaacgttatgccatgtggtcatactctcagcttgctgagtggatgacaaaaagaggggaattgttaaaggaaaatttaaatggagactggaaaaatcctgagcaaacaaaaccacctggcccttagaaatagctttaactttgcttaaactacaaacacaagcaaaacttcacggggtcatactacatacaagcataagcaaaacttaacttggatcatttctggtaaatgcttatgttagaaataagacaaccccagccaatcacaagcagcctactaacatataattaggtgactagggactttctaagaagatacctacccccaaaaaacaattatgtaattgaaaaccaaccgattgcctttattttgcttccacattttcccaataaatacttgcctgtgacattttgccactggaacactaaacttcatgaattgcgcctcagatttttcctttaacatcttttttttttttgacagagtctcaatctgttacccaggctggagtgcagtggtgctatcttggctcactgcaaacccgcctcccaggtttaagcgattctcatgcctcagcctcccagtagctgggattagaggcatgtgccatcatacccagctaatttttgtattttttattttttttttttagtagagacagggtttcgcaatgttggccaggccgatctcgaacttctggcctctagcgatctgcccgcctcggcctcccaaagtgctgggatgaccagcatcagccccaatgtccagcctctttaacatcttctttcctatgccctctctgtggatccctactgctggtttctgccttctccatgctgagaacaaaatcacctattcactgcttatgcagtcggaagctccagaagaacaaagagcccaattaccagaaccacattaagtctccattgttttgccttgggatttgagaagagaattagagaggtgaggatctggtatttcctggactaaattccccttggggaagacgaagggatgctgcagttccaaaagagaaggactcttccagagtcatctacctgagtcccaaagctccctgtcctgaaagccacagacaatatggtcccaaatgactgactgcaccttctgtgcctcagccgttcttgacatcaagaatcttctgttccacatccacacagccaatacaattagtcaaaccactgttattaacagatgtagcaacatgagaaacgcttatgttacaggttacatgagagcaatcatgtaagtctatatgacttcagaaatgttaaaatagactaacctctaacaacaaattaaaagtgattgtttcaaggtgatgcaattattgatgacctattttatttttctataatgatcatatattacctttgtaataaaacattataaccaaaacattctgtttaccttttcagggctgtattgattggggtgtagactgaactatccggggtctgtttcttttcggtgatgaaagtcttgagaaggtagtaatggataagatgtgagggagaggagagagggagatttggagtgtagggtgagtgcccctcttcttagaactgaatactcttcttctaatgaacttgtattcttgtttccatgtcttcttccctttccttctatagcaaataaagcattcactttgttttgg

SEQ ID NO: 2654 - protein, 275 aa, Homo sapiens; identical to SEQ ID NO: 2640

SEQ ID NO: 2655 - DNA, 934 bp, Homo sapiens
gcttgtctcttaaaacccactggacgttggcacagtgctgggatgactatggagacccaaatgtctcagaatgtatgtcccagaaacctgtggctgcttcaaccattgacagttttgctgctgctggcttctgcagacagtcaagctgctcccccaaaggctgtgctgaaacttgagcccccgtggatcaacgtgctccaggaggactctgtgactctgacatgccagggggctcgcagccctgagagcgactccattcagtggttccacaatgggaatctcattcccacccacacgcagcccagctacaggttcaaggccaacaacaatgacagcggggagtacacgtgccagactggccagaccagcctcagcgaccctgtgcatctgactgtgctttccgaatggctggtgctccagacccctcacctggagttccaggagggagaaaccatcatgctgaggtgccacagctggaaggacaagcctctggtcaaggtcacattcttccagaatggaaaatcccagaaattctcccatttggatcccaccttctccatcccacaagcaaaccacagtcacagtggtgattaccactgcacaggaaacataggctacacgctgttctcatccaagcctgtgaccatcactgtccaaggtatggggagtctgccaagatgtagggaggggagaagaggggatggacaagggctgaggtcacatgggcctacatggaggtctgagaaagcccatagcagcaaaattgggcactggagcaaagaggagtggggtggaagcctggctaagtattgaccaacaagtaggggccagagcttggagccctcacgtcccaggtaataggtagtcaggctgttgtttcactttgaaatgtaggccccagactaaagatggcagtgaagcagagctccctcat

SEQ ID NO: 2656 - protein, 256 aa, Homo sapiens
MTMETQMSQNVCPRNLWLLQPLTVLLLLASADSQAAPPKAVLKLEPPWINVLQEDSVTLTCQGARSPESDSIQWFHNGNLIPTHTQPSYRFKANNNDSGEYTCQTGQTSLSDPVHLTVLSEWLVLQTPHLEFQEGETIMLRCHSWKDKPLVKVTFFQNGKSQKFSHLDPTFSIPQANHSHSGDYHCTGNIGYTLFSSKPVTITVQGMGSLPRCREGRRGDGQGLRSHGPTWRSEKAHSSKIGHWSKEEWGGSLAKY

SEQ ID NO: 2657 - DNA, 697 bp, Homo sapiens
agtgctgggatgactatggagacccaaatgtctcagaatgtatgtcccagaaacctgtggctgcttcaaccattgacagttttgctgctgctggcttctgcagacagtcaagctggtgagtatgccctttgcttccttgtattgacagtgttgtatcctcataatatgatgctgtgtttgctggggcggcgggggggtatgtctattccactgaaaatcaagcttgggttcagcatgggcagttcccccattttagtggggtctgggatttgcttcttagatccactgaagacccaagggaatgaggccgctgcaagtacagatcttgaactacatctacaataggactcttgggtgcctgacctcccttgggagctcctttggcatccacagtcccttcagggttatttattccacacccctttccactctgcccctcagcagctcccccaaaggctgtgctgaaacttgagcccccgtggatcaacgtgctccaggaggactctgtgactctgacatgccagggggctcgcagccctgagagcgactccattcagtggttccacaatgggaatctcattcccacccacacgcagcccagctacaggttcaaggccaacaacaatgacagcggggagtacacgtgccagactggccagaccagcctcagcgaccctgtgcatctgactgtgctttc

SEQ ID NO: 2658 - protein, 111 aa, Homo sapiens
MTMETQMSQNVCPRNLWLLQPLTVLLLLASADSQAGEYALCFLVLTVLYPHNMMLCLLGRRGGMSIPLKIKLGFSMGSSPILVGSGICFLDPLKTQGNEAAASTDLELHLQ

SEQ ID NO: 2659 - DNA, 478 bp, Homo sapiens
gatgactatggagacccaaatgtctcagaatgtatgtcccagaaacctgtggctgcttcaaccattgacagttttgctgctgctggcttctgcagacagtcaagctgctcccccaaaggctgtgctgaaacttgagcccccgtggatcaacgtgctccaggaggactctgtgactctgacatgccagggggctcgcagccctgagagcgactccattcagtggttccacaatgggaatctcattcccacccacacgcagcccagctacaggttcaaggccaacaacaatgacagcggggagtacacgtgccagactggccagaccagcctcagcgaccctgtgcatctgactgtgctttccggtcagtggaggaaggccccagggtggacctgggagggccaggacggatgaaatctgtttacagacagaggtttgcaggaaagagtgggcgtggactgcttactgggaagcactgtt

SEQ ID NO: 2660 - protein, 136 aa, Homo sapiens
MTMETQMSQNVCPRNLWLLQPLTVLLLLASADSQAAPPKAVLKLEPPWINVLQEDSVTLTCQGARSPESDSIQWFHNGNLIPTHTQPSYRFKANNNDSGEYTCQTGQTSLSDPVHLTVLSGQWRKAPGWTWEGQDG

SEQ ID NO: 2661 - DNA, 1203 bp, Homo sapiens
gggggctgcataaatggttttttaaaaatcctttcgcaaaaggcaaagctgggttgctggaattgttggggaatgtattagaatgggaattcagaatgtggtttgctgcagaatttacagcatggcaataaaggctctctgtgttcagggggtgagagaagagactagatgcattgtctcagatgtctcccgacttcctgagaaatgccactttgcaaatactggggctacttttcacactggccaagtcagtttatgacaaaaacatgaggcaattaggtgtgttttggacactaaccagagaaagtccttccttccctcccttcctccctccctccttccctccctctctcccttcctgccttccttccttcccccttccctccctccctttctccctccctaagctccctccctgcctctctttttctctctcatgttactttctctttctgtcttcctttttaatgccatggagtactatattcttcaaagttccaacaaagatgcactacatttggacaatgtggaaatggccctcagccttctcttcctgatgtgccaattccactgatcctgtgaaggctgcccaatttgagccacctggacgtcaaatgattgccatcagaaagagacaacttgaagaaaccaacaatgactatgaaacagctgacggcggctacatgactctgaaccccagggcacctactgacgatgataaaaacatctacctgactcttcctcccaacgaccatgtcaacagtaataactaaagagtaacgttatgccatgtggtcatactctcagcttgctgagtggatgacaaaaagaggggaattgttaaaggaaaatttaaatggagactggaaaaatcctgagcaaacaaaaccacctggcccttagaaatagctttaactttgcttaaactacaaacacaagcaaaacttcacggggtcatactacatacaagcataagcaaaacttaacttggatcatttctggtaaatgcttatgttagaaataagacaaccccagccaatcacaagcagcctactaacatataattaggtgactagggactttctaagaagatacctacccccaaaaaacaattatgtaattgaaaaccaaccgattgcctttattttgcttccacattttcccaataaatacttgcctgtgacattttgccactggaacact

SEQ ID NO: 2662 - protein, 45 aa, Homo sapiens
MLLSLSVFLFNAMEYYILQSSNKDALHLDNVEMALSLLFLMCQFH

SEQ ID NO: 2663 - DNA, 2124 bp, Homo sapiens
gggggctgcataaatggttttttaaaaatcctttcgcaaaaggcaaagctgggttgctggaattgttggggaatgtattagaatgggaattcagaatgtggtttgctgcagaatttacagcatggcaataaaggctctctgtgttcagggggtgagagaagagactagatgcattgtctcagatgtctcccgacttcctgagaaatgccactttgcaaatactggggctacttttcacactggccaagtcagtttatgacaaaaacatgaggcaattaggtgtgttttggacactaaccagagaaagtccttccttccctcccttcctccctccctccttccctccctctctcccttcctgccttccttccttcccccttccctccctccctttctccctccctaagctccctccctgcctctctttttctctctcatgttactttctctttctgtcttcctttttaatgccatggagtactatattcttcaaagttccaacaaagatgcactacatttggacaatgtggaaatggccctcagccttctcttcctgatgtgccaattccactgatcctgtgaaggctgcccaatttgagccacctggacgtcaaatgattgccatcagaaagagacaacttgaagaaaccaacaatgactatgaaacagctgacggcggctacatgactctgaaccccagggcacctactgacgatgataaaaacatctacctgactcttcctcccaacgaccatgtcaacagtaataactaaagagtaacgttatgccatgtggtcatactctcagcttgctgagtggatgacaaaaagaggggaattgttaaaggaaaatttaaatggagactggaaaaatcctgagcaaacaaaaccacctggcccttagaaatagctttaactttgcttaaactacaaacacaagcaaaacttcacggggtcatactacatacaagcataagcaaaacttaacttggatcatttctggtaaatgcttatgttagaaataagacaaccccagccaatcacaagcagcctactaacatataattaggtgactagggactttctaagaagatacctacccccaaaaaacaattatgtaattgaaaaccaaccgattgcctttattttgcttccacattttcccaataaatacttgcctgtgacattttgccactggaacactaaacttcatgaattgcgcctcagatttttcctttaacatcttttttttttttgacagagtctcaatctgttacccaggctggagtgcagtggtgctatcttggctcactgcaaacccgcctcccaggtttaagcgattctcatgcctcagcctcccagtagctgggattagaggcatgtgccatcatacccagctaatttttgtattttttattttttttttttagtagagacagggtttcgcaatgttggccaggccgatctcgaacttctggcctctagcgatctgcccgcctcggcctcccaaagtgctgggatgaccagcatcagccccaatgtccagcctctttaacatcttctttcctatgccctctctgtggatccctactgctggtttctgccttctccatgctgagaacaaaatcacctattcactgcttatgcagtcggaagctccagaagaacaaagagcccaattaccagaaccacattaagtctccattgttttgccttgggatttgagaagagaattagagaggtgaggatctggtatttcctggactaaattccccttggggaagacgaagggatgctgcagttccaaaagagaaggactcttccagagtcatctacctgagtcccaaagctccctgtcctgaaagccacagacaatatggtcccaaatgactgactgcaccttctgtgcctcagccgttcttgacatcaagaatcttctgttccacatccacacagccaatacaattagtcaaaccactgttattaacagatgtagcaacatgagaaacgcttatgttacaggttacatgagagcaatcatgtaagtctatatgacttcagaaatgttaaaatagactaacctctaacaacaaattaaaagtgattgtttcaaggtgatgcaatt

SEQ ID NO: 2664 - protein, 45 aa, Homo sapiens; identical to SEQ ID NO: 2662

SEQ ID NO: 2665 - DNA, 2189 bp, Homo sapiens
gggggctgcataaatggttttttaaaaatcctttcgcaaaaggcaaagctgggttgctggaattgttggggaatgtattagaatgggaattcagaatgtggtttgctgcagaatttacagcatggcaataaaggctctctgtgttcagggggtgagagaagagactagatgcattgtctcagatgtctcccgacttcctgagaaatgccactttgcaaatactggggctacttttcacactggccaagtcagtttatgacaaaaacatgaggcaattaggtgtgttttggacactaaccagagaaagtccttccttccctcccttcctccctccctccttccctccctctctcccttcctgccttccttccttcccccttccctccctccctttctccctccctaagctccctccctgcctctctttttctctctcatgttactttctctttctgtcttcctttttaatgccatggagtactatattcttcaaagttccaacaaagatgcactacatttggacaatgtggaaatggccctcagccttctcttcctgatgtgccaattccactgatcctgtgaaggctgcccaatttgagccacctggacgtcaaatgattgccatcagaaagagacaacttgaagaaaccaacaatgactatgaaacagctgacggcggctacatgactctgaaccccagggcacctactgacgatgataaaaacatctacctgactcttcctcccaacgaccatgtcaacagtaataactaaagagtaacgttatgccatgtggtcatactctcagcttgctgagtggatgacaaaaagaggggaattgttaaaggaaaatttaaatggagactggaaaaatcctgagcaaacaaaaccacctggcccttagaaatagctttaactttgcttaaactacaaacacaagcaaaacttcacggggtcatactacatacaagcataagcaaaacttaacttggatcatttctggtaaatgcttatgttagaaataagacaaccccagccaatcacaagcagcctactaacatataattaggtgactagggactttctaagaagatacctacccccaaaaaacaattatgtaattgaaaaccaaccgattgcctttattttgcttccacattttcccaataaatacttgcctgtgacattttgccactggaacactaaacttcatgaattgcgcctcagatttttcctttaacatcttttttttttttgacagagtctcaatctgttacccaggctggagtgcagtggtgctatcttggctcactgcaaacccgcctcccaggtttaagcgattctcatgcctcagcctcccagtagctgggattagaggcatgtgccatcatacccagctaatttttgtattttttattttttttttttagtagagacagggtttcgcaatgttggccaggccgatctcgaacttctggcctctagcgatctgcccgcctcggcctcccaaagtgctgggatgaccagcatcagccccaatgtccagcctctttaacatcttctttcctatgccctctctgtggatccctactgctggtttctgccttctccatgctgagaacaaaatcacctattcactgcttatgcagtcggaagctccagaagaacaaagagcccaattaccagaaccacattaagtctccattgttttgccttgggatttgagaagagaattagagaggtgaggatctggtatttcctggactaaattccccttggggaagacgaagggatgctgcagttccaaaagagaaggactcttccagagtcatctacctgagtcccaaagctccctgtcctgaaagccacagacaatatggtcccaaatgactgactgcaccttctgtgcctcagccgttcttgacatcaagaatcttctgttccacatccacacagccaatacaattagtcaaaccactgttattaacagatgtagcaacatgagaaacgcttatgttacaggttacatgagagcaatcatgtaagtctatatgacttcagaaatgttaaaatagactaacctctaacaacaaattaaaagtgattgtttcaaggtgatgcaattattgatgacctattttatttttctataatgatcatatattacctttgtaataaaacattataacc

SEQ ID NO: 2666 - protein, 45 aa, Homo sapiens; identical to SEQ ID NO: 2662

SEQ ID NO: 2667 - DNA, 2452 bp, Homo sapiens
gggggctgcataaatggttttttaaaaatcctttcgcaaaaggcaaagctgggttgctggaattgttggggaatgtattagaatgggaattcagaatgtggtttgctgcagaatttacagcatggcaataaaggctctctgtgttcagggggtgagagaagagactagatgcattgtctcagatgtctcccgacttcctgagaaatgccactttgcaaatactggggctacttttcacactggccaagtcagtttatgacaaaaacatgaggcaattaggtgtgttttggacactaaccagagaaagtccttccttccctcccttcctccctccctccttccctccctctctcccttcctgccttccttccttcccccttccctccctccctttctccctccctaagctccctccctgcctctctttttctctctcatgttactttctctttctgtcttcctttttaatgccatggagtactatattcttcaaagttccaacaaagatgcactacatttggacaatgtggaaatggccctcagccttctcttcctgatgtgccaattccactgatcctgtgaaggctgcccaatttgagccacctggacgtcaaatgattgccatcagaaagagacaacttgaagaaaccaacaatgactatgaaacagctgacggcggctacatgactctgaaccccagggcacctactgacgatgataaaaacatctacctgactcttcctcccaacgaccatgtcaacagtaataactaaagagtaacgttatgccatgtggtcatactctcagcttgctgagtggatgacaaaaagaggggaattgttaaaggaaaatttaaatggagactggaaaaatcctgagcaaacaaaaccacctggcccttagaaatagctttaactttgcttaaactacaaacacaagcaaaacttcacggggtcatactacatacaagcataagcaaaacttaacttggatcatttctggtaaatgcttatgttagaaataagacaaccccagccaatcacaagcagcctactaacatataattaggtgactagggactttctaagaagatacctacccccaaaaaacaattatgtaattgaaaaccaaccgattgcctttattttgcttccacattttcccaataaatacttgcctgtgacattttgccactggaacactaaacttcatgaattgcgcctcagatttttcctttaacatcttttttttttttgacagagtctcaatctgttacccaggctggagtgcagtggtgctatcttggctcactgcaaacccgcctcccaggtttaagcgattctcatgcctcagcctcccagtagctgggattagaggcatgtgccatcatacccagctaatttttgtattttttattttttttttttagtagagacagggtttcgcaatgttggccaggccgatctcgaacttctggcctctagcgatctgcccgcctcggcctcccaaagtgctgggatgaccagcatcagccccaatgtccagcctctttaacatcttctttcctatgccctctctgtggatccctactgctggtttctgccttctccatgctgagaacaaaatcacctattcactgcttatgcagtcggaagctccagaagaacaaagagcccaattaccagaaccacattaagtctccattgttttgccttgggatttgagaagagaattagagaggtgaggatctggtatttcctggactaaattccccttggggaagacgaagggatgctgcagttccaaaagagaaggactcttccagagtcatctacctgagtcccaaagctccctgtcctgaaagccacagacaatatggtcccaaatgactgactgcaccttctgtgcctcagccgttcttgacatcaagaatcttctgttccacatccacacagccaatacaattagtcaaaccactgttattaacagatgtagcaacatgagaaacgcttatgttacaggttacatgagagcaatcatgtaagtctatatgacttcagaaatgttaaaatagactaacctctaacaacaaattaaaagtgattgtttcaaggtgatgcaattattgatgacctattttatttttctataatgatcatatattacctttgtaataaaacattataaccaaaacattctgtttaccttttcagggctgtattgattggggtgtagactgaactatccggggtctgtttcttttcggtgatgaaagtcttgagaaggtagtaatggataagatgtgagggagaggagagagggagatttggagtgtagggtgagtgcccctcttcttagaactgaatactcttcttctaatgaacttgtattcttgtttccatgtcttcttccctttccttctatagcaaataaagcattcactttgttttgg

SEQ ID NO: 2668 - protein, 45 aa, Homo sapiens; identical to SEQ ID NO: 2662

SEQ ID NO: 2669 - DNA, 841 bp, Homo sapiens
caggcttgcaacttgtgtcctgagctctctgagtttatttgagtaattttatttctcatttgattcagcagttaatcttggtatttgacaagttcatctgtttccaacaggaactatactaggtccagtatagtgtactagtttccagacaaggtctgatttctggattgggatccagaggtcaaattgggtacttgacagattgaactaggtgttcaacagaaaccgaactgggggtccagttggagtcctcagccacctggacgtcaaatgattgccatcagaaagagacaacttgaagaaaccaacaatgactatgaaacagctgacggcggctacatgactctgaaccccagggcacctactgacgatgataaaaacatctacctgactcttcctcccaacgaccatgtcaacagtaataactaaagagtaacgttatgccatgtggtcatactctcagcttgctgagtggatgacaaaaagaggggaattgttaaaggaaaatttaaatggagactggaaaaatcctgagcaaacaaaaccacctggcccttagaaatagctttaactttgcttaaactacaaacacaagcaaaacttcacggggtcatactacatacaagcataagcaaaacttaacttggatcatttctggtaaatgcttatgttagaaataagacaaccccagccaatcacaagcagcctactaacatataattaggtgactagggactttctaagaagatacctacccccaaaaaacaattatgtaattgaaaaccaaccgattgcctttattttgcttccacattttcccaataaatacttgcctgtgaca

SEQ ID NO: 2670 - protein, 52 aa, Homo sapiens [sequence omitted]

SEQ ID NO: 2671 - DNA, 1780 bp, Homo sapiens
caggcttgcaacttgtgtcctgagctctctgagtttatttgagtaattttatttctcatttgattcagcagttaatcttggtatttgacaagttcatctgtttccaacaggaactatactaggtccagtatagtgtactagtttccagacaaggtctgatttctggattgggatccagaggtcaaattgggtacttgacagattgaactaggtgttcaacagaaaccgaactgggggtccagttggagtcctcagccacctggacgtcaaatgattgccatcagaaagagacaacttgaagaaaccaacaatgactatgaaacagctgacggcggctacatgactctgaaccccagggcacctactgacgatgataaaaacatctacctgactcttcctcccaacgaccatgtcaacagtaataactaaagagtaacgttatgccatgtggtcatactctcagcttgctgagtggatgacaaaaagaggggaattgttaaaggaaaatttaaatggagactggaaaaatcctgagcaaacaaaaccacctggcccttagaaatagctttaactttgcttaaactacaaacacaagcaaaacttcacggggtcatactacatacaagcataagcaaaacttaacttggatcatttctggtaaatgcttatgttagaaataagacaaccccagccaatcacaagcagcctactaacatataattaggtgactagggactttctaagaagatacctacccccaaaaaacaattatgtaattgaaaaccaaccgattgcctttattttgcttccacattttcccaataaatacttgcctgtgacattttgccactggaacactaaacttcatgaattgcgcctcagatttttcctttaacatcttttttttttttgacagagtctcaatctgttacccaggctggagtgcagtggtgctatcttggctcactgcaaacccgcctcccaggtttaagcgattctcatgcctcagcctcccagtagctgggattagaggcatgtgccatcatacccagctaatttttgtattttttattttttttttttagtagagacagggtttcgcaatgttggccaggccgatctcgaacttctggcctctagcgatctgcccgcctcggcctcccaaagtgctgggatgaccagcatcagccccaatgtccagcctctttaacatcttctttcctatgccctctctgtggatccctactgctggtttctgccttctccatgctgagaacaaaatcacctattcactgcttatgcagtcggaagctccagaagaacaaagagcccaattaccagaaccacattaagtctccattgttttgccttgggatttgagaagagaattagagaggtgaggatctggtatttcctggactaaattccccttggggaagacgaagggatgctgcagttccaaaagagaaggactcttccagagtcatctacctgagtcccaaagctccctgtcctgaaagccacagacaatatggtcccaaatgactgactgcaccttctgtgcctcagccgttcttgacatcaagaatcttctgttccacatccacacagccaatacaattagtcaaaccactgttattaacagatgtagcaacatgagaaacgcttatgttacaggttacatgagagcaatcatgtaagtctatatgacttcagaaatgttaaaatagactaacctctaacaacaaattaaaagtgattgtttcaaggtgatgcaatt

SEQ ID NO: 2672 - protein, 72 aa, Homo sapiens
MNCASDFSFNIFFFFDRVSICYPGWSAVVLSWLTANPPPRFKRFSCLSLPVAGIRGMCHHTQLIFVFFIFFF

SEQ ID NO: 2673 - DNA, 1845 bp, Homo sapiens
caggcttgcaacttgtgtcctgagctctctgagtttatttgagtaattttatttctcatttgattcagcagttaatcttggtatttgacaagttcatctgtttccaacaggaactatactaggtccagtatagtgtactagtttccagacaaggtctgatttctggattgggatccagaggtcaaattgggtacttgacagattgaactaggtgttcaacagaaaccgaactgggggtccagttggagtcctcagccacctggacgtcaaatgattgccatcagaaagagacaacttgaagaaaccaacaatgactatgaaacagctgacggcggctacatgactctgaaccccagggcacctactgacgatgataaaaacatctacctgactcttcctcccaacgaccatgtcaacagtaataactaaagagtaacgttatgccatgtggtcatactctcagcttgctgagtggatgacaaaaagaggggaattgttaaaggaaaatttaaatggagactggaaaaatcctgagcaaacaaaaccacctggcccttagaaatagctttaactttgcttaaactacaaacacaagcaaaacttcacggggtcatactacatacaagcataagcaaaacttaacttggatcatttctggtaaatgcttatgttagaaataagacaaccccagccaatcacaagcagcctactaacatataattaggtgactagggactttctaagaagatacctacccccaaaaaacaattatgtaattgaaaaccaaccgattgcctttattttgcttccacattttcccaataaatacttgcctgtgacattttgccactggaacactaaacttcatgaattgcgcctcagatttttcctttaacatcttttttttttttgacagagtctcaatctgttacccaggctggagtgcagtggtgctatcttggctcactgcaaacccgcctcccaggtttaagcgattctcatgcctcagcctcccagtagctgggattagaggcatgtgccatcatacccagctaatttttgtattttttattttttttttttagtagagacagggtttcgcaatgttggccaggccgatctcgaacttctggcctctagcgatctgcccgcctcggcctcccaaagtgctgggatgaccagcatcagccccaatgtccagcctctttaacatcttctttcctatgccctctctgtggatccctactgctggtttctgccttctccatgctgagaacaaaatcacctattcactgcttatgcagtcggaagctccagaagaacaaagagcccaattaccagaaccacattaagtctccattgttttgccttgggatttgagaagagaattagagaggtgaggatctggtatttcctggactaaattccccttggggaagacgaagggatgctgcagttccaaaagagaaggactcttccagagtcatctacctgagtcccaaagctccctgtcctgaaagccacagacaatatggtcccaaatgactgactgcaccttctgtgcctcagccgttcttgacatcaagaatcttctgttccacatccacacagccaatacaattagtcaaaccactgttattaacagatgtagcaacatgagaaacgcttatgttacaggttacatgagagcaatcatgtaagtctatatgacttcagaaatgttaaaatagactaacctctaacaacaaattaaaagtgattgtttcaaggtgatgcaattattgatgacctattttatttttctataatgatcatatattacctttgtaataaaacattataacc

SEQ ID NO: 2674 - protein, 72 aa, Homo sapiens; identical to SEQ ID NO: 2672

SEQ ID NO: 2675 - DNA, 2108 bp, Homo sapiens
caggcttgcaacttgtgtcctgagctctctgagtttatttgagtaattttatttctcatttgattcagcagttaatcttggtatttgacaagttcatctgtttccaacaggaactatactaggtccagtatagtgtactagtttccagacaaggtctgatttctggattgggatccagaggtcaaattgggtacttgacagattgaactaggtgttcaacagaaaccgaactgggggtccagttggagtcctcagccacctggacgtcaaatgattgccatcagaaagagacaacttgaagaaaccaacaatgactatgaaacagctgacggcggctacatgactctgaaccccagggcacctactgacgatgataaaaacatctacctgactcttcctcccaacgaccatgtcaacagtaataactaaagagtaacgttatgccatgtggtcatactctcagcttgctgagtggatgacaaaaagaggggaattgttaaaggaaaatttaaatggagactggaaaaatcctgagcaaacaaaaccacctggcccttagaaatagctttaactttgcttaaactacaaacacaagcaaaacttcacggggtcatactacatacaagcataagcaaaacttaacttggatcatttctggtaaatgcttatgttagaaataagacaaccccagccaatcacaagcagcctactaacatataattaggtgactagggactttctaagaagatacctacccccaaaaaacaattatgtaattgaaaaccaaccgattgcctttattttgcttccacattttcccaataaatacttgcctgtgacattttgccactggaacactaaacttcatgaattgcgcctcagatttttcctttaacatcttttttttttttgacagagtctcaatctgttacccaggctggagtgcagtggtgctatcttggctcactgcaaacccgcctcccaggtttaagcgattctcatgcctcagcctcccagtagctgggattagaggcatgtgccatcatacccagctaatttttgtattttttattttttttttttagtagagacagggtttcgcaatgttggccaggccgatctcgaacttctggcctctagcgatctgcccgcctcggcctcccaaagtgctgggatgaccagcatcagccccaatgtccagcctctttaacatcttctttcctatgccctctctgtggatccctactgctggtttctgccttctccatgctgagaacaaaatcacctattcactgcttatgcagtcggaagctccagaagaacaaagagcccaattaccagaaccacattaagtctccattgttttgccttgggatttgagaagagaattagagaggtgaggatctggtatttcctggactaaattccccttggggaagacgaagggatgctgcagttccaaaagagaaggactcttccagagtcatctacctgagtcccaaagctccctgtcctgaaagccacagacaatatggtcccaaatgactgactgcaccttctgtgcctcagccgttcttgacatcaagaatcttctgttccacatccacacagccaatacaattagtcaaaccactgttattaacagatgtagcaacatgagaaacgcttatgttacaggttacatgagagcaatcatgtaagtctatatgacttcagaaatgttaaaatagactaacctctaacaacaaattaaaagtgattgtttcaaggtgatgcaattattgatgacctattttatttttctataatgatcatatattacctttgtaataaaacattataaccaaaacattctgtttaccttttcagggctgtattgattggggtgtagactgaactatccggggtctgtttcttttcggtgatgaaagtcttgagaaggtagtaatggataagatgtgagggagaggagagagggagatttggagtgtagggtgagtgcccctcttcttagaactgaatactcttcttctaatgaacttgtattcttgtttccatgtcttcttccctttccttctatagcaaataaagcattcactttgttttgg

SEQ ID NO: 2676 - protein, 72 aa, Homo sapiens; identical to SEQ ID NO: 2672

SEQ ID NO: 2677 - DNA, 1071 bp, Homo sapiens
acctactgacgatgataaaaacatctacctgactcttcctcccaacgaccatgtcaacagtaataactaaagagtaacgttattgcctttattttgcttccacattttcccaataaatacttgcctgtgacattttgccactggaacactaaacttcatgaattgcgcctcagatttttcctttaacatcttttttttttttgacagagtctcaatctgttacccaggctggagtgcagtggtgctatcttggctcactgcaaacccgcctcccaggtttaagcgattctcatgcctcagcctcccagtagctgggattagaggcatgtgccatcatacccagctaatttttgtattttttattttttttttttagtagagacagggtttcgcaatgttggccaggccgatctcgaacttctggcctctagcgatctgcccgcctcggcctcccaaagtgctgggatgaccagcatcagccccaatgtccagcctctttaacatcttctttcctatgccctctctgtggatccctactgctggtttctgccttctccatgctgagaacaaaatcacctattcactgcttatgcagtcggaagctccagaagaacaaagagcccaattaccagaaccacattaagtctccattgttttgccttgggatttgagaagagaattagagaggtgaggatctggtatttcctggactaaattccccttggggaagacgaagggatgctgcagttccaaaagagaaggactcttccagagtcatctacctgagtcccaaagctccctgtcctgaaagccacagacaatatggtcccaaatgactgactgcaccttctgtgcctcagccgttcttgacatcaagaatcttctgttccacatccacacagccaatacaattagtcaaaccactgttattaacagatgtagcaacatgagaaacgcttatgttacaggttacatgagagcaatcatgtaagtctatatgacttcagaaatgttaaaatagactaacctctaacaacaaattaaaagtgattgtttcaaggtgatgcaatt

SEQ ID NO: 2678 - protein, 72 aa, Homo sapiens; identical to SEQ ID NO: 2672

SEQ ID NO: 2679 - DNA, 1136 bp, Homo sapiens
acctactgacgatgataaaaacatctacctgactcttcctcccaacgaccatgtcaacagtaataactaaagagtaacgttattgcctttattttgcttccacattttcccaataaatacttgcctgtgacattttgccactggaacactaaacttcatgaattgcgcctcagatttttcctttaacatcttttttttttttgacagagtctcaatctgttacccaggctggagtgcagtggtgctatcttggctcactgcaaacccgcctcccaggtttaagcgattctcatgcctcagcctcccagtagctgggattagaggcatgtgccatcatacccagctaatttttgtattttttattttttttttttagtagagacagggtttcgcaatgttggccaggccgatctcgaacttctggcctctagcgatctgcccgcctcggcctcccaaagtgctgggatgaccagcatcagccccaatgtccagcctctttaacatcttctttcctatgccctctctgtggatccctactgctggtttctgccttctccatgctgagaacaaaatcacctattcactgcttatgcagtcggaagctccagaagaacaaagagcccaattaccagaaccacattaagtctccattgttttgccttgggatttgagaagagaattagagaggtgaggatctggtatttcctggactaaattccccttggggaagacgaagggatgctgcagttccaaaagagaaggactcttccagagtcatctacctgagtcccaaagctccctgtcctgaaagccacagacaatatggtcccaaatgactgactgcaccttctgtgcctcagccgttcttgacatcaagaatcttctgttccacatccacacagccaatacaattagtcaaaccactgttattaacagatgtagcaacatgagaaacgcttatgttacaggttacatgagagcaatcatgtaagtctatatgacttcagaaatgttaaaatagactaacctctaacaacaaattaaaagtgattgtttcaaggtgatgcaattattgatgacctattttatttttctataatgatcatatattacctttgtaataaaacattataacc

SEQ ID NO: 2680 - protein, 72 aa, Homo sapiens; identical to SEQ ID NO: 2672

SEQ ID NO: 2681 - DNA, 1399 bp, Homo sapiens
acctactgacgatgataaaaacatctacctgactcttcctcccaacgaccatgtcaacagtaataactaaagagtaacgttattgcctttattttgcttccacattttcccaataaatacttgcctgtgacattttgccactggaacactaaacttcatgaattgcgcctcagatttttcctttaacatcttttttttttttgacagagtctcaatctgttacccaggctggagtgcagtggtgctatcttggctcactgcaaacccgcctcccaggtttaagcgattctcatgcctcagcctcccagtagctgggattagaggcatgtgccatcatacccagctaatttttgtattttttattttttttttttagtagagacagggtttcgcaatgttggccaggccgatctcgaacttctggcctctagcgatctgcccgcctcggcctcccaaagtgctgggatgaccagcatcagccccaatgtccagcctctttaacatcttctttcctatgccctctctgtggatccctactgctggtttctgccttctccatgctgagaacaaaatcacctattcactgcttatgcagtcggaagctccagaagaacaaagagcccaattaccagaaccacattaagtctccattgttttgccttgggatttgagaagagaattagagaggtgaggatctggtatttcctggactaaattccccttggggaagacgaagggatgctgcagttccaaaagagaaggactcttccagagtcatctacctgagtcccaaagctccctgtcctgaaagccacagacaatatggtcccaaatgactgactgcaccttctgtgcctcagccgttcttgacatcaagaatcttctgttccacatccacacagccaatacaattagtcaaaccactgttattaacagatgtagcaacatgagaaacgcttatgttacaggttacatgagagcaatcatgtaagtctatatgacttcagaaatgttaaaatagactaacctctaacaacaaattaaaagtgattgtttcaaggtgatgcaattattgatgacctattttatttttctataatgatcatatattacctttgtaataaaacattataaccaaaacattctgtttaccttttcagggctgtattgattggggtgtagactgaactatccggggtctgtttcttttcggtgatgaaagtcttgagaaggtagtaatggataagatgtgagggagaggagagagggagatttggagtgtagggtgagtgcccctcttcttagaactgaatactcttcttctaatgaacttgtattcttgtttccatgtcttcttccctttccttctatagcaaataaagcattcactttgttttgg

SEQ ID NO: 2682 - protein, 72 aa, Homo sapiens; identical to SEQ ID NO: 2672

SEQ ID NO: 2683 - DNA, 2923 bp, Homo sapiens
taaggaaccaggcaccgtcttaaatcgcggtttggaaaatattttgttcaagataaaactgttttaagatatacgtgtatatatcttatatatctgtattcgcatggtaacatatcttcggccttcctgagccgctgggctctcagcggccctccaaggcagcccgcaggcccctgtgtgcctcagggatccgacctcccacagccccggggagaccttgcctctaaagttgctgcttttgcagcctctgccacaaccgcgcgtcctcagagccagcccggaggagctagaaccttccccgcatttctttcagcagcctgagtcagaggcgggctggcctggcgtagccgcccagcctcgcggctcatgccccgatctgcccgaaccttctcccggggtcagcgccgcgccgcgccacccggctgagtcagcccgggcgggcgagaggctctcaactgggcgggaaggtgcgggaaggtgcggaaaggttcgcgaaagttcgcggcggcgggggtcgggtgaggcgcaaaaggataaaaagccggtggaagcggagctgagcagatccgagccgggctggctgcagagaaaccgcagggagagcctcactgctgagcgcccctcgacggcggagcggcagcagcctccgtggcctccagcatccgacaagaagcttcagccatgcaggccccacgggagctcgcggtgggcatcgacctgggcaccacctactcgtgcgtgggcgtgtttcagcagggccgcgtggagatcctggccaacgaccagggcaaccgcaccacgcccagctacgtggccttcaccgacaccgagcggctggtcggggacgcggccaagagccaggcggccctgaacccccacaacaccgtgttcgatgccaagcggctgatcgggcgcaagttcgcggacaccacggtgcagtcggacatgaagcactggcccttccgggtggtgagcgagggcggcaagcccaaggtgcgcgtatgctaccgcggggaggacaagacgttctaccccgaggagatctcgtccatggtgctgagcaagatgaaggagacggccgaggcgtacctgggccagcccgtgaagcacgcagtgatcaccgtgcccgcctatttcaatgactcgcagcgccaggccaccaaggacgcgggggccatcgcggggctcaacgtgttgcggatcatcaatgagcccacggcagctgccatcgcctatgggctggaccggcggggcgcgggagagcgcaacgtgctcatttttgacctgggtgggggcaccttcgatgtgtcggttctctccattgacgctggtgtctttgaggtgaaagccactgctggagatacccacctgggaggagaggacttcgacaaccggctcgtgaaccacttcatggaagaattccggcggaagcatgggaaggacctgagcgggaacaagcgtgccctgcgcaggctgcgcacagcctgtgagcgcgccaagcgcaccctgtcctccagcacccaggccaccctggagatagactccctgttcgagggcgtggacttctacacgtccatcactcgtgcccgctttgaggaactgtgctcagacctcttccgcagcaccctggagccggtggagaaggccctgcgggatgccaagctggacaaggcccagattcatgacgtcgtcctggtggggggctccacacgcatccccaaggtgcagaagttgctgcaggacttcttcaacggcaaggagctgaacaagagcatcaaccctgatgaggctgtggcctatggggctgctgtgcaggcggccgtgttgatgggggacaaatgtgagaaagtgcaggatctcctgctgctggatgtggctcccctgtctctggggctggagacagcaggtggggtgatgaccacgctgatccagaggaacgccactatccccaccaagcagacccagactttcaccacctactcggacaaccagcctggggtcttcatccaggtgtatgagggtgagagggccatgaccaaggacaacaacctgctggggcgttttgaactcagtggcatccctcctgccccacgtggagtcccccagatagaggtgacttttgacattgatgctaatggcatcctgagcgtgacagccactgacaggagcacaggtaaggctaacaagatcaccatcaccaatgacaagggccggctgagcaaggaggaggtggagaggatggttcatgaagccgagcagtacaaggctgaggatgaggcccagagggacagagtggctgccaaaaactcgctggaggcccatgtcttccatgtgaaaggttctttgcaagaggaaagccttagggacaagattcccgaagaggacaggcgcaaaatgcaagacaagtgtcgggaagtccttgcctggctggagcacaaccagctggcagagaaggaggagtatgagcatcagaagagggagctggagcaaatctgtcgccccatcttctccaggctctatggggggcctggtgtccctgggggcagcagttgtggcactcaagcccgccagggggaccccagcaccggccccatcattgaggaggttgattgaatggcccttcgtgataagtcagctgtgactgtcagggctatgctatgggccttctagactgtcttctatgatcctgcccttcagagatgaactttccctccaaagctagaactttcttcccaggataactgaagtcttttgactttttgcggggagggcggttcatcctcttctgcttcaaataaaaagtcattaatttattaaaacttgtgtggcactttaacattgctttcacctatattttgtgtactttgttacttgcatgtatgaattttgttatgtaaaatatagttatagacctaaataagct

SEQ ID NO: 2684 - protein, 643 aa, Homo sapiens; identical to SEQ ID NO: 145

SEQ ID NO: 2685 - DNA, 589 bp, Homo sapiens
ctctaaagttgctgcttttgcagcctctgccacaaccgcgcgtcctcagagccagcccggaggagctagaaccttccccgcatttctttcagcagcctgagtcagaggcgggctggcctggcgtagccgcccagcctcgcggctcatgccccgatctgcccgaaccttctcccggggtcagcgccgcgccgcgccacccggctgagtcagcccgggcgggcgagaggctctcaactgggcgggaaggtgcgggaaggtgcggaaaggttcgcgaaagttcgcggcggcgggggtcgggtgaggcgcaaaaggataaaaagccggtggaagcggagctgagcagatccgagccgggctggctgcagagaaaccgcagggagagcctcactgctgagcgcccctcgacggcggagcggcagcagcctccgtggcctccagcatccgacaagaagcttcagccatgcaggccccacgggagctcgcggtgggcatcgacctgagcgggaacaagcgtgccctgcgcaggctgcgcacagcctgtgagcgcgccaagcgcaccctgtcctccagcacccaggccaccctggag

SEQ ID NO: 2686 - protein, 42 aa, Homo sapiens
MQAPRELAVGIDLSGNKRALRRLRTACERAKRTLSSSTQATL

SEQ ID NO: 2687 - DNA, 2253 bp, Homo sapiens
agatccgagccgggctggctgcagagaaaccgcagggagagcctcactgctgagcgcccctcgacggcggagcggcagcagcctccgtggcctccagcatccgacaagaagcttcagccatgcaggccccacgggagctcgcggtgggcatcgacctgggcaccacctactcgtgcgtgggcgtgtttcagcagggccgcgtggagatcctggccaacgaccagggcaaccgcaccacgcccagctacgtggccttcaccgacaccgagcggctggtcggggacgcggccaagagccaggcggccctgaacccccacaacaccgtgttcgatgccaagcggctgatcgggcgcaagttcgcggacaccacggtgcagtcggacatgaagcactggcccttccgggtggtgagcgagggcggcaagcccaaggtgcgcgtatgctaccgcggggaggacaagacgttctaccccgaggagatctcgtccatggtgctgagcaagatgaaggagacggccgaggcgtacctgggccagcccgtgaagcacgcagtgatcaccgtgcccgcctatttcaatgactcgcagcgccaggccaccaaggacgcgggggccatcgcggggctcaacgtgttgcggatcatcaatgagcccacggcagctgccatcgcctatgggctggaccggcggggcgcgggagagcgcaacgtgctcatttttgacctgggtgggggcaccttcgatgtgtcggttctctccattgacgctggtgtctttgaggtgaaagccactgctggagatacccacctgggaggagaggacttcgacaaccggctcgtgaaccacttcatggaagaattccggcggaagcatgggaaggacctgagcgggaacaagcgtgccctgcgcaggctgcgcacagcctgtgagcgcgccaagcgcaccctgtcctccagcacccaggccaccctggagatagactccctgttcgagggcgtggacttctacacgtccatcactcgtgcccgctttgaggaactgtgctcagacctcttccgcagcaccctggagccggtggagaaggccctgcgggatgccaagctggacaaggcccagattcatgacgtcgtcctggtggggggctccacacgcatccccaaggtgcagaagttgctgcaggacttcttcaacggcaaggagctgaacaagagcatcaaccctgatgaggctgtggcctatggggctgctgtgcaggcggccgtgttgatgggggacaaatgtgagaaagtgcaggatctcctgctgctggatgtggctcccctgtctctggggctggagacagcaggtggggtgatgaccacgctgatccagaggaacgccactatccccaccaagcagacccagactttcaccacctactcggacaaccagcctggggtcttcatccaggtgtatgagggtgagagggccatgaccaaggacaacaacctgctggggcgttttgaactcagtggcatccctcctgccccacgtggagtcccccagatagaggtgacttttgacattgatgctaatggcatcctgagcgtgacagccactgacaggagcacaggtaaggctaacaagatcaccatcaccaatgacaagggccggctgagcaaggaggaggtggagaggatggttcatgaagccgagcagtacaaggctgaggatgaggcccagagggacagagtggctgccaaaaactcgctggaggcccatgtcttccatgtgaaaggttctttgcaagaggaaagccttagggacaagattcccgaagaggacaggcgcaaaatgcaagacaagtgtcgggaagtccttgcctggctggagcacaaccagctggcagagaaggaggagtatgagcatcagaagagggagctggagcaaatctgtcgccccatcttctccaggctctatggggggcctggtgtccctgggggcagcagttgtggcactcaagcccgccagggggaccccagcaccggccccatcattgaggaggttgattgaatggcccttcgtgataagtcagctgtgactgtcagggctatgctatgggccttctagactgtcttctatgatcctgcccttcagagatgaactttccctccaaagctagaactttcttcccaggataactgaagtcttttgactttttgcggggagggcggttcatcctcttctgcttcaaataaaaagtcattaatttatt

SEQ ID NO: 2688 - protein, 643 aa, Homo sapiens; identical to SEQ ID NO: 145

SEQ ID NO: 2689 - DNA, 2288 bp, Homo sapiens
agatccgagccgggctggctgcagagaaaccgcagggagagcctcactgctgagcgcccctcgacggcggagcggcagcagcctccgtggcctccagcatccgacaagaagcttcagccatgcaggccccacgggagctcgcggtgggcatcgacctgggcaccacctactcgtgcgtgggcgtgtttcagcagggccgcgtggagatcctggccaacgaccagggcaaccgcaccacgcccagctacgtggccttcaccgacaccgagcggctggtcggggacgcggccaagagccaggcggccctgaacccccacaacaccgtgttcgatgccaagcggctgatcgggcgcaagttcgcggacaccacggtgcagtcggacatgaagcactggcccttccgggtggtgagcgagggcggcaagcccaaggtgcgcgtatgctaccgcggggaggacaagacgttctaccccgaggagatctcgtccatggtgctgagcaagatgaaggagacggccgaggcgtacctgggccagcccgtgaagcacgcagtgatcaccgtgcccgcctatttcaatgactcgcagcgccaggccaccaaggacgcgggggccatcgcggggctcaacgtgttgcggatcatcaatgagcccacggcagctgccatcgcctatgggctggaccggcggggcgcgggagagcgcaacgtgctcatttttgacctgggtgggggcaccttcgatgtgtcggttctctccattgacgctggtgtctttgaggtgaaagccactgctggagatacccacctgggaggagaggacttcgacaaccggctcgtgaaccacttcatggaagaattccggcggaagcatgggaaggacctgagcgggaacaagcgtgccctgcgcaggctgcgcacagcctgtgagcgcgccaagcgcaccctgtcctccagcacccaggccaccctggagatagactccctgttcgagggcgtggacttctacacgtccatcactcgtgcccgctttgaggaactgtgctcagacctcttccgcagcaccctggagccggtggagaaggccctgcgggatgccaagctggacaaggcccagattcatgacgtcgtcctggtggggggctccacacgcatccccaaggtgcagaagttgctgcaggacttcttcaacggcaaggagctgaacaagagcatcaaccctgatgaggctgtggcctatggggctgctgtgcaggcggccgtgttgatgggggacaaatgtgagaaagtgcaggatctcctgctgctggatgtggctcccctgtctctggggctggagacagcaggtggggtgatgaccacgctgatccagaggaacgccactatccccaccaagcagacccagactttcaccacctactcggacaaccagcctggggtcttcatccaggtgtatgagggtgagagggccatgaccaaggacaacaacctgctggggcgttttgaactcagtggcatccctcctgccccacgtggagtcccccagatagaggtgacttttgacattgatgctaatggcatcctgagcgtgacagccactgacaggagcacaggtaaggctaacaagatcaccatcaccaatgacaagggccggctgagcaaggaggaggtggagaggatggttcatgaagccgagcagtacaaggctgaggatgaggcccagagggacagagtggctgccaaaaactcgctggaggcccatgtcttccatgtgaaaggttctttgcaagaggaaagccttagggacaagattcccgaagaggacaggcgcaaaatgcaagacaagtgtcgggaagtccttgcctggctggagcacaaccagctggcagagaaggaggagtatgagcatcagaagagggagctggagcaaatctgtcgccccatcttctccaggctctatggggggcctggtgtccctgggggcagcagttgtggcactcaagcccgccagggggaccccagcaccggccccatcattgaggaggttgattgaatggcccttcgtgataagtcagctgtgactgtcagggctatgctatgggccttctagactgtcttctatgatcctgcccttcagagatgaactttccctccaaagctagaactttcttcccaggataactgaagtcttttgactttttgcggggagggcggttcatcctcttctgcttcaaataaaaagtcattaatttattaaaacttgtgtggcactttaacattgctttcacct

SEQ ID NO: 2690 - protein, 643 aa, Homo sapiens; identical to SEQ ID NO: 145

SEQ ID NO: 2691 - DNA, 1235 bp, Homo sapiens
tctctttctgcttggtgatggtactcctttttgcagtggacacaggactatatttctctgtgaagacaaacattcgaagctcaacaagagactggaaggaccataaatttaaatggagaaaggaccctcaagacaaatgacccccatcccatgggggtaataagagcagtagcagcagcatctctgaacatttctctggatttgcaaccccatcatcctcaggcctctctacaagcagcaggaaacatagaactcagagccagatcccttatccaactctcgacttttccttggtctccagtggaagggaaaagcccatgatcttcaagcagggaagccccagtgagtagctgcattcctagaaattgaagtttcagagctacacaaacactttttctgtcccaaccgttccctcacagcaaagcaacaatacaggctagggatggtaatcctttaaacatacaaaaattgctcgtgttataaattacccagtttagaggggaaaaaaaaacaattattcctaaataaatggataagtagaattaatggttgaggcaggaccatacagagtgtgggaactgctggggatctagggaattcagtgggaccaatgaaagcatggctgagaaatagcaggtagtccaggatagtctaagggaggtgttcccatctgagcccagagataagggtgtcttcctagaacattagccgtagtggaattaacaggaaatcatgagggtgacgtagaattgagtcttccaggggactctatcagaactggaccatctccaagtatataacgatgagtcctcttaatgctaggagtagaaaatggtcctaggaaggggactgaggattgcggtggggggtggggtggaaaagaaaaattagaggttaatgcagggactgtaaaaccaccttttctgcttcaatatctaattcctgtgtagctttgttcattgcatttattaaacaaatgttgtataaccaatactaaatgtactactgagcttcgctgagttaagttatgaaactttcaaatccttcatcatgtcagttccaatgaggtggggatggagaagacaattgttgcttatgaaagaaagctttagctgtctctgttttgtaagctttaagcgcaacatttcttggttccaataaagcattttacaagatcttgcatgctactcttagatagaagatgggaaaaccatggtaataaaatatgaatgata

SEQ ID NO: 2692 - protein, 44 aa, Homo sapiens [sequence omitted]

SEQ ID NO: 2693 - DNA, 2307 bp, Homo sapiens
gattctgtgtgtgtcctcagatgctcagccacagacctttgagggagtaaagggggcagacccacccaccttgcctccaggctctttccttcctggtcctgttctatggtggggctcccttgccagacttcagactgagaagtcagatgaagtttcaagaaaaggaaattggtgggtgacagagatgggtggaggggctggggaaaggctgtttacttcctcctgtctagtcggtttggtccctttagggctccggatatctttggtgacttgtccactccagtgtggcatcatgtggcagctgctcctcccaactgctctgctacttctagtttcagctggcatgcggactgaagatctcccaaaggctgtggtgttcctggagcctcaatggtacagggtgctcgagaaggacagtgtgactctgaagtgccagggagcctactcccctgaggacaattccacacagtggtttcacaatgagagcctcatctcaagccaggcctcgagctacttcattgacgctgccacagtcgacgacagtggagagtacaggtgccagacaaacctctccaccctcagtgacccggtgcagctagaagtccatatcggctggctgttgctccaggcccctcggtgggtgttcaaggaggaagaccctattcacctgaggtgtcacagctggaagaacactgctctgcataaggtcacatatttacagaatggcaaaggcaggaagtattttcatcataattctgacttctacattccaaaagccacactcaaagacagcggctcctacttctgcagggggctttttgggagtaaaaatgtgtcttcagagactgtgaacatcaccatcactcaaggtttggcagtgtcaaccatctcatcattctttccacctgggtaccaagtctctttctgcttggtgatggtactcctttttgcagtggacacaggactatatttctctgtgaagacaaacattcgaagctcaacaagagactggaaggaccataaatttaaatggagaaaggaccctcaagacaaatgacccccatcccatgggggtaataagagcagtagcagcagcatctctgaacatttctctggatttgcaaccccatcatcctcaggcctctctacaagcagcaggaaacatagaactcagagccagatcccttatccaactctcgacttttccttggtctccagtggaagggaaaagcccatgatcttcaagcagggaagccccagtgagtagctgcattcctagaaattgaagtttcagagctacacaaacactttttctgtcccaaccgttccctcacagcaaagcaacaatacaggctagggatggtaatcctttaaacatacaaaaattgctcgtgttataaattacccagtttagaggggaaaaaaaaacaattattcctaaataaatggataagtagaattaatggttgaggcaggaccatacagagtgtgggaactgctggggatctagggaattcagtgggaccaatgaaagcatggctgagaaatagcaggtagtccaggatagtctaagggaggtgttcccatctgagcccagagataagggtgtcttcctagaacattagccgtagtggaattaacaggaaatcatgagggtgacgtagaattgagtcttccaggggactctatcagaactggaccatctccaagtatataacgatgagtcctcttaatgctaggagtagaaaatggtcctaggaaggggactgaggattgcggtggggggtggggtggaaaagaaagtacagaacaaaccctgtgtcactgtcccaagttgctaagtgaacagaactatctcagcatcagaatgagaaagcctgagaagaaagaaccaaccacaagcacacaggaaggaaagcgcaggaggtgaaaatgctttcttggccagggtagtaagaattagaggttaatgcagggactgtaaaaccaccttttctgcttcaatatctaattcctgtgtagctttgttcattgcatttattaaacaaatgttgtataaccaatactaaatgtactactgagcttcgctgagttaagttatgaaactttcaaatccttcatcatgtcagttccaatgaggtggggatggagaagacaattgttgcttatgaaagaaagctttagctgtctctgttttgtaagctttaagcgcaacatttcttggttccaataaagcattttacaagatcttgcatgctactcttagatagaagatgggaaaaccatggtaataaaatatgaatgata

SEQ ID NO: 2694 - protein, 290 aa, Homo sapiens; identical to SEQ ID NO: 147

SEQ ID NO: 2695 - DNA, 2150 bp, Homo sapiens
agccccggctcctaggctgacagaccagcccagatccagtggcccggaggggcctgagctaaatccgcaggacctgggtaacacgaggaagggctccggatatctttggtgacttgtccactccagtgtggcatcatgtggcagctgctcctcccaactgctctgctacttctagtttcagctggcatgcggactgaagatctcccaaaggctgtggtgttcctggagcctcaatggtacagggtgctcgagaaggacagtgtgactctgaagtgccagggagcctactcccctgaggacaattccacacagtggtttcacaatgagagcctcatctcaagccaggcctcgagctacttcattgacgctgccacagtcgacgacagtggagagtacaggtgccagacaaacctctccaccctcagtgacccggtgcagctagaagtccatatcggctggctgttgctccaggcccctcggtgggtgttcaaggaggaagaccctattcacctgaggtgtcacagctggaagaacactgctctgcataaggtcacatatttacagaatggcaaaggcaggaagtattttcatcataattctgacttctacattccaaaagccacactcaaagacagcggctcctacttctgcagggggctttttgggagtaaaaatgtgtcttcagagactgtgaacatcaccatcactcaaggtttggcagtgtcaaccatctcatcattctttccacctgggtaccaagtctctttctgcttggtgatggtactcctttttgcagtggacacaggactatatttctctgtgaagacaaacattcgaagctcaacaagagactggaaggaccataaatttaaatggagaaaggaccctcaagacaaatgacccccatcccatgggggtaataagagcagtagcagcagcatctctgaacatttctctggatttgcaaccccatcatcctcaggcctctctacaagcagcaggaaacatagaactcagagccagatcccttatccaactctcgacttttccttggtctccagtggaagggaaaagcccatgatcttcaagcagggaagccccagtgagtagctgcattcctagaaattgaagtttcagagctacacaaacactttttctgtcccaaccgttccctcacagcaaagcaacaatacaggctagggatggtaatcctttaaacatacaaaaattgctcgtgttataaattacccagtttagaggggaaaaaaaaacaattattcctaaataaatggataagtagaattaatggttgaggcaggaccatacagagtgtgggaactgctggggatctagggaattcagtgggaccaatgaaagcatggctgagaaatagcaggtagtccaggatagtctaagggaggtgttcccatctgagcccagagataagggtgtcttcctagaacattagccgtagtggaattaacaggaaatcatgagggtgacgtagaattgagtcttccaggggactctatcagaactggaccatctccaagtatataacgatgagtcctcttaatgctaggagtagaaaatggtcctaggaaggggactgaggattgcggtggggggtggggtggaaaagaaagtacagaacaaaccctgtgtcactgtcccaagttgctaagtgaacagaactatctcagcatcagaatgagaaagcctgagaagaaagaaccaaccacaagcacacaggaaggaaagcgcaggaggtgaaaatgctttcttggccagggtagtaagaattagaggttaatgcagggactgtaaaaccaccttttctgcttcaatatctaattcctgtgtagctttgttcattgcatttattaaacaaatgttgtataaccaatactaaatgtactactgagcttcgctgagttaagttatgaaactttcaaatccttcatcatgtcagttccaatgaggtggggatggagaagacaattgttgcttatgaaagaaagctttagctgtctctgttttgtaagctttaagcgcaacatttcttggttccaataaagcattttacaagatcttgcatgctactcttagatagaagatgggaaaaccatggtaataaaatatgaatgata

SEQ ID NO: 2696 - protein, 254 aa, Homo sapiens
MWQLLLPTALLLLVSAGMRTEDLPKAVVFLEPQWYRVLEKDSVTLKCQGAYSPEDNSTQWFHNESLISSQASSYFIDAATVDDSGEYRCQTNLSTLSDPVQLEVHIGWLLLQAPRWVFKEEDPIHLRCHSWKNTALHKVTYLQNGKGRKYFHHNSDFYIPKATLKDSGSYFCRGLFGSKNVSSETVNITITQGLAVSTISSFFPPGYQVSFCLVMVLLFAVDTGLYFSVKTNIRSSTRDWKDHKFKWRKDPQDK

SEQ ID NO: 2697 - DNA, 2091 bp, Homo sapiens
agccccggctcctaggctgacagaccagcccagatccagtggcccggaggggcctgagctaaatccgcaggacctgggtaacacgaggaagggctccggatatctttggtgacttgtccactccagtgtggcatcatgtggcagctgctcctcccaactgctctgctacttctagtttcagctggcatgcggactgaagatctcccaaaggctgtggtgttcctggagcctcaatggtacagggtgctcgagaaggacagtgtgactctgaagtgccagggagcctactcccctgaggacaattccacacagtggtttcacaatgagagcctcatctcaagccaggcctcgagctacttcattgacgctgccacagtcgacgacagtggagagtacaggtgccagacaaacctctccaccctcagtgacccggtgcagctagaagtccatatcggctggctgttgctccaggcccctcggtgggtgttcaaggaggaagaccctattcacctgaggtgtcacagctggaagaacactgctctgcataaggtcacatatttacagaatggcaaaggcaggaagtattttcatcataattctgacttctacattccaaaagccacactcaaagacagcggctcctacttctgcagggggctttttgggagtaaaaatgtgtcttcagagactgtgaacatcaccatcactcaaggtttggcagtgtcaaccatctcatcattctttccacctgggtaccaagtctctttctgcttggtgatggtactcctttttgcagtggacacaggactatatttctctgtgaagacaaacattcgaagctcaacaagagactggaaggaccataaatttaaatggagaaaggaccctcaagacaaatgacccccatcccatgggggtaataagagcagtagcagcagcatctctgaacatttctctggatttgcaaccccatcatcctcaggcctctctacaagcagcaggaaacatagaactcagagccagatcccttatccaactctcgacttttccttggtctccagtggaagggaaaagcccatgatcttcaagcagggaagccccagtgagtagctgcattcctagaaattgaagtttcagagctacacaaacactttttctgtcccaaccgttccctcacagcaaagcaacaatacaggctagggatggtaatcctttaaacatacaaaaattgctcgtgttataaattacccagtttagaggggaaaaaaaaacaattattcctaaataaatggataagtagaattaatggttgaggcaggaccatacagagtgtgggaactgctggggatctagggaattcagtgggaccaatgaaagcatggctgagaaatagcaggtagtccaggatagtctaagggaggtgttcccatctgagcccagagataagggtgtcttcctagaacattagccgtagtggaattaacaggaaatcatgagggtgacgtagaattgagtcttccaggggactctatcagaactggaccatctccaagtatataacgatgagtcctcttaatgctaggagtagaaaatggtcctaggaaggggactgaggattgcggtggggggtggggtggaaaagaaagtacagaacaaaccctgtgtcactgtcccaagttgctaagtgaacagaactatctcagcatcagaatgagaaagcctgagaagaaagaaccaaccacaagcacacaggaaggaaagcgcaggaggtgaaaatgctttcttggccagggtagtaagaattagaggttaatgcagggactgtaaaaccaccttttctgcttcaatatctaattcctgtgtagctttgttcattgcatttattaaacaaatgttgtataaccaatactaaatgtactactgagcttcgctgagttaagttatgaaactttcaaatccttcatcatgtcagttccaatgaggtggggatggagaagacaattgttgcttatgaaagaaagctttagctgtctctgttttgtaagctttaagcgcaacatttcttggttccaataaagcattttacaagat

SEQ ID NO: 2698 - protein, 254 aa, Homo sapiens; identical to SEQ ID NO: 2696

SEQ ID NO: 2699 - DNA, 1180 bp, Homo sapiens
agccccggctcctaggctgacagaccagcccagatccagtggcccggaggggcctgagctaaatccgcaggacctgggtaacacgaggaagggctccggatatctttggtgacttgtccactccagtgtggcatcatgtggcagctgctcctcccaactgctctgctacttctagtttcagctggcatgcggactgaagatctcccaaaggctgtggtgttcctggagcctcaatggtacagggtgctcgagaaggacagtgtgactctgaagtgccagggagcctactcccctgaggacaattccacacagtggtttcacaatgagagcctcatctcaagccaggcctcgagctacttcattgacgctgccacagtcgacgacagtggagagtacaggtgccagacaaacctctccaccctcagtgacccggtgcagctagaagtccatatcggctggctgttgctccaggcccctcggtgggtgttcaaggaggaagaccctattcacctgaggtgtcacagctggaagaacactgctctgcataaggtcacatatttacagaatggcaaaggcaggaagtattttcatcataattctgacttctacattccaaaagccacactcaaagacagcggctcctacttctgcagggggctttttgggagtaaaaatgtgtcttcagagactgtgaacatcaccatcactcaaggtttggcagtgtcaaccatctcatcattctttccacctgggtaccaagtctctttctgcttggtgatggtactcctttttgcagtggacacaggactatatttctctgtgaagacaaacattcgaagctcaacaagagactggaaggaccataaatttaaatggagaaaggaccctcaagacaaatgacccccatcccatgggggtaataagagcagtagcagcagcatctctgaacatttctctggatttgcaaccccatcatcctcaggcctctctacaagcagcaggaaacatagaactcagagccagatcccttatccaactctcgacttttccttggtctccagtggaagggaaaagcccatgatcttcaagcagggaagccccagtgagtagctgcattcctagaaattgaagtttcagagctacacaaacactttttctgtcccaaccgttccctcacagc

SEQ ID NO: 2700 - protein, 254 aa, Homo sapiens; identical to SEQ ID NO: 2696

SEQ ID NO: 2701 - DNA, 898 bp, Homo sapiens
gtccactccagtgtggcatcatgtggcagctgctcctcccaactgctctgctacttctagtttcagctggcatgcggactggtgagtcagcttcatggtcttggattgacccagtggggcacatatggggacaaaggccataagatattgggaaatgcttgttgaatgggaaaatgctgatgtggggttagcagggatagttcctccaacacagcagaacttggccctgtgcttctctggccagctttccttaagatactgaacaggccaaaaatggggccaagatgctctaagactgagccaccaagcatgggtttgcaatgagctcattctggctttgaggctccctgggaatggcagtgtagagcctgctcctctccctgtcctcaccccacattatcttggctcctcagaagatctcccaaaggctgtggtgttcctggagcctcaatggtacagggtgctcgagaaggacagtgtgactctgaagtgccagggagcctactcccctgaggacaattccacacagtggtttcacaatgagagcctcatctcaagccaggcctcgagctacttcattgacgctgccacagtcgacgacagtggagagtacaggtgccagacaaacctctccaccctcagtgacccggtgcagctagaagtccatatcggtgagttgatgaaggggaagaggaaaatcaccaataaagggtgaaacaaagggtcctgaaatacttggtaagagccagagatgatattcttagagataaaagctaagatgagatgatgtgtggtcccactgaatggtatcagagttgtagtcctagctctaagtaggtcttgggcaaaatgtcaaagcctgtcagacagtagatataggactgctgcattgcacaat

SEQ ID NO: 2702 - protein, 40 aa, Homo sapiens
MWQLLLPTALLLLVSAGMRTGESASWSWIDPVGHIWGQRP

SEQ ID NO: 2703 - DNA, 654 bp, Homo sapiens
atgggtggaggggctggggaaaggctgtttacttcctcctgtctagtcggtttggtccctttagggctccggatatctttggtgacttgtccactccagtgtggcatcatgtggcagctgctcctcccaactgctctgctacttctagtttcagctggcatgcggactgaagatctcccaaaggctgtggtgttcctggagcctcaatggtacagggtgctcgagaaggacagtgtgactctgaagtgccagggagcctactcccctgaggacaattccacacagtggtttcacaatgagagcctcatctcaagccaggcctcgagctacttcattgacgctgccacagtcgacgacagtggagagtacaggtgccagacaaacctctccaccctcagtgacccggtgcagctagaagtccatatcggtgagttgatgaaggggaagaggaaaatcaccaataaagggtgaaacaaagggtcctgaaatacttggtaagagccagagatgatattcttagagataaaagctaagatgagatgatgtgtggtcccactgaatggtatcagagttgtagtcctagctctaagtaggtcttgggcaaaatgtcaaagcctgtcagacagtagatataggactgctgcattgcacaat

SEQ ID NO: 2704 - protein, 156 aa, Homo sapiens
MGGGAGERLFTSSCLVGLVPLGLRISLVTCPLQCGIMWQLLLPTALLLLVSAGMRTEDLPKAVVFLEPQWYRVLEKDSVTLKCQGAYSPEDNSTQWFHNESLISSQASSYFIDAATVDDSGEYRCQTNLSTLSDPVQLEVHIGELMKGKRKITNKG

SEQ ID NO: 2705 - DNA, 462 bp, Homo sapiens
aaattatcacaggagcatgaaccctattgtgaagtacgcatgcaagggatctaggttgcattctccttatgagaatctaatgcctgatgacctggcattgtctcccatcaccctagatgggactgtctagttgcaagaaaacaagctcggggctccccctgattctacattatgttacagcaataggtaactggaattcaactgctggactataccaaagactgccaggccagcctacctttctcacagccttcttgactacctgtcttggatgagctcactgaaagcccacataccttcattctagcatttcctcagtctggttgagctgctttggaggtaatacaggttgtaggacttccctccactcctgctcaggaccgttttcagcaggctaatcagacagcagttggcactgagtacaactggagaaatgttatcagcactgaagactgctccagc

SEQ ID NO: 2706 - protein, 52 aa, Homo sapiens
MGLSSCKKTSSGLPLILHYVTAIGNWNSTAGLYQRLPGQPTFLTAFLTTCLG

SEQ ID NO: 2707 - DNA, 348 bp, Homo sapiens
atgggctacaccagatttattctgggaagctctgaatcttctaggagggaaagactgagaggaaagaggggtagaatccgccaagctttgagagaaggctgtgactgctgtgctctgggcgccagctcgctccagggagtgatgggaatcctgtcattcttacctgtccttgccactgagagtgactgggctgactgcaagtccccccagccttggggtcatatgcttctgtggacagctgtgctattcctgggcactgttctaggacttggagacttatcagtgaacatgactgacagccttcctgaccggaaatacgaggtcaatgaacttattgtgaagcaataa

SEQ ID NO: 2708 - protein, 115 aa, Homo sapiens
MGYTRFILGSSESSRRERLRGKRGRIRQALREGCDCCALGASSLQGVMGILSFLPVLATESDWADCKSPQPWGHMLLWTAVLFLGTVLGLGDLSVNMTDSLPDRKYEVNELIVKQ

SEQ ID NO: 2709 - DNA, 1172 bp, Homo sapiens
aatttgtttgccctctagggtagaatccgccaagctttgagagaaggctgtgactgctgtgctctgggcgccagctcgctccagggagtgatgggaatcctgtcattcttacctgtccttgccactgagagtgactgggctgactgcaagtccccccagccttggggtcatatgcttctgtggacagctgtgctattcctggctcctgttgctgggacacctgcagctcccccaaaggctgtgctgaaactcgagccctagtggatcaacgtgctccaagaggactctgtgactctgacatgccgggggactcacagccctgagagcgactccattccgtggttccacaatgggaatctcattcccacccacacgcagcccagctacaggttcaaggccaacaacaatgacagcggggagtacacgtgccagactggccagaccagcctcagcgaccctgtgcatctgactgtgctttctgagtggctggtgctccagacccctcacctggagttccaggagggagaaaccatcgtgctgaggtgccacagctggaaggacaagcctctggtcaaggtcacattcttccagaatggaaaatccaagaaattttcccgttcggatcccaacttctccatcccacaagcaaaccacagtcacagtggtgattaccactgcacaggaaacataggctacacgctgtactcatccaagcctgtgaccatcactgtccaaggccccagactaaggacggcagcgaagcagagctccctcgttggtgcagaggttccctaagctcctgggcattcgtaagaactgagctcccagctcttcaccgatggggatcattgtggctgtggtcactgggattgctgtagcggccattgttgctgctgtagtggccttgatctactgcaggaaaaagcggatttcaggtttgtagctcctcccggtccctttggttatcagtttccacttggcccaggccctaaccccagacattgccagaatccctctctttgggctagatacacattcagatctaggcccgtattgtattatagtcattcattcgtttattagatcattcatttgacaagacttgaacaaactagcttatgtgtcagccaatgcgtgagacatggtgggtgatgccaagagaagtccagtcc

SEQ ID NO: 2710 - protein, 56 aa, Homo sapiens
MGILSFLPVLATESDWADCKSPQPWGHMLLWTAVLFLAPVAGTPAAPPKAVLKLEP

SEQ ID NO: 2711 - DNA, 2371 bp, Homo sapiens
aatttgtttgccctctagggtagaatccgccaagctttgagagaaggctgtgactgctgtgctctgggcgccagctcgctccagggagtgatgggaatcctgtcattcttacctgtccttgccactgagagtgactgggctgactgcaagtccccccagccttggggtcatatgcttctgtggacagctgtgctattcctggctcctgttgctgggacacctgcagctcccccaaaggctgtgctgaaactcgagccctagtggatcaacgtgctccaagaggactctgtgactctgacatgccgggggactcacagccctgagagcgactccattccgtggttccacaatgggaatctcattcccacccacacgcagcccagctacaggttcaaggccaacaacaatgacagcggggagtacacgtgccagactggccagaccagcctcagcgaccctgtgcatctgactgtgctttctgagtggctggtgctccagacccctcacctggagttccaggagggagaaaccatcgtgctgaggtgccacagctggaaggacaagcctctggtcaaggtcacattcttccagaatggaaaatccaagaaattttcccgttcggatcccaacttctccatcccacaagcaaaccacagtcacagtggtgattaccactgcacaggaaacataggctacacgctgtactcatccaagcctgtgaccatcactgtccaagctcccagctcttcaccgatggggatcattgtggctgtggtcactgggattgctgtagcggccattgttgctgctgtagtggccttgatctactgcaggaaaaagcggatttcagaacagctgacggcggctacatgactctgaaccccagggcacctactgacgatgataaaaacatctacctgactcttcctcccaacgaccatgtcaacagtaataactaaagagtaacgttatgccatgtggtcacactctcagcttgctgagtggatgacaaaaagaggggaattgttaaaggaaaatttaaatggagactggaaaaattcctgagcaaacaaaaccacctggcccttagaaatagctttaactttgcttaaactacaaacacaagcaaaacttcacggggtcatactacatacaagcataagcaaaacttaacttggatgatttctggtaaatgcttatgttagaaataagacaaccccagccaatcacaagcagcctactaacatataattaggtgactagggactttctaagaagatacctacccccaaaaaacaattatgtaattgaaaacccatcgattgcctttattttgcttccacattttcccaataaatacttgcctgtgacattttgccactggaacactaaacttcatgaattgcgcctcagatttttcctttaacatcttttttttttgacagtctcaatctgttacccaggctggagtgtagtggtgctatcttggctcactgcaaacccgcctcccaggtttaagcgattctcatgcctcagcctcccagtagctgggattacaggcatgtgccgtcataaccagctaatttttgtattttttatttttttttttagtagagacggggtttcgcaatgttggccaggccgatctcgaacttctggcctctagcgatctgcccgcctcggcctcccaaagtgctgggatgaccagcatcagccccaatgcccagcctctttaacatcttctttcctatgccctctctgtggatccctactgctggtttctgccttctccatgctgagaacaaaatcacctattcactgcttatgcagtcggaagctccagaagaacaaagagcccaattaccagaaccacattaagtctccattgttttgccttgggatttgagaagagaattagagaggtgaggatctggtatttcctggtctaaattccccttgaggaagacgaagggatgctgcagttccaaaagagaaggactcttccagagtcatctacctgagtcccgatgctccctgtcctgaaaaccacagacaatatggtcccaaatgactgactgcaccttctgtgcctcagccattcttgacatcaagaatcttctgttccacatccacacagccaatacaattaatcaaaccactgttatgaaaagatgtagcaacatgagaaatgcttatgttacaggttacatgagaacaatcatgtaagtctatatgacttcagaaatgttaaaatagactaacctctaacaacaaattaaaagtgattgtttcaaggtgatgcaattattgatgacctattttatttttctataatgatcatatattacctttgtaataaaacattataacc

SEQ ID NO: 2712 - protein, 56 aa, Homo sapiens; identical to SEQ ID NO: 2710

SEQ ID NO: 2713 - DNA, 2409 bp, Homo sapiens
aatttgtttgccctctagggtagaatccgccaagctttgagagaaggctgtgactgctgtgctctgggcgccagctcgctccagggagtgatgggaatcctgtcattcttacctgtccttgccactgagagtgactgggctgactgcaagtccccccagccttggggtcatatgcttctgtggacagctgtgctattcctggctcctgttgctgggacacctgcagctcccccaaaggctgtgctgaaactcgagccctagtggatcaacgtgctccaagaggactctgtgactctgacatgccgggggactcacagccctgagagcgactccattccgtggttccacaatgggaatctcattcccacccacacgcagcccagctacaggttcaaggccaacaacaatgacagcggggagtacacgtgccagactggccagaccagcctcagcgaccctgtgcatctgactgtgctttctgagtggctggtgctccagacccctcacctggagttccaggagggagaaaccatcgtgctgaggtgccacagctggaaggacaagcctctggtcaaggtcacattcttccagaatggaaaatccaagaaattttcccgttcggatcccaacttctccatcccacaagcaaaccacagtcacagtggtgattaccactgcacaggaaacataggctacacgctgtactcatccaagcctgtgaccatcactgtccaagctcccagctcttcaccgatggggatcattgtggctgtggtcactgggattgctgtagcggccattgttgctgctgtagtggccttgatctactgcaggaaaaagcggatttcagccaattccactgatcctgtgaaggctgcccaatttgagaacagctgacggcggctacatgactctgaaccccagggcacctactgacgatgataaaaacatctacctgactcttcctcccaacgaccatgtcaacagtaataactaaagagtaacgttatgccatgtggtcacactctcagcttgctgagtggatgacaaaaagaggggaattgttaaaggaaaatttaaatggagactggaaaaattcctgagcaaacaaaaccacctggcccttagaaatagctttaactttgcttaaactacaaacacaagcaaaacttcacggggtcatactacatacaagcataagcaaaacttaacttggatgatttctggtaaatgcttatgttagaaataagacaaccccagccaatcacaagcagcctactaacatataattaggtgactagggactttctaagaagatacctacccccaaaaaacaattatgtaattgaaaacccatcgattgcctttattttgcttccacattttcccaataaatacttgcctgtgacattttgccactggaacactaaacttcatgaattgcgcctcagatttttcctttaacatcttttttttttgacagtctcaatctgttacccaggctggagtgtagtggtgctatcttggctcactgcaaacccgcctcccaggtttaagcgattctcatgcctcagcctcccagtagctgggattacaggcatgtgccgtcataaccagctaatttttgtattttttatttttttttttagtagagacggggtttcgcaatgttggccaggccgatctcgaacttctggcctctagcgatctgcccgcctcggcctcccaaagtgctgggatgaccagcatcagccccaatgcccagcctctttaacatcttctttcctatgccctctctgtggatccctactgctggtttctgccttctccatgctgagaacaaaatcacctattcactgcttatgcagtcggaagctccagaagaacaaagagcccaattaccagaaccacattaagtctccattgttttgccttgggatttgagaagagaattagagaggtgaggatctggtatttcctggtctaaattccccttgaggaagacgaagggatgctgcagttccaaaagagaaggactcttccagagtcatctacctgagtcccgatgctccctgtcctgaaaaccacagacaatatggtcccaaatgactgactgcaccttctgtgcctcagccattcttgacatcaagaatcttctgttccacatccacacagccaatacaattaatcaaaccactgttatgaaaagatgtagcaacatgagaaatgcttatgttacaggttacatgagaacaatcatgtaagtctatatgacttcagaaatgttaaaatagactaacctctaacaacaaattaaaagtgattgtttcaaggtgatgcaattattgatgacctattttatttttctataatgatcatatattacctttgtaataaaacattataacc

SEQ ID NO: 2714 - protein, 56 aa, Homo sapiens; identical to SEQ ID NO: 2710

SEQ ID NO: 2715 - DNA, 1628 bp, Homo sapiens
acagccaattccactgatcctgtgaaggctgcccaatttgagccacctggacgtcaaatgattgccatcagaaagagacaacctgaagaaaccaacaatgactatgaaacagctgacggcggctacatgactctgaaccccagggcacctactgacgatgataaaaacatctacctgactcttcctcccaacgaccatgtcaacagtaataactaaagagtaacgttatgccatgtggtcacactctcagcttgctgagtggatgacaaaaagaggggaattgttaaaggaaaatttaaatggagactggaaaaattcctgagcaaacaaaaccacctggcccttagaaatagctttaactttgcttaaactacaaacacaagcaaaacttcacggggtcatactacatacaagcataagcaaaacttaacttggatgatttctggtaaatgcttatgttagaaataagacaaccccagccaatcacaagcagcctactaacatataattaggtgactagggactttctaagaagatacctacccccaaaaaacaattatgtaattgaaaacccatcgattgcctttattttgcttccacattttcccaataaatacttgcctgtgacattttgccactggaacactaaacttcatgaattgcgcctcagatttttcctttaacatcttttttttttgacagtctcaatctgttacccaggctggagtgtagtggtgctatcttggctcactgcaaacccgcctcccaggtttaagcgattctcatgcctcagcctcccagtagctgggattacaggcatgtgccgtcataaccagctaatttttgtattttttatttttttttttagtagagacggggtttcgcaatgttggccaggccgatctcgaacttctggcctctagcgatctgcccgcctcggcctcccaaagtgctgggatgaccagcatcagccccaatgcccagcctctttaacatcttctttcctatgccctctctgtggatccctactgctggtttctgccttctccatgctgagaacaaaatcacctattcactgcttatgcagtcggaagctccagaagaacaaagagcccaattaccagaaccacattaagtctccattgttttgccttgggatttgagaagagaattagagaggtgaggatctggtatttcctggtctaaattccccttgaggaagacgaagggatgctgcagttccaaaagagaaggactcttccagagtcatctacctgagtcccgatgctccctgtcctgaaaaccacagacaatatggtcccaaatgactgactgcaccttctgtgcctcagccattcttgacatcaagaatcttctgttccacatccacacagccaatacaattaatcaaaccactgttatgaaaagatgtagcaacatgagaaatgcttatgttacaggttacatgagaacaatcatgtaagtctatatgacttcagaaatgttaaaatagactaacctctaacaacaaattaaaagtgattgtttcaaggtgatgcaattattgatgacctattttatttttctataatgatcatatattacctttgtaataaaacattataacc

SEQ ID NO: 2716 - protein, 52 aa, Homo sapiens [sequence omitted]

SEQ ID NO: 2717 - DNA, 3882 bp, Homo sapiens
ttgtatttacctccccggtgtattgaattatcctatgggttttaaatgctttcctgcacccacctggacgtcaaatgattgccatcagaaagagacaacctgaagaaaccaacaatgactatgaaacagctgacggcggctacatgactctgaaccccagggcacctactgacgatgataaaaacatctacctgactcttcctcccaacgaccatgtcaacaggctgtattgattggggtgtagactgaactatccggggtctgtttcttttcggtgatgaaagtcttgagaaggtagtaatggataagatgtgaaggagaggagagatggagatttggagtgtaggcggaaatccgaacgccagaagatctgaatggaatgttctggattgaagaaagtgggaaatggcctcaattcacaaagtcacagcctgatagaaaccagtgtgactttactgcccagtgaacccatctcgtcctccagcctttaggaggtaggttggactggagcctgcagtagtttactctccacctgagtcctggtctccggctgggaacccacttaggccatagagaaaaacgcacactgtgcctctccaccgggcctctggagacgaggctcctcggggatacaaacagtggggagaacatgagggacatcctgaccgtacactgcgtcctcctttcccaggtgttgcgttctctcttgggttgagtggcgaggtctctcccgagtcccagggccacagtgcaatgtcacatctcctttgtggaaagtgactggtaaaagagaacaaaactggaggaacctaaagtcttcggccacctggtttaatttattcaagagtgattaatcctagatgagaaaaagaattgaaatggatcggaaaaaaccaataatgtcgatgaaagagctgcagtgtcatctcttaaagctgattatctctggccattccttaaggaaacaggcactgtcttaaatcgtggtttggaaaatattttgttcaagataaaactgttttaagatatatgtatatatatcttatatatctgtattcgcatggtaacatatcttcggccttcctgagccgctgggctctcagcggccctccaaggcagcccgcaggcccgtgctcgcctcagggatccgacctcccacagccccggggagaccttgcctctaaagttgctgcttttgcagcctctgccacaaccgcgcgtcctcagagccagccgggaggagctagaaccttccccgcgtttctttcagcagccctgagtcagaggcgggctggcctggcatagccgcccagcctctcggctcacggcccgatccgcccgaaccttctcccggggtcagcgccgcgctgcgccgcccggctgactcagcccgggcgggcgggcgggaggctctcgactgggcgggaaggtgcgggaaggttcgcggcggcggggtcggggaggtgcaaaaggatgaaaagcccgtggaagcggagctgagcagatccgagccgggctggcggcagagaaaccgcagggagagcctcactgctgagcgcccctcgacggcggagcggcagcagcctccgtggcctccagcatccgacaagaagcttcagccatgcaggccccacgggagctcgcggtgggcatcgacctgggcaccacctactcgtgcgtgggcgtgtttcagcagggccgcgtggagatcctggccaacgaccagggcaaccgcaccacgcccagctacgtggccttcaccgacaccgagcggctggtcggggacgcggccaagagccaggcggccctgaacccccacaacaccgtgttcgatgccaagcggctgatcgggcgcaagttcgcggacaccacggtgcagtcggacatgaagcactggcccttccaggtggtgagcgagggcggcaagcccaaggtgcgcgtatgctaccgcggggaggacaagacgttctaccccgaggagatctcgtccatggtgctgagcaagatgaaggagacggccgaggcgtacctgggccagcccgtgaagcacgcagtgatcaccgtgcccacctatttcagtaactcgcagcgccaggccaccaaggacgcgggggccatcgcggggctcaaggtgctgccgatcatcaatgaggccacggcagcagccatcgcctatgggctggaccggcggggcgcgggaaagcgcaacgtgctcatttttgacctgggtgggggcaccttcgatgtgtcggttctctccattgacgccggtgtctttgaggtgaaagccactgctggagatacccacctgggaggagaggacttcgacaaccggctcgtgaaccacttcatggaagaattccggcggaagcatgggaaggacctgagcgggaacaagcgtgccctgcgcaggctgcgcacagcctgtgagcgcgccaagcgcaccccgtcctccagcacccaggccaccctggagatagactccctgttcgagggcgtggacttctacaagtccatcactcgtgcccgctttgaggaactgtgctcagacctcttccgcagcaccctggagccggtggagaaggccctgcgggatgccaagctggacaaggcccagattcatgacttcgtcctggggggagggctccactcgcatccccaaggtgcagaagttgctgcaggacttcttcaacggcaaggagctgaacaagagcatcaaccctgatgaggctgtggcctatggggctgctgtgcaggcggccgtgttgatgggggacaaatgtgagaaagtgcaggatctcctgctgctggatgtggctcccctgtctctggggctggagacagcaggtggggtgatgaccacgctgatccagaggaacgccactatccccaccaagcagacccagactttcaccacctactcggacaaccagcctggggtcttcatccaggtgtatgaggttgagagggccatgaccaaggacaacaacctgctggggcgttttgaactcattggcatccctcctgccccacatggagtcccccagatagaggtgacgtttgacattgatgctaatggcatcctgagcgtgacagccactgacaggagcacaggtaaggctaacaagatcaccaatgacaagggccggctgagcaaggaggaggtggagaggatggttcatgaagccgagcagtacggggctgaggatgaggcccagagggacagagtggctgccaaaaactcgctggaggcccatgtcttccatgtgaaaggttctttgcaagaggaaagccttagggacaagattcccgaagaggacaggcgcaaagtgcaagacaagtgtcaggaagtccttgcctggctggagcacaaccagctggcagagaaggaggagtatgagcatcagaagagggagctggagcaaatctgtcgccccatcttctccaggctctatggggggcctggtgtccctgggggcagcagttgtagcgctcaagcccaccagggggaccccagcaccggccccatcattgaggaggttgattgaatggcccttcgtgataagtcagctgtgactgtcagggctatgctatgggccttctagactgtcttctatgatcctgcccttcagagatgaagggcttgggggggtcttccctccaaagctagaactttctttccaggataactgaagtcttttgactttttggggggagggcggttcatcctcttctgcttcaaataaaaagtcattaatttattaaaacttgtgtggcactttaacattgctttcacctatattttgtgtattttgttacttgtatgtatgaattttgttatgtaaaatatagttatagacctaaataaacttttaaaactcc

SEQ ID NO: 2718 - protein, 52 aa, Homo sapiens
MIAIRKRQPEETNNDYETADGGYMTLNPRAPTDDDKNIYLTLPPNDHVNRLY

SEQ ID NO: 2719 - DNA, 4425 bp, Homo sapiens
ttgtatttacctccccggtgtattgaattatcctatgggttttaaatgctttcctgcacccacctggacgtcaaatgattgccatcagaaagagacaacctgaagaaaccaacaatgactatgaaacagctgacggcggctacatgactctgaaccccagggcacctactgacgatgataaaaacatctacctgactcttcctcccaacgaccatgtcaacaggctgtattgattggggtgtagactgaactatccggggtctgtttcttttcggtgatgaaagtcttgagaaggtagtaatggataagatgtgaaggagaggagagatggagatttggagtgtaggcggaaatccgaacgccagaagatctgaatggaatgttctggattgaagaaagtgggaaatggcctcaattcacaaagtcacagcctgatagaaaccagtgtgactttactgcccagtgaacccatctcgtcctccagcctttaggaggtaggttggactggagcctgcagtagtttactctccacctgagtcctggtctccggctgggaacccacttaggccatagagaaaaacgcacactgtgcctctccaccgggcctctggagacgaggctcctcggggatacaaacagtggggagaacatgagggacatcctgaccgtacactgcgtcctcctttcccaggtgttgcgttctctcttgggttgagtggcgaggtctctcccgagtcccagggccacagtgcaatgtcacatctcctttgtggaaagtgactggtaaaagagaacaaaactggaggaacctaaagtcttcggccacctggtttaatttattcaagagtgattaatcctagatgagaaaaagaattgaaatggatcggaaaaaaccaataatgtcgatgaaagagctgcagtgtcatctcttaaagctgattatctctggccattccttaaggaaacaggcactgtcttaaatcgtggtttggaaaatattttgttcaagataaaactgttttaagatatatgtatatatatcttatatatctgtattcgcatggtaacatatcttcggccttcctgagccgctgggctctcagcggccctccaaggcagcccgcaggcccgtgctcgcctcagggatccgacctcccacagccccggggagaccttgcctctaaagttgctgcttttgcagcctctgccacaaccgcgcgtcctcagagccagccgggaggagctagaaccttccccgcgtttctttcagcagccctgagtcagaggcgggctggcctggcatagccgcccagcctctcggctcacggcccgatccgcccgaaccttctcccggggtcagcgccgcgctgcgccgcccggctgactcagcccgggcgggcgggcgggaggctctcgactgggcgggaaggtgcgggaaggttcgcggcggcggggtcggggaggtgcaaaaggatgaaaagcccgtggaagcggagctgagcagatccgagccgggctggcggcagagaaaccgcagggagagcctcactgctgagcgcccctcgacggcggagcggcagcagcctccgtggcctccagcatccgacaagaagcttcagccatgcaggccccacgggagctcgcggtgggcatcgacctgggcaccacctactcgtgcgtgggcgtgtttcagcagggccgcgtggagatcctggccaacgaccagggcaaccgcaccacgcccagctacgtggccttcaccgacaccgagcggctggtcggggacgcggccaagagccaggcggccctgaacccccacaacaccgtgttcgatgccaagcggctgatcgggcgcaagttcgcggacaccacggtgcagtcggacatgaagcactggcccttccaggtggtgagcgagggcggcaagcccaaggtgcgcgtatgctaccgcggggaggacaagacgttctaccccgaggagatctcgtccatggtgctgagcaagatgaaggagacggccgaggcgtacctgggccagcccgtgaagcacgcagtgatcaccgtgcccacctatttcagtaactcgcagcgccaggccaccaaggacgcgggggccatcgcggggctcaaggtgctgccgatcatcaatgaggccacggcagcagccatcgcctatgggctggaccggcggggcgcgggaaagcgcaacgtgctcatttttgacctgggtgggggcaccttcgatgtgtcggttctctccattgacgccggtgtctttgaggtgaaagccactgctggagatacccacctgggaggagaggacttcgacaaccggctcgtgaaccacttcatggaagaattccggcggaagcatgggaaggacctgagcgggaacaagcgtgccctgcgcaggctgcgcacagcctgtgagcgcgccaagcgcaccccgtcctccagcacccaggccaccctggagatagactccctgttcgagggcgtggacttctacaagtccatcactcgtgcccgctttgaggaactgtgctcagacctcttccgcagcaccctggagccggtggagaaggccctgcgggatgccaagctggacaaggcccagattcatgacttcgtcctggggggagggctccactcgcatccccaaggtgcagaagttgctgcaggacttcttcaacggcaaggagctgaacaagagcatcaaccctgatgaggctgtggcctatggggctgctgtgcaggcggccgtgttgatgggggacaaatgtgagaaagtgcaggatctcctgctgctggatgtggctcccctgtctctggggctggagacagcaggtggggtgatgaccacgctgatccagaggaacgccactatccccaccaagcagacccagactttcaccacctactcggacaaccagcctggggtcttcatccaggtgtatgaggttgagagggccatgaccaaggacaacaacctgctggggcgttttgaactcattggcatccctcctgccccacatggagtcccccagatagaggtgacgtttgacattgatgctaatggcatcctgagcgtgacagccactgacaggagcacaggtaaggctaacaagatcaccaatgacaagggccggctgagcaaggaggaggtggagaggatggttcatgaagccgagcagtacggggctgaggatgaggcccagagggacagagtggctgccaaaaactcgctggaggcccatgtcttccatgtgaaaggttctttgcaagaggaaagccttagggacaagattcccgaagaggacaggcgcaaagtgcaagacaagtgtcaggaagtccttgcctggctggagcacaaccagctggcagagaaggaggagtatgagcatcagaagagggagctggagcaaatctgtcgccccatcttctccaggctctatggggggcctggtgtccctgggggcagcagttgtagcgctcaagcccaccagggggaccccagcaccggccccatcattgaggaggttgattgaatggcccttcgtgataagtcagctgtgactgtcagggctatgctatgggccttctagactgtcttctatgatcctgcccttcagagatgaagggcttgggggggtcttccctccaaagctagaactttctttccaggataactgaagtcttttgactttttggggggagggcggttcatcctcttctgcttcaaataaaaagtcattaatttattaaaacttgtgtggcactttaacattgctttcacctatattttgtgtattttgttacttgtatgtatgaattttgttatgtaaaatatagttatagacctaaataaacttttaaaactccttcttgcttttcattccaaccaatcaaagtacaaaagtacataaaggctttcagaagcagaaaatgttggggtgggtgctgaaggaggaatgtgaagaatattcctgagaccgtgtgcatgattcctataggggaaggcagggtttggaaaagagtttgaggccaatacattggaacagtactgaagagttagggctggtaaagaggagaggattgagatataatgcaggaagagagagggagagatgtggaattggaaaagcagagaatgaagagaaacttaagtactggcagtgtttccatgtgtgatcctatgattcaaattctgtatttttgtcataggaacctggttgagtttgtcagtctagctgttttaataacactaacaaatagtttacatgcttattagctgtttgtaatcatgtcactttatccattgttcttttagagaaaagactctgagtcctggactctggaggatggtatatgtcagaggaagtagatctggtggtacgattaaagttactattgactttatctatg

SEQ ID NO: 2720 - protein, 52 aa, Homo sapiens; identical to SEQ ID NO: 2718

SEQ ID NO: 2721 - DNA, 1104 bp, Homo sapiens
atgcaggccccacgggagctcgcggtgggcatcgacctgggcaccacctactcgtgcgtgggcgtgtttcagcagggccgcgtggagatcctggccaacgaccagggcaaccgcaccacgcccagctacgtggccttcaccgacaccgagcggctggtcggggacgcggccaagagccaggcggccctgaacccccacaacaccgtgttcgatgccaagcggctgatcgggcgcaagttcgcggacaccacggtgcagtcggacatgaagcactggcccttccaggtggtgagcgagggcggcaagcccaaggtgcgcgtatgctaccgcggggaggacaagacgttctaccccgaggagatctcgtccatggtgctgagcaagatgaaggagacggccgaggcgtacctgggccagcccgtgaagcacgcagtgatcaccgtgcccacctatttcagtaactcgcagcgccaggccaccaaggacgcgggggccatcgcggggctcaaggtgctgccgatcatcaatgaggccacggcagcagccatcgcctatgggctggaccggcggggcgcgggaaagcgcaacgtgctcatttttgacctgggtgggggcaccttcgatgtgtcggttctctccattgacgccggtgtctttgaggtgaaagccactgctggagatacccacctgggaggagaggacttcgacaaccggctcgtgaaccacttcatggaagaattccggcggaagcatgggaaggacctgagcgggaacaagcgtgccctgcgcaggctgcgcacagcctgtgagcgcgccaagcgcaccccgtcctccagcacccaggccaccctggagatagactccctgttcgagggcgtggacttctacaagtccatcactcgtgcccgctttgaggaactgtgctcagacctcttccgcagcaccctggagccggtggagaaggccctgcgggatgccaagctggacaaggcccagattcatgacttcgtcctggggggagggctccactcgcatccccaaggtgcagaagttgctgcaggacttcttcaacggcaaggagctgaacaagagcatcaaccctga

SEQ ID NO: 2722 - protein, 367 aa, Homo sapiens
MQAPRELAVGIDLGTTYSCVGVFQQGRVEILANDQGNRTTPSYVAFTDTERLVGDAAKSQAALNPHNTVFDAKRLIGRKFADTTVQSDMKHWPFQVVSEGGKPKVRVCYRGEDKTFYPEEISSMVLSKMKETAEAYLGQPVKHAVITVPTYFSNSQRQATKDAGAIAGLKVLPIINEATAAAIAYGLDRRGAGKRNVLIFDLGGGTFDVSVLSIDAGVFEVKATAGDTHLGGEDFDNRLVNHFMEEFRRKHGKDLSGNKRALRRLRTACERAKRTPSSSTQATLEIDSLFEGVDFYKSITRARFEELCSDLFRSTLEPVEKALRDAKLDKAQIHDFVLGGGLHSHPQGAEVAAGLLQRQGAEQEHQP

SEQ ID NO: 2723 - DNA, 1746 bp, Homo sapiens
agggctccggatatctttggtgacttgtccactccagtgtggcatcatgctggctgttgctccaggcccctcggtgggtgttcaaggaggaagaccctattcacctgaggtgtcacagctggaagaacactgctctgcataaggtcacatatttacagaatggcaaagacaggaagtattttcatcataattctgacttccacattccaaaagccacactcaaagatagcggctcctacttctgcagggggcttgttgggagtaaaaatgtgtcttcagagactgtgaacatcaccatcactcaaggtttggcagtgtcaaccatctcatcattctctccacctgggtaccaagtctctttctgcttggtgatggtactcctttttgcagtggacacaggactatatttctctgtgaagacaaacatttgaagctcaacaagagactggaaggaccataaacttaaatggagaaaggaccctcaagacacatgacccccatcccatgggggtaataagagcagtggcagcagcatctctgaacatttctctggatttgcaaccccatcatcctcaggcctctctacaagcagcaggaaacatagaactcagagccagatcctttatccaactctcgatttttccttggtctccagtggaagggaaaagcccatgatcttcaagcagggaagccccagtgagtagctgcattcctagaaattgaagtttcagagctacacaaacactttttctgtcccaaccattccctcacagcaaagcaacaatacaggctagggatggtaatcctttaaacatacaaaaattgctcgtattataaattacccagtttagagggaaaaaaagaaaataattattcctaaacaaatggataagtagaattaatggttgaggcaggaccctacagagtgtgggaactgctggggatctagagaattcagtgggaccaatgaaagcatggctgagaaatagcagggtagtccaggatagtctaagggaggtgttcccatctgagcccagagataagggtgtcttcctagaacattagccgtagtggaattaacaggaaatcatgagggtgacgtagaattgagtcttccaggggactctatcagaactggaccatttccaagtatataacgatgagtcctctaatgctaggagtagaaaatggtcctaggaaggggactgaggattggggtgggggtggggtggaaaagaaagtacagaacaaaccctgtgtcactgtctcaagttaagctaagtgaacagaactatctcagcatcagaatgagaaagcctgagaagaaagaaccaaccagaagcacacaggaaggaaagcgcaggaggtgaaaatgctttcttggccggggtagtaagaattagaggttaatgcagggactgtaaaaccaccttttctgcttcaatgtctagttcctgtatagctttgttcattgcatttattaaacaaatgttgtataaccaatactaaatgtactactgagcttcactgagttacgctgtgaaactttcaaatccttcttcatgtcagttccaatgaggtggggatggagaagacaattgttgcttatgaaagaaagctttagctgtctctgttttgtaagctttcagtgcaacatttcttggttccaataaagcattttacaagatcttgcatgctactcttagatagaagatggcaaaaccatggtaataaaatatgaatgat

SEQ ID NO: 2724 - protein, 31 aa, Homo sapiens [sequence omitted]

SEQ ID NO: 2725 - DNA, 1934 bp, Homo sapiens
ctagtcggcttggtccctttagggctccggatatctttggtgacttgtccactccagtgtggcatcatgtggcagctgctcctcccaactgctctgctacttctagtttcagctggcatgcggactggcctcgagctacttcattgacgctgccacagtcaacgacagtggagagtacaggtgccagacaaacctctccaccctcagtgacccggtgcagctagaagtccatatcggctggctgttgctccaggcccctcggtgggtgttcaaggaggaagaccctattcacctgaggtgtcacagctggaagaacactgctctgcataaggtcacatatttacagaatggcaaagacaggaagtattttcatcataattctgacttccacattccaaaagccacactcaaagatagcggctcctacttctgcagggggcttgttgggagtaaaaatgtgtcttcagagactgtgaacatcaccatcactcaaggtttggcagtgtcaaccatctcatcattctctccacctgggtaccaagtctctttctgcttggtgatggtactcctttttgcagtggacacaggactatatttctctgtgaagacaaacatttgaagctcaacaagagactggaaggaccataaacttaaatggagaaaggaccctcaagacacatgacccccatcccatgggggtaataagagcagtggcagcagcatctctgaacatttctctggatttgcaaccccatcatcctcaggcctctctacaagcagcaggaaacatagaactcagagccagatcctttatccaactctcgatttttccttggtctccagtggaagggaaaagcccatgatcttcaagcagggaagccccagtgagtagctgcattcctagaaattgaagtttcagagctacacaaacactttttctgtcccaaccattccctcacagcaaagcaacaatacaggctagggatggtaatcctttaaacatacaaaaattgctcgtattataaattacccagtttagagggaaaaaaagaaaataattattcctaaacaaatggataagtagaattaatggttgaggcaggaccctacagagtgtgggaactgctggggatctagagaattcagtgggaccaatgaaagcatggctgagaaatagcagggtagtccaggatagtctaagggaggtgttcccatctgagcccagagataagggtgtcttcctagaacattagccgtagtggaattaacaggaaatcatgagggtgacgtagaattgagtcttccaggggactctatcagaactggaccatttccaagtatataacgatgagtcctctaatgctaggagtagaaaatggtcctaggaaggggactgaggattggggtgggggtggggtggaaaagaaagtacagaacaaaccctgtgtcactgtctcaagttaagctaagtgaacagaactatctcagcatcagaatgagaaagcctgagaagaaagaaccaaccagaagcacacaggaaggaaagcgcaggaggtgaaaatgctttcttggccggggtagtaagaattagaggttaatgcagggactgtaaaaccaccttttctgcttcaatgtctagttcctgtatagctttgttcattgcatttattaaacaaatgttgtataaccaatactaaatgtactactgagcttcactgagttacgctgtgaaactttcaaatccttcttcatgtcagttccaatgaggtggggatggagaagacaattgttgcttatgaaagaaagctttagctgtctctgttttgtaagctttcagtgcaacatttcttggttccaataaagcattttacaagatcttgcatgctactcttagatagaagatggcaaaaccatggtaataaaatatgaatgat

SEQ ID NO: 2726 - protein, 60 aa, Homo sapiens [sequence omitted]

SEQ ID NO: 2727 - DNA, 2291 bp, Homo sapiens
agatgctcagccgcagacctttgggagagtaaagggggcacacccacccaccttgcctccaggctctttccttcctattcctgttctatggtggggctccattgcgagacttcagattgagaaatcagatgaagtttcaagaaaaggaaactggcaggtgacagagatgggtggagggactggggaaaggctgtttactccctcctgtctagtcggcttggtccctttagggctccggatatctttggtgacttgtccactccagtgtggcatcatgtggcagctgctcctcccaactgctctgctacttctagtttcagctggcatgcggactgaagatctcccaaaggctgtggtgttcctggagcctcaatggtacagcgtgcttgagaaggacagtgtgactctgaagtgccagggagcctactcccctgaggacaattccacacagtggtttcacaatgagaacctcatctcaagccaggcctcgagctacttcattgacgctgccacagtcaacgacagtggagagtacaggtgccagacaaacctctccaccctcagtgacccggtgcagctagaagtccatatcggctggctgttgctccaggcccctcggtgggtgttcaaggaggaagaccctattcacctgaggtgtcacagctggaagaacactgctctgcataaggtcacatatttacagaatggcaaagacaggaagtattttcatcataattctgacttccacattccaaaagccacactcaaagatagcggctcctacttctgcagggggcttgttgggagtaaaaatgtgtcttcagagactgtgaacatcaccatcactcaaggtttggcagtgtcaaccatctcatcattctctccacctgggtaccaagtctctttctgcttggtgatggtactcctttttgcagtggacacaggactatatttctctgtgaagacaaacatttgaagctcaacaagagactggaaggaccataaacttaaatggagaaaggaccctcaagacacatgacccccatcccatgggggtaataagagcagtggcagcagcatctctgaacatttctctggatttgcaaccccatcatcctcaggcctctctacaagcagcaggaaacatagaactcagagccagatcctttatccaactctcgatttttccttggtctccagtggaagggaaaagcccatgatcttcaagcagggaagccccagtgagtagctgcattcctagaaattgaagtttcagagctacacaaacactttttctgtcccaaccattccctcacagcaaagcaacaatacaggctagggatggtaatcctttaaacatacaaaaattgctcgtattataaattacccagtttagagggaaaaaaagaaaataattattcctaaacaaatggataagtagaattaatggttgaggcaggaccctacagagtgtgggaactgctggggatctagagaattcagtgggaccaatgaaagcatggctgagaaatagcagggtagtccaggatagtctaagggaggtgttcccatctgagcccagagataagggtgtcttcctagaacattagccgtagtggaattaacaggaaatcatgagggtgacgtagaattgagtcttccaggggactctatcagaactggaccatttccaagtatataacgatgagtcctctaatgctaggagtagaaaatggtcctaggaaggggactgaggattggggtgggggtggggtggaaaagaaagtacagaacaaaccctgtgtcactgtctcaagttaagctaagtgaacagaactatctcagcatcagaatgagaaagcctgagaagaaagaaccaaccagaagcacacaggaaggaaagcgcaggaggtgaaaatgctttcttggccggggtagtaagaattagaggttaatgcagggactgtaaaaccaccttttctgcttcaatgtctagttcctgtatagctttgttcattgcatttattaaacaaatgttgtataaccaatactaaatgtactactgagcttcactgagttacgctgtgaaactttcaaatccttcttcatgtcagttccaatgaggtggggatggagaagacaattgttgcttatgaaagaaagctttagctgtctctgttttgtaagctttcagtgcaacatttcttggttccaataaagcattttacaagatcttgcatgctactcttagatagaagatggcaaaaccatggtaataaaatatgaatgat

SEQ ID NO: 2728 - protein, 269 aa, Homo sapiens
MGGGTGERLFTPSCLVGLVPLGLRISLVTCPLQCGIMWQLLLPTALLLLVSAGMRTEDLPKAVVFLEPQWYSVLEKDSVTLKCQGAYSPEDNSTQWFHNENLISSQASSYFIDAATVNDSGEYRCQTNLSTLSDPVQLEVHIGWLLLQAPRWVFKEEDPIHLRCHSWKNTALHKVTYLQNGKDRKYFHHNSDFHIPKATLKDSGSYFCRGLVGSKNVSSETVNITITQGLAVSTISSFSPPGYQVSFCLVMVLLFAVDTGLYFSVKTNI

SEQ ID NO: 2729 - DNA, 2139 bp, Homo sapiens
aggctgacagaccagcccagatccagtggcccggaggggcctgagctaaatccgcaggacctgggtaacacgaggaagggctccggatatctttggtgacttgtccactccagtgtggcatcatgtggcagctgctcctcccaactgctctgctacttctagtttcagctggcatgcggactgaagatctcccaaaggctgtggtgttcctggagcctcaatggtacagcgtgcttgagaaggacagtgtgactctgaagtgccagggagcctactcccctgaggacaattccacacagtggtttcacaatgagaacctcatctcaagccaggcctcgagctacttcattgacgctgccacagtcaacgacagtggagagtacaggtgccagacaaacctctccaccctcagtgacccggtgcagctagaagtccatatcggctggctgttgctccaggcccctcggtgggtgttcaaggaggaagaccctattcacctgaggtgtcacagctggaagaacactgctctgcataaggtcacatatttacagaatggcaaagacaggaagtattttcatcataattctgacttccacattccaaaagccacactcaaagatagcggctcctacttctgcagggggcttgttgggagtaaaaatgtgtcttcagagactgtgaacatcaccatcactcaaggtttggcagtgtcaaccatctcatcattctctccacctgggtaccaagtctctttctgcttggtgatggtactcctttttgcagtggacacaggactatatttctctgtgaagacaaacatttgaagctcaacaagagactggaaggaccataaacttaaatggagaaaggaccctcaagacacatgacccccatcccatgggggtaataagagcagtggcagcagcatctctgaacatttctctggatttgcaaccccatcatcctcaggcctctctacaagcagcaggaaacatagaactcagagccagatcctttatccaactctcgatttttccttggtctccagtggaagggaaaagcccatgatcttcaagcagggaagccccagtgagtagctgcattcctagaaattgaagtttcagagctacacaaacactttttctgtcccaaccattccctcacagcaaagcaacaatacaggctagggatggtaatcctttaaacatacaaaaattgctcgtattataaattacccagtttagagggaaaaaaagaaaataattattcctaaacaaatggataagtagaattaatggttgaggcaggaccctacagagtgtgggaactgctggggatctagagaattcagtgggaccaatgaaagcatggctgagaaatagcagggtagtccaggatagtctaagggaggtgttcccatctgagcccagagataagggtgtcttcctagaacattagccgtagtggaattaacaggaaatcatgagggtgacgtagaattgagtcttccaggggactctatcagaactggaccatttccaagtatataacgatgagtcctctaatgctaggagtagaaaatggtcctaggaaggggactgaggattggggtgggggtggggtggaaaagaaagtacagaacaaaccctgtgtcactgtctcaagttaagctaagtgaacagaactatctcagcatcagaatgagaaagcctgagaagaaagaaccaaccagaagcacacaggaaggaaagcgcaggaggtgaaaatgctttcttggccggggtagtaagaattagaggttaatgcagggactgtaaaaccaccttttctgcttcaatgtctagttcctgtatagctttgttcattgcatttattaaacaaatgttgtataaccaatactaaatgtactactgagcttcactgagttacgctgtgaaactttcaaatccttcttcatgtcagttccaatgaggtggggatggagaagacaattgttgcttatgaaagaaagctttagctgtctctgttttgtaagctttcagtgcaacatttcttggttccaataaagcattttacaagatcttgcatgctactcttagatagaagatggcaaaaccatggtaataaaatatgaatgat

SEQ ID NO: 2730 - protein, 233 aa, Homo sapiens; identical to SEQ ID NO: 155

SEQ ID NO: 2731 - DNA, 613 bp, Homo sapiens
agtcggcttggtccctttagggctccggatatctttggtgacttgtccactccagtgtggcatcatgtggcagctgctcctcccaactgctctgctacttctagtttcagctggcatgcggactgaagatctcccaaaggctgtggtgttcctggagcctcaatggtacagcgtgcttgagaaggacagtgtgactctgaagtgccagggagcctactcccctgaggacaattccacacagtggtttcacaatgagaacctcatctcaagccaggcctcgagctacttcattgacgctgccacagtcaacgacagtggagagtacaggtgccagacaaacctctccaccctcagtgacccggtgcagctagaagtccatatcggtgagttgatgaaggggaagaggaaaatcaccaataaagggtgaaacaaagggtcctgaaatacttggtaagagccagagatgatattcttagagataaaagctaagatgagatgatgtgtggtcccactgaatggtatcagagttgtagtcctagctctaagtaggtcttgggcaaaatgtcaaagcctgtcagacagtagatataggctgctgcattgcacaattcca

SEQ ID NO: 2732 - protein, 120 aa, Homo sapiens
MWQLLLPTALLLLVSAGMRTEDLPKAVVFLEPQWYSVLEKDSVTLKCQGAYSPEDNSTQWFHNENLISSQASSYFIDAATVNDSGEYRCQTNLSTLSDPVQLEVHIGELMKGKRKITNKG

SEQ ID NO: 2733 - DNA, 963 bp, Homo sapiens
gtttactccctcctgtctagtcggcttggtccctttagggctccggatatctttggtgacttgtccactccagtgtggcatcatgtggcagctgctcctcccaactgctctgctacttctagtttcagctggcatgcggactggtgagtcagcttcatggtcttggattgacccagtggggcacatatggggacaatggccataagatattgggaaatgcttgttgaatgggaaaatgctgatgtggggttagcagggatagttcctccaacacagcagaacttggccctgtgcttctctggccagctttccttaagatactgaacaggccaaaaatggggccaagatgctctaagactgagccaccaagcatgggtttgcaatgagctcattctggctttgaggctccctgggaatggcagtgtagagcctgctcctctccctgtcctcaccccacattatcttggctcctcagaagatctcccaaaggctgtggtgttcctggagcctcaatggtacagcgtgcttgagaaggacagtgtgactctgaagtgccagggagcctactcccctgaggacaattccacacagtggtttcacaatgagaacctcatctcaagccaggcctcgagctacttcattgacgctgccacagtcaacgacagtggagagtacaggtgccagacaaacctctccaccctcagtgacccggtgcagctagaagtccatatcggtgagttgatgaaggggaagaggaaaatcaccaataaagggtgaaacaaagggtcctgaaatacttggtaagagccagagatgatattcttagagataaaagctaagatgagatgatgtgtggtcccactgaatggtatcagagttgtagtcctagctctaagtaggtcttgggcaaaatgtcaaagcctgtcagacagtagatataggctgctgcattgcacaattcca

SEQ ID NO: 2734 - protein, 40 aa, Homo sapiens
MWQLLLPTALLLLVSAGMRTGESASWSWIDPVGHIWGQWP

SEQ ID NO: 2735 - DNA, 348 bp, Homo sapiens; identical to SEQ ID NO: 2707

SEQ ID NO: 2736 - protein, 115 aa, Homo sapiens; identical to SEQ ID NO: 2708

SEQ ID NO: 2737 - DNA, 1471 bp, Homo sapiens
tccagaatttgtttgccctctagggtagaatccgccaagctttgagagaaggctgtgactgctgtgctctgggcgccagctcgctccagggagtgatgggaatcctgtcattcttacctgtccttgccactgagagtgactgggctgactgcaagtccccccagccttggggtcatatgcttctgtggacagctgtgctattcctggctcctgttgctgggacacctgcagctcccccaaaggctgtgctgaaactcgagccccagtggatcaacgtgctccaggaggactctgtgactctgacatgccgggggactcacagccctgagagcgactccattcagtggttccacaatgggaatctcattcccacccacacgcagcccagctacaggttcaaggccaacaacaatgacagcggggagtacacgtgccagactggccagaccagcctcagcgaccctgtgcatctgactgtgctttctgagtggctggtgctccagacccctcacctggagttccaggagggagaaaccatcgtgctgaggtgccacagctggaaggacaagcctctggtcaaggtcacattcttccagaatggaaaatccaagaaattttcccgttcggatcccaacttctccatcccacaagcaaaccacagtcacagtggtgattaccactgcacaggaaacataggctacacgctgtactcatccaagcctgtgaccatcactgtccaagctcccagctcttcaccgatggggatcattgtggctgtggtcactgggattgctgtagcggccattgttgctgctgtagtggccttgatctactgcaggaaaaagcggatttcagccaatcccactaatcctgatgaggctgacaaagttggggctgagaacacaatcacctattcacttctcatgcacccggatgctctggaagagcctgatgaccagaaccgtatttagtctccattgtcttgcattgggatttgagaagaaaatcagagagggaagatctggtatttcctggcctaaattccccttggggaggacagggagatgctgcagttccaaaagagaaggtttcttccagagtcatctacctgagtcctgaagctccctgtcctgaaagccacagacaatatggtcccaaataaccgactgcaccttctgtgcttcagctcttcttgacatcaaggctcttccgttccacatccacacagccaatccaattaatcaaaccactgttattaacagataatagcaacttgggaaatgcttatgttacaggttacgtgagaacaatcatgtaaatctatatgatttcagaaatgttaaaatagactaacctctaccagcacattaaaagtgattgtttctgggtgataaaattattgatgatttttattttctttatttttctataaagatcatatattacttttataataaaacattataaaaac

SEQ ID NO: 2738 - protein, 291 aa, Homo sapiens; identical to SEQ ID NO: 159

SEQ ID NO: 2739 - DNA, 2070 bp, Homo sapiens
tccagaatttgtttgccctctagggtagaatccgccaagctttgagagaaggctgtgactgctgtgctctgggcgccagctcgctccagggagtgatgggaatcctgtcattcttacctgtccttgccactgagagtgactgggctgactgcaagtccccccagccttggggtcatatgcttctgtggacagctgtgctattcctggctcctgttgctgggacacctgcagctcccccaaaggctgtgctgaaactcgagccccagtggatcaacgtgctccaggaggactctgtgactctgacatgccgggggactcacagccctgagagcgactccattcagtggttccacaatgggaatctcattcccacccacacgcagcccagctacaggttcaaggccaacaacaatgacagcggggagtacacgtgccagactggccagaccagcctcagcgaccctgtgcatctgactgtgctttctgagtggctggtgctccagacccctcacctggagttccaggagggagaaaccatcgtgctgaggtgccacagctggaaggacaagcctctggtcaaggtcacattcttccagaatggaaaatccaagaaattttcccgttcggatcccaacttctccatcccacaagcaaaccacagtcacagtggtgattaccactgcacaggaaacataggctacacgctgtactcatccaagcctgtgaccatcactgtccaagctcccagctcttcaccgatggggatcattgtggctgtggtcactgggattgctgtagcggccattgttgctgctgtagtggccttgatctactgcaggaaaaagcggatttcagccaatcccactaatcctgatgaggctgacaaagttggggctgagaacacaatcacctattcacttctcatgcacccggatgctctggaagagcctgatgaccagaaccgtatttagtctccattgtcttgcattgggatttgagaagaaaatcagagagggaagatctggtatttcctggcctaaattccccttggggaggacagggagatgctgcagttccaaaagagaaggtttcttccagagtcatctacctgagtcctgaagctccctgtcctgaaagccacagacaatatggtcccaaataaccgactgcaccttctgtgcttcagctcttcttgacatcaaggctcttccgttccacatccacacagccaatccaattaatcaaaccactgttattaacagataatagcaacttgggaaatgcttatgttacaggttacgtgagaacaatcatgtaaatctatatgatttcagaaatgttaaaatagactaacctctaccagcacattaaaagtgattgtttctgggtgataaaattattgatgatttttattttctttatttttctataaagatcatatattacttttataataaaacattataaaaacaacattctgtttaccttttcaaggctgtattggttggagtgtagactgaactgcctggggtctgtttctcttcagtgatgagactcttaggaaggcaggaatggataggatagggggaggagaggagagatggggatttagaatgtagagtgagtgccccttttcttaaaactgaatacagtcacgcaccacataatgatgtttagttcaacaacagactgcatatatgatggtgatcccataaaattataataccatatttctattgtaccttttctattcctatgtttagatatatgagtacttaccattgtgttacaattgcctaaagtattcagtacagtagcatgctgtacaggtttgtagcctaggggcaataggctatacgctacagcctaggtgtgtagtaggccacaccatttaggtttgtataagtacctgctatgatgttcacacaacaaaattgcctgcatttctcaaaatgtatccccatatttcaacaatgcatgactgtactcttctgccaatgaccttgtattcttgtttccatgtcttcttctctttcctcctatggcaaataaaacactgttttgcaacac

SEQ ID NO: 2740 - protein, 291 aa, Homo sapiens; identical to SEQ ID NO: 159

SEQ ID NO: 2741 - DNA, 1396 bp, Homo sapiens
cagaatttgtttgccctctagggtagaatccgccaagctttgagagaaggctgtgactgctgtgctctgggcgccagctcgctccagggagtgatgggaatcctgtcattcttacctgtccttgccactgagagtgactgggctgactgcaagtccccccagccttggggtcatatgcttctgtggacagctgtgctattcctggctcctgttgctgggacacctgcagctcccccaaaggctgtgctgaaactcgagccccagtggatcaacgtgctccaggaggactctgtgactctgacatgccgggggactcacagccctgagagcgactccattcagtggttccacaatgggaatctcattcccacccacacgcagcccagctacaggttcaaggccaacaacaatgacagcggggagtacacgtgccagactggccagaccagcctcagcgaccctgtgcatctgactgtgctttctgagtggctggtgctccagacccctcacctggagttccaggagggagaaaccatcgtgctgaggtgccacagctggaaggacaagcctctggtcaaggtcacattcttccagaatggaaaatccaagaaattttcccgttcggatcccaacttctccatcccacaagcaaaccacagtcacagtggtgattaccactgcacaggaaacataggctacacgctgtactcatccaagcctgtgaccatcactgtccaagctcccagctcttcaccgatggggatcattgtggctgtggtcactgggattgctgtagcggccattgttgctgctgtagtggccttgatctactgcaggaaaaagcggatttcagccaatcccactaatcctgatgaggctgacaaagttggggctgagaacacaatcacctattcacttctcatgcacccggatgctctggaagagcctgatgaccagaaccgtatttagtctccattgtcttgcattgggatttgagaagaaaatcagagagggaagatctggtatttcctggcctaaattccccttggggaggacagggagatgctgcagttccaaaagagaaggtttcttccagagtcatctacctgagtcctgaagctccctgtcctgaaagccacagacaatatggtcccaaataaccgactgcaccttctgtgcttcagctcttcttgacatcaaggctcttccgttccacatccacacagccaatccaattaatcaaaccactgttattaacagataatagcaacttgggaaatgcttatgttacaggttacgtgagaacaatcatgtaaatctatatgatttcagaaatgttaaaatagactaacctctaccagcacattaaaagtgattgtttctgggtgataaaatt

SEQ ID NO: 2742 - protein, 291 aa, Homo sapiens; identical to SEQ ID NO: 159

SEQ ID NO: 2743 - DNA, 1452 bp, Homo sapiens
agaatttgtttgccctctagggtagaatccgccaagctttgagagaaggctgtgactgctgtgctctgggcgccagctcgctccagggagtgatgggaatcctgtcattcttacctgtccttgccactgagagtgactgggctgactgcaagtccccccagccttggggtcatatgcttctgtggacagctgtgctattcctggctcctgttgctgggacacctgcagctcccccaaaggctgtgctgaaactcgagccccagtggatcaacgtgctccaggaggactctgtgactctgacatgccgggggactcacagccctgagagcgactccattcagtggttccacaatgggaatctcattcccacccacacgcagcccagctacaggttcaaggccaacaacaatgacagcggggagtacacgtgccagactggccagaccagcctcagcgaccctgtgcatctgactgtgctttctgagtggctggtgctccagacccctcacctggagttccaggagggagaaaccatcgtgctgaggtgccacagctggaaggacaagcctctggtcaaggtcacattcttccagaatggaaaatccaagaaattttcccgttcggatcccaacttctccatcccacaagcaaaccacagtcacagtggtgattaccactgcacaggaaacataggctacacgctgtactcatccaagcctgtgaccatcactgtccaagctcccagctcttcaccgatggggatcattgtggctgtggtcactgggattgctgtagcggccattgttgctgctgtagtggccttgatctactgcaggaaaaagcggatttcagctctcccaggataccctgagtgcagggaaatgggagagaccctccctgagaaaccagccaatcccactaatcctgatgaggctgacaaagttggggctgagaacacaatcacctattcacttctcatgcacccggatgctctggaagagcctgatgaccagaaccgtatttagtctccattgtcttgcattgggatttgagaagaaaatcagagagggaagatctggtatttcctggcctaaattccccttggggaggacagggagatgctgcagttccaaaagagaaggtttcttccagagtcatctacctgagtcctgaagctccctgtcctgaaagccacagacaatatggtcccaaataaccgactgcaccttctgtgcttcagctcttcttgacatcaaggctcttccgttccacatccacacagccaatccaattaatcaaaccactgttattaacagataatagcaacttgggaaatgcttatgttacaggttacgtgagaacaatcatgtaaatctatatgatttcagaaatgttaaaatagactaacctctaccagcacattaaaagtgattgtttctgggtgataaaatt

SEQ ID NO: 2744 - protein, 310 aa, Homo sapiens; identical to SEQ ID NO: 163

SEQ ID NO: 2745 - DNA, 4722 bp, Homo sapiens
agaatttgtttgccctctagggtagaatccgccaagctttgagagaaggctgtgactgctgtgctctgggcgccagctcgctccagggagtgatgggaatcctgtcattcttacctgtccttgccactgagagtgactgggctgactgcaagtccccccagccttggggtcatatgcttctgtggacagctgtgctattcctggctcctgttgctgggacacctgcagctcccccaaaggctgtgctgaaactcgagccccagtggatcaacgtgctccaggaggactctgtgactctgacatgccgggggactcacagccctgagagcgactccattcagtggttccacaatgggaatctcattcccacccacacgcagcccagctacaggttcaaggccaacaacaatgacagcggggagtacacgtgccagactggccagaccagcctcagcgaccctgtgcatctgactgtgctttctgagtggctggtgctccagacccctcacctggagttccaggagggagaaaccatcgtgctgaggtgccacagctggaaggacaagcctctggtcaaggtcacattcttccagaatggaaaatccaagaaattttcccgttcggatcccaacttctccatcccacaagcaaaccacagtcacagtggtgattaccactgcacaggaaacataggctacacgctgtactcatccaagcctgtgaccatcactgtccaagctcccagctcttcaccgatggggatcattgtggctgtggtcactgggattgctgtagcggccattgttgctgctgtagtggccttgatctactgcaggaaaaagcggatttcaggtttgtagctcctcccggtccctttggttatcagtttccacttggcccaggccctaaccccagacattgccagaatccctctctttgggctagatacacattcagatctaggcccgtattgtattatagtcattcattcgtttattagatcattcatttgacaagacttgaacaaactagcttatgtgtcagccaatgcgtgagacatggtgggtgatgccaagagaagtccagtccctgcccttggggagttctcagcattgtgaggaagacagggtcattataataagatgggataagagcaatgatagggacatgaaaagcctaggatagaagtacagaggaggctccatagcccaacaagggctgaggcagttggagaaggtcttggggagagcagtgtagtgtagtgatggagtgcacatagtggggccagactgcctgagttcaaatctagttctacagcataccaactatatgacccaagtgagtcactccacctctctgtgcctcagctgtctcaagtggaaaatggggacactaataggacttacctcagagggttgccatggggatgaaagaggctgatgctcttacacagtgcctggtaggcagtaacagcacacaaacagggctgttgccattctggaggaggtggtgtgtgagggcagcgcttagctagggaaggaggaccctccaggcactgggccaaggcagggattgaagccgggtggggctcatatgggtgtcgaagggggagtagagagggtactgcaagccaccaagaaagaaagaatcctgctaacacctcacaaagcacttttcaattggttcatagccaacacctcagttactgatgataagtaaatacagagaaacagagagagagagactgagacacaggggtgtttttaaaaggcagagcaagcctcagacagatgccatggcgtggactttctgacactcctgggcatccccatgggtgagctgaattctgcctctggaccagcccttttccaggcgggagcagcctctgagcaggggagctgggggtgggaggacaggaaacatctgccagagtgaaggcctgagctggtcccatccaaccctggccctggtccttggtcctgaggactcaggccccaccgcctaatcctactaacctcctgtgtgcccctcccagctctcccaggataccctgagtgcagggaaatgggagagaccctccctgagaaaccaggtgagtacaggttgtctcagggattcagtgatggctcaccagggctgccggctggactggagccagggagaaggggcttgtgcaagttcagctgggagccagggagggagcagcagtgggaggatggctggggctcaaatcgcttggtcagctcttagtctaactcctgggcctaaagacgacctctctggagatgagaagagaaacaccagtcccagatacagaagagagggctgtgtccgaatttctggtaccaggaatctggtgatatttccagagcaagaaatcagagatactttggtcttcctgtggagctttggcagagctggcaaaggatggggttaggggctgtaagactgaggccaataggacgtgggaggcaggagtctaaggggaaaggaggaggaggcctggaaaccccttgatttgctgaggaatctgcctctgtggagggatggggtggagtggccaggctcagctgtctgtggaacactaggaggaggtttgggcttgagaaaattctgggggactaggggcactagtgggctctactctgtgggcaaaactcagttctgatgcccatgcactcaaggttgactgaattttggcctggttctgccctcatcacacagtggagccctgagcaagtcagtctccctgatggggttcagtctcctcactgaggaaatgagtgggtggccagggtgacctctcaggtcttctagatttgacattctgagaaccaggggccacccaagccctggcccaggtgggagtgtgtaaaggaacttccaggaggatgccaggcaacttccagactgtagttaaagtcagagcacaaaggaaaccagtgctttctctgggggcttccatgacagtaagaacaggcagaaaaaagaggctgtcaaagaccccacctcagatggctggagtatgattcagagcagagccaacagatttaagagcttgagcaaaatatcacttgttcagctgtgcttgcagcaaggtcgcatgtctgctggccaggcccagtggtgataggggcctgtgttcacaccagggccaaaacagatctggaaaaaacaaagtccaagcaactggattatccatcttgttgtgtggttctgtctgcactggcataagcacatttcacaaggcacttttgcagccaggcattggggctgcataaatggttttttaaaaatcctttcccaaaaggcaaagctgggttgctgggattcttgggaaatgtaatagaatgggaattcagaatgcggtttactgcagaatttacagcatggcaataaaggctctctatgttcagggggtgagagaagagactagatgcattgtctcagatgtctcctgacttcctgagaaatgccactttgcagatatggggctgcttttcacactggctaagtcagttcatggcaaaatatgagggaattcagtgtgtttcagacactaaccaaagtccatccttcctttctccttccgtccctcccttcctccctttctcactcactctctctttctttttaatgccatggagtaccatatttttcaaagttccaacaaagatgcactacatttagacaatgtggaaatggccctcagccttctctccctgaagtctgtggccagcaaaaatctggactttacttcactctgatgctgaacacccccctcccccacctcttccccaatatctcagatcccaagcctccctggtttgcttctaggaaagctcagcaattccctgaaaagaatgcagctcaagtgactgctccactttttcaccttggcctttgcggaaggctgtggctgggctaccctatgcatcgatcaatgaggtcatatttacccagtgcttggcctagaggcccaagacagggtcagcagtgcttgctttggctctagtttgggcgttggttttgcagcctcagcatcagcacaggcaggccctcttctccagcagtgctctggctgatatttcttctttttcccacagccaatcccactaatcctgatgaggctgacaaagttggggctgagaacacaatcacctattcacttctcatgcacccggatgctctggaagagcctgatgaccagaaccgtatttagtctccattgtcttgcattgggatttgagaagaaaatcagagagggaagatctggtatttcctggcctaaattccccttggggaggacagggagatgctgcagttccaaaagagaaggtttcttccagagtcatctacctgagtcctgaagctccctgtcctgaaagccacagacaatatggtcccaaataaccgactgcaccttctgtgcttcagctcttcttgacatcaaggctcttccgttccacatccacacagccaatccaattaatcaaaccactgttattaacagataatagcaacttgggaaatgcttatgttacaggttacgtgagaacaatcatgtaaatctatatgatttcagaaatgttaaaatagactaacctctaccagcacattaaaagtgattgtttctgggtgataaaattattgatgatttttattttctttatttttctataaagatcatatattacttttataataaaacattataaaaac

SEQ ID NO: 2746 - protein, 255 aa, Homo sapiens
MGILSFLPVLATESDWADCKSPQPWGHMLLWTAVLFLAPVAGTPAAPPKAVLKLEPQWINVLQEDSVTLTCRGTHSPESDSIQWFHNGNLIPTHTQPSYRFKANNNDSGEYTCQTGQTSLSDPVHLTVLSEWLVLQTPHLEFQEGETIVLRCHSWKDKPLVKVTFFQNGKSKKFSRSDPNFSIPQANHSHSGDYHCTGNIGYTLYSSKPVTITVQAPSSSPMGIIVAVVTGIAVAAIVAAVVALIYCRKKRISGL

SEQ ID NO: 2747 - DNA, 1525 bp, Homo sapiens
agaatttgtttgccctctagggtagaatccgccaagctttgagagaaggctgtgactgctgtgctctgggcgccagctcgctccagggagtgatgggaatcctgtcattcttacctgtccttgccactgagagtgactgggctgactgcaagtccccccagccttggggtcatatgcttctgtggacagctgtgctattcctggctcctgttgctgggacacctgcagctcccccaaaggctgtgctgaaactcgagccccagtggatcaacgtgctccaggaggactctgtgactctgacatgccgggggactcacagccctgagagcgactccattcagtggttccacaatgggaatctcattcccacccacacgcagcccagctacaggttcaaggccaacaacaatgacagcggggagtacacgtgccagactggccagaccagcctcagcgaccctgtgcatctgactgtgctttctgagtggctggtgctccagacccctcacctggagttccaggagggagaaaccatcgtgctgaggtgccacagctggaaggacaagcctctggtcaaggtcacattcttccagaatggaaaatccaagaaattttcccgttcggatcccaacttctccatcccacaagcaaaccacagtcacagtggtgattaccactgcacaggaaacataggctacacgctgtactcatccaagcctgtgaccatcactgtccaagctcccagctcttcaccgatggggatcattgtggctgtggtcactgggattgctgtagcggccattgttgctgctgtagtggccttgatctactgcaggaaaaagcggatttcagctctcccaggataccctgagtgcagggaaatgggagagaccctccctgagaaaccagccaatcccactaatcctgatgaggctgacaaagttggggctgagaacacaatcacctattcacttctcatgcacccggatgctctggaagagcctgatgaccagaaccgtatttagtctccattgtcttgcattgggatttgagaagaaaatcagagagggaagatctggtatttcctggcctaaattccccttggggaggacagggagatgctgcagttccaaaagagaaggtttcttccagagtcatctacctgagtcctgaagctccctgtcctgaaagccacagacaatatggtcccaaataaccgactgcaccttctgtgcttcagctcttcttgacatcaaggctcttccgttccacatccacacagccaatccaattaatcaaaccactgttattaacagataatagcaacttgggaaatgcttatgttacaggttacgtgagaacaatcatgtaaatctatatgatttcagaaatgttaaaatagactaacctctaccagcacattaaaagtgattgtttctgggtgataaaattattgatgatttttattttctttatttttctataaagatcatatattacttttataataaaacattataaaaac

SEQ ID NO: 2748 - protein, 310 aa, Homo sapiens; identical to SEQ ID NO: 163

SEQ ID NO: 2749 - DNA, 2124 bp, Homo sapiens
agaatttgtttgccctctagggtagaatccgccaagctttgagagaaggctgtgactgctgtgctctgggcgccagctcgctccagggagtgatgggaatcctgtcattcttacctgtccttgccactgagagtgactgggctgactgcaagtccccccagccttggggtcatatgcttctgtggacagctgtgctattcctggctcctgttgctgggacacctgcagctcccccaaaggctgtgctgaaactcgagccccagtggatcaacgtgctccaggaggactctgtgactctgacatgccgggggactcacagccctgagagcgactccattcagtggttccacaatgggaatctcattcccacccacacgcagcccagctacaggttcaaggccaacaacaatgacagcggggagtacacgtgccagactggccagaccagcctcagcgaccctgtgcatctgactgtgctttctgagtggctggtgctccagacccctcacctggagttccaggagggagaaaccatcgtgctgaggtgccacagctggaaggacaagcctctggtcaaggtcacattcttccagaatggaaaatccaagaaattttcccgttcggatcccaacttctccatcccacaagcaaaccacagtcacagtggtgattaccactgcacaggaaacataggctacacgctgtactcatccaagcctgtgaccatcactgtccaagctcccagctcttcaccgatggggatcattgtggctgtggtcactgggattgctgtagcggccattgttgctgctgtagtggccttgatctactgcaggaaaaagcggatttcagctctcccaggataccctgagtgcagggaaatgggagagaccctccctgagaaaccagccaatcccactaatcctgatgaggctgacaaagttggggctgagaacacaatcacctattcacttctcatgcacccggatgctctggaagagcctgatgaccagaaccgtatttagtctccattgtcttgcattgggatttgagaagaaaatcagagagggaagatctggtatttcctggcctaaattccccttggggaggacagggagatgctgcagttccaaaagagaaggtttcttccagagtcatctacctgagtcctgaagctccctgtcctgaaagccacagacaatatggtcccaaataaccgactgcaccttctgtgcttcagctcttcttgacatcaaggctcttccgttccacatccacacagccaatccaattaatcaaaccactgttattaacagataatagcaacttgggaaatgcttatgttacaggttacgtgagaacaatcatgtaaatctatatgatttcagaaatgttaaaatagactaacctctaccagcacattaaaagtgattgtttctgggtgataaaattattgatgatttttattttctttatttttctataaagatcatatattacttttataataaaacattataaaaacaacattctgtttaccttttcaaggctgtattggttggagtgtagactgaactgcctggggtctgtttctcttcagtgatgagactcttaggaaggcaggaatggataggatagggggaggagaggagagatggggatttagaatgtagagtgagtgccccttttcttaaaactgaatacagtcacgcaccacataatgatgtttagttcaacaacagactgcatatatgatggtgatcccataaaattataataccatatttctattgtaccttttctattcctatgtttagatatatgagtacttaccattgtgttacaattgcctaaagtattcagtacagtagcatgctgtacaggtttgtagcctaggggcaataggctatacgctacagcctaggtgtgtagtaggccacaccatttaggtttgtataagtacctgctatgatgttcacacaacaaaattgcctgcatttctcaaaatgtatccccatatttcaacaatgcatgactgtactcttctgccaatgaccttgtattcttgtttccatgtcttcttctctttcctcctatggcaaataaaacactgttttgcaacac

SEQ ID NO: 2750 - protein, 310 aa, Homo sapiens; identical to SEQ ID NO: 163

SEQ ID NO: 2751 - DNA, 5321 bp, Homo sapiens
agaatttgtttgccctctagggtagaatccgccaagctttgagagaaggctgtgactgctgtgctctgggcgccagctcgctccagggagtgatgggaatcctgtcattcttacctgtccttgccactgagagtgactgggctgactgcaagtccccccagccttggggtcatatgcttctgtggacagctgtgctattcctggctcctgttgctgggacacctgcagctcccccaaaggctgtgctgaaactcgagccccagtggatcaacgtgctccaggaggactctgtgactctgacatgccgggggactcacagccctgagagcgactccattcagtggttccacaatgggaatctcattcccacccacacgcagcccagctacaggttcaaggccaacaacaatgacagcggggagtacacgtgccagactggccagaccagcctcagcgaccctgtgcatctgactgtgctttctgagtggctggtgctccagacccctcacctggagttccaggagggagaaaccatcgtgctgaggtgccacagctggaaggacaagcctctggtcaaggtcacattcttccagaatggaaaatccaagaaattttcccgttcggatcccaacttctccatcccacaagcaaaccacagtcacagtggtgattaccactgcacaggaaacataggctacacgctgtactcatccaagcctgtgaccatcactgtccaagctcccagctcttcaccgatggggatcattgtggctgtggtcactgggattgctgtagcggccattgttgctgctgtagtggccttgatctactgcaggaaaaagcggatttcaggtttgtagctcctcccggtccctttggttatcagtttccacttggcccaggccctaaccccagacattgccagaatccctctctttgggctagatacacattcagatctaggcccgtattgtattatagtcattcattcgtttattagatcattcatttgacaagacttgaacaaactagcttatgtgtcagccaatgcgtgagacatggtgggtgatgccaagagaagtccagtccctgcccttggggagttctcagcattgtgaggaagacagggtcattataataagatgggataagagcaatgatagggacatgaaaagcctaggatagaagtacagaggaggctccatagcccaacaagggctgaggcagttggagaaggtcttggggagagcagtgtagtgtagtgatggagtgcacatagtggggccagactgcctgagttcaaatctagttctacagcataccaactatatgacccaagtgagtcactccacctctctgtgcctcagctgtctcaagtggaaaatggggacactaataggacttacctcagagggttgccatggggatgaaagaggctgatgctcttacacagtgcctggtaggcagtaacagcacacaaacagggctgttgccattctggaggaggtggtgtgtgagggcagcgcttagctagggaaggaggaccctccaggcactgggccaaggcagggattgaagccgggtggggctcatatgggtgtcgaagggggagtagagagggtactgcaagccaccaagaaagaaagaatcctgctaacacctcacaaagcacttttcaattggttcatagccaacacctcagttactgatgataagtaaatacagagaaacagagagagagagactgagacacaggggtgtttttaaaaggcagagcaagcctcagacagatgccatggcgtggactttctgacactcctgggcatccccatgggtgagctgaattctgcctctggaccagcccttttccaggcgggagcagcctctgagcaggggagctgggggtgggaggacaggaaacatctgccagagtgaaggcctgagctggtcccatccaaccctggccctggtccttggtcctgaggactcaggccccaccgcctaatcctactaacctcctgtgtgcccctcccagctctcccaggataccctgagtgcagggaaatgggagagaccctccctgagaaaccaggtgagtacaggttgtctcagggattcagtgatggctcaccagggctgccggctggactggagccagggagaaggggcttgtgcaagttcagctgggagccagggagggagcagcagtgggaggatggctggggctcaaatcgcttggtcagctcttagtctaactcctgggcctaaagacgacctctctggagatgagaagagaaacaccagtcccagatacagaagagagggctgtgtccgaatttctggtaccaggaatctggtgatatttccagagcaagaaatcagagatactttggtcttcctgtggagctttggcagagctggcaaaggatggggttaggggctgtaagactgaggccaataggacgtgggaggcaggagtctaaggggaaaggaggaggaggcctggaaaccccttgatttgctgaggaatctgcctctgtggagggatggggtggagtggccaggctcagctgtctgtggaacactaggaggaggtttgggcttgagaaaattctgggggactaggggcactagtgggctctactctgtgggcaaaactcagttctgatgcccatgcactcaaggttgactgaattttggcctggttctgccctcatcacacagtggagccctgagcaagtcagtctccctgatggggttcagtctcctcactgaggaaatgagtgggtggccagggtgacctctcaggtcttctagatttgacattctgagaaccaggggccacccaagccctggcccaggtgggagtgtgtaaaggaacttccaggaggatgccaggcaacttccagactgtagttaaagtcagagcacaaaggaaaccagtgctttctctgggggcttccatgacagtaagaacaggcagaaaaaagaggctgtcaaagaccccacctcagatggctggagtatgattcagagcagagccaacagatttaagagcttgagcaaaatatcacttgttcagctgtgcttgcagcaaggtcgcatgtctgctggccaggcccagtggtgataggggcctgtgttcacaccagggccaaaacagatctggaaaaaacaaagtccaagcaactggattatccatcttgttgtgtggttctgtctgcactggcataagcacatttcacaaggcacttttgcagccaggcattggggctgcataaatggttttttaaaaatcctttcccaaaaggcaaagctgggttgctgggattcttgggaaatgtaatagaatgggaattcagaatgcggtttactgcagaatttacagcatggcaataaaggctctctatgttcagggggtgagagaagagactagatgcattgtctcagatgtctcctgacttcctgagaaatgccactttgcagatatggggctgcttttcacactggctaagtcagttcatggcaaaatatgagggaattcagtgtgtttcagacactaaccaaagtccatccttcctttctccttccgtccctcccttcctccctttctcactcactctctctttctttttaatgccatggagtaccatatttttcaaagttccaacaaagatgcactacatttagacaatgtggaaatggccctcagccttctctccctgaagtctgtggccagcaaaaatctggactttacttcactctgatgctgaacacccccctcccccacctcttccccaatatctcagatcccaagcctccctggtttgcttctaggaaagctcagcaattccctgaaaagaatgcagctcaagtgactgctccactttttcaccttggcctttgcggaaggctgtggctgggctaccctatgcatcgatcaatgaggtcatatttacccagtgcttggcctagaggcccaagacagggtcagcagtgcttgctttggctctagtttgggcgttggttttgcagcctcagcatcagcacaggcaggccctcttctccagcagtgctctggctgatatttcttctttttcccacagccaatcccactaatcctgatgaggctgacaaagttggggctgagaacacaatcacctattcacttctcatgcacccggatgctctggaagagcctgatgaccagaaccgtatttagtctccattgtcttgcattgggatttgagaagaaaatcagagagggaagatctggtatttcctggcctaaattccccttggggaggacagggagatgctgcagttccaaaagagaaggtttcttccagagtcatctacctgagtcctgaagctccctgtcctgaaagccacagacaatatggtcccaaataaccgactgcaccttctgtgcttcagctcttcttgacatcaaggctcttccgttccacatccacacagccaatccaattaatcaaaccactgttattaacagataatagcaacttgggaaatgcttatgttacaggttacgtgagaacaatcatgtaaatctatatgatttcagaaatgttaaaatagactaacctctaccagcacattaaaagtgattgtttctgggtgataaaattattgatgatttttattttctttatttttctataaagatcatatattacttttataataaaacattataaaaacaacattctgtttaccttttcaaggctgtattggttggagtgtagactgaactgcctggggtctgtttctcttcagtgatgagactcttaggaaggcaggaatggataggatagggggaggagaggagagatggggatttagaatgtagagtgagtgccccttttcttaaaactgaatacagtcacgcaccacataatgatgtttagttcaacaacagactgcatatatgatggtgatcccataaaattataataccatatttctattgtaccttttctattcctatgtttagatatatgagtacttaccattgtgttacaattgcctaaagtattcagtacagtagcatgctgtacaggtttgtagcctaggggcaataggctatacgctacagcctaggtgtgtagtaggccacaccatttaggtttgtataagtacctgctatgatgttcacacaacaaaattgcctgcatttctcaaaatgtatccccatatttcaacaatgcatgactgtactcttctgccaatgaccttgtattcttgtttccatgtcttcttctctttcctcctatggcaaataaaacactgttttgcaacac

SEQ ID NO: 2752 - protein, 255 aa, Homo sapiens; identical to SEQ ID NO: 2746

SEQ ID NO: 2753 - DNA, 2408 bp, Homo sapiens
tgtttgccctctagggtagaatccgccaagctttgagagaaggctgtgactgctgtgctctgggcgccagctcgctccagggagtgatgggaatcctgtcattcttacctgtccttgccactgagagtgactgggctgactgcaagtccccccagccttggggtcatatgcttctgtggacagctgtgctattcctggctcctgttgctgggacacctgcagctcccccaaaggctgtgctgaaactcgagccccagtggatcaacgtgctccaggaggactctgtgactctgacatgccgggggactcacagccctgagagcgactccattcagtggttccacaatgggaatctcattcccacccacacgcagcccagctacaggttcaaggccaacaacaatgacagcggggagtacacgtgccagactggccagaccagcctcagcgaccctgtgcatctgactgtgctttctggtcagtggaggaaggccccagggtggacctgggagggccaggacggatgaaatctgctttcaggcagaggtttgcaggaaaggggggtggcctgcttactgggaagtatcgctgtgagttgcctcagcacatatcagtggttgtttttgcctcagttctgattgaacagaagaaggtttcaaggccaaaaacaggcagccaagtgtgagagaagcagaaggaaatccctactgcataaaacccatttccattttaatggcagaattgaaaagcacagaccacaactgaatcctagccctggaaatgactcactatacaacatgatgaattcatttaacccttgagtttccatttcttcacctgctccgtggggcactaacgcctccctcagaggcttctggtgagaatcagtgtttccctgcccccgccccgccctccatgccccttctccacgttctcactgtgctaggtgctcttctctgtctttctcttccaccagcctgtgggaaacctgagatgaaagtcgtgtcttacccatctttgtatttccagcatctgaaactgggcagagcttaataaatattttgctggagaggttgatgatcttacaaagctcccattgaaaggtggctctctgtaaagcaaagttacaatgagattgtgatgaacattgtccttgtggcttttcacttagtcccctcccttcacctgaagagcaaattttcctcaaaagtacacagcaaacgaatgacccactggtgacactgctgcctttagaccctgctggaaagaagctccacatttattaacattcccgaagtaaatttatcaggtagcattcatcaggtaacatttgttgcacattcatgacttttctactgtccacaaaggcatatgtccttatcatatgcggactcctcggtcacactggattcttccttccctcctcgacatggaagagatggcatcttagggtctcttgtgttcttcctgcagaggcctgtcgggcaggaaaaggctgcagctgccttcctgggagaaggaggagatgagtgtatcctgaacacctattatgtgctaggggctattgtagatacatgacactatcatgctcattttcacgaatgaggaaactgaggctcagaagacttaaattatttgcccaagagttcataaatgacagagccagcattagagtccaggactgtctgatttcagacctaagctgttccctctgcacatcgtgtcccaccagtaaggaagatctgggtctcagagctgagccaagacctcccgggtcctctgcggttttttgtgtctttcagagtggctggtgctccagacccctcacctggagttccaggagggagaaaccatcgtgctgaggtgccacagctggaaggacaagcctctggtcaaggtcacattcttccagaatggaaaatccaagaaattttcccgttcggatcccaacttctccatcccacaagcaaaccacagtcacagtggtgattaccactgcacaggaaacataggctacacgctgtactcatccaagcctgtgaccatcactgtccaagctcccagctcttcaccgatggggatcattgtggctgtggtcactgggattgctgtagcggccattgttgctgctgtagtggccttgatctactgcaggaaaaagcggatttcaggtttgtagctcctcccggtccctttggttatcagtttccacttggcccaggccctaaccccagacattgccagaatccctctctttgggctagatacacattcagatctaggcccgtattgtattatagtcattcattcgtttattagatcattcatttgacaagacttgaacaaactagcttatgtgtcagccaatgcgtgagacatggtgggtgatgccaagagaagtccagtcc

SEQ ID NO: 2754 - protein, 146 aa, Homo sapiens
MGILSFLPVLATESDWADCKSPQPWGHMLLWTAVLFLAPVAGTPAAPPKAVLKLEPQWINVLQEDSVTLTCRGTHSPESDSIQWFHNGNLIPTHTQPSYRFKANNNDSGEYTCQTGQTSLSDPVHLTVLSGQWRKAPGWTWEGQDG

SEQ ID NO: 2755 - DNA, 1493 bp, Homo sapiens
gccctctagggtagaatccgccaagctttgagagaaggctgtgactgctgtgctctgggcgccagctcgctccagggagtgatgggaatcctgtcattcttacctgtccttgccactgagagtgactgggctgactgcaagtccccccagccttggggtcatatgcttctgtggacagctgtgctattcctggcagctcccccaaaggctgtgctgaaactcgagccccagtggatcaacgtgctccaggaggactctgtgactctgacatgccgggggactcacagccctgagagcgactccattcagtggttccacaatgggaatctcattcccacccacacgcagcccagctacaggttcaaggccaacaacaatgacagcggggagtacacgtgccagactggccagaccagcctcagcgaccctgtgcatctgactgtgctttctgagtggctggtgctccagacccctcacctggagttccaggagggagaaaccatcgtgctgaggtgccacagctggaaggacaagcctctggtcaaggtcacattcttccagaatggaaaatccaagaaattttcccgttcggatcccaacttctccatcccacaagcaaaccacagtcacagtggtgattaccactgcacaggaaacataggctacacgctgtactcatccaagcctgtgaccatcactgtccaagctcccagctcttcaccgatggggatcattgtggctgtggtcactgggattgctgtagcggccattgttgctgctgtagtggccttgatctactgcaggaaaaagcggatttcagctctcccaggataccctgagtgcagggaaatgggagagaccctccctgagaaaccagccaatcccactaatcctgatgaggctgacaaagttggggctgagaacacaatcacctattcacttctcatgcacccggatgctctggaagagcctgatgaccagaaccgtatttagtctccattgtcttgcattgggatttgagaagaaaatcagagagggaagatctggtatttcctggcctaaattccccttggggaggacagggagatgctgcagttccaaaagagaaggtttcttccagagtcatctacctgagtcctgaagctccctgtcctgaaagccacagacaatatggtcccaaataaccgactgcaccttctgtgcttcagctcttcttgacatcaaggctcttccgttccacatccacacagccaatccaattaatcaaaccactgttattaacagataatagcaacttgggaaatgcttatgttacaggttacgtgagaacaatcatgtaaatctatatgatttcagaaatgttaaaatagactaacctctaccagcacattaaaagtgattgtttctgggtgataaaattattgatgatttttattttctttatttttctataaagatcatatattacttttataataaaacattataaaaac

SEQ ID NO: 2756 - protein, 303 aa, Homo sapiens
MGILSFLPVLATESDWADCKSPQPWGHMLLWTAVLFLAAPPKAVLKLEPQWINVLQEDSVTLTCRGTHSPESDSIQWFHNGNLIPTHTQPSYRFKANNNDSGEYTCQTGQTSLSDPVHLTVLSEWLVLQTPHLEFQEGETIVLRCHSWKDKPLVKVTFFQNGKSKKFSRSDPNFSIPQANHSHSGDYHCTGNIGYTLYSSKPVTITVQAPSSSPMGIIVAVVTGIAVAAIVAAVVALIYCRKKRISALPGYPECREMGETLPEKPANPTNPDEADKVGAENTITYSLLMHPDALEEPDDQNRI

SEQ ID NO: 2757 - DNA, 2092 bp, Homo sapiens
gccctctagggtagaatccgccaagctttgagagaaggctgtgactgctgtgctctgggcgccagctcgctccagggagtgatgggaatcctgtcattcttacctgtccttgccactgagagtgactgggctgactgcaagtccccccagccttggggtcatatgcttctgtggacagctgtgctattcctggcagctcccccaaaggctgtgctgaaactcgagccccagtggatcaacgtgctccaggaggactctgtgactctgacatgccgggggactcacagccctgagagcgactccattcagtggttccacaatgggaatctcattcccacccacacgcagcccagctacaggttcaaggccaacaacaatgacagcggggagtacacgtgccagactggccagaccagcctcagcgaccctgtgcatctgactgtgctttctgagtggctggtgctccagacccctcacctggagttccaggagggagaaaccatcgtgctgaggtgccacagctggaaggacaagcctctggtcaaggtcacattcttccagaatggaaaatccaagaaattttcccgttcggatcccaacttctccatcccacaagcaaaccacagtcacagtggtgattaccactgcacaggaaacataggctacacgctgtactcatccaagcctgtgaccatcactgtccaagctcccagctcttcaccgatggggatcattgtggctgtggtcactgggattgctgtagcggccattgttgctgctgtagtggccttgatctactgcaggaaaaagcggatttcagctctcccaggataccctgagtgcagggaaatgggagagaccctccctgagaaaccagccaatcccactaatcctgatgaggctgacaaagttggggctgagaacacaatcacctattcacttctcatgcacccggatgctctggaagagcctgatgaccagaaccgtatttagtctccattgtcttgcattgggatttgagaagaaaatcagagagggaagatctggtatttcctggcctaaattccccttggggaggacagggagatgctgcagttccaaaagagaaggtttcttccagagtcatctacctgagtcctgaagctccctgtcctgaaagccacagacaatatggtcccaaataaccgactgcaccttctgtgcttcagctcttcttgacatcaaggctcttccgttccacatccacacagccaatccaattaatcaaaccactgttattaacagataatagcaacttgggaaatgcttatgttacaggttacgtgagaacaatcatgtaaatctatatgatttcagaaatgttaaaatagactaacctctaccagcacattaaaagtgattgtttctgggtgataaaattattgatgatttttattttctttatttttctataaagatcatatattacttttataataaaacattataaaaacaacattctgtttaccttttcaaggctgtattggttggagtgtagactgaactgcctggggtctgtttctcttcagtgatgagactcttaggaaggcaggaatggataggatagggggaggagaggagagatggggatttagaatgtagagtgagtgccccttttcttaaaactgaatacagtcacgcaccacataatgatgtttagttcaacaacagactgcatatatgatggtgatcccataaaattataataccatatttctattgtaccttttctattcctatgtttagatatatgagtacttaccattgtgttacaattgcctaaagtattcagtacagtagcatgctgtacaggtttgtagcctaggggcaataggctatacgctacagcctaggtgtgtagtaggccacaccatttaggtttgtataagtacctgctatgatgttcacacaacaaaattgcctgcatttctcaaaatgtatccccatatttcaacaatgcatgactgtactcttctgccaatgaccttgtattcttgtttccatgtcttcttctctttcctcctatggcaaataaaacactgttttgcaacac

SEQ ID NO: 2758 - protein, 303 aa, Homo sapiens; identical to SEQ ID NO: 2756

SEQ ID NO: 2759 - DNA, 783 bp, Homo sapiens
ggtagaatccgccaagctttgagagaaggctgtgactgctgtgctctgggcgccagctcgctccagggagtgatgggaatcctgtcattcttacctgtccttgccactgagagtgactgggctgactgcaagtccccccagccttggggtcatatgcttctgtggacagctgtgctattcctggctcctgttgctgggacacctgcagctcccccaaaggctgtgctgaaactcgagccccagtggatcaacgtgctccaggaggactctgtgactctgacatgccgggggactcacagccctgagagcgactccattcagtggttccacaatgggaatctcattcccacccacacgcagcccagctacaggttcaaggccaacaacaatgacagcggggagtacacgtgccagactggccagaccagcctcagcgaccctgtgcatctgactgtgctttctgagtggctggtgctccagacccctcacctggagttccaggagggagaaaccatcgtgctgaggtgccacagctggaaggacaagcctctggtcaaggtcacattcttccagaatggaaaatccaagaaattttcccgttcggatcccaacttctccatcccacaagcaaaccacagtcacagtggtgattaccactgcacaggaaacataggctacacgctgtactcatccaagcctgtgaccatcactgtccaaggtatgcggagtctgccaagatgtaaggaggggagaagaggggatggacaagggctgaggtcacat

SEQ ID NO: 2760 - protein, 236 aa, Homo sapiens
MGILSFLPVLATESDWADCKSPQPWGHMLLWTAVLFLAPVAGTPAAPPKAVLKLEPQWINVLQEDSVTLTCRGTHSPESDSIQWFHNGNLIPTHTQPSYRFKANNNDSGEYTCQTGQTSLSDPVHLTVLSEWLVLQTPHLEFQEGETIVLRCHSWKDKPLVKVTFFQNGKSKKFSRSDPNFSIPQANHSHSGDYHCTGNIGYTLYSSKPVTITVQGMRSLPRCKEGRRGDGQGLRS

SEQ ID NO: 2761 - DNA, 981 bp, Homo sapiens
cgacacccatatgagccccacccggcttcaatccctgccttggcccagtgcctggagggtcctccttccctagctaagcgctgccctcacacaccacctcctccagaatggcaacagccctgtttgtgtgctgttactgcctaccaggcactgtgtaagagcatcagcctctttcatccccatggcaaccctctgagagagccacctttcaatgggagctttgctggtggaagagaaagacagagaagagcacctagcacagtgagaacgtggagaaggggcatggagggcggggcgggggcagggaaacactgattctcaccagaagcctctgagggaggcgttagtgccccacggagcaggtgaagaaatggaaactcaagggttaaatgaattcatcatgttgtatagtgagtcatttccagggctaggattcagttgtggtctgtgcttttcaattctgccattaaaatggaaatgggttttatgcagtagggatttccttctgcttctctcacacttggctgcctgtttttggccttgaaaccttcttctgttcaatcagaactgaggcaaaaacaaccactgatatgtgctgaggcaactcacagcgatacttcccagtaagcaggccacccccctttcctgcaaacctctgcctgaaagcagatttcatccgtcctggccctcccaggtccaccctggggccttcctccactgaccagaaagcacagtcagatgcacagggtcgctgaggctggtctggccagtctggcacgtgtactccccgctgtcattgttgttggccttgaacctgtagctgggctgcgtgtgggtgggaatgagattcccattgtggaaccactgaatggagtcgctctcagggctgtgagtcccccggcatgtcagagtcacagagtcctcctggagcacgttgatccactggggctcgagtttcagcacagcctttgggggagctgc

SEQ ID NO: 2762 - protein, 80 aa, Homo sapiens
MHRVAEAGLASLARVLPAVIVVGLEPVAGLRVGGNEIPIVEPLNGVALRAVSPPACQSHRVLLEHVDPLGLEFQHSLWGS

SEQ ID NO: 2763 - DNA, 992 bp, Homo sapiens
ctttcagagtggctggtgctccagacccctcacctggagttccaggagggagaaaccatcgtgctgaggtgccacagctggaaggacaagcctctggtcaaggtcacattcttccagaatggaaaatccaagaaattttcccgttcggatcccaacttctccatcccacaagcaaaccacagtcacagtggtgattaccactgcacaggaaacataggctacacgctgtactcatccaagcctgtgaccatcactgtccaagctcccagctcttcaccgatggggatcattgtggctgtggtcactgggattgctgtagcggccattgttgctgctgtagtggccttgatctactgcaggaaaaagcggatttcagccaatcccactaatcctgatgaggctgacaaagttggggctgagaacacaatcacctattcacttctcatgcacccggatgctctggaagagcctgatgaccagaaccgtatttagtctccattgtcttgcattgggatttgagaagaaaatcagagagggaagatctggtatttcctggcctaaattccccttggggaggacagggagatgctgcagttccaaaagagaaggtttcttccagagtcatctacctgagtcctgaagctccctgtcctgaaagccacagacaatatggtcccaaataaccgactgcaccttctgtgcttcagctcttcttgacatcaaggctcttccgttccacatccacacagccaatccaattaatcaaaccactgttattaacagataatagcaacttgggaaatgcttatgttacaggttacgtgagaacaatcatgtaaatctatatgatttcagaaatgttaaaatagactaacctctaccagcacattaaaagtgattgtttctgggtgataaaattattgatgatttttattttctttatttttctataaagatcatatattacttttataataaaacattataaaaac

SEQ ID NO: 2764 - protein, 81 aa, Homo sapiens
MRLTKLGLRTQSPIHFSCTRMLWKSLMTRTVFSLHCLALGFEKKIREGRSGISWPKFPLGRTGRCCSSKREGFFQSHLPES

SEQ ID NO: 2765 - DNA, 1591 bp, Homo sapiens
ctttcagagtggctggtgctccagacccctcacctggagttccaggagggagaaaccatcgtgctgaggtgccacagctggaaggacaagcctctggtcaaggtcacattcttccagaatggaaaatccaagaaattttcccgttcggatcccaacttctccatcccacaagcaaaccacagtcacagtggtgattaccactgcacaggaaacataggctacacgctgtactcatccaagcctgtgaccatcactgtccaagctcccagctcttcaccgatggggatcattgtggctgtggtcactgggattgctgtagcggccattgttgctgctgtagtggccttgatctactgcaggaaaaagcggatttcagccaatcccactaatcctgatgaggctgacaaagttggggctgagaacacaatcacctattcacttctcatgcacccggatgctctggaagagcctgatgaccagaaccgtatttagtctccattgtcttgcattgggatttgagaagaaaatcagagagggaagatctggtatttcctggcctaaattccccttggggaggacagggagatgctgcagttccaaaagagaaggtttcttccagagtcatctacctgagtcctgaagctccctgtcctgaaagccacagacaatatggtcccaaataaccgactgcaccttctgtgcttcagctcttcttgacatcaaggctcttccgttccacatccacacagccaatccaattaatcaaaccactgttattaacagataatagcaacttgggaaatgcttatgttacaggttacgtgagaacaatcatgtaaatctatatgatttcagaaatgttaaaatagactaacctctaccagcacattaaaagtgattgtttctgggtgataaaattattgatgatttttattttctttatttttctataaagatcatatattacttttataataaaacattataaaaacaacattctgtttaccttttcaaggctgtattggttggagtgtagactgaactgcctggggtctgtttctcttcagtgatgagactcttaggaaggcaggaatggataggatagggggaggagaggagagatggggatttagaatgtagagtgagtgccccttttcttaaaactgaatacagtcacgcaccacataatgatgtttagttcaacaacagactgcatatatgatggtgatcccataaaattataataccatatttctattgtaccttttctattcctatgtttagatatatgagtacttaccattgtgttacaattgcctaaagtattcagtacagtagcatgctgtacaggtttgtagcctaggggcaataggctatacgctacagcctaggtgtgtagtaggccacaccatttaggtttgtataagtacctgctatgatgttcacacaacaaaattgcctgcatttctcaaaatgtatccccatatttcaacaatgcatgactgtactcttctgccaatgaccttgtattcttgtttccatgtcttcttctctttcctcctatggcaaataaaacactgttttgcaacac

SEQ ID NO: 2766 - protein, 81 aa, Homo sapiens; identical to SEQ ID NO: 2764

SEQ ID NO: 2767 - DNA, 913 bp, Homo sapiens
gagtggctggtgctccagacccctcacctggagttccaggagggagaaaccatcgtgctgaggtgccacagctggaaggacaagcctctggtcaaggtcacattcttccagaatggaaaatccaagaaattttcccgttcggatcccaacttctccatcccacaagcaaaccacagtcacagtggtgattaccactgcacaggaaacataggctacacgctgtactcatccaagcctgtgaccatcactgtccaagctcccagctcttcaccgatggggatcattgtggctgtggtcactgggattgctgtagcggccattgttgctgctgtagtggccttgatctactgcaggaaaaagcggatttcagccaatcccactaatcctgatgaggctgacaaagttggggctgagaacacaatcacctattcacttctcatgcacccggatgctctggaagagcctgatgaccagaaccgtatttagtctccattgtcttgcattgggatttgagaagaaaatcagagagggaagatctggtatttcctggcctaaattccccttggggaggacagggagatgctgcagttccaaaagagaaggtttcttccagagtcatctacctgagtcctgaagctccctgtcctgaaagccacagacaatatggtcccaaataaccgactgcaccttctgtgcttcagctcttcttgacatcaaggctcttccgttccacatccacacagccaatccaattaatcaaaccactgttattaacagataatagcaacttgggaaatgcttatgttacaggttacgtgagaacaatcatgtaaatctatatgatttcagaaatgttaaaatagactaacctctaccagcacattaaaagtgattgtttctgggtgataaaatt

SEQ ID NO: 2768 - protein, 81 aa, Homo sapiens; identical to SEQ ID NO: 2764

SEQ ID NO: 2769 - DNA, 1532 bp, Homo sapiens
ggcccagtggtgataggggcctgtgttcacaccagggccaaaacagatctggaaaaaacaaagtccaagcaactggattatccatcttgttgtgtggttctgtctgcactggcataagcacatttcacaaggcacttttgcagccaggcattggggctgcataaatggttttttaaaaatcctttcccaaaaggcaaagctgggttgctgggattcttgggaaatgtaatagaatgggaattcagaatgcggtttactgcagaatttacagcatggcaataaaggctctctatgttcagggggtgagagaagagactagatgcattgtctcagatgtctcctgacttcctgagaaatgccactttgcagatatggggctgcttttcacactggctaagtcagttcatggcaaaatatgagggaattcagtgtgtttcagacactaaccaaagtccatccttcctttctccttccgtccctcccttcctccctttctcactcactctctctttctttttaatgccatggagtaccatatttttcaaagttccaacaaagatgcactacatttagacaatgtggaaatggccctcagccttctctccctgaagtctgtggccagcaaaaatctggactttacttcactctgatgctgaacacccccctcccccacctcttccccaatatctcagatcccaagcctccctggtttgcttctaggaaagctcagcaattccctgaaaagaatgcagctcaagtgactgctccactttttcaccttggcctttgcggaaggctgtggctgggctaccctatgcatcgatcaatgaggtcatatttacccagtgcttggcctagaggcccaagacagggtcagcagtgcttgctttggctctagtttgggcgttggttttgcagcctcagcatcagcacaggcaggccctcttctccagcagtgctctggctgatatttcttctttttcccacagccaatcccactaatcctgatgaggctgacaaagttggggctgagaacacaatcacctattcacttctcatgcacccggatgctctggaagagcctgatgaccagaaccgtatttagtctccattgtcttgcattgggatttgagaagaaaatcagagagggaagatctggtatttcctggcctaaattccccttggggaggacagggagatgctgcagttccaaaagagaaggtttcttccagagtcatctacctgagtcctgaagctccctgtcctgaaagccacagacaatatggtcccaaataaccgactgcaccttctgtgcttcagctcttcttgacatcaaggctcttccgttccacatccacacagccaatccaattaatcaaaccactgttattaacagataatagcaacttgggaaatgcttatgttacaggttacgtgagaacaatcatgtaaatctatatgatttcagaaatgttaaaatagactaacctctaccagcacattaaaagtgattgtttctgggtgataaaatt

SEQ ID NO: 2770 - protein, 81 aa, Homo sapiens; identical to SEQ ID NO: 2764

SEQ ID NO: 2771 - DNA, 1546 bp, Homo sapiens
ctcaatccctcgcgctcttcctttccaacttggacccggcagaatggctcccgcaaagaagggtggcaagaataaaagggccgttctgccatcaacgaggtggtgacccgagaatacaccatcaacattcacaagcacatccatggagtgggcttcaagaagtgtgcccctcgggcactcaaagagcttcggaaatttggcatgaaggagatgggaactccagatgcgcgcattgatatcaggctcaacaaagctgtctgggccaaaggaataagaatgtcccataccgaatccgtgtgcggctgtcccgaaaacgtaatgaggatgaagattcaccaaataagctctatactttggttacctatgtacctgttgccacttttgaaaatctacagtcaatgtggatgagaactaatcgctgatcgtcaaatacatcaaataaagttataaaattgccttcaaaaaaaaaaagacataggttctcgttggatatgtagaaatcgcagattgaagagtttaattatttggctaacaacagttacagaaatgtatgctacaatgtgtttgacaagtcttaagtaatcttgttgagataacaatttgtataatttaaattatctgttgaaattgtggttttcagcaaaaatagaaaaattaaggaacatttcattccagtgggcacaggagtacagtaaacagagagactagtgtggtagggaaaatatatacttttttttgtattattcaagactaagaatgttacaaaatagaagagattacaatgtacaagattgcaaacagaaggaagatgtgatcaaacaatcaaaaactaattctgtgaaaagaccaataaaaaagacttctgacaagcctaattaagataaacagagatataaagatgtctcttttatttaaccatttaacattatttttgtctaatatctaagaagtaacattgggataaccacaaatcttggtcatgttgttatagaaaattgggtaatagggaattgagtttatttccctaaagaaaggaatgctaatgaaaagcaagctaattttcctggaagatcttagaaaaagtccaggaatttggaggaatcatgtacaacaaaatatatggttaaagaatgattctaaaaatgagaggataattgtaaactctgtataaggagaagttagactcttagggcctctctcctacccagggtgactatttgcaggtgactaatttttccctgtcatagtttaattctcaggagaaattgacccagccagcagctgcaggtgaattcaggtgagttgagtgagtatgaggtgaggcattatggcctccactatatcacctgcaaaccctttctcaggatgccctggcaaacatgctgcagccacacaaggaagaaaccaagaaataggaagacataagattcaggaaacaggatttcatataaaagatagagaagtcctaggacaacagctgtgcaagaggtccagagatcaaatgaccgaaaacagtgtcaaaaaaggagggacatcttgctaatgg

SEQ ID NO: 2772 - protein, 71 aa, Homo sapiens [sequence omitted]

SEQ ID NO: 2773 - DNA, 780 bp, Homo sapiens
gcttggagaagaggaggaggctgaaaagaaggcaaagagtgaagatagagaaacaagatggaagtgggggagaaaaacagggatgagagaatgccatggtggtgctgagaaggaaaggagagacttttctgcttgtaaagggcagaagatggcagaatccagtgacgcaggggcatctggctccagaaataataggtcacttggcacccacttcttcaaaacaactcgtagaggtaccaccttggttgtcttggataaaatctggaataattatctgggttaccaggagagacccttgttcttttcgcttactttctccaaaacatatgaagcctctctctctgtgctgaaccacctggaactggaggtgtgatgagttatagagatgaaaatgcatatggaattatcatgcaaattaccaataaagagaatcactggtcagaatccctatattttggagaagaaaaattttgaaaaccagtcagaattcaatcaactgcagttgggagaaagacagcgagtagcttgagagagatgagaaactatcaaaaagaagttcctgacatggcaacagtgtatcatccaatgaatcaatcgcctcacccaacactgtaacacttcctggcctattgactcagagcatgaggaaaccaaagtgaccagggattaaaagctatctctggagaagatgatgtcagcaagatggcagaatagaaaaatccaggtcctggttccaccacagaaacatgaagtaaacaacaaaggaatggcttaatagcc

SEQ ID NO: 2774 - protein, 96 aa, Homo sapiens
MRECHGGAEKERRDFSACKGQKMAESSDAGASGSRNNRSLGTHFFKTTRRGTTLVVLDKIWNNYLGYQERPLFFSLTFSKTYEASLSVLNHLELEV

SEQ ID NO: 2775 - DNA, 2008 bp, Homo sapiens
catgacattgcatccttcacccatcacttgtgaatttttgttttccacagctctcatttctccaaaaatgtgtttgagccacttggaaaatatgcctttaagccattcaagaactcaaggagctcagagatcatcctggaagctgtggctcttttgctcaatagttatgttgctatttctttgctccttcagttggctaatctttatttttctccaattagagactgctaaggagccctgtatggctaagtttggaccattaccctcaaaatggcaaatggcatcttctgaacctccttgcgtgaataaggtgtctgactggaagctggagatacttcagaatggcttatatttaatttatggccaagtggctcccaatgcaaactacaatgatgtagctccttttgaggtgcggctgtataaaaacaaagacatgatacaaactctaacaaacaaatctaaaatccaaaatgtaggagggacttatgaattgcatgttggggacaccatagacttgatattcaactctgagcatcaggttctaaaaaataatacatactggggtatcattttactagcaaatccccaattcatctcctagagacttgatttgatctcctcattcccttcagcacatgtagaggtgccagtgggtggattggagggagaagatattcaatttctagagtttgtctgtctacaaaaatcaacacaaacagaactcctctgcacgtgaattttcatctatcatgcctatctgaaagagactcaggggaagagccaaagacttttggttggatctgcagagatacttcattaatccatgataaaacaaatatggatgacagaggacatgtgcttttcaaagaatctttatctaattcttgaattcatgagtggaaaaatggagttctattcccatggaagatttacctggtatgcaaaaaggatctggggcagtagcctggctttgttctcatattcttgggctgctgtaattcattcttctcatactcccatcttctgagaccctcccaataaaaagtagactgataggatggccacagatatgcctaccataccctactttagatatggtggtgttagaagataaagaacaatctgagaactattggaatagaggtacaagtggcataaaatggaatgtacgctatctggaaatttctcttggttttatcttcctcaggatgcagggtgctttaaaaagccttatcaaaggagtcattccgaaccctcacgtagagctttgtgagaccttactgttggtgtgtgtgtctaaacattgctaattgtaaagaaagagtaaccattagtaatcattaggtttaaccccagaatggtattatcattactggattatgtcatgtaatgatttagtatttttagctagctttccacagtttgcaaagtgctttcgtaaaacagttagcaattctatgaagttaattgggcaggcatttgggggaaaattttagtgatgagaatgtgatagcatagcatagccaactttcctcaactcataggacaagtgactacaagaggcaatgggtagtcccctgcattgcactgtctcagctttagaattgttatttctgctatcgtgttataagactctaaaacttagcgaattcacttttcaggaagcatattcccctttagcccaaggtgagcagagtgaagctacaacagatctttcctttaccagcacactttttttttttttcctgcctgaatcagggagatccaggatgctgttcaggccttatcccaaccaaattcccctcttcactttgcagggcccatcttagtcaaatgtgctaacttctaaaataataaatagcactaattcaaaatttttggactcttaaattagctacttgcaggttcttgttgaaaggtatataatattacattgtaaacaaatttaaaatatttatggatatttgtgaaaagctgcattatgttaaataatattacatgtaaagct

SEQ ID NO: 2776 - protein, 199 aa, Homo sapiens; identical to SEQ ID NO: 166

SEQ ID NO: 2777 - DNA, 690 bp, Homo sapiens
ccacattttcctgtcttctgagccctccaaactgttccaacctctacctgttacccagttccaaagtaacttccacattttcatgtatctttacagtagcaccccactctctgtggtaccagtttactgtattagtccattctcatgctgctataaagaactgcccgagactaggtaatttatagaggaaagaggtttaactggctcacagttctgcagggctggggaggcattgggaaacttacaatggtggcaggggaagcaaacgtgtccttcttgaaaatgtcataatctgtgacccgtggttggtgttttgtttaatcctcaaaacaatcctatgagataatttgtatgatggcagagcagggaaggcagtgatcagtagacctacaattaagtaaaaccagaggatacagctgataagtggtggtaaaatctcaacttgaacacaagcctccattgattctaaatcttgagtgctttagaccaaccatattattctagtgtctttctatttctctcagattccccagaacacctaacacagtggcaggtactttataaaagaatttttaacaaatatttgtttaaataaattaattttgttataggccctcaaatttaataaatctctagtgtaaatctacattcttgaaaggctcttatattatccattccttgatttttttc

SEQ ID NO: 2778 - protein, 31 aa, Homo sapiens
MYLYSSTPLSVVPVYCISPFSCCYKELPETR

SEQ ID NO: 2779 - DNA, 2498 bp, Homo sapiens
atttatccttatattttctaaattgcctagccgtcacaccccaagattgccttgcttatgtcattgaaaacggtacctgactaccatttgctggaaatttgacatgtgtgtggcattatcaaaatgaagaggagcaaggagtgaaggagtggggttatgaatctgccaaaggtggtatgaaccaacccctggaagccaaagcggcctctccaaggttaaattgattgcagtttgcatattgcctaaatttaaactttctcatttggtgggggttcaaaagaagaatcagcttgtgaaaaatcaggacttgaagagagccgtctaagaaataccacgtgctttttttctttaccattttgctttcccagcctccaaacatagttaatagaaatttcccttcaaagaactgtctggggatgtgatgctttgaaaaatctaatcagtgacttaagagagattttcttgtatacagggagagtgagataacttattgtgaagggttagctttactgtacaggatagcagggaactggacatctcagggtaaaagtcagtacggattttaatagcctggggaggaaaacacattctttgccacagacaggcaaagcaacacatgctcatcctcctgcctatgctgagatacgcactcagctccatgtcttgtacacacagaaacattgctggtttcaagaaatgaggtgatcctattatcaaattcaatctgatgtcaaatagcactaagaagttattgtgccttatgaaaaataatgatctctgtctagaaataccatagaccatatatagtctcacattgataattgaaactagaagggtctataatcagcctatgccagggcttcaatggaatagtatccccttatgtttagttgaaatgtccccttaacttgatataatgtgttatgcttatggcgctgtggacaatctgatttttcatgtcaactttccagatgatttgtaacttctctgtgccaaaccttttataaacataaatttttgagatatgtattttaaaattgtagcacatgtttccctgacattttcaatagaggatacaacatcacagaatctttctggatgattctgtgttatcaaggaattgtactgtgctacaattatctctagaatctccagaaaggtggagggctgttcgcccttacactaaatggtctcagttggatttttttttcctgttttctatttcctcttaagtacaccttcaactatattcccatccctctattttaatctgttatgaaggaaggtaaataaaaatgctaaatagaagaaattgtaggtaaggtaagaggaatcaagttctgagtggctgccaaggcactcacagaatcataatcatggctaaatatttatggagggcctactgtggaccaggcactgggctaaatacttacatttacaagaatcattctgagacagatattcaatgatatctggcttcactactcagaagattgtgtgtgtgtttgtgtgtgtgtgtgtgtgtgtatttcactttttgttattgaccatgttctgcaaaattgcagttactcagtgagtgatatccgaaaaagtaaacgtttatgactataggtaatatttaagaaaatgcatggttcatttttaagtttggaatttttatctatatttctcacagatgtgcagtgcacatgcaggcctaagtatatgttgtgtgtgttgtttgtctttgatgtcatggtcccctctcttaggtgctcactcgctttgggtgcacctggcctgctcttcccatgttggcctctgcaaccacacagggatatttctgctatgcaccagcctcactccaccttccttccatcaaaaatatgtgtgtgtgtctcagtccctgtaagtcatgtccttcacagggagaattaacccttcgatatacatggcagagttttgtgggaaaagaattgaatgaaaagtcaggagatcagaattttaaatttgacttagccactaactagccatgtaaccttgggaaagtcatttcccatttctgggtcttgcttttctttctgttaaatgagaggaatgttaaatatctaacagtttagaatcttatgcttacagtgttatctgtgaatgcacatattaaatgtctatgttcttgttgctatgagtcaaggagtgtaaccttctcctttactatgttgaatgtatttttttctggacaagcttacatcttcctcagccatctttgtgagtccttcaagagcagttatcaattgttagttagatattttctatttagagaatgcttaagggattccaatcccgatccaaatcataatttgttcttaagtatactgggcaggtcccctattttaagtcataattttgtatttagtgctttcctggctctcagagagtattaatattgatattaataatatagttaatagtaatattgctatttacatggaaacaaataaaagatctcagaattcact

SEQ ID NO: 2780 - protein, 104 aa, Homo sapiens [sequence omitted]

SEQ ID NO: 2781 - DNA, 3431 bp, Homo sapiens
aaaacacaggacacatggctccattcaaggctaactgattgcacaacggctctgagcaggagagagcaaaaggtgaaccacagttgtacagcttgctggtggttggggtcacattggactatcaatatccaggagatgttgagaaaaagaggggatcctttccaacaagtcatccagcaactctgggacagaaggaaagctgtgggaagaaaagcagggtgctggtttctaggacactaaacctcatggtatcacatcggtatcctcgaattcaaagtatcaaagtacaatttaccgaatataagaaggagaaaggtttcatcctcacttcccaaaaggaggatgaaatcatgaaggtgcagaacaactcagtcatcatcaactgtgatgggttttatctcatctccctgaagggctacttctcccaggaagtcaacattagccttcattaccagaaggatgaggagcccctcttccaactgaagaaggtcaggtctgtcaactccttgatggtggcctctctgacttacaaagacaaagtctacttgaatgtgaccactgacaatacctccctggatgacttccatgtgaatggcggagaactgattcttatccatcaaaatcctggtgaattctgtgtcctttgaggggctgatggcaatatctaaaaccaggcaccagcatgaacaccaagctgggggtggacagggcatggattcttcattgcaagtgaaggagcctcccagctcagccacgtgggatgtgacaagaagcagatcctggccctcccgcccccacccctcagggatatttaaaacttattttatataccagttaatcttatttatccttatattttctaaattgcctagccgtcacaccccaagattgccttgagcctactaggcacctttgtgagaaagaaaaaatagatgcctcttcttcaagatgcattgtttctattggtcaggcaattgtcataataaacttatgtcattgaaaacggtacctgactaccatttgctggaaatttgacatgtgtgtggcattatcaaaatgaagaggagcaaggagtgaaggagtggggttatgaatctgccaaaggtggtatgaaccaacccctggaagccaaagcggcctctccaaggttaaattgattgcagtttgcatattgcctaaatttaaactttctcatttggtgggggttcaaaagaagaatcagcttgtgaaaaatcaggacttgaagagagccgtctaagaaataccacgtgctttttttctttaccattttgctttcccagcctccaaacatagttaatagaaatttcccttcaaagaactgtctggggatgtgatgctttgaaaaatctaatcagtgacttaagagagattttcttgtatacagggagagtgagataacttattgtgaagggttagctttactgtacaggatagcagggaactggacatctcagggtaaaagtcagtacggattttaatagcctggggaggaaaacacattctttgccacagacaggcaaagcaacacatgctcatcctcctgcctatgctgagatacgcactcagctccatgtcttgtacacacagaaacattgctggtttcaagaaatgaggtgatcctattatcaaattcaatctgatgtcaaatagcactaagaagttattgtgccttatgaaaaataatgatctctgtctagaaataccatagaccatatatagtctcacattgataattgaaactagaagggtctataatcagcctatgccagggcttcaatggaatagtatccccttatgtttagttgaaatgtccccttaacttgatataatgtgttatgcttatggcgctgtggacaatctgatttttcatgtcaactttccagatgatttgtaacttctctgtgccaaaccttttataaacataaatttttgagatatgtattttaaaattgtagcacatgtttccctgacattttcaatagaggatacaacatcacagaatctttctggatgattctgtgttatcaaggaattgtactgtgctacaattatctctagaatctccagaaaggtggagggctgttcgcccttacactaaatggtctcagttggatttttttttcctgttttctatttcctcttaagtacaccttcaactatattcccatccctctattttaatctgttatgaaggaaggtaaataaaaatgctaaatagaagaaattgtaggtaaggtaagaggaatcaagttctgagtggctgccaaggcactcacagaatcataatcatggctaaatatttatggagggcctactgtggaccaggcactgggctaaatacttacatttacaagaatcattctgagacagatattcaatgatatctggcttcactactcagaagattgtgtgtgtgtttgtgtgtgtgtgtgtgtgtgtatttcactttttgttattgaccatgttctgcaaaattgcagttactcagtgagtgatatccgaaaaagtaaacgtttatgactataggtaatatttaagaaaatgcatggttcatttttaagtttggaatttttatctatatttctcacagatgtgcagtgcacatgcaggcctaagtatatgttgtgtgtgttgtttgtctttgatgtcatggtcccctctcttaggtgctcactcgctttgggtgcacctggcctgctcttcccatgttggcctctgcaaccacacagggatatttctgctatgcaccagcctcactccaccttccttccatcaaaaatatgtgtgtgtgtctcagtccctgtaagtcatgtccttcacagggagaattaacccttcgatatacatggcagagttttgtgggaaaagaattgaatgaaaagtcaggagatcagaattttaaatttgacttagccactaactagccatgtaaccttgggaaagtcatttcccatttctgggtcttgcttttctttctgttaaatgagaggaatgttaaatatctaacagtttagaatcttatgcttacagtgttatctgtgaatgcacatattaaatgtctatgttcttgttgctatgagtcaaggagtgtaaccttctcctttactatgttgaatgtatttttttctggacaagcttacatcttcctcagccatctttgtgagtccttcaagagcagttatcaattgttagttagatattttctatttagagaatgcttaagggattccaatcccgatccaaatcataatttgttcttaagtatactgggcaggtcccctattttaagtcataattttgtatttagtgctttcctggctctcagagagtattaatattgatattaataatatagttaatagtaatattgctatttacatggaaacaaataaaagatctcagaattcact

SEQ ID NO: 2782 - protein, 133 aa, Homo sapiens
MVSHRYPRIQSIKVQFTEYKKEKGFILTSQKEDEIMKVQNNSVIINCDGFYLISLKGYFSQEVNISLHYQKDEEPLFQLKKVRSVNSLMVASLTYKDKVYLNVTTDNTSLDDFHVNGGELILIHQNPGEFCVL

SEQ ID NO: 2783 - DNA, 3492 bp, Homo sapiens
tcaatcgccttttatctctggccctgggacctttgcctattttctgattgataggctttgttttgtctttacctccttctttctggggaaaacttcagttttatcgcacgttccccttttccatatcttcatcttccctctacccagattgtgaagatggaaagggtccaacccctggaagagaatgtgggaaatgcagccaggccaagattcgagaggaacaagctattgctggtggcctctgtaattcagggactggggctgctcctgtgcttcacctacatctgcctgcacttctctgctcttcaggtatcacatcggtatcctcgaattcaaagtatcaaagtacaatttaccgaatataagaaggagaaaggtttcatcctcacttcccaaaaggaggatgaaatcatgaaggtgcagaacaactcagtcatcatcaactgtgatgggttttatctcatctccctgaagggctacttctcccaggaagtcaacattagccttcattaccagaaggatgaggagcccctcttccaactgaagaaggtcaggtctgtcaactccttgatggtggcctctctgacttacaaagacaaagtctacttgaatgtgaccactgacaatacctccctggatgacttccatgtgaatggcggagaactgattcttatccatcaaaatcctggtgaattctgtgtcctttgaggggctgatggcaatatctaaaaccaggcaccagcatgaacaccaagctgggggtggacagggcatggattcttcattgcaagtgaaggagcctcccagctcagccacgtgggatgtgacaagaagcagatcctggccctcccgcccccacccctcagggatatttaaaacttattttatataccagttaatcttatttatccttatattttctaaattgcctagccgtcacaccccaagattgccttgagcctactaggcacctttgtgagaaagaaaaaatagatgcctcttcttcaagatgcattgtttctattggtcaggcaattgtcataataaacttatgtcattgaaaacggtacctgactaccatttgctggaaatttgacatgtgtgtggcattatcaaaatgaagaggagcaaggagtgaaggagtggggttatgaatctgccaaaggtggtatgaaccaacccctggaagccaaagcggcctctccaaggttaaattgattgcagtttgcatattgcctaaatttaaactttctcatttggtgggggttcaaaagaagaatcagcttgtgaaaaatcaggacttgaagagagccgtctaagaaataccacgtgctttttttctttaccattttgctttcccagcctccaaacatagttaatagaaatttcccttcaaagaactgtctggggatgtgatgctttgaaaaatctaatcagtgacttaagagagattttcttgtatacagggagagtgagataacttattgtgaagggttagctttactgtacaggatagcagggaactggacatctcagggtaaaagtcagtacggattttaatagcctggggaggaaaacacattctttgccacagacaggcaaagcaacacatgctcatcctcctgcctatgctgagatacgcactcagctccatgtcttgtacacacagaaacattgctggtttcaagaaatgaggtgatcctattatcaaattcaatctgatgtcaaatagcactaagaagttattgtgccttatgaaaaataatgatctctgtctagaaataccatagaccatatatagtctcacattgataattgaaactagaagggtctataatcagcctatgccagggcttcaatggaatagtatccccttatgtttagttgaaatgtccccttaacttgatataatgtgttatgcttatggcgctgtggacaatctgatttttcatgtcaactttccagatgatttgtaacttctctgtgccaaaccttttataaacataaatttttgagatatgtattttaaaattgtagcacatgtttccctgacattttcaatagaggatacaacatcacagaatctttctggatgattctgtgttatcaaggaattgtactgtgctacaattatctctagaatctccagaaaggtggagggctgttcgcccttacactaaatggtctcagttggatttttttttcctgttttctatttcctcttaagtacaccttcaactatattcccatccctctattttaatctgttatgaaggaaggtaaataaaaatgctaaatagaagaaattgtaggtaaggtaagaggaatcaagttctgagtggctgccaaggcactcacagaatcataatcatggctaaatatttatggagggcctactgtggaccaggcactgggctaaatacttacatttacaagaatcattctgagacagatattcaatgatatctggcttcactactcagaagattgtgtgtgtgtttgtgtgtgtgtgtgtgtgtgtatttcactttttgttattgaccatgttctgcaaaattgcagttactcagtgagtgatatccgaaaaagtaaacgtttatgactataggtaatatttaagaaaatgcatggttcatttttaagtttggaatttttatctatatttctcacagatgtgcagtgcacatgcaggcctaagtatatgttgtgtgtgttgtttgtctttgatgtcatggtcccctctcttaggtgctcactcgctttgggtgcacctggcctgctcttcccatgttggcctctgcaaccacacagggatatttctgctatgcaccagcctcactccaccttccttccatcaaaaatatgtgtgtgtgtctcagtccctgtaagtcatgtccttcacagggagaattaacccttcgatatacatggcagagttttgtgggaaaagaattgaatgaaaagtcaggagatcagaattttaaatttgacttagccactaactagccatgtaaccttgggaaagtcatttcccatttctgggtcttgcttttctttctgttaaatgagaggaatgttaaatatctaacagtttagaatcttatgcttacagtgttatctgtgaatgcacatattaaatgtctatgttcttgttgctatgagtcaaggagtgtaaccttctcctttactatgttgaatgtatttttttctggacaagcttacatcttcctcagccatctttgtgagtccttcaagagcagttatcaattgttagttagatattttctatttagagaatgcttaagggattccaatcccgatccaaatcataatttgttcttaagtatactgggcaggtcccctattttaagtcataattttgtatttagtgctttcctggctctcagagagtattaatattgatattaataatatagttaatagtaatattgctatttacatggaaacaaataaaagatctcagaattcact

SEQ ID NO: 2784 - protein, 183 aa, Homo sapiens; identical to SEQ ID NO: 169

SEQ ID NO: 2785 - DNA, 640 bp, Homo sapiens
atcgaccggatgcccaagacatcaaccggaattaggctcttttgagaagaaaacaaagagagtaaccaaatatagaacagctgagtgcattcaccagtctgggagccctgagagtgctttttctaacaaccacagtgttacatatttccttacaccatgggatgataaaacacaggacacatggctccattcaaggctaactgattgcacaacggctctgagcaggagagagcaaaaggtgaaccacagttgtacagcttgctggtggttggggtcacattggactatcaatatccaggagatgttgagaaaaagaggggatcctttccaacaagtcatccagcaactctgggacagaaggaaagctgtgggaagaaaagcagggtgctggtttctaggacactaaacctcatggtatcacatcggtatcctcgaattcaaagtatcaaagtacaatttaccggtaagtattgtcaaaagtttaattgattcatatttttgaaagaatcttctcttcagtctcttaatttcctctagaacacaagatctcttcttttcctaagggaaggaattaaattccaattaaatcccagaattgttgtagcctgcatattattttcattagggatacagatgtata

SEQ ID NO: 2786 - protein, 34 aa, Homo sapiens
MLRKRGDPFQQVIQQLWDRRKAVGRKAGCWFLGH

SEQ ID NO: 2787 - DNA, 617 bp, Homo sapiens
actgcagctgcgagcctcggggaagcggaacccacaggcgcgcgcgccgctgcttctggccgggcgcgggtcgtggtgcaccacgggagcgccgcaccggccggcatggaggagcgcggcgattccgagccgacccccggctgcagcggcctgggtccgggcggtgttcgcggctttggcgacggcggtggagctccttcgtgggcccctgaggacgcctggatgggcactcaccctaagtatctagaaatgatggaattagatataggagatgccacccaagtttatgtagcgttcttggtttacctggacctcatggaaagcaaaagctggcatgaagtaaactgtgtaggattaccagaactccagctcatctgccttgttggtactgagatagaaggggaggggttacagactgtggtgcctacccccatcactgcttccctcagccataacagttgtacacagaagaaagcccatatgaggacacagcaagaaggtggctgtcttcaagccaagaagagaggcctcatcagagatggaatgttcctgcacttcggtctggatttctagtgtccagaactgtgagaaaataaatttctgttgtttaagccacc

SEQ ID NO: 2788 - protein, 155 aa, Homo sapiens
MEERGDSEPTPGCSGLGPGGVRGFGDGGGAPSWAPEDAWMGTHPKYLEMMELDIGDATQVYVAFLVYLDLMESKSWHEVNCVGLPELQLICLVGTEIEGEGLQTVVPTPITASLSHNSCTQKKAHMRTQQEGGCLQAKKRGLIRDGMFLHFGLDF

SEQ ID NO: 2789 - DNA, 1956 bp, Homo sapiens
gtccttaaaagaagagggaaatatggacacagacatagacacagaggaagatgatgtgaagacacacagggaaaacatcatgtaaagacaggcttggagtggtgcacctacaagccaacacagaatcacagcatctcagagttggaaggaattcttcatatgaccacattgattttttttttcctgttggtcggcatcagatttgtgaaggcccctggaagattggatggtgcctgcctatacggagggcggatcttcccctcctcgtccactcagactcacatgcaagtctcctctagaaacacccttgcagacacaccccaaaatgacacttttagagcccctagaagatgccttagagatgaaaaaaaaaacacacgcatttcctaatgaagaggcagccagatgcagcctctgagccctgactgcacagtgtgacagtcactcaacccaacacagctctcttgcctttgctgcaacctcaacaccctgcgtcctgccaaatctcttcccatttcatcagtccatctatgctggtgtccagccattccagcccaccatggcatttaaaaatctttccagctctctgtggaagatctgagacttgagaaagagactgttgctcagggctggacaggaaggaagtatgcattcctggctcccagaacagaacagcaatgtgggtgacccttcgtcccctccccaaggcgtccccttgggccgacacaaaaatagattctatcctccttggttcgtctccacctccctcgggaaagaagacacaggcttcgagtgagtcaacagtattatcggggcttgactgtctttcaggaatgaccagatgttgggaagaggataatgtgccatttcctttaacaaatagtccgggcatctgtgcatttccttttgagccagctcttcaggagactgtgctgctgtgacagggaaggacgaatcaccctggtttctactctcacggatactagggggctccttgaaccctttggattccagccctccattaagaaaatatttctgtcctttgtatgcatgagtgacaccacgagaagacagcatagggagtggttacaagcaaagaatttagagacaaaataaatgctctaagggaaaaagacaagtagccaaggaacgctgggagagggcttggaggaagcaaattgttcatccattcccccaaatcagtggttctcagtagaaaaccaacatgagtaacatttgcctgggaacttgtctaccaccccagccctactgaaactccaggggtgaagcccagcaatctcctttgacaagccttccaggagattctgatgtgagctcaagattgagaactactgatccagatagatcttagctggtcctagggcttcccagaaagcatttttaaaaaagcagagattctcctccacaggaggcctacatgctgccacctctgtggccaccatgtctctagtgatccctgaagagttccagcatattctgcgagtactcaacaccagcatcggtgggcggtggaaaaaaagcctttgccatcactgccatttaggctgtgggtcgaagatatgctcatgcggtgttgaggaaagcagactttgaccacaccaagagggcaggagaactcactgaggatgaggtggaacgtgtgatcaccattatacaggatccatgccagtacaagatcccggactggttcttgaacagacagaaggatgtaaagtctggaaaatacagccagatcccagccaatggacaacaagttctgtgaccacctggagtgattgaagaagtttcaggcccatagagggctgcgccacctctggggccttcgtgtcttgaggccagcacagcaagaccactggctgccatggctgtactacgggtgtgtccaagaaggaataagtctgtaggccttgtctgttaataaatagtttatatacc

SEQ ID NO: 2790 - protein, 76 aa, Homo sapiens
MTTLIFFFLLVGIRFVKAPGRLDGACLYGGRIFPSSSTQTHMQVSSRNTLADTPQNDTFRAPRRCLRDEKKNTRIS

SEQ ID NO: 2791 - DNA, 432 bp, Homo sapiens
ggcccctggaagattggatggtgcctgcctatacggagggcggatcttcccctcctcgtccactcagactcacatgcaagtctcctctagaaacacccttgcagacacaccccaaaatgacacttttagagaagctgtgtgtgctcccgaaactgccatgcaggacctcagtagatgtgtgccatagaaccacaagcaagctcagataaatgactaggaagcaggaagatgcatctgatggcttctctgcatgaagaccaaataaaaggaaccttgtacgtggactctttttaaaaattaaaatttattttgtttcttgcatctaatatagaaataattcatattcattgtggaagatctgtgggaaaaaaaatagaaagaaaaaaagactcacctgtcatctaccaaacaccaatagacacaattgaaatg

SEQ ID NO: 2792 - protein, 63 aa, Homo sapiens
MVPAYTEGGSSPPRPLRLTCKSPLETPLQTHPKMTLLEKLCVLPKLPCRTSVDVCHRTTSKLR

SEQ ID NO: 2793 - DNA, 519 bp, Homo sapiens
cccctggaagattggatggtgcctgcctatacggagggcggatcttcccctcctcgtccactcagactcacatgcaagtctcctctagaaacacccttgcagacacaccccaaaatgacacttttagaggaacaactgagtttggtggacttgatgaggccatttcctgcactcttaccgatcctcccactatgtgctaattgctttactttctcttaaaactgaagaagctgtgtgtgctcccgaaactgccatgcaggacctcagtagatgtgtgccatagaaccacaagcaagctcagataaatgactaggaagcaggaagatgcatctgatggcttctctgcatgaagaccaaataaaaggaaccttgtacgtggactctttttaaaaattaaaatttattttgtttcttgcatctaatatagaaataattcatattcattgtggaagatctgtgggaaaaaaaatagaaagaaaaaaagactcacctgtcatctaccaaacaccaatagacaca

SEQ ID NO: 2794 - protein, 67 aa, Homo sapiens
MVPAYTEGGSSPPRPLRLTCKSPLETPLQTHPKMTLLEEQLSLVDLMRPFPALLPILPLCANCFTFS

SEQ ID NO: 2795 - DNA, 1418 bp, Homo sapiens
ggagctggggccgggcttcggcgcagaggcaggaagaggaagcggcacccgcttcggggacccagccggcggccaggccaccgcgcccacccggccgatggcaccgtgttcctgcgcctcgggagggaggaggctctgcgcgggactgcaggttctgccccgcatcggagtgatcgctgagcctgacgctctcgaaggctgggcctggggcccgcaatctactccggaggctttcccactgggcagggtcgctagcagggtgccacccgggtgcagtgaggacctggagcccctgccccaggctgtgaggagacttgaccagagctgcctgaatgctccacggagcaggaggaagcattcccatgtgaaagatgagctccctataaaagcaacgctcttatcatcgagaacagaaagttgaagccaagagagagctccacaagctgaccttgttaaactaacccttatcttcttagtcgcttctttacccaattaactaccctagccgaagcccctttgccttattacattttgcaacagtgttcgttgtccaattcagtatacaagtgagtgactctggatgctttttggggtcttcgtttccttatgagggcttctgtgccatgtaaaacttgtattaaataaatttgtatgcttttctcctgttaatctgtctatatcgattgaactttagggtccagtcagaacccaaagaggatggaggtggagttttggctcctctacagctatctgaataatcaaaattcaagatattccatgttctttctgagtttctttgaaattaaaaatgcagacaaccactcaactaatacgtcagcgagatacgttttctgtccttattgccttactgatgaaattgcctttattcataaaaaataaatgtgggagtcttgtttatttatttctaatgacattaacttgacattaaccttggtgctcttgggaaccataaatgggccctgtactacttgttacagagtataaattcccagaactacaagtacatcatattcctcaagttactgaagaatttcatgatccatgtgtcaggcctctgagcccaagctaagtcatcatatcccctgtgacctgcacgtatacatccagatggccggttcctgccttaactgatgacattccaccacaaaagaagtgaaaatggcctgttcctgccttaactgatgacattgtcttgtgaaattccttctcctggctcatcctggctcaaaagctcccccactgaataccttgtgacccccaactcctgcccgccagagagccacccccctttttcctttacctacccaagtcctataaaacagcgccacccctatctccctttgctgactctcttttcggactcagcccacttgcacccaggtgattaaaagctttat

SEQ ID NO: 2796 - protein, 107 aa, Homo sapiens
MAPCSCASGGRRLCAGLQVLPRIGVIAEPDALEGWAWGPQSTPEAFPLGRVASRVPPGCSEDLEPLPQAVRRLDQSCLNAPRSRRKHSHVKDELPIKATLLSSRTES

SEQ ID NO: 2797 - DNA, 944 bp, Homo sapiens
gttcctgcgcctcgggagggaggaggctctgcgcgggactgcaggttctgccccgcatcggagtgatcgctgagcctgacgctctcgaaggctgggcctggggcccgcaatctactccggaggctttcccactgggcagggtcgctagcagggaggaagcattcccatgtgaaagatgagctccctataaaagcaacgctcttatcatcgagaacagaaagttgaagccaagagagagctccacaagctgaccttgttaaactaacccttatcttcttagtcgcttctttacccaattaactaccctagccgaagcccctttgccttattacattttgcaacagtgttcgttgtccaattcagtatacaagtgagtgactctggatgctttttggggtcttcgtttccttatgagggcttctgtgccatgtaaaacttgtattaaataaatttgtatgcttttctcctgttaatctgtctatatcgattgaactttagggtccagtcagaacccaaagaggatggaggtggagttttggctcctctacagctatctgaataatcaaaattcaagatattccatgttctttctgagtttctttgaaattaaaaatgcagacaaccactcaactaatacgtcagcgagatacgttttctgtccttattgccttactgatgaaattgcctttattcataaaaaataaatgtgggagtcttgtttatttatttctaatgacattaacttgacattaaccttggtgctcttgggaaccataaatgggccctgtactacttgttacagagtataaattcccagaactacaagtacatcatattcctcaagttactgaagaatttcatgatccatgtgtcaggcctctgagcccaagctaagtcatcatatcccctgtgacctgcacgtatacatccagatggccggttcc

SEQ ID NO: 2798 - protein, 60 aa, Homo sapiens
MEVEFWLLYSYLNNQNSRYSMFFLSFFEIKNADNHSTNTSARYVFCPYCLTDEIAFIHKK

SEQ ID NO: 2799 - DNA, 1866 bp, Homo sapiens
gacaaccggcgtggaggcgtggccacagccgcccagaaattctacccaagctccctcagcaccatgtaccgagcacttcggctcctcgcgcgctcgcgtcccctcgtgcgggctccagccgcagccttagcttcggctcccggcttgggtggcgcggccgtgccctcgttttggcctccgaacgcggctcgaatggcaagccaaaattccttccggatagaatatgatacctttggtgaactaaaggtgccaaatgataagtattatggcgcccagaccgtgagatctacgatgaactttaagattggaggtgtgacagaacgcatgccaaccccagttattaaagcttttggcatcttgaagcgagcggccgctgaagtaaaccaggattatggtcttgatccaaagattgctaatgcaataatgaaggcagcagatgaggtagctgaaggtaaattaaatgatcattttcctctcgtggtatggcagactggatcaggaactcagacaaatatgaatgtaaatgaagtcattagcaatagagcaattgaaatgttaggaggtgaacttggcagcaagatacctgtgcatcccaacgatcatgttaataaaagccagagctcaaatgatacttttcccacagcaatgcacattgctgctgcaatagaagttcatgaagtactgttaccaggactacagaagttacatgatgctcttgatgcaaaatccaaagagtttgcacagatcatcaagattggacgtactcatactcaggatgctgttccacttactcttgggcaggaatttagtggttatgttcaacaagtaaaatatgcaatgacaagaataaaagctgccatgccaagaatctatgagctcgcagctggaggcactgctgttggtacaggtttaaatactagaattggctttgcagaaaaggttgctgcaaaagtggctgcacttacaggcttgccttttgtcactgctccgaataaatttgaagctctggctgctcatgacgctctggttgagctcagtggagccatgaacactactgcctgcagtctgatgaagatagcaaatgatattcgatttttgggttctggtcctcggtcaggtctgggagaattgatcttgcctgaaaatgaaccaggaagcagtatcatgccaggcaaggtgaaccctactcagtgtgaagcaatgaccatggttgcagcccaagtcatggggaaccatgttgctgtcactgtcggaggcagcaatggacattttgagttgaatgttttcaagccaatgatgattaaaaatgtgttacactcagccaggctgctgggggatgcttcagtttcctttacagaaaactgcgtggtgggaatccaggccaatacagaaaggatcaacaagctgatgaatgagtctctaatgttggtgacagctctcaatcctcatatagggtatgacaaggcagcaaagattgctaagacagcacacaaaaatggatcaaccttaaaggaaactgctatcgaacttggctatctcacagcagagcagtttgacgaatgggtaaaacctaaggacatgctgggtccaaagtgatttacataaatttataatgaaaataaacatgtataaaatttaaaaaaacagactcccatttcttaaaaacggataagtttgaaaggaaactgctattgaacttaagcatctctagcagagcaatttgatcagtatataaaaccctaggatgtgctaggtctaagatggattaaacaagtataaaataaaatacatttataaaataaaaaggaaaacagacttaaattttctcctatgttaattgacttgtattatagttgaatctatgat

SEQ ID NO: 2800 - protein, 510 aa, Homo sapiens; identical to SEQ ID NO: 171

SEQ ID NO: 2801 - DNA, 1818 bp, Homo sapiens
gacaaccggcgtggaggcgtggccacagccgcccagaaattctacccaagctccctcagcaccatgtaccgagcacttcggctcctcgcgcgctcgcgtcccctcgtgcgggctccagccgcagccttagcttcggctcccggcttgggtggcgcggccgtgccctcgttttggcctccgaacgcggctcgaatggcaagccaaaattccttccggatagaatatgatacctttggtgaactaaaggtgccaaatgataagtattatggcgcccagaccgtgagatctacgatgaactttaagattggaggtgtgacagaacgcatgccaaccccagttattaaagcttttggcatcttgaagcgagcggccgctgaagtaaaccaggattatggtcttgatccaaagattgctaatgcaataatgaaggcagcagatgaggtagctgaaggtaaattaaatgatcattttcctctcgtggtatggcagactggatcaggaactcagacaaatatgaatgtaaatgaagtcattagcaatagagcaattgaaatgttaggaggtgaacttggcagcaagatacctgtgcatcccaacgatcatgttaataaaagccagagctcaaatgatacttttcccacagcaatgcacattgctgctgcaatagaagttcatgaagtactgttaccaggactacagaagttacatgatgctcttgatgcaaaatccaaagagtttgcacagatcatcaagattggacgtactcatactcaggatgctgttccacttactcttgggcaggaatttagtggttatgttcaacaagtaaaatatgcaatgacaagaataaaagctgccatgccaagaatctatgagctcgcagctggaggcactgctgttggtacaggtttaaatactagaattggctttgcagaaaaggttgctgcaaaagtggctgcacttacaggcttgccttttgtcactgctccgaataaatttgaagctctggctgctcatgacgctctggttgagctcagtggagccatgaacactactgcctgcagtctgatgaagatagcaaatgatattcgatttttgggttctggtcctcggtcaggtctgggagaattgatcttgcctgaaaatgaaccaggaagcagtatcatgccaggcaaggtgaaccctactcagtgtgaagcaatgaccatggttgcagcccaagtcatggggaaccatgttgctgtcactgtcggaggcagcaatggacattttgagttgaatgttttcaagccaatgatgattaaaaatgtgttacactcagccaggctgctgggggatgcttcagtttcctttacagaaaactgcgtggtgggaatccaggccaatacagaaaggatcaacaagctgatgaatgagtctctaatgttggtgacagctctcaatcctcatatagggtatgacaaggcagcaaagattgctaagacagcacacaaaaatggatcaaccttaaaggaaactgctatcgaacttggctatctcacagcagagcagtttgacgaatgggtaaaacctaaggacatgctgggtccaaagtgatttacataaatttataatgaaaataaacatgtataaaatttaaaaaaacagactcccatttcttaaaaacggataagtttgaaaggaaactgctattgaacttaagcatctctagcagagcaatttgatcagtatataaaaccctaggatgtgctaggtctaagatggattaaacaagtataaaataaaatacatttataaaataaaaaggaaaacagactt

SEQ ID NO: 2802 - protein, 510 aa, Homo sapiens; identical to SEQ ID NO: 171

SEQ ID NO: 2803 - DNA, 1637 bp, Homo sapiens
gacaaccggcgtggaggcgtggccacagccgcccagaaattctacccaagctccctcagcaccatgtaccgagcacttcggctcctcgcgcgctcgcgtcccctcgtgcgggctccagccgcagccttagcttcggctcccggcttgggtggcgcggccgtgccctcgttttggcctccgaacgcggctcgaatggcaagccaaaattccttccggatagaatatgatacctttggtgaactaaaggtgccaaatgataagtattatggcgcccagaccgtgagatctacgatgaactttaagattggaggtgtgacagaacgcatgccaaccccagttattaaagcttttggcatcttgaagcgagcggccgctgaagtaaaccaggattatggtcttgatccaaagattgctaatgcaataatgaaggcagcagatgaggtagctgaaggtaaattaaatgatcattttcctctcgtggtatggcagactggatcaggaactcagacaaatatgaatgtaaatgaagtcattagcaatagagcaattgaaatgttaggaggtgaacttggcagcaagatacctgtgcatcccaacgatcatgttaataaaagccagagctcaaatgatacttttcccacagcaatgcacattgctgctgcaatagaagttcatgaagtactgttaccaggactacagaagttacatgatgctcttgatgcaaaatccaaagagtttgcacagatcatcaagattggacgtactcatactcaggatgctgttccacttactcttgggcaggaatttagtggttatgttcaacaagtaaaatatgcaatgacaagaataaaagctgccatgccaagaatctatgagctcgcagctggaggcactgctgttggtacaggtttaaatactagaattggctttgcagaaaaggttgctgcaaaagtggctgcacttacaggcttgccttttgtcactgctccgaataaatttgaagctctggctgctcatgacgctctggttgagctcagtggagccatgaacactactgcctgcagtctgatgaagatagcaaatgatattcgatttttgggttctggtcctcggtcaggtctgggagaattgatcttgcctgaaaatgaaccaggaagcagtatcatgccaggcaaggtgaaccctactcagtgtgaagcaatgaccatggttgcagcccaagtcatggggaaccatgttgctgtcactgtcggaggcagcaatggacattttgagttgaatgttttcaagccaatgatgattaaaaatgtgttacactcagccaggctgctgggggatgcttcagtttcctttacagaaaactgcgtggtgggaatccaggccaatacagaaaggatcaacaagctgatgaatgagtctctaatgttggtgacagctctcaatcctcatatagggtatgacaaggcagcaaagattgctaagacagcacacaaaaatggatcaaccttaaaggaaactgctatcgaacttggctatctcacagcagagcagtttgacgaatgggtaaaacctaaggacatgctgggtccaaagtgatttacataaatttataatgaaaataaacatgtataaaattt

SEQ ID NO: 2804 - protein, 510 aa, Homo sapiens; identical to SEQ ID NO: 171

SEQ ID NO: 2805 - DNA, 833 bp, Homo sapiens
gacaaccggcgtggaggcgtggccacagccgcccagaaattctacccaagctccctcagcaccatgtaccgagcacttcggctcctcgcgcgctcgcgtcccctcgtgcgggctccagccgcagccttagcttcggctcccggcttgggtggcgcggccgtgccctcgttttggcctccgaacgcggctcgaatggcaagccaaaattccttccggatagaatatgatacctttggtgaactaaaggtgccaaatgataagtattatggcgcccagaccgtgagatctacgatgaactttaagattggaggtgtgacagaacgcatgccaaccccagttattaaagcttttggcatcttgaagcgagcggccgctgaagtaaaccaggattatggtcttgatccaaagattgctaatgcaataatgaaggcagcagatgaggtagctgaaggtaaattaaatgatcattttcctctcgtggtatggcagactggatcaggaactcagacaaatatgaatgtaaatgaagtcattagcaatagagcaattgaaatgttaggaggtgaacttggcagcaagatacctgtgcatcccaacgatcatgttaataaaagccagagctcaaatgatacttttcccacagcaatgcacattgctgctgcaatagaagttcatgaagtactgttaccaggactacagaagttacatgatgctcttgatgcaaaatccaaagagtttgcacagatcatcaagattggacgtactcatactcaggatgctgttccacttactcttgggcaggtataggagtttgactaatttgattcaattta

SEQ ID NO: 2806 - protein, 247 aa, Homo sapiens
MYRALRLLARSRPLVRAPAAALASAPGLGGAAVPSFWPPNAARMASQNSFRIEYDTFGELKVPNDKYYGAQTVRSTMNFKIGGVTERMPTPVIKAFGILKRAAAEVNQDYGLDPKIANAIMKAADEVAEGKLNDHFPLVVWQTGSGTQTNMNVNEVISNRAIEMLGGELGSKIPVHPNDHVNKSQSSNDTFPTAMHIAAAIEVHEVLLPGLQKLHDALDAKSKEFAQIIKIGRTHTQDAVPLTLGQV

SEQ ID NO: 2807 - DNA, 956 bp, Homo sapiens
aagatgtttttggacttcagatgagaagggctccattcatggttaatcatgaatgaaaacgaaactaagaatatatgctgtagaaaaagaagaagaaaagccacaagactgcttaaaaatttctgtgtcttacacagaagatagaaaaaatagagtgtctccaattggatggattttttaaaaaatttggttattgtaatggatttattttttcttagagctgagctgattgtactttggccaactaatgggttaatactgtcaagggaaattagccctgactaaacattgccgctggctcatgaatgcactaggcttggggcagtataaaaactcagagaaatcagtgtgtaggagacacagaaatcagtgtcactcagtgacagaagcaacaataattgtgaaaaatacttcagcagttatggactcatctgtcattcaaaggaaaaaagtagctgtcattggtggtggcttggttggctcattacaagcatgctttcttgcaaagaggaatttccagattgatgtatatgaagctagggaagatactcgagtggctaccttcacacgtggaagaagcattaacttagccctttctcatagaggacgacaagccttgaaagctgttggcctggaagatcaggtacttaatgtatctttcttacagaagataatacctggtatttttcaacaattgcatggtttgatttcatcctggcttaaaaagtaccatttaataccaagaatctctgcatgaaaactcattctactaaagcttttaaaattcgaaatttggcaagagggtgaacattggacactcgaggcacccgaggaggaccctgcaaccggatgattgcttctgatattgggttctcaacaggatggtgcgtcactgcctgtagaaagtgagagtcaagatggcatccaggataaaaggagccagattcctttttttt

SEQ ID NO: 2808 - protein, 151 aa, Homo sapiens
MNALGLGQYKNSEKSVCRRHRNQCHSVTEATIIVKNTSAVMDSSVIQRKKVAVIGGGLVGSLQACFLAKRNFQIDVYEAREDTRVATFTRGRSINLALSHRGRQALKAVGLEDQVLNVSFLQKIIPGIFQQLHGLISSWLKKYHLIPRISA

SEQ ID NO: 2809 - DNA, 2016 bp, Homo sapiens
aagatgtttttggacttcagatgagaagggctccattcatggttaatcatgaatgaaaacgaaactaagaatatatgctgtagaaaaagaagaagaaaagccacaagactgcttaaaaatttctgtgtcttacacagaagatagaaaaaatagagtgtctccaattggatggattttttaaaaaatttggttattgtaatggatttattttttcttagagctgagctgattgtactttggccaactaatgggttaatactgtcaagggaaattagccctgactaaacattgccgctggctcatgaatgcactaggcttggggcagtataaaaactcagagaaatcagtgtgtaggagacacagaaatcagtgtcactcagtgacagaagcaacaataattgtgaaaaatacttcagcagttatggactcatctgtcattcaaaggaaaaaagtagctgtcattggtggtggcttggttggctcattacaagcatgctttcttgcaaagaggaatttccagattgatgtatatgaagctagggaagatactcgagtggctaccttcacacgtggaagaagcattaacttagccctttctcatagaggacgacaagccttgaaagctgttggcctggaagatcagattgtatcccaaggtattcccatgagagcaagaatgatccactctctttcaggaaaaaagtctgcaattccctatgggacaaagtctcagtatattctttctgtaagcagagaaaatctaaacaaggatctattgactgctgctgagaaataccccaatgtgaaaatgcactttaaccacaggctgttgaaatgtaatccagaggaaggaatgatcacagtgcttggatctgacaaagttcccaaagatgtcacttgtgacctcattgtaggatgtgatggagcctattcaactgtcagatctcacctgatgaagaaacctcgctttgattacagtcagcagtacattcctcatgggtacatggagttgactattccacctaagaacggagattatgccatggaacctaattatctgcatatttggcctagaaatacctttatgatgattgcacttcctaacatgaacaaatcattcacatgtactttgttcatgccctttgaagagtttgaaaaacttctaaccagtaatgatgtggtagatttcttccagaaatactttccggatgccatccctctaattggagagaaactcctagtgcaagatttcttcctgttgcctgcccagcccatgatatctgtaaagtgctcttcatttcactttaaatctcactgtgtactgctgggagatgcagctcatgctatagtgccgttttttgggcaaggaatgaatgcgggctttgaagactgcttggtatttgatgagttaatggataaattcagtaacgaccttagtttgtgtcttcctgtgttctcaagattgagaatcccagatgatcacgcgatttcagacctatccatgtacaattacatagagatgcgagcacatgtcaactcaagctggttcatttttcagaagaacatggagagatttcttcatgcgattatgccatcgacctttatccctctctatacaatggtcactttttccagaataagataccatgaggctgtgcagcgttggcattggcaaaaaaaggtgataaacaaaggactctttttcttgggatcactgatagccatcagcagtacctacctacttatacactacatgtcaccacgatctttcctccgcttgagaagaccatggaactggatagctcacttccggaatacaacatgtttccccgcaaaggccgtggactccctagaacaaatttccaatctcattagcaggtgatagaaaggttttgtggtagcaaatgcatgatttctctgtgaccaaaattaagcatgaaaaaaatgtttccattgccatatttgattcactagtggaagatagtgttctgcttataattaaactgaatgtagagt

SEQ ID NO: 2810 - protein, 526 aa, Homo sapiens
MNALGLGQYKNSEKSVCRRHRNQCHSVTEATIIVKNTSAVMDSSVIQRKKVAVIGGGLVGSLQACFLAKRNFQIDVYEAREDTRVATFTRGRSINLALSHRGRQALKAVGLEDQIVSQGIPMRARMIHSLSGKKSAIPYGTKSQYILSVSRENLNKDLLTAAEKYPNVKMHFNHRLLKCNPEEGMITVLGSDKVPKDVTCDLIVGCDGAYSTVRSHLMKKPRFDYSQQYIPHGYMELTIPPKNGDYAMEPNYLHIWPRNTFMMIALPNMNKSFTCTLFMPFEEFEKLLTSNDVVDFFQKYFPDAIPLIGEKLLVQDFFLLPAQPMISVKCSSFHFKSHCVLLGDAAHAIVPFFGQGMNAGFEDCLVFDELMDKFSNDLSLCLPVFSRLRIPDDHAISDLSMYNYIEMRAHVNSSWFIFQKNMERFLHAIMPSTFIPLYTMVTFSRIRYHEAVQRWHWQKKVINKGLFFLGSLIAISSTYLLIHYMSPRSFLRLRRPWNWIAHFRNTTCFPAKAVDSLEQISNLISR

SEQ ID NO: 2811 - DNA, 1978 bp, Homo sapiens
aagatgtttttggacttcagatgagaagggctccattcatggttaatcatgaatgaaaacgaaactaagaatatatgctgtagaaaaagaagaagaaaagccacaagactgcttaaaaatttctgtgtcttacacagaagatagaaaaaatagagtgtctccaattggatggattttttaaaaaatttggttattgtaatggatttattttttcttagagctgagctgattgtactttggccaactaatgggttaatactgtcaagggaaattagccctgactaaacattgccgctggctcatgaatgcactaggcttggggcagtataaaaactcagagaaatcagtgtgtaggagacacagaaatcagtgtcactcagtgacagaagcaacaataattgtgaaaaatacttcagcagttatggactcatctgtcattcaaaggaaaaaagtagctgtcattggtggtggcttggttggctcattacaagcatgctttcttgcaaagaggaatttccagattgatgtatatgaagctagggaagatactcgagtggctaccttcacacgtggaagaagcattaacttagccctttctcatagaggacgacaagccttgaaagctgttggcctggaagatcagattgtatcccaaggtattcccatgagagcaagaatgatccactctctttcaggaaaaaagtctgcaattccctatgggacaaagtctcagtatattctttctgtaagcagagaaaatctaaacaaggatctattgactgctgctgagaaataccccaatgtgaaaatgcactttaaccacaggctgttgaaatgtaatccagaggaaggaatgatcacagtgcttggatctgacaaagttcccaaagatgtcacttgtgacctcattgtaggatgtgatggagcctattcaactgtcagatctcacctgatgaagaaacctcgctttgattacagtcagcagtacattcctcatgggtacatggagttgactattccacctaagaacggagattatgccatggaacctaattatctgcatatttggcctagaaatacctttatgatgattgcacttcctaacatgaacaaatcattcacatgtactttgttcatgccctttgaagagtttgaaaaacttctaaccagtaatgatgtggtagatttcttccagaaatactttccggatgccatccctctaattggagagaaactcctagtgcaagatttcttcctgttgcctgcccagcccatgatatctgtaaagtgctcttcatttcactttaaatctcactgtgtactgctgggagatgcagctcatgctatagtgccgttttttgggcaaggaatgaatgcgggctttgaagactgcttggtatttgatgagttaatggataaattcagtaacgaccttagtttgtgtcttcctgtgttctcaagattgagaatcccagatgatcacgcgatttcagacctatccatgtacaattacatagagaagaacatggagagatttcttcatgcgattatgccatcgacctttatccctctctatacaatggtcactttttccagaataagataccatgaggctgtgcagcgttggcattggcaaaaaaaggtgataaacaaaggactctttttcttgggatcactgatagccatcagcagtacctacctacttatacactacatgtcaccacgatctttcctccgcttgagaagaccatggaactggatagctcacttccggaatacaacatgtttccccgcaaaggccgtggactccctagaacaaatttccaatctcattagcaggtgatagaaaggttttgtggtagcaaatgcatgatttctctgtgaccaaaattaagcatgaaaaaaatgtttccattgccatatttgattcactagtggaagatagtgttctgcttataattaaactgaatgtagagta

SEQ ID NO: 2812 - protein, 513 aa, Homo sapiens
MNALGLGQYKNSEKSVCRRHRNQCHSVTEATIIVKNTSAVMDSSVIQRKKVAVIGGGLVGSLQACFLAKRNFQIDVYEAREDTRVATFTRGRSINLALSHRGRQALKAVGLEDQIVSQGIPMRARMIHSLSGKKSAIPYGTKSQYILSVSRENLNKDLLTAAEKYPNVKMHFNHRLLKCNPEEGMITVLGSDKVPKDVTCDLIVGCDGAYSTVRSHLMKKPRFDYSQQYIPHGYMELTIPPKNGDYAMEPNYLHIWPRNTFMMIALPNMNKSFTCTLFMPFEEFEKLLTSNDVVDFFQKYFPDAIPLIGEKLLVQDFFLLPAQPMISVKCSSFHFKSHCVLLGDAAHAIVPFFGQGMNAGFEDCLVFDELMDKFSNDLSLCLPVFSRLRIPDDHAISDLSMYNYIEKNMERFLHAIMPSTFIPLYTMVTFSRIRYHEAVQRWHWQKKVINKGLFFLGSLIAISSTYLLIHYMSPRSFLRLRRPWNWIAHFRNTTCFPAKAVDSLEQISNLISR

SEQ ID NO: 2813 - DNA, 5376 bp, Homo sapiens
aagatgtttttggacttcagatgagaagggctccattcatggttaatcatgaatgaaaacgaaactaagaatatatgctgtagaaaaagaagaagaaaagccacaagactgcttaaaaatttctgtgtcttacacagaagatagaaaaaatagagtgtctccaattggatggattttttaaaaaatttggttattgtaatggatttattttttcttagagctgagctgattgtactttggccaactaatgggttaatactgtcaagggaaattagccctgactaaacattgccgctggctcatgaatgcactaggcttggggcagtataaaaactcagagaaatcagtgtgtaggagacacagaaatcagtgtcactcagtgacagaagcaacaataattgtgaaaaatacttcagcagttatggactcatctgtcattcaaaggaaaaaagtagctgtcattggtggtggcttggttggctcattacaagcatgctttcttgcaaagaggaatttccagattgatgtatatgaagctagggaagatactcgagtggctaccttcacacgtggaagaagcattaacttagccctttctcatagaggacgacaagccttgaaagctgttggcctggaagatcagattgtatcccaaggtattcccatgagagcaagaatgatccactctctttcaggaaaaaagtctgcaattccctatgggacaaagtctcagtatattctttctgtaagcagagaaaatctaaacaaggatctattgactgctgctgagaaataccccaatgtgaaaatgcactttaaccacaggctgttgaaatgtaatccagaggaaggaatgatcacagtgcttggatctgacaaagttcccaaagatgtcacttgtgacctcattgtaggatgtgatggagcctattcaactgtcagatctcacctgatgaagaaacctcgctttgattacagtcagcagtacattcctcatgggtacatggagttgactattccacctaagaacggagattatgccatggaacctaattatctgcatatttggcctagaaatacctttatgatgattgcacttcctaacatgaacaaatcattcacatgtactttgttcatgccctttgaagagtttgaaaaacttctaaccagtaatgatgtggtagatttcttccagaaatactttccggatgccatccctctaattggagagaaactcctagtgcaagatttcttcctgttgcctgcccagcccatgatatctgtaaagtgctcttcatttcactttaaatctcactgtgtactgctgggagatgcagctcatgctatagtgccgttttttgggcaaggaatgaatgcgggctttgaagactgcttggtatttgatgagttaatggataaattcagtaacgaccttagtttgtgtcttcctgtgttctcaagattgagaatcccagatgatcacgcgatttcagacctatccatgtacaattacatagagatgcgagcacatgtcaactcaagctggttcatttttcagaagaacatggagagatttcttcatgcgattatgccatcgacctttatccctctctatacaatggtcactttttccagaataagataccatgaggctgtgcagcgttggcattggcaaaaaaaggtgataaacaaaggactctttttcttgggatcactgatagccatcagcagtacctacctacttatacactacatgtcaccacgatctttcctccgcttgagaagaccatggaactggatagctcacttccggaatacaacatgtttccccgcaaaggccgtggactccctagaacaaatttccaatctcattagcaggtgatagaaaggttttgtggtagcaaatgcatgatttctctgtgaccaaaattaagcatgaaaaaaatgtttccattgccatatttgattcactagtggaagatagtgttctgcttataattaaactgaatgtagagtatctctgtatgttaattgcaattactggttggggggtgcattttaaaagatgaaacatgcagcttccctacattacacacactcaggttgagtcattctaactataaaagtgcaatgactaagatccttcacttctctgaaagtaaggccctagatgcctcagggaagacagtaatcatgccttttctttaaaagacacaataggactcgcaacagcattgactcaacacctaggactaaaaatcacaacttaactagcatgttaactgcacttttcattacgtgaatggaacttacctaaccacagggctcagacttactagataaaaccagaaatggaaataaggaattcaggggagttccagagacttacaaaatgaactcattttattttcccaccttcaaatataagtattatcatctatctgtttatcgtctatctatctatcatctatctatctatctatcatctatctatctatctatctatctatctatctatctatctatctctatttatttatgtatttagagatcaggtctcactctgttgaccaggctggagtgcagtggtgagatctgggttcactgcaacctctgcctcctgggctcaagcaatcctcccacttcagcctcccaaatagctggggctaccatggtatttttcagtagagaccgggtcttgccatgctgcccaggccagtctcaaactcctggcctcatgtgatctgcccacctcagcctcccaaagtacagggattagagttgtgagccaccgctgccagcccagagttaccctctaaagataagaaaaaggctattaatatcatactaagtgaaggacaggaaagggttttattcataaattaaatgtctacatgtgccagaatggaaaggaaacaaggggagacaacttttatagaaatacaaagccattactttattcaatttcagaccctcagaagcaatttactaatttattcttcgactacatactgcagcagaaccagcaatacacttgatttttaaaagcacatttagtgaaatgttttctttggttcatccttctttaacaggctgctgagtcactcagaaatccttcaaacatgattaattatgaagatgaaacactagagtcatataagaaataaaaattgggcaataaaataaaatgattcagtgtttcttttctatattgtcaatgaaaaccttgagttctaataatccatgttcagtttgtagggaaagaaaaaataatttttccttctacccactttaggttccttggctggggcccctataacaaaagacagattgacaagagaaaaacaaacataaatttattagcgggtatatgtaatatatatgtgggaaatacaggggaatgagcaaatctcaaagagctggcgtcttagaactccctggcttatatagcatcgacaaagaacagtaaatttttagagaaacaacaaaacaaagaaaaagagctttgagtctgtaggggcagcaatttgggggaagcaaatatatgggagtttgccttgtagattcctctggtgctggtctccaggctgacaaggattcaaagttgtctctgaaactcctctttgtcatactgcacatataaaacgtcttttgtttccaacaagaggattttctttttcattctagaattatctccttgataacttgatcagatataggacatgacactgaatagagtccaacagtacaaaaaaaattcagtatgttctagctacttcacacatgtgtacgcgacagttatttttacagtaaggtattttcgagaaaaatgcattacgtgttttggaaaatagagtaatttaaaaaatatatttgaaatgaaaatctccaacacattagaagatgatgatgttagatgcccatcgtgtgccacaagtggttttttcattatgtaaagcacccgttgaattaaaagaatttgtttttgttcaacctcttcctgaggcccaagagcatatgggcaattcggatttcctgctggaccacaaggttctgttgatattacatagaacgggtattccagacacttcttatgatgaaagtccaaaagtggcatccaatttaaggccccatctttcgttgccattcttcattcctacaaaggacgaacttggattacatcaactttggacccattggttttgtcgctgtcgtcaactgacagtgattcatcactggtgatgataaaaatgatggaagaagagttgaaagtcacttttttctttggcctgtccccatctttctgtgacatcacaatgggtctgatctgcatttcacttccagctgctggtaggtctttagcaggcctctggcacctcagcagtcggaggcacagaagctgcaaaagggatcttcgaaactgggcagagaaaaaataaagtggaatattaagtaaaagttgggcactaatctggattaacattcgaggaaatcagttgagctgaatttaagttgttttttgtttgttagcaggtgtggatgtggggttatgtggtcatgctcagatctacctaaatcaccccagagctttatgtcttttattcattctaattcttattaaccggaatatgtaggaccatttcaataccttgtaatcctccaagcttcaatctgcacacactttctatgagggcaggtacaactattaagagattttgaacattaagttagtccacaaatattcagtgggcatctactaggtgacagccactgtgctataattagagactttttactataagcatcaaaaacagataaggctcttcctggcagagtttacagcctggtgtacttgctaatgtctctttaattaggtgaagaattttttttttctatcgaaattactaatcagttggggaaaaaaatactatagcagacagcactaatgtcatcaacaaacattgttcttctccgtgtcctgggtacaacatcgaataatatttcttggcctcctttccgcttctcctctctgctgttcctctctacaagaacctgggaggccaacgcctaaagatcataatatcacacaatggaaggaacctagattcctaaatgactgcataggacagatcccatctcctccacccaatacattattagactgaactgtgacctgaaatgagcaataaactctgtattaattcactgaaatgttggggttgcttgttatagtagtcggtccatcatgaccagtaaaacataaatcaaaagttaatgtaattgttatcccattatttagagcgaaataaatgttgaatatatggactttctcagattaggaaataccaattaaaaatataataaatagctacattg

SEQ ID NO: 2814 - protein, 526 aa, Homo sapiens; identical to SEQ ID NO: 2810

SEQ ID NO: 2815 - DNA, 3165 bp, Homo sapiens
gcaaattgaaaggtcagcctttcgcgcgctgtgtaggcaagttacccgtgttctgcgttgccggccgtgggtgctctggccacagtgagttaggggcgtcggagcgggtttctccaaccgcaatcggctccgctcaaggggaggaggagagtcccttctcggaaggcctaaggaaacgtgtcgtctggaatgggcttgggggccacgcctgcacatctccgcgagacagagggataaagtgaagatggtgctgttattgttacctcgagtgccacatgcgacctctgagatatgtacacagtcattcttactatcgcactcagccattcttactacgctaaagaagaaataattattcgaggatatttgcctggcccagaagaaacttatgtaaatttcatgaactattatatccgttttcctcggagtgagagaaaactctttttagatatcatctgagaggtagttaatttggcaccatggggatacagggattgctacaatttatcaaagaagcttcagaacccatccatgtgaggaagtataaagggcaggtagtagctgtggatacatattgctggcttcacaaaggagctattgcttgtgctgaaaaactagccaaaggtgaacctactgataggtatgtaggattttgtatgaaatttgtaaatatgttactatctcatgggatcaagcctattctcgtatttgatggatgtactttaccttctaaaaaggaagtagagagatctagaagagaaagacgacaagccaatcttcttaagggaaagcaacttcttcgtgaggggaaagtctcggaagctcgagagtgtttcacccggtctatcaatatcacacatgccatggcccacaaagtaattaaagctgcccggtctcagggggtagattgcctcgtggctccctatgaagctgatgcgcagttggcctatcttaacaaagcgggaattgtgcaagccataattacagaggactcggatctcctagcttttggctgtaaaaaggtaattttaaagatggaccagtttggaaatggacttgaaattgatcaagctcggctaggaatgtgcagacagcttggggatgtattcacggaagagaagtttcgttacatgtgtattctttcaggttgtgactacctgtcatcactgcgtgggattggattagcaaaggcatgcaaagtcctaagactagccaataatccagatatagtaaaggttatcaagaaaattggacattatctcaagatgaatatcacggtaccagaggattacatcaacgggtttattcgggccaacaataccttcctctatcagctagtttttgatcccatcaaaaggaaacttattcctctgaacgcctatgaagatgatgttgatcctgaaacactaagctacgctgggcaatatgttgatgattccatagctcttcaaatagcacttggaaataaagatataaatacttttgaacagatcgatgactacaatccagacactgctatgcctgcccattcaagaagtcatagttgggatgacaaaacatgtcaaaagtcagctaatgttagcagcatttggcataggaattactctcccagaccagagtcgggtactgtttcagatgccccacaattgaaggaaaatccaagtactgtgggagtggaacgagtgattagtactaaagggttaaatctcccaaggaaatcatccattgtgaaaagaccaagaagtgcagagctgtcagaagatgacctgttgagtcagtattctctttcatttacgaagaagaccaagaaaaatagctctgaaggcaataaatcattgagcttttctgaagtgtttgtgcctgacctggtaaatggacctactaacaaaaagagtgtaagcactccacctaggacgagaaataaatttgcaacatttttacaaaggaaaaatgaagaaagtggtgcagttgtggttccagggaccagaagcaggtttttttgcagttcagattctactgactgtgtatcaaacaaagtgagcatccagcctctggatgaaactgctgtcacagataaagagaacaatctgcatgaatcagagtatggagaccaagaaggcaagagactggttgacacagatgtagcacgtaattcaagtgatgacattccgaataatcatattccaggtgatcatattccagacaaggcaacagtgtttacagatgaagagtcctactcttttgagagcagcaaatttacaaggaccatttcaccacccactttgggaacactaagaagttgttttagttggtctggaggtcttggagatttttcaagaacgccgagcccctctccaagcacagcattgcagcagttccgaagaaagagcgattcccccacctctttgcctgagaataatatgtctgatgtgtcgcagttaaagagcgaggagtccagtgacgatgagtctcatcccttacgagaagaggcatgttcttcacagtcccaggaaagtggagaattctcactgcagagttcaaatgcatcaaagctttctcagtgctctagtaaggactctgattcagaggaatctgattgcaatattaagttacttgacagtcaaagtgaccagacctccaagctacgtttatctcatttctcaaaaaaagacacacctctaaggaacaaggttcctgggctatataagtccagttctgcagactctctttctacaaccaagatcaaacctctaggacctgccagagccagtgggctgagcaagaagccggcaagcatccagaagagaaagcatcataatgccgagaacaagccggggttacagatcaaactcaatgagctctggaaaaactttggatttaaaaaagattctgaaaagcttcctccttgtaagaaacccctgtccccagtcagagataacatccaactaactccagaagcggaagaggatatatttaacaaacctgaatgtggccgtgttcaaagagcaatattccagtaaatgcagactgctgcaaagcttttgcctgcaagagaatctgatcaatttgaagtccctgtttgggaatgaggcacttatcagcatgaagaattttttctcattctgtgccattttaaaaatagaatacattttgtatattaacttt

SEQ ID NO: 2816 - protein, 846 aa, Homo sapiens
MGIQGLLQFIKEASEPIHVRKYKGQVVAVDTYCWLHKGAIACAEKLAKGEPTDRYVGFCMKFVNMLLSHGIKPILVFDGCTLPSKKEVERSRRERRQANLLKGKQLLREGKVSEARECFTRSINITHAMAHKVIKAARSQGVDCLVAPYEADAQLAYLNKAGIVQAIITEDSDLLAFGCKKVILKMDQFGNGLEIDQARLGMCRQLGDVFTEEKFRYMCILSGCDYLSSLRGIGLAKACKVLRLANNPDIVKVIKKIGHYLKMNITVPEDYINGFIRANNTFLYQLVFDPIKRKLIPLNAYEDDVDPETLSYAGQYVDDSIALQIALGNKDINTFEQIDDYNPDTAMPAHSRSHSWDDKTCQKSANVSSIWHRNYSPRPESGTVSDAPQLKENPSTVGVERVISTKGLNLPRKSSIVKRPRSAELSEDDLLSQYSLSFTKKTKKNSSEGNKSLSFSEVFVPDLVNGPTNKKSVSTPPRTRNKFATFLQRKNEESGAVVVPGTRSRFFCSSDSTDCVSNKVSIQPLDETAVTDKENNLHESEYGDQEGKRLVDTDVARNSSDDIPNNHIPGDHIPDKATVFTDEESYSFESSKFTRTISPPTLGTLRSCFSWSGGLGDFSRTPSPSPSTALQQFRRKSDSPTSLPENNMSDVSQLKSEESSDDESHPLREEACSSQSQESGEFSLQSSNASKLSQCSSKDSDSEESDCNIKLLDSQSDQTSKLRLSHFSKKDTPLRNKVPGLYKSSSADSLSTTKIKPLGPARASGLSKKPASIQKRKHHNAENKPGLQIKLNELWKNFGFKKDSEKLPPCKKPLSPVRDNIQLTPEAEEDIFNKPECGRVQRAIFQ

SEQ ID NO: 2817 - DNA, 3258 bp, Homo sapiens
agcctttcgcgcgctgtgtaggcaagttacccgtgttctgcgttgccggccgtgggtgctctggccacagtgagttaggggcgtcggagcgggtttctccaaccgcaatcggctccgctcaaggggaggaggagagtcccttctcggaaggcctaaggaaacgtgtcgtctggaatgggcttgggggccacgcctgcacatctccgcgagacagagggataaagtgaagatggtgctgttattgttacctcgagtgccacatgcgacctctgagatatgtacacagtcattcttactatcgcactcagccattcttactacgctaaagaagaaataattattcgaggatatttgcctggcccagaagaaacttatgtaaatttcatgaactattatatccgttttcctcggagtgagagaaaactctttttagatatcatctgagagcagaactagtgaatcccagtcactgagtggagttgagagtctaagaacctctgaaatttgagaactgctggaccagagcctttagagctctgataaggtgtcaacagggtagttaatttggcaccatggggatacagggattgctacaatttatcaaagaagcttcagaacccatccatgtgaggaagtataaagggcaggtagtagctgtggatacatattgctggcttcacaaaggagctattgcttgtgctgaaaaactagccaaaggtgaacctactgataggtatgtaggattttgtatgaaatttgtaaatatgttactatctcatgggatcaagcctattctcgtatttgatggatgtactttaccttctaaaaaggaagtagagagatctagaagagaaagacgacaagccaatcttcttaagggaaagcaacttcttcgtgaggggaaagtctcggaagctcgagagtgtttcacccggtctatcaatatcacacatgccatggcccacaaagtaattaaagctgcccggtctcagggggtagattgcctcgtggctccctatgaagctgatgcgcagttggcctatcttaacaaagcgggaattgtgcaagccataattacagaggactcggatctcctagcttttggctgtaaaaaggtaattttaaagatggaccagtttggaaatggacttgaaattgatcaagctcggctaggaatgtgcagacagcttggggatgtattcacggaagagaagtttcgttacatgtgtattctttcaggttgtgactacctgtcatcactgcgtgggattggattagcaaaggcatgcaaagtcctaagactagccaataatccagatatagtaaaggttatcaagaaaattggacattatctcaagatgaatatcacggtaccagaggattacatcaacgggtttattcgggccaacaataccttcctctatcagctagtttttgatcccatcaaaaggaaacttattcctctgaacgcctatgaagatgatgttgatcctgaaacactaagctacgctgggcaatatgttgatgattccatagctcttcaaatagcacttggaaataaagatataaatacttttgaacagatcgatgactacaatccagacactgctatgcctgcccattcaagaagtcatagttgggatgacaaaacatgtcaaaagtcagctaatgttagcagcatttggcataggaattactctcccagaccagagtcgggtactgtttcagatgccccacaattgaaggaaaatccaagtactgtgggagtggaacgagtgattagtactaaagggttaaatctcccaaggaaatcatccattgtgaaaagaccaagaagtgcagagctgtcagaagatgacctgttgagtcagtattctctttcatttacgaagaagaccaagaaaaatagctctgaaggcaataaatcattgagcttttctgaagtgtttgtgcctgacctggtaaatggacctactaacaaaaagagtgtaagcactccacctaggacgagaaataaatttgcaacatttttacaaaggaaaaatgaagaaagtggtgcagttgtggttccagggaccagaagcaggtttttttgcagttcagattctactgactgtgtatcaaacaaagtgagcatccagcctctggatgaaactgctgtcacagataaagagaacaatctgcatgaatcagagtatggagaccaagaaggcaagagactggttgacacagatgtagcacgtaattcaagtgatgacattccgaataatcatattccaggtgatcatattccagacaaggcaacagtgtttacagatgaagagtcctactcttttgagagcagcaaatttacaaggaccatttcaccacccactttgggaacactaagaagttgttttagttggtctggaggtcttggagatttttcaagaacgccgagcccctctccaagcacagcattgcagcagttccgaagaaagagcgattcccccacctctttgcctgagaataatatgtctgatgtgtcgcagttaaagagcgaggagtccagtgacgatgagtctcatcccttacgagaagaggcatgttcttcacagtcccaggaaagtggagaattctcactgcagagttcaaatgcatcaaagctttctcagtgctctagtaaggactctgattcagaggaatctgattgcaatattaagttacttgacagtcaaagtgaccagacctccaagctacgtttatctcatttctcaaaaaaagacacacctctaaggaacaaggttcctgggctatataagtccagttctgcagactctctttctacaaccaagatcaaacctctaggacctgccagagccagtgggctgagcaagaagccggcaagcatccagaagagaaagcatcataatgccgagaacaagccggggttacagatcaaactcaatgagctctggaaaaactttggatttaaaaaagattctgaaaagcttcctccttgtaagaaacccctgtccccagtcagagataacatccaactaactccagaagcggaagaggatatatttaacaaacctgaatgtggccgtgttcaaagagcaatattccagtaaatgcagactgctgcaaagcttttgcctgcaagagaatctgatcaatttgaagtccctgtttgggaatgaggcacttatcagcatgaagaattttttctcattctgtgccattttaaaaatagaatacattttgtatattaacttt

SEQ ID NO: 2818 - protein, 846 aa, Homo sapiens; identical to SEQ ID NO: 2816

SEQ ID NO: 2819 - DNA, 900 bp, Homo sapiens
gctgaatgcagccgaggggcgagcgcgcgggctcgcacggattagccgtgctttcccatgagccacaaaagaatgcccgaatctgggacatctgtcatcaaggggcaggctgctcaggatgcaagatattgtcaagaaccctctgctctacagttctttgctgttcttgacccacctccttcaaactcggattttccgtttctctcttctcctaagagctgcctgctgccttctgaagctgctttagaaccacagaagcctggatcatctctacaaagggtgcaagatgaaggtgttaggacaacttaaagagacgggaggtgctaggaatcggcaggtgcctgattgccaaggcagggactgatggtgggagatgttgttacagaactgggcttcctgatagcaatgaggatgaaaagattccaaaacaatagatttaaccagcagaatcaagtttctccaggacaagagaaaaagagaatcctgaaggcatggttcccagacggggtgaaatagttaatacagaaattcttctaactcaggcccaaacatctccacactgtccccatcctcaagccctgctgtccaccccacccctatttgtacaggagccatttaatagagcaaacagtattcgtttggcagtttatttgtgctgcaccaaaaaaaaaaacagagaagccaaaactgaaagaaaaaggaaaaacaaaaaaccagaaatggagaagtgttccctttccagacaatcatatgaaaaccttgacaccgagagattaagtaatttgcccaaggtcacagttttaagtgcagagcttggacttgaacccaggcaagagaagaagattccatgaagctcacattccaacattggagacagcatggagctgtcagtgacctccc

SEQ ID NO: 2820 - protein, 119 aa, Homo sapiens
MVPRRGEIVNTEILLTQAQTSPHCPHPQALLSTPPLFVQEPFNRANSIRLAVYLCCTKKKNREAKTERKRKNKKPEMEKCSLSRQSYENLDTERLSNLPKVTVLSAELGLEPRQEKKIP

SEQ ID NO: 2821 - DNA, 1797 bp, Homo sapiens
gctgaatgcagccgaggggcgagcgcgcgggctcgcacggattagccgtgctttcccatgagccacaaaagaatgcccgaatctgggacatctgtcatcaaggggcaggctgctcaggatgcaagatattgtcaagaaccctctgctctacagttctttgctgttcttgacccacctccttcaaactcggattttccgtttctctcttctcctaagagctgcctgctgccttctgaagctgctttagaaccacagaagcctggatcatctctacaaagggtgcaagatgaaggtgttaggacaacttaaagagacgggaggtgctaggaatcggcaggtgcctgattgccaaggcagggactgatggtgggagatgttgttacagaactgggcttcctgatagcaatgaggatgaaaagattccaaaacaatagatttaaccagcagaatcaagtttctccaggacaagagaaaaagagaatcctgaaggcatggttcccagacggggtgaaatagttaatacagaaattcttctaactcaggcccaaacatctccacactgtccccatcctcaagccctgctgtccaccccacccctatttgtacaggagccatttaatagagcaaacagtattcgtttggcagtttatttgtgctgcaccaaaaaaaaaaacagagaagccaaaactgaaagaaaaaggaaaaacaaaaaaccagaaatggagaagtgttccctttccagacaatcatgcaagagaagaagattccatgaagctcacattccaacattggagacagcatggagctgtcagtgacctccccacttccaagcagaaatcgtcacatgtaagaaggaagaaaagagatagggatgcgctgaggctggactacccgaaggcatcggggtgtccagagaagctgggcttgagggaggcagcagctccaacaccttagagccttgggaacagtccctgtgacagccacactgattgagaggaaaaagcacagcgggagaagttgatctctttccactgggagattgatctgcactagactatttcttgaatgcgtattatgtgccaagcaccattctaggtgctaaggatacagctattatcatagaagagtccccatcctgaggaagcttacatcccaccaaggaagataggaaacaaaaaatagaaggtgctgcattcaagagtgaagcaagcacaaaaggaaaggaaaaatctctccctggaggagaatgcagacagacagacagacgctatttgtatctttgcgtccgaagcacagcagctaacacacaagcatatcaacctgttcatttctaaatgccagaagagagatgagacagagagaaaaaaaactaagtcagactgaaattgggccttctaccactagactgaaaagacctagaattcatcgacagcacagatacaacaaaagccttcatggaatacaaaaactccaattttcataggatatccttgacctcagtgatgaatcatgagggcgtagagggttgagaaaaaagtaggcacatcactactgtttctaaccagatatctcgaagctatttcagttccaggaattctgtctgctcctgtttttacttcattagcaattcaacatgtctgatttgcccacacaatactttccagctactttacccatttgacctggaacaaagtgaaagcacattttgcccagttgaaaggtctcctggcaggttggttagcaacaggcttgccagtctgggttctgttagcaaagaataaacacatttcattagac

SEQ ID NO: 2822 - protein, 107 aa, Homo sapiens
MVPRRGEIVNTEILLTQAQTSPHCPHPQALLSTPPLFVQEPFNRANSIRLAVYLCCTKKKNREAKTERKRKNKKPEMEKCSLSRQSCKRRRFHEAHIPTLETAWSCQ

SEQ ID NO: 2823 - DNA, 3744 bp, Homo sapiens
gaggaggcggaggacgcggcggcggcggggacgcggtgacttagggccgctccgtgttatgaagacagtatggagtttccagaccatagtagacatttgctacagtgtctgagcgagcagagacaccagggttttctttgtgactgcactgttctggtgggagatgcccagttccgagcgcaccgagctgtactggcttcatgcagcatgtatttccacctcttttacaaggaccagctggacaaaagagacattgttcatctgaacagcgacattgttacagcccccgctttcgctctcctgcttgaattcatgtatgaagggaaactccagttcaaagacttgcccattgaagacgtgctagcagctgccagttatctccacatgtatgacattgtcaaagtctgcaaaaagaagctgaaagagaaagccaccacggaggcagacagcaccaaaaaggaagaagatgcttcaagttgttcggacaaagtcgagagtctctccgatggcagcagccacatagcaggcgatttgcccagtgatgaagatgaaggagaagatgaaaaattgaacatcctgcccagcaaaagggacttggcggccgagcctgggaacatgtggatgcgattgccctcagactcagcaggcatcccccaggctggcggagaggcagagccacacgccacagcagctggaaaaacagtagccagcccctgcagctcaacagagtctttgtcccagaggtctgtcacctccgtgagggattcggcagatgttgactgtgtgctggacctgtctgtcaagtccagcctttcaggagttgaaaatctgaacagctcttatttctcttcacaggacgtgctgagaagcaacctggtgcaggtgaaggtggagaaagaggcttcctgtgatgagagtgatgttggcactaatgactatgacatggaacatagcactgtgaaagaaagtgtgagcactaataacagggtacagtatgagccggcccatctggctcccctgagggaggactcggtcttgagggagctggaccgggaggacaaagccagtgatgatgagatgatgaccccagagagcgagcgtgtccaggtggagggaggcatggagagcagtctgctcccctacgtctccaacatcctgagccccgcgggccagatcttcatgtgccccctgtgcaacaaggtcttccccagcccccacatcctgcagatccacctgagcacgcacttccgcgagcaggacggcatccgcagcaagcccgccgccgatgtcaacgtgcccacgtgctcgctgtgtgggaagactttctcttgcatgtacaccctcaagcgccacgagaggactcactcgggggagaagccctacacatgcacccagtgcggcaagagcttccagtactcgcacaacctgagccgccatgccgtggtgcacacccgcgagaagccgcacgcctgcaagtggtgcgagcgcaggttcacgcagtccggggacctgtacagacacattcgcaagttccactgtgagttggtgaactccttgtcggtcaaaagcgaagcactgagcttgcctactgtcagagactggaccttagaagatagctctcaagaactttggaaataattttatatatatataaataatatatatatatatacatatatataaatagatctctatatagttgtggtacggtctaaaagcagtcttgtttcctggaaataaaaagttgggatattaacttgtttttgcactttagaatagcatgagaatctcactaatttagcattctgataaaagaaactttagagcaagtcagaatagagaggtgtttttcctttgaggggataggggaagtaagccaataagaaccttttaaacaaatcgtcctgtcacaaaatgctttcatatggcttaattttgtcaacactgcattgtcttttgagctcttttttcccccccaacaaagtttttttgttttttgtttttttttttaagtagaaattccctccagttttattagcctctttatatgtctcaaattgcatgaattttttctggctgttggaaacctgaatgcttttagacccaaatggaaaatttctgaaatgctggattatctatttttaaacaagcagttgacttaaaactttctgtggcaacttctggttttctgacagttcccagtgagagaaatgctgaaagtacactgggatcactgggacactgtcttatgaaggtttgcttgggatgaaaaaggatattgcagcttcagcagtgttgaactgtgtgtttaaaaatgtgaattactgttattgtatactgtaattgattacatgggctgggggggtgtcaaagaacttgacaggttgtgttgatgctcttagttgagtcttgaaaagtaaatattaacgctacagaaatgcatgagtttcaatatattttttgtctttgtttgcattgtataactttaacgagtgagtttaaaattatttaatttccttagaaaaataacaccatttggaaaaaaaaactggtgttatgaagaacgtaaatgcactgtttttatttttattttatataatttaaattgactttcccactgtctttaagttgaaactgttaagctgaataaaaacttaagctgcaaattgataacttcgctacataacaaggaaaatataaatgtttacaaacagcttaaagatttgcatgtgcagtgtgcatttataacaaacttctaattgcacaaaacccatgccagctcagagtttaggtgtacacatttacccagttgagcgttcttagaataactactgcacaagttgacaataggtcgttctctctttttttttgtttgctccctttttctttttctccccttcctccttaccctccctcccttactctccccccccaccaccaccctccacccccaactcatgaaaagattctatggactgaaaaagccccaggctgaaaggactggactgccttgattgacatggggaagggggttagtagactatgtggattgcggcagcagaggctgcagcctaacgtgtggttttaatgaccagcacgcaaggcaaaagcattttgcacagtgtttgttttcctgtcttgcacttacaaataaggtctatgggagtagcatggaaaacgtttgctgtttttcccttttttttttaattgcttttgtttaaaatttgatcgccttaactactgtaaacatagcctatttttgtgcttaagatactgaatggaaaactccattgtgtgttgctggactgttttggaaatatttggttaaatgtgtgttaatttggctgtaatggcatttaaagcaaacaaacaaacaaaaaaagctgtgaaaatggccttggagcattatctttagttacttgaagagtttctagtttttttaaaatacagtttatgttaaaataatttttattaatttagagaagacaatcaatgtctgtgagaaaacggactttcttttggattttctttttgtggtcattgtgagtgattgctttttccttttcttagtttcacattcttcctttgttctaaaacttagactgacatctagctttgacaatcatagtatgttttattttcctgagggggaataacttataatgctgtttagttttgtactattggtgtgttggtgaatttttaaactgtgtgctaactgcaataaattatatgaactgagaa

SEQ ID NO: 2824 - protein, 522 aa, Homo sapiens; identical to SEQ ID NO: 181

SEQ ID NO: 2825 - DNA, 3855 bp, Homo sapiens
agttagtgtgtgcggatctgtggtggagaaggtatctcattcctctctaacatcatctccactttgcatctgtctctcttagtctgctttttttccaccgatgtaacagacctggagccagcaggactcagaggaaaggacttaatcaggtttatgtgtcctaaaggttatgaagacagtatggagtttccagaccatagtagacatttgctacagtgtctgagcgagcagagacaccagggttttctttgtgactgcactgttctggtgggagatgcccagttccgagcgcaccgagctgtactggcttcatgcagcatgtatttccacctcttttacaaggaccagctggacaaaagagacattgttcatctgaacagcgacattgttacagcccccgctttcgctctcctgcttgaattcatgtatgaagggaaactccagttcaaagacttgcccattgaagacgtgctagcagctgccagttatctccacatgtatgacattgtcaaagtctgcaaaaagaagctgaaagagaaagccaccacggaggcagacagcaccaaaaaggaagaagatgcttcaagttgttcggacaaagtcgagagtctctccgatggcagcagccacatagcaggcgatttgcccagtgatgaagatgaaggagaagatgaaaaattgaacatcctgcccagcaaaagggacttggcggccgagcctgggaacatgtggatgcgattgccctcagactcagcaggcatcccccaggctggcggagaggcagagccacacgccacagcagctggaaaaacagtagccagcccctgcagctcaacagagtctttgtcccagaggtctgtcacctccgtgagggattcggcagatgttgactgtgtgctggacctgtctgtcaagtccagcctttcaggagttgaaaatctgaacagctcttatttctcttcacaggacgtgctgagaagcaacctggtgcaggtgaaggtggagaaagaggcttcctgtgatgagagtgatgttggcactaatgactatgacatggaacatagcactgtgaaagaaagtgtgagcactaataacagggtacagtatgagccggcccatctggctcccctgagggaggactcggtcttgagggagctggaccgggaggacaaagccagtgatgatgagatgatgaccccagagagcgagcgtgtccaggtggagggaggcatggagagcagtctgctcccctacgtctccaacatcctgagccccgcgggccagatcttcatgtgccccctgtgcaacaaggtcttccccagcccccacatcctgcagatccacctgagcacgcacttccgcgagcaggacggcatccgcagcaagcccgccgccgatgtcaacgtgcccacgtgctcgctgtgtgggaagactttctcttgcatgtacaccctcaagcgccacgagaggactcactcgggggagaagccctacacatgcacccagtgcggcaagagcttccagtactcgcacaacctgagccgccatgccgtggtgcacacccgcgagaagccgcacgcctgcaagtggtgcgagcgcaggttcacgcagtccggggacctgtacagacacattcgcaagttccactgtgagttggtgaactccttgtcggtcaaaagcgaagcactgagcttgcctactgtcagagactggaccttagaagatagctctcaagaactttggaaataattttatatatatataaataatatatatatatatacatatatataaatagatctctatatagttgtggtacggtctaaaagcagtcttgtttcctggaaataaaaagttgggatattaacttgtttttgcactttagaatagcatgagaatctcactaatttagcattctgataaaagaaactttagagcaagtcagaatagagaggtgtttttcctttgaggggataggggaagtaagccaataagaaccttttaaacaaatcgtcctgtcacaaaatgctttcatatggcttaattttgtcaacactgcattgtcttttgagctcttttttcccccccaacaaagtttttttgttttttgtttttttttttaagtagaaattccctccagttttattagcctctttatatgtctcaaattgcatgaattttttctggctgttggaaacctgaatgcttttagacccaaatggaaaatttctgaaatgctggattatctatttttaaacaagcagttgacttaaaactttctgtggcaacttctggttttctgacagttcccagtgagagaaatgctgaaagtacactgggatcactgggacactgtcttatgaaggtttgcttgggatgaaaaaggatattgcagcttcagcagtgttgaactgtgtgtttaaaaatgtgaattactgttattgtatactgtaattgattacatgggctgggggggtgtcaaagaacttgacaggttgtgttgatgctcttagttgagtcttgaaaagtaaatattaacgctacagaaatgcatgagtttcaatatattttttgtctttgtttgcattgtataactttaacgagtgagtttaaaattatttaatttccttagaaaaataacaccatttggaaaaaaaaactggtgttatgaagaacgtaaatgcactgtttttatttttattttatataatttaaattgactttcccactgtctttaagttgaaactgttaagctgaataaaaacttaagctgcaaattgataacttcgctacataacaaggaaaatataaatgtttacaaacagcttaaagatttgcatgtgcagtgtgcatttataacaaacttctaattgcacaaaacccatgccagctcagagtttaggtgtacacatttacccagttgagcgttcttagaataactactgcacaagttgacaataggtcgttctctctttttttttgtttgctccctttttctttttctccccttcctccttaccctccctcccttactctccccccccaccaccaccctccacccccaactcatgaaaagattctatggactgaaaaagccccaggctgaaaggactggactgccttgattgacatggggaagggggttagtagactatgtggattgcggcagcagaggctgcagcctaacgtgtggttttaatgaccagcacgcaaggcaaaagcattttgcacagtgtttgttttcctgtcttgcacttacaaataaggtctatgggagtagcatggaaaacgtttgctgtttttcccttttttttttaattgcttttgtttaaaatttgatcgccttaactactgtaaacatagcctatttttgtgcttaagatactgaatggaaaactccattgtgtgttgctggactgttttggaaatatttggttaaatgtgtgttaatttggctgtaatggcatttaaagcaaacaaacaaacaaaaaaagctgtgaaaatggccttggagcattatctttagttacttgaagagtttctagtttttttaaaatacagtttatgttaaaataatttttattaatttagagaagacaatcaatgtctgtgagaaaacggactttcttttggattttctttttgtggtcattgtgagtgattgctttttccttttcttagtttcacattcttcctttgttctaaaacttagactgacatctagctttgacaatcatagtatgttttattttcctgagggggaataacttataatgctgtttagttttgtactattggtgtgttggtgaatttttaaactgtgtgctaactgcaataaattatatgaactgagaa

SEQ ID NO: 2826 - protein, 531 aa, Homo sapiens; identical to SEQ ID NO: 183

SEQ ID NO: 2827 - DNA, 3805 bp, Homo sapiens
agtctgctttttttccaccgatgtaacagacctggagccagcaggactcagaggaaaggacttaatcaggtttatgtgtcctaaagggcttttgttgtaacaccctgactttaaaagttatgaagacagtatggagtttccagaccatagtagacatttgctacagtgtctgagcgagcagagacaccagggttttctttgtgactgcactgttctggtgggagatgcccagttccgagcgcaccgagctgtactggcttcatgcagcatgtatttccacctcttttacaaggaccagctggacaaaagagacattgttcatctgaacagcgacattgttacagcccccgctttcgctctcctgcttgaattcatgtatgaagggaaactccagttcaaagacttgcccattgaagacgtgctagcagctgccagttatctccacatgtatgacattgtcaaagtctgcaaaaagaagctgaaagagaaagccaccacggaggcagacagcaccaaaaaggaagaagatgcttcaagttgttcggacaaagtcgagagtctctccgatggcagcagccacatagcaggcgatttgcccagtgatgaagatgaaggagaagatgaaaaattgaacatcctgcccagcaaaagggacttggcggccgagcctgggaacatgtggatgcgattgccctcagactcagcaggcatcccccaggctggcggagaggcagagccacacgccacagcagctggaaaaacagtagccagcccctgcagctcaacagagtctttgtcccagaggtctgtcacctccgtgagggattcggcagatgttgactgtgtgctggacctgtctgtcaagtccagcctttcaggagttgaaaatctgaacagctcttatttctcttcacaggacgtgctgagaagcaacctggtgcaggtgaaggtggagaaagaggcttcctgtgatgagagtgatgttggcactaatgactatgacatggaacatagcactgtgaaagaaagtgtgagcactaataacagggtacagtatgagccggcccatctggctcccctgagggaggactcggtcttgagggagctggaccgggaggacaaagccagtgatgatgagatgatgaccccagagagcgagcgtgtccaggtggagggaggcatggagagcagtctgctcccctacgtctccaacatcctgagccccgcgggccagatcttcatgtgccccctgtgcaacaaggtcttccccagcccccacatcctgcagatccacctgagcacgcacttccgcgagcaggacggcatccgcagcaagcccgccgccgatgtcaacgtgcccacgtgctcgctgtgtgggaagactttctcttgcatgtacaccctcaagcgccacgagaggactcactcgggggagaagccctacacatgcacccagtgcggcaagagcttccagtactcgcacaacctgagccgccatgccgtggtgcacacccgcgagaagccgcacgcctgcaagtggtgcgagcgcaggttcacgcagtccggggacctgtacagacacattcgcaagttccactgtgagttggtgaactccttgtcggtcaaaagcgaagcactgagcttgcctactgtcagagactggaccttagaagatagctctcaagaactttggaaataattttatatatatataaataatatatatatatatacatatatataaatagatctctatatagttgtggtacggtctaaaagcagtcttgtttcctggaaataaaaagttgggatattaacttgtttttgcactttagaatagcatgagaatctcactaatttagcattctgataaaagaaactttagagcaagtcagaatagagaggtgtttttcctttgaggggataggggaagtaagccaataagaaccttttaaacaaatcgtcctgtcacaaaatgctttcatatggcttaattttgtcaacactgcattgtcttttgagctcttttttcccccccaacaaagtttttttgttttttgtttttttttttaagtagaaattccctccagttttattagcctctttatatgtctcaaattgcatgaattttttctggctgttggaaacctgaatgcttttagacccaaatggaaaatttctgaaatgctggattatctatttttaaacaagcagttgacttaaaactttctgtggcaacttctggttttctgacagttcccagtgagagaaatgctgaaagtacactgggatcactgggacactgtcttatgaaggtttgcttgggatgaaaaaggatattgcagcttcagcagtgttgaactgtgtgtttaaaaatgtgaattactgttattgtatactgtaattgattacatgggctgggggggtgtcaaagaacttgacaggttgtgttgatgctcttagttgagtcttgaaaagtaaatattaacgctacagaaatgcatgagtttcaatatattttttgtctttgtttgcattgtataactttaacgagtgagtttaaaattatttaatttccttagaaaaataacaccatttggaaaaaaaaactggtgttatgaagaacgtaaatgcactgtttttatttttattttatataatttaaattgactttcccactgtctttaagttgaaactgttaagctgaataaaaacttaagctgcaaattgataacttcgctacataacaaggaaaatataaatgtttacaaacagcttaaagatttgcatgtgcagtgtgcatttataacaaacttctaattgcacaaaacccatgccagctcagagtttaggtgtacacatttacccagttgagcgttcttagaataactactgcacaagttgacaataggtcgttctctctttttttttgtttgctccctttttctttttctccccttcctccttaccctccctcccttactctccccccccaccaccaccctccacccccaactcatgaaaagattctatggactgaaaaagccccaggctgaaaggactggactgccttgattgacatggggaagggggttagtagactatgtggattgcggcagcagaggctgcagcctaacgtgtggttttaatgaccagcacgcaaggcaaaagcattttgcacagtgtttgttttcctgtcttgcacttacaaataaggtctatgggagtagcatggaaaacgtttgctgtttttcccttttttttttaattgcttttgtttaaaatttgatcgccttaactactgtaaacatagcctatttttgtgcttaagatactgaatggaaaactccattgtgtgttgctggactgttttggaaatatttggttaaatgtgtgttaatttggctgtaatggcatttaaagcaaacaaacaaacaaaaaaagctgtgaaaatggccttggagcattatctttagttacttgaagagtttctagtttttttaaaatacagtttatgttaaaataatttttattaatttagagaagacaatcaatgtctgtgagaaaacggactttcttttggattttctttttgtggtcattgtgagtgattgctttttccttttcttagtttcacattcttcctttgttctaaaacttagactgacatctagctttgacaatcatagtatgttttattttcctgagggggaataacttataatgctgtttagttttgtactattggtgtgttggtgaatttttaaactgtgtgctaactgcaataaattatatgaactgagaa

SEQ ID NO: 2828 - protein, 522 aa, Homo sapiens; identical to SEQ ID NO: 181

SEQ ID NO: 2829 - DNA, 4270 bp, Homo sapiens
gttgtttgctaatttctggactaattatgcaatttcatttttttttcttgattcagccaaatgtgtgtgtgtgtgtttaaactgtgctttctaagcacagtcaggtagcaaaagtaataaaaaggatggttgaacaagttttcttgtatgttccaggatatgtttgggacttttctttgtttattatatgagttgttccctttgaaattaaagctattttgtaggttttgtgggacataatttgataagtagagttaattaaatttcttctggaagagatctaaattcttattcttagtgagagactgtagttaaaggaaggcttttagaacttgggttcaaggaagatggagatgcgtcggaagctctttggcgggggtgaggaagttcagaaagtgtgcattttccttctggcatttaggtcttgtccgtgtgatttggtggtgcttgggtcataagcctgattaaaattcagggacatgtaccacggcggccaaagcggaattaatttttttatatggggactggagcgctgaaaagttgttcctgaccaggctctaatgagaaattcctctctccccaggttatgaagacagtatggagtttccagaccatagtagacatttgctacagtgtctgagcgagcagagacaccagggttttctttgtgactgcactgttctggtgggagatgcccagttccgagcgcaccgagctgtactggcttcatgcagcatgtatttccacctcttttacaaggaccagctggacaaaagagacattgttcatctgaacagcgacattgttacagcccccgctttcgctctcctgcttgaattcatgtatgaagggaaactccagttcaaagacttgcccattgaagacgtgctagcagctgccagttatctccacatgtatgacattgtcaaagtctgcaaaaagaagctgaaagagaaagccaccacggaggcagacagcaccaaaaaggaagaagatgcttcaagttgttcggacaaagtcgagagtctctccgatggcagcagccacatagcaggcgatttgcccagtgatgaagatgaaggagaagatgaaaaattgaacatcctgcccagcaaaagggacttggcggccgagcctgggaacatgtggatgcgattgccctcagactcagcaggcatcccccaggctggcggagaggcagagccacacgccacagcagctggaaaaacagtagccagcccctgcagctcaacagagtctttgtcccagaggtctgtcacctccgtgagggattcggcagatgttgactgtgtgctggacctgtctgtcaagtccagcctttcaggagttgaaaatctgaacagctcttatttctcttcacaggacgtgctgagaagcaacctggtgcaggtgaaggtggagaaagaggcttcctgtgatgagagtgatgttggcactaatgactatgacatggaacatagcactgtgaaagaaagtgtgagcactaataacagggtacagtatgagccggcccatctggctcccctgagggaggactcggtcttgagggagctggaccgggaggacaaagccagtgatgatgagatgatgaccccagagagcgagcgtgtccaggtggagggaggcatggagagcagtctgctcccctacgtctccaacatcctgagccccgcgggccagatcttcatgtgccccctgtgcaacaaggtcttccccagcccccacatcctgcagatccacctgagcacgcacttccgcgagcaggacggcatccgcagcaagcccgccgccgatgtcaacgtgcccacgtgctcgctgtgtgggaagactttctcttgcatgtacaccctcaagcgccacgagaggactcactcgggggagaagccctacacatgcacccagtgcggcaagagcttccagtactcgcacaacctgagccgccatgccgtggtgcacacccgcgagaagccgcacgcctgcaagtggtgcgagcgcaggttcacgcagtccggggacctgtacagacacattcgcaagttccactgtgagttggtgaactccttgtcggtcaaaagcgaagcactgagcttgcctactgtcagagactggaccttagaagatagctctcaagaactttggaaataattttatatatatataaataatatatatatatatacatatatataaatagatctctatatagttgtggtacggtctaaaagcagtcttgtttcctggaaataaaaagttgggatattaacttgtttttgcactttagaatagcatgagaatctcactaatttagcattctgataaaagaaactttagagcaagtcagaatagagaggtgtttttcctttgaggggataggggaagtaagccaataagaaccttttaaacaaatcgtcctgtcacaaaatgctttcatatggcttaattttgtcaacactgcattgtcttttgagctcttttttcccccccaacaaagtttttttgttttttgtttttttttttaagtagaaattccctccagttttattagcctctttatatgtctcaaattgcatgaattttttctggctgttggaaacctgaatgcttttagacccaaatggaaaatttctgaaatgctggattatctatttttaaacaagcagttgacttaaaactttctgtggcaacttctggttttctgacagttcccagtgagagaaatgctgaaagtacactgggatcactgggacactgtcttatgaaggtttgcttgggatgaaaaaggatattgcagcttcagcagtgttgaactgtgtgtttaaaaatgtgaattactgttattgtatactgtaattgattacatgggctgggggggtgtcaaagaacttgacaggttgtgttgatgctcttagttgagtcttgaaaagtaaatattaacgctacagaaatgcatgagtttcaatatattttttgtctttgtttgcattgtataactttaacgagtgagtttaaaattatttaatttccttagaaaaataacaccatttggaaaaaaaaactggtgttatgaagaacgtaaatgcactgtttttatttttattttatataatttaaattgactttcccactgtctttaagttgaaactgttaagctgaataaaaacttaagctgcaaattgataacttcgctacataacaaggaaaatataaatgtttacaaacagcttaaagatttgcatgtgcagtgtgcatttataacaaacttctaattgcacaaaacccatgccagctcagagtttaggtgtacacatttacccagttgagcgttcttagaataactactgcacaagttgacaataggtcgttctctctttttttttgtttgctccctttttctttttctccccttcctccttaccctccctcccttactctccccccccaccaccaccctccacccccaactcatgaaaagattctatggactgaaaaagccccaggctgaaaggactggactgccttgattgacatggggaagggggttagtagactatgtggattgcggcagcagaggctgcagcctaacgtgtggttttaatgaccagcacgcaaggcaaaagcattttgcacagtgtttgttttcctgtcttgcacttacaaataaggtctatgggagtagcatggaaaacgtttgctgtttttcccttttttttttaattgcttttgtttaaaatttgatcgccttaactactgtaaacatagcctatttttgtgcttaagatactgaatggaaaactccattgtgtgttgctggactgttttggaaatatttggttaaatgtgtgttaatttggctgtaatggcatttaaagcaaacaaacaaacaaaaaaagctgtgaaaatggccttggagcattatctttagttacttgaagagtttctagtttttttaaaatacagtttatgttaaaataatttttattaatttagagaagacaatcaatgtctgtgagaaaacggactttcttttggattttctttttgtggtcattgtgagtgattgctttttccttttcttagtttcacattcttcctttgttctaaaacttagactgacatctagctttgacaatcatagtatgttttattttcctgagggggaataacttataatgctgtttagttttgtactattggtgtgttggtgaatttttaaactgtgtgctaactgcaataaattatatgaactgag

SEQ ID NO: 2830 - protein, 522 aa, Homo sapiens; identical to SEQ ID NO: 181

SEQ ID NO: 2831 - DNA, 4160 bp, Homo sapiens
gttgtttgctaatttctggactaattatgcaatttcatttttttttcttgattcagccaaatgtgtgtgtgtgtgtttaaactgtgctttctaagcacagtcaggtagcaaaagtaataaaaaggatggttgaacaagttttcttgtatgttccaggatatgtttgggacttttctttgtttattatatgagttgttccctttgaaattaaagctattttgtaggttttgtgggacataatttgataagtagagttaattaaatttcttctggaagagatctaaattcttattcttagtgagagactgtagttaaaggaaggcttttagaacttgggttcaaggaagatggagatgcgtcggaagctctttggcgggggtgaggaagttcagaaagtgtgcattttccttctggcatttaggtcttgtccgtgtgatttggtggtgcttgggtcataagcctgattaaaattcagggacatgtaccacggcggccaaagcggaattaatttttttatatggggactggagcgctgaaaagttgttcctgaccaggctctaatgagaaattcctctctccccaggttatgaagacagtatggagtttccagaccatagtagacatttgctacagtgtctgagcgagcagagacaccagggttttctttgtgactgcactgttctggtgggagatgcccagttccgagcgcaccgagctgtactggcttcatgcagcatgtatttccacctcttttacaaggaccagctggacaaaagagacattgttcatctgaacagcgacattgttacagcccccgctttcgctctcctgcttgaattcatgtatgaagggaaactccagttcaaagacttgcccattgaagacgtgctagcagctgccagttatctccacatgtatgacattgtcaaagtctgcaaaaagaagctgaaagagaaagccaccacggaggcagacagcaccaaaaaggaagaagatgcttcaagttgttcggacaaagtcgagagtctctccgatggcagcagccacatagcaggcgatttgcccagtgatgaagatgaaggagaagatgaaaaattgaacatcctgcccagcaaaagggacttggcggccgagcctgggaacatgtggatgcgattgccctcagactcagcaggcatcccccaggctggcggagaggcagagccacacgccacagcagctggaaaaacagtagccagcccctgcagctcaacagagtctttgtcccagaggacgtgctgagaagcaacctggtgcaggtgaaggtggagaaagaggcttcctgtgatgagagtgatgttggcactaatgactatgacatggaacatagcactgtgaaagaaagtgtgagcactaataacagggtacagtatgagccggcccatctggctcccctgagggaggactcggtcttgagggagctggaccgggaggacaaagccagtgatgatgagatgatgaccccagagagcgagcgtgtccaggtggagggaggcatggagagcagtctgctcccctacgtctccaacatcctgagccccgcgggccagatcttcatgtgccccctgtgcaacaaggtcttccccagcccccacatcctgcagatccacctgagcacgcacttccgcgagcaggacggcatccgcagcaagcccgccgccgatgtcaacgtgcccacgtgctcgctgtgtgggaagactttctcttgcatgtacaccctcaagcgccacgagaggactcactcgggggagaagccctacacatgcacccagtgcggcaagagcttccagtactcgcacaacctgagccgccatgccgtggtgcacacccgcgagaagccgcacgcctgcaagtggtgcgagcgcaggttcacgcagtccggggacctgtacagacacattcgcaagttccactgtgagttggtgaactccttgtcggtcaaaagcgaagcactgagcttgcctactgtcagagactggaccttagaagatagctctcaagaactttggaaataattttatatatatataaataatatatatatatatacatatatataaatagatctctatatagttgtggtacggtctaaaagcagtcttgtttcctggaaataaaaagttgggatattaacttgtttttgcactttagaatagcatgagaatctcactaatttagcattctgataaaagaaactttagagcaagtcagaatagagaggtgtttttcctttgaggggataggggaagtaagccaataagaaccttttaaacaaatcgtcctgtcacaaaatgctttcatatggcttaattttgtcaacactgcattgtcttttgagctcttttttcccccccaacaaagtttttttgttttttgtttttttttttaagtagaaattccctccagttttattagcctctttatatgtctcaaattgcatgaattttttctggctgttggaaacctgaatgcttttagacccaaatggaaaatttctgaaatgctggattatctatttttaaacaagcagttgacttaaaactttctgtggcaacttctggttttctgacagttcccagtgagagaaatgctgaaagtacactgggatcactgggacactgtcttatgaaggtttgcttgggatgaaaaaggatattgcagcttcagcagtgttgaactgtgtgtttaaaaatgtgaattactgttattgtatactgtaattgattacatgggctgggggggtgtcaaagaacttgacaggttgtgttgatgctcttagttgagtcttgaaaagtaaatattaacgctacagaaatgcatgagtttcaatatattttttgtctttgtttgcattgtataactttaacgagtgagtttaaaattatttaatttccttagaaaaataacaccatttggaaaaaaaaactggtgttatgaagaacgtaaatgcactgtttttatttttattttatataatttaaattgactttcccactgtctttaagttgaaactgttaagctgaataaaaacttaagctgcaaattgataacttcgctacataacaaggaaaatataaatgtttacaaacagcttaaagatttgcatgtgcagtgtgcatttataacaaacttctaattgcacaaaacccatgccagctcagagtttaggtgtacacatttacccagttgagcgttcttagaataactactgcacaagttgacaataggtcgttctctctttttttttgtttgctccctttttctttttctccccttcctccttaccctccctcccttactctccccccccaccaccaccctccacccccaactcatgaaaagattctatggactgaaaaagccccaggctgaaaggactggactgccttgattgacatggggaagggggttagtagactatgtggattgcggcagcagaggctgcagcctaacgtgtggttttaatgaccagcacgcaaggcaaaagcattttgcacagtgtttgttttcctgtcttgcacttacaaataaggtctatgggagtagcatggaaaacgtttgctgtttttcccttttttttttaattgcttttgtttaaaatttgatcgccttaactactgtaaacatagcctatttttgtgcttaagatactgaatggaaaactccattgtgtgttgctggactgttttggaaatatttggttaaatgtgtgttaatttggctgtaatggcatttaaagcaaacaaacaaacaaaaaaagctgtgaaaatggccttggagcattatctttagttacttgaagagtttctagtttttttaaaatacagtttatgttaaaataatttttattaatttagagaagacaatcaatgtctgtgagaaaacggactttcttttggattttctttttgtggtcattgtgagtgattgctttttccttttcttagtttcacattcttcctttgttctaaaacttagactgacatctagctttgacaatcatagtatgttttattttcctgagggggaataacttataatgctgtttagttttgtactattggtgtgttggtgaatttttaaactgtgtgctaactgcaataaattatatgaactgagaa

SEQ ID NO: 2832 - protein, 227 aa, Homo sapiens
MEFPDHSRHLLQCLSEQRHQGFLCDCTVLVGDAQFRAHRAVLASCSMYFHLFYKDQLDKRDIVHLNSDIVTAPAFALLLEFMYEGKLQFKDLPIEDVLAAASYLHMYDIVKVCKKKLKEKATTEADSTKKEEDASSCSDKVESLSDGSSHIAGDLPSDEDEGEDEKLNILPSKRDLAAEPGNMWMRLPSDSAGIPQAGGEAEPHATAAGKTVASPCSSTESLSQRTC

SEQ ID NO: 2833 - DNA, 3580 bp, Homo sapiens
gctatacacatctcatatcacttacattgtacttgtgattcttttctcaaatcccaaatctctcaaagccctttcaaatttctatctgattaactagtccaaaggctaagttggatacagatattttttctcttcaggctgaagaaatcaagactgaaagcgttggttcatgtttactcttgtatcataagtatttttaaaagtatgattaatatatataataacaaaccagcacagctcccctgggaggcacacatattaaaatgatttacccggagatttaaatgatttactccactctcaccaggagaaggtggcccatgccagagcccacctcagagcatctcaatctcaggccttgcctcatctatgtgctcttttatgtgcaggtgcagcccacgttgtggtgtaatgcaaatctatggctatactgtatcacagcgaataaatccatttggagaaaaaggcacctggtgaaaggccacagtgcaatggaatgcaatgctgctatgtgcaatgctgcttacaagaaaactttgggtaaatattgcacgggtcaaacttacgatccaactttttcacgtaacagggccgcgtattggatgccttcagaattcccattcagcgtgtccactttgctctttgatgcaatgccacctcacaaaagcattcaagccacagtcatctatttttttccttctttctccccttgctataatgacccaaatctccgtttttactttgtaatttttgtaagttttttaaggcaatgactataataattcatgtttagtgaaataattcttttggttgatatatttcacagtttggtctctaaaaaaagttaaaaaacaacaacaagaaccaaaaacaaacaaccccccgccccaagcttccctctgcttgatgccatagacaagagtccaaaggacattagctgctccattgcacacattggaagggagagtttgctgtgagctcagtccttctaatagactggcaattttgtaaaagatttagagaattttgtttaaccatttctgcatgtgtttttaatgagctcatgatggtttctaacaaaggccaggttgtgtgttttccagcactttctgacctgattcctccctgctgacttggggagtgggcacctgtgcttctctcctggctcacctatgggagtcggggtggtggggccatctccgggcctgtcttcacgccagggatgaatcatgtagtaggcagagtggaaggagtctctttgttgacagctttccatctggactttggatacggctgatcgttcatgtagagccgtggttagctggaaggggctacgcgagtcagctcctccttaagggatcaagggtgtgtaaaacatcaggaaagaactgcctgggatttcatttgcaaagcttagagaagcattttatcctctgagtttcaggtagccagggttgtgaatgtgtatgactgcagctttgacaggtcggtctttaatagtcaataggatcatttatagcctcgttcagataatccaactggagtacacctgaataaatacatcaagttcaggtggctaaaagctaaccccttttgagtttaataattaaaataaacagagctatgaagatgaatttcagtttgtcatgcataaatgtaagaagctccataaaggatggtgttctgtgattcatataggagtatgatggatgtatgatacgttttccacagctatttaagaaaaaacgattatcttagtcatggggtaaagttatgtgaagcattgcaccatccaggctgtgtctgggccagtacagattttttttctttttctttttctttctttcttttttttttttttgtgaaagattacttcttggcaaactagatatgcaaacgccagaatacagtaaaaccacatttaattggacctacttgccaacttcttgaacacagcttggattattccactggaggctgcttctgttaaaagctgggggaggaggaagtggcatattgacaagacttcagataatttttttttcactcgaagtacaattatgcaatgagccaagtttggaagtattttactatgtttaataattattattaaagatattgtaaaacatatgcatttgttaagtggaatgtaatgggagtaaaatcatgtcatcaattttcctttggatttattttcccattttgtgttttatttgacagccttccaaattgattctagccaaaaccatgcactctaatatatatcatacttgatattaaagtgagaatgcgagtaatttatagaatctgagtgagaacagttttcttctcttagccagcctatatggagctgccacctctgctcaggtagcaaccgacacatgccttgtacacagaaaggaaaataataggggtcgagaaatcctccacacatccttcctgatagacactccaaaacccacatatcccaggcattgttcagtgggagatcaggggcaaggagaaggataactatttctttatgtgtgtgtgaatctagaggaaccagacttgtctctggaaatgcaagtgggaagtgggattcactgagaagccatcattctgctcaggtgagtcctgacttcaggcgagggatcctaaaggtgacaccgcgatccttcacctggaaagccaaggagacatgacatcagtgtgtttcacatcctaagcttaaacaaatgtatattgtttttaccgcctctttctcaagggggaacactgcccctgaaactgcactccttgaaaccgagcaaaggtgccatcgctaatgattagcaagacgctccggatggtttgcatcgaactccacctgctatgtgaaaaccccatgcttttctcactttcccattcaagctgcttagcagttgggtcctctcctctgagtgtggttatgtgtcagtttgacttctgtgtgccctgcgatttcgttgttttcttctgccctgccacagcaaatgaccagtggaggcaaccagcggacggaggaaaagggcaggtccctgcatccatctcagcgccctgcagccggcggcctgtcctttcaggcgggagttcccagcggcgttcctaggtgttttgaatgtgtgccccggggctgggggaagcctcgtgcagttctgctgctgtgggaggcaggggggactggaggggacgggagcagtgtgaggctttcatgtgcagaggggacatgaggacatctggatggcatccctgtgagcagggctcccgctgcaggcctttgaaaaccccgctgccctggctccccagtgccttggaactttctccctggagaatgcagaaaagccagtgcccttgatttcttagacatctacagcttcgacacgtgcagggttatccaggagcagtgaggtttggggtgagggcctgagcactttctgaaaagtgcttgtttctaagaacctggaactatgagtgaggagtgacatgagttctgccctcaagtcctctgataaccagctgtgcagtcttgaacaagtgacttcatctcttcatctttaaaataaaccttttgggccaaatg

SEQ ID NO: 2834 - protein, 162 aa, Homo sapiens
MIYSTLTRRRWPMPEPTSEHLNLRPCLIYVLFYVQVQPTLWCNANLWLYCITANKSIWRKRHLVKGHSAMECNAAMCNAAYKKTLGKYCTGQTYDPTFSRNRAAYWMPSEFPFSVSTLLFDAMPPHKSIQATVIYFFPSFSPCYNDPNLRFYFVIFVSFLRQ

SEQ ID NO: 2835 - DNA, 1531 bp, Homo sapiens
tttctctgctgcaacacccctactgttctccgtgtattggcttttctgggcagcagaatcttgctctgtcacccaggctggagtgcagtggcatgatcatagctcactgtagccgtgaactcctgggctcaagggatcctcctaccacttgccccaacttggactatagcgttagggaacaaaggaaggaaaagctgatgcgatgctctcagtgccgcgtcgccaaatactgtagtgctaagtgtcagaaaaaagcttggccagaccacaagcgggaatgcaaatgccttaaaagctgcaaacccagatatcctccagactccgttcgacttcttggcagagttgtcttcaaacttatggatggagcaccttcagaatcagagaagctttactcattttatgatctggagtcaaatattaacaaactgactgaagataagaaagagggcctcaggcaactcgtaatgacatttcaacatttcatgagagaagaaatacaggatgcctctcagctgccacctgcctttgacctttttgaagcctttgcaaaagtgatctgcaactctttcaccatctgtaatgcggagatgcaggaagttggtgttggcctatatcccagtatctctttgctcaatcacagctgtgaccccaactgttcgattgtgttcaatgggccccacctcttactgcgagcagtccgagacatcgaggtgggagaggagctcaccatctgctacctggatatgctgatgaccagtgaggagcgccggaagcagctgagggaccagtactgctttgaatgtgactgtttccgttgccaaacccaggacaaggatgctgatatgctaactggtgatgagcaagtatggaaggaagttcaagaatccctgaaaaaaattgaagaactgaaggcacactggaagtgggagcaggttctggccatgtgccaggcaatcataagcagcaattctgaacggcttcccgatatcaacatctaccagctgaaggtgctcgactgcgccatggatgcctgcatcaacctcggcctgttggaggaagccttgttctatggtactcggaccatggagccatacaggcaagatttttttcccaggaagccatcccgtcagaggggttcaagtgatgaaagttggcaaactgcagctacatcaaggcatgtttccccaagcaatgaagaatctgagactggcttttgatattatgagagtgacacatggcagagaacacagcctgattgaagatttgattctacttttagaagaatgcgacgccaacatcagagcatcctaagggaacgcagtcagagggaaatacggcgtgtgtctttgttgaatgccttattgaggtcacacactctatgctttgttagctgtgtgaacctctcctattggaaattctgttccgtgtttgtgtaggtaaataaaggcagacatggtttgcaaaccacaagaatcattagttgtagagaagcacgattataataaattcaaaacatttggttgaggatgcc

SEQ ID NO: 2836 - protein, 374 aa, Homo sapiens
MIIAHCSRELLGSRDPPTTCPNLDYSVREQRKEKLMRCSQCRVAKYCSAKCQKKAWPDHKRECKCLKSCKPRYPPDSVRLLGRVVFKLMDGAPSESEKLYSFYDLESNINKLTEDKKEGLRQLVMTFQHFMREEIQDASQLPPAFDLFEAFAKVICNSFTICNAEMQEVGVGLYPSISLLNHSCDPNCSIVFNGPHLLLRAVRDIEVGEELTICYLDMLMTSEERRKQLRDQYCFECDCFRCQTQDKDADMLTGDEQVWKEVQESLKKIEELKAHWKWEQVLAMCQAIISSNSERLPDINIYQLKVLDCAMDACINLGLLEEALFYGTRTMEPYRQDFFPRKPSRQRGSSDESWQTAATSRHVSPSNEESETGF

SEQ ID NO: 2837 - DNA, 1464 bp, Homo sapiens
gaggtggatttgagagatacctcccctccttctgctcagctgccttgcagtaattaaactctttctctgctgcaacacccctactgttctccgtgtattggcttttctgggcagcaggaaggaaaagctgatgcgatgctctcagtgccgcgtcgccaaatactgtagtgctaagtgtcagaaaaaagcttggccagaccacaagcgggaatgcaaatgccttaaaagctgcaaacccagatatcctccagactccgttcgacttcttggcagagttgtcttcaaacttatggatggagcaccttcagaatcagagaagctttactcattttatgatctggagtcaaatattaacaaactgactgaagataagaaagagggcctcaggcaactcgtaatgacatttcaacatttcatgagagaagaaatacaggatgcctctcagctgccacctgcctttgacctttttgaagcctttgcaaaagtgatctgcaactctttcaccatctgtaatgcggagatgcaggaagttggtgttggcctatatcccagtatctctttgctcaatcacagctgtgaccccaactgttcgattgtgttcaatgggccccacctcttactgcgagcagtccgagacatcgaggtgggagaggagctcaccatctgctacctggatatgctgatgaccagtgaggagcgccggaagcagctgagggaccagtactgctttgaatgtgactgtttccgttgccaaacccaggacaaggatgctgatatgctaactggtgatgagcaagtatggaaggaagttcaagaatccctgaaaaaaattgaagaactgaaggcacactggaagtgggagcaggttctggccatgtgccaggcaatcataagcagcaattctgaacggcttcccgatatcaacatctaccagctgaaggtgctcgactgcgccatggatgcctgcatcaacctcggcctgttggaggaagccttgttctatggtactcggaccatggagccatacaggcaagatttttttcccaggaagccatcccgtcagaggggttcaagtgatgaaagttggcaaactgcagctacatcaaggcatgtttccccaagcaatgaagaatctgagactggcttttgatattatgagagtgacacatggcagagaacacagcctgattgaagatttgattctacttttagaagaatgcgacgccaacatcagagcatcctaagggaacgcagtcagagggaaatacggcgtgtgtctttgttgaatgccttattgaggtcacacactctatgctttgttagctgtgtgaacctctcctattggaaattctgttccgtgtttgtgtaggtaaataaaggcagacatggtttgcaaaccacaagaatcattagttgtagagaagcacgattataataaattcaaaacatttggttgaggatgcc

SEQ ID NO: 2838 - protein, 339 aa, Homo sapiens
MRCSQCRVAKYCSAKCQKKAWPDHKRECKCLKSCKPRYPPDSVRLLGRVVFKLMDGAPSESEKLYSFYDLESNINKLTEDKKEGLRQLVMTFQHFMREEIQDASQLPPAFDLFEAFAKVICNSFTICNAEMQEVGVGLYPSISLLNHSCDPNCSIVFNGPHLLLRAVRDIEVGEELTICYLDMLMTSEERRKQLRDQYCFECDCFRCQTQDKDADMLTGDEQVWKEVQESLKKIEELKAHWKWEQVLAMCQAIISSNSERLPDINIYQLKVLDCAMDACINLGLLEEALFYGTRTMEPYRQDFFPRKPSRQRGSSDESWQTAATSRHVSPSNEESETGF

SEQ ID NO: 2839 - DNA, 1678 bp, Homo sapiens
agaggagaaagaatgtgaatgctcattgctggtcatttttttttcctgtgctatgccatcttaattgttcatagctcttctcttttaagaaagcttatgtgagagccacaattgtatcagagaacattattacataattatacagccttccctttcccttaaatggtcctttaaggctttacatctgcaatagagatagcttagtgaatattcttccaaataagtttttttagtttcatttttagattagccttttgtatttgcgtaaaacagtgcttttggtaaatgttgtgtatttaaggggaagaacaggatacttctgggggctgaggaaggaaaagctgatgcgatgctctcagtgccgcgtcgccaaatactgtagtgctaagtgtcagaaaaaagcttggccagaccacaagcgggaatgcaaatgccttaaaagctgcaaacccagatatcctccagactccgttcgacttcttggcagagttgtcttcaaacttatggatggagcaccttcagaatcagagaagctttactcattttatgatctggagtcaaatattaacaaactgactgaagataagaaagagggcctcaggcaactcgtaatgacatttcaacatttcatgagagaagaaatacaggatgcctctcagctgccacctgcctttgacctttttgaagcctttgcaaaagtgatctgcaactctttcaccatctgtaatgcggagatgcaggaagttggtgttggcctatatcccagtatctctttgctcaatcacagctgtgaccccaactgttcgattgtgttcaatgggccccacctcttactgcgagcagtccgagacatcgaggtgggagaggagctcaccatctgctacctggatatgctgatgaccagtgaggagcgccggaagcagctgagggaccagtactgctttgaatgtgactgtttccgttgccaaacccaggacaaggatgctgatatgctaactggtgatgagcaagtatggaaggaagttcaagaatccctgaaaaaaattgaagaactgaaggcacactggaagtgggagcaggttctggccatgtgccaggcaatcataagcagcaattctgaacggcttcccgatatcaacatctaccagctgaaggtgctcgactgcgccatggatgcctgcatcaacctcggcctgttggaggaagccttgttctatggtactcggaccatggagccatacaggcaagatttttttcccaggaagccatcccgtcagaggggttcaagtgatgaaagttggcaaactgcagctacatcaaggcatgtttccccaagcaatgaagaatctgagactggcttttgatattatgagagtgacacatggcagagaacacagcctgattgaagatttgattctacttttagaagaatgcgacgccaacatcagagcatcctaagggaacgcagtcagagggaaatacggcgtgtgtctttgttgaatgccttattgaggtcacacactctatgctttgttagctgtgtgaacctctcctattggaaattctgttccgtgtttgtgtaggtaaataaaggcagacatggtttgcaaaccacaagaatcattagttgtagagaagcacgattataataaattcaaaacatttggttgaggatgcc

SEQ ID NO: 2840 - protein, 339 aa, Homo sapiens; identical to SEQ ID NO: 2838

SEQ ID NO: 2841 - DNA, 1636 bp, Homo sapiens
ccgcgcccgccccgcccctcgggcgtacgtgtgcgcgcagggcgcaggcgcgcgggtcccggcagcccgtgagacgcccgctgctggacgcgggtagccgtctgaggtgccggagctgcgggaggatggagccgctgaaggtggaaaagttcgcaaccgccaagaggggaaacgggctgcgcgccgtgaccccgctgcgccccggagagctactcttccgctcggatcccttggcgtacacggtgtgcaaggggagtcgtggcgtcgtctgcgaccgctgccttctcgggaaggaaaagctgatgcgatgctctcagtgccgcgtcgccaaatactgtagtgctaagtgtcagaaaaaagcttggccagaccacaagcgggaatgcaaatgccttaaaagctgcaaacccagatatcctccagactccgttcgacttcttggcagagttgtcttcaaacttatggatggagcaccttcagaatcagagaagctttactcattttatgatctggagtcaaatattaacaaactgactgaagataagaaagagggcctcaggcaactcgtaatgacatttcaacatttcatgagagaagaaatacaggatgcctctcagctgccacctgcctttgacctttttgaagcctttgcaaaagtgatctgcaactctttcaccatctgtaatgcggagatgcaggaagttggtgttggcctatatcccagtatctctttgctcaatcacagctgtgaccccaactgttcgattgtgttcaatgggccccacctcttactgcgagcagtccgagacatcgaggtgggagaggagctcaccatctgctacctggatatgctgatgaccagtgaggagcgccggaagcagctgagggaccagtactgctttgaatgtgactgtttccgttgccaaacccaggacaaggatgctgatatgctaactggtgatgagcaagtatggaaggaagttcaagaatccctgaaaaaaattgaagaactgaaggcacactggaagtgggagcaggttctggccatgtgccaggcaatcataagcagcaattctgaacggcttcccgatatcaacatctaccagctgaaggtgctcgactgcgccatggatgcctgcatcaacctcggcctgttggaggaagccttgttctatggtactcggaccatggagccatacaggcaagatttttttcccaggaagccatcccgtcagaggggttcaagtgatgaaagttggcaaactgcagctacatcaaggcatgtttccccaagcaatgaagaatctgagactggcttttgatattatgagagtgacacatggcagagaacacagcctgattgaagatttgattctacttttagaagaatgcgacgccaacatcagagcatcctaagggaacgcagtcagagggaaatacggcgtgtgtctttgttgaatgccttattgaggtcacacactctatgctttgttagctgtgtgaacctctcctattggaaattctgttccgtgtttgtgtaggtaaataaaggcagacatggtttgcaaaccacaagaatcattagttgtagagaagcacgattataataaattcaaaacatttggttgaggatgcc

SEQ ID NO: 2842 - protein, 398 aa, Homo sapiens
MEPLKVEKFATAKRGNGLRAVTPLRPGELLFRSDPLAYTVCKGSRGVVCDRCLLGKEKLMRCSQCRVAKYCSAKCQKKAWPDHKRECKCLKSCKPRYPPDSVRLLGRVVFKLMDGAPSESEKLYSFYDLESNINKLTEDKKEGLRQLVMTFQHFMREEIQDASQLPPAFDLFEAFAKVICNSFTICNAEMQEVGVGLYPSISLLNHSCDPNCSIVFNGPHLLLRAVRDIEVGEELTICYLDMLMTSEERRKQLRDQYCFECDCFRCQTQDKDADMLTGDEQVWKEVQESLKKIEELKAHWKWEQVLAMCQAIISSNSERLPDINIYQLKVLDCAMDACINLGLLEEALFYGTRTMEPYRQDFFPRKPSRQRGSSDESWQTAATSRHVSPSNEESETGF

SEQ ID NO: 2843 - DNA, 580 bp, Homo sapiens
cttagttactagaatgtttttctcaactatgaatctgacttcactccctttcttgaaaacctcctgtagttcctgttgtgtacgggataaaggtgcttaccatggggctgcgcaggtggaaagcagcccagtcttactatgaggatgtccgtttgccatctgggaacaaggaggaagaagcagagacctgggcaagacctcagagaataaattatctcaatggctacttacatggtccagcatagcagaaaaaaaagccacactgagcaagcagtggtcctttccatgctacacaagcaagaaatgcctataaagacagacttgagtgcagtctaaagaatcttttgctttgccttaacactctacttctggatatccttgctcaaaaagaagtctactcaagacagggaggttcctgtggacagaaacatctgcttcctgcttatcctgtatctcagcatctgaatggtcatgactggaacacaggcagacttcagaaataaatacataaatatctcatactcctcgaatcttttagaaaaagagtgtgggtaacaataaacatatctgctgagaaatg

SEQ ID NO: 2844 - protein, 47 aa, Homo sapiens
MGLRRWKAAQSYYEDVRLPSGNKEEEAETWARPQRINYLNGYLHGPA

SEQ ID NO: 2845 - DNA, 2550 bp, Homo sapiens
gaggcggaagcggaagtgagggagaaaagcaggaaggctccgctgttcgcatgcgcaggctctagtgtttacttccgcttgacctggcccggacgccagaaaatgttccacgtgggataccctgcgtggggttcactgtagtagctgcactaggtgattcttggagcgggcctgagagacaaggacatgtggatcccagtggtcgggcttcctcggcggctgaggctctccgccttggcgggcgctggtcgcttttgcattttagggtctgaagcggcgacgcgaaagcatttgccggcgaggaaccactgtgggctctctgactcctctccgcagctgtggcccgaaccggatttcaggaatccgccaaggaaggcgtctaaggccagcttagactttaagcgttacgtaaccgatcggagattggctgagaccctggcgcaaatctatttgggaaaaccaagtagacctccacacctactgctggagtgcaatccaggtcctggaatcctgactcaggcattacttgaagctggtgccaaagtggttgcgctcgaaagtgacaaaacttttattccacatttggagtccttaggaaaaaatctggatggaaaactacgagtgatccactgtgacttctttaaactagatcctagaagtggtggagtaataaaaccacctgctatgtcttctcgagggctctttaagaatttgggaatagaagcagttccttggacagcagacatccctttaaaagtagttggaatgttcccaagtagaggtgagaaaagggcactttggaaactcgcatatgacttgtattcctgtacttctatatataaatttggacgaatagaagtaaatatgtttattggtgaaaaagaattccagaaactaatggcagatcccggaaatccagacttgtatcatgtattaagtgttatctggcaattagcttgtgagattaaggttctgcacatggagccttggtcatcatttgatatatacacccggaaagggccgctggaaaacccaaagcgtagggaattattagaccaattacaacaaaagctgtatcttattcaaatgattcctcgtcaaaatttatttaccaagaacttaacacctatgaactataatatattttttcacttgttaaagcactgttttgggaggcgcagcgccactgtaatagaccacttacgttcattgactccacttgatgcgagagatatattgatgcaaataggaaaacaggaggatgagaaagtagttaacatgcaccctcaagacttcaaaacactttttgaaactatagagcgttccaaagattgtgcttataaatggctgtatgatgaaaccctggaagataggtagcaactagactgtcgtttttggtggagcggttcatttatttggaaactatgacatgaaaaccaaatttgaaaactcacatcctttcagcagaaggtaactgttcttgtcttgcacaagccaggcagatcatttctcctaagctgatatcattggcttattggatgaaacagtgtctgctattttattcacaattgaataaaatgaaaacttcaattaattgtggatttgatcagattgaattcgttttgtttcagattcctatttaaatatttcacttgtactgttgctgatttttgcatcttcttgaagagcaagagtctgtacattattaagcttagaaagtaagcaaaactgatttactggtttgcctttcagtttgttgaaatgtattgtcaagtactgtacaatgaaattgtttaaattttaatatgatttaagctttttagaaattaaaatattttaaataagaagattttgtggtttcttttggtctctaaatacctaatgaaacattaaactgaccctaatttactcctttttagttctgtcatgtagcgtcaatatagttttggtgaataattcagtctgtattactgaaaagtctgcacatttgttctatcaagaaaattcatctgaagttggatatgaacctaaatggaatttatgtgaacctaaatggaattaagaatattttcttggccaggcacagcggctcacgcctgtaatcccagcactttgggaggccaaggcgggcggatcacgaagtcaggagttcgagaccagcctggccaacacggtgaaaccccatctctactaaaagtacaaaaattagcctggtgtggtggtgggcacctgtaatcccagttactctggaggctgaggcaggagaatcgcttggacctgggaggcagaggttgcagtgagccgagatcataccactgcactccagcctgggtgacagagcaagactcagtctcggaaaaaaaaaaaaaaaaaaaagaatgttttcttgccaggaatggtggtgtgcacctgtagtcccagctactcaggaggtggaggagggaggacaactgagcccatgggtctagcctgggggcaacatggtgaaacccccatttctaaaaatattttataaaacagctgggcatggtggcaggttcctgtagtccc

SEQ ID NO: 2846 - protein, 396 aa, Homo sapiens; identical to SEQ ID NO: 187

SEQ ID NO: 2847 - DNA, 1848 bp, Homo sapiens
gaggcggaagcggaagtgagggagaaaagcaggaaggctccgctgttcgcatgcgcaggctctagtgtttacttccgcttgacctggcccggacgccagaaaatgttccacgtgggataccctgcgtggggttcactgtagtagctgcactaggtgattcttggagcgggcctgagagacaaggacatgtggatcccagtggtcgggcttcctcggcggctgaggctctccgccttggcgggcgctggtcgcttttgcattttagggtctgaagcggcgacgcgaaagcatttgccggcgaggaaccactgtgggctctctgactcctctccgcagctgtggcccgaaccggatttcaggaatccgccaaggaaggcgtctaaggccagcttagactttaagcgttacgtaaccgatcggagattggctgagaccctggcgcaaatctatttgggaaaaccaagtagacctccacacctactgctggagtgcaatccaggtcctggaatcctgactcaggcattacttgaagctggtgccaaagtggttgcgctcgaaagtgacaaaacttttattccacatttggagtccttaggaaaaaatctggatggaaaactacgagtgatccactgtgacttctttaaactagatcctagaagtggtggagtaataaaaccacctgctatgtcttctcgagggctctttaagaatttgggaatagaagcagttccttggacagcagacatccctttaaaagtagttggaatgttcccaagtagaggtgagaaaagggcactttggaaactcgcatatgacttgtattcctgtacttctatatataaatttggacgaatagaagtaaatatgtttattggtgaaaaagaattccagaaactaatggcagatcccggaaatccagacttgtatcatgtattaagtgttatctggcaattagcttgtgagattaaggttctgcacatggagccttggtcatcatttgatatatacacccggaaagggccgctggaaaacccaaagcgtagggaattattagaccaattacaacaaaagctgtatcttattcaaatgattcctcgtcaaaatttatttaccaagaacttaacacctatgaactataatatattttttcacttgttaaagcactgttttgggaggcgcagcgccactgtaatagaccacttacgttcattgactccacttgatgcgagagatatattgatgcaaataggaaaacaggaggatgagaaagtagttaacatgcaccctcaagacttcaaaacactttttgaaactatagagcgttccaaagattgtgcttataaatggctgtatgatgaaaccctggaagataggtagcaactagactgtcgtttttggtggagcggttcatttatttggaaactatgacatgaaaaccaaatttgaaaactcacatcctttcagcagaaggtaactgttcttgtcttgcacaagccaggcagatcatttctcctaagctgatatcattggcttattggatgaaacagtgtctgctattttattcacaattgaataaaatgaaaacttcaattaattgtggatttgatcagattgaattcgttttgtttcagattcctatttaaatatttcacttgtactgttgctgatttttgcatcttcttgaagagcaagagtctgtacattattaagcttagaaagtaagcaaaactgatttactggtttgcctttcagtttgttgaaatgtattgtcaagtactgtacaatgaaattgtttaaattttaatatgatttaagctttttagaaattaaaatattttaaataagaag

SEQ ID NO: 2848 - protein, 396 aa, Homo sapiens; identical to SEQ ID NO: 187

SEQ ID NO: 2849 - DNA, 407 bp, Homo sapiens
tcaaattcctggcctcaagcaatccaccttgcttggcctcccaaagtgctggggttacaggcatgagccactgcacctggccatccatgtaatttgtatgtagggctgatgcacacacctctgtaagtagtgctggggttacaggcgggagccaccatgcctggccatccatgtaatttgtgtgtaggcctgatgcccacacttctgtaagtacagctcaggttaccagcatgagccactgcgcctggccatctatgtaatttgtatgtagggatgatgcatacatctctgtaatccgagcatttttgtgaggccaaggtgggaggatcacttgaggaggccggggattggaggctgtagtgagccataaactcaccactgcattgcagtgtgggacacagagcaag

SEQ ID NO: 2850 - protein, 30 aa, Homo sapiens [sequence omitted]

SEQ ID NO: 2851 - DNA, 693 bp, Homo sapiens
gaggcggaagcggaagtgagggagaaaagcaggaaggctccgctgttcgcatgcgcaggctctagtgtttacttccgcttgacctggcccggacgccagaaaatgttccacgtgggataccctgcgtggggttcactgtagtagctgcactaggtgattcttggagcgggcctgagagacaaggacatgtggatcccagtggtcgggcttcctcggcggctgaggctctccgccttggcgggcgctggtcgcttttgcattttagggtctgaagcggcgacgcgaaagcatttgccggcgaggaaccactgtgggctctctgactcctctccgcagctgtggcccgaaccggatttcaggaatccgccaaggaaggcgtctaaggccagcttagactttaagcgttacgtaaccgatcggagattggctgagaccctggcgcaaatctatttgggaaaaccaagtagacctccacacctactgctggagtgcaatccaggtcctggaatcctgactcaggcattacttgaagctggtgccaaagtggttgcgctcgaaagtgacaaaacttttattccacatttggaggtatatttttagtttctcaacgtatgttattgtttgttcaactatctgtgagtggtttaaggaaatggaattaagcacacagtgttttacatagaatatctttta

SEQ ID NO: 2852 - protein, 137 aa, Homo sapiens
MWIPVVGLPRRLRLSALAGAGRFCILGSEAATRKHLPARNHCGLSDSSPQLWPEPDFRNPPRKASKASLDFKRYVTDRRLAETLAQIYLGKPSRPPHLLLECNPGPGILTQALLEAGAKVVALESDKTFIPHLEVYF

SEQ ID NO: 2853 - DNA, 2886 bp, Homo sapiens
ggctcagccgcccgaggattgtgagtggaccgttgaggagagcgaccgaccatccggctggtgtccggactcgtactctatggttgtccgcgctctgcgcttcctctctagccgccagtgctctatgctccgcggtcgcgggccgccagcctccagccggccagccgcgaggggtgcgcagagggaggcggggcggaaaggcgagaggtgtctcctccaccggagccaggggagacccgagcaagctccgtgacagcacgtcggccgccatgtcgccgagtggggctggaaacagacccggcgcccagcggtagccctccttgcgcctccgattcccagacatggaaggtctttaatgtaactttaaatggttcaccaaaggatgctctaatggatgacagcgatactcctacatattatctgcaaatagaaccacaagatggatgtcatcctggtgacagcgtggaaaggagtgtgacctgtctgccttctgcatcagatgaaaatgaaaatcagcttgacggggacgggcatgagcatctgaccagcagtgacagtgcgatgggaaagccccaagtgtctgagcaggacagtctcaataataatgaaagctgcacattgagctgcgaggtggctgcaggtgagaacttgcaaaacaccctttgtgaagcctccagagatgaacaggccttcttgggaaaggacaaaaaaattcctggaaaaagaagtccaagaagcaaaaaagggactgctaagaagataccaccaggacttttttcaggagatattgcacctttaatgcaagaaaaagtactaagcgcagtcacatatgctgttgatgatgaagaagctgctgaagtaaatgctaatgagcagccagaggcgccaaagcttgttctgcagtctctgttttcacttatacgaggtgaagttgagcagttggattcaagagcacttcccctttgccttcatcagatagcagaatcctatttccaggaggaggactatgagaaagcaatgaaattcattcagctagaacgattgtatcatgagcaattgctcgcaaatctttctgccattcaagaacagtggggtaagtacagaccaacatggaatgtggaattagcagtaatccaacaagtcactatctacaaaattaacatatttgacctggttttataaatcagaaaatagatgtttccataaacaagttaatgttgcaaagaaagtagcatttttaccacaagtctattatattgtgagaagacttttttctttgtattttgctcttcatatcaatgccaagaaaagaatacttgcaactatttgcatttttcctaatcacatttcatgccctactggctaatttagtctctaggatgatatttacttatattgaaaagtaataagttagttatttctaactgttgggttgtttgaaaagataattttgcatgcaaatctttatgagtggtgctagttaactgtttgtttgtttttttgctcctaaatatgttttataagagccagtgactaacaaatactttaaatttagaaacaaaatggaaaactgtgcaaccacatacagttacggctctaaggaattcagaaaagggatttaatggtgaagattttgaacggcttacgaaaatttgtgcaacacatcaagatcctcttttatccaaacataagatagcagctgtggagaagtcccaggaaaggaaatgctccacgcagttactagtgtctgaagatccaaaggaaggaggagctaccaccaaagagtcagagagtaaaacttgtctcggcacagagtcaagtaaagaaagccaacatacagtggagcccctggggagcagtccctgctgtcatcagatggacgtgcaaacagattccccaagcctttcggtaactgcaggaaaggaccacatggaggagctgctctgcagcgctgaagccacgttagcgctccacacccagtcctccgagacagcagggagcccgtctgggccagactcttctgaggatgcttgtgaggatgacagtcgcttgcagctggctcaaacagaggcctgccaggatgtggccagaatagagggcattgctgaagaccctaaggtgtttctttccagcaagtcaaagacagagccgttgatttcaccaggctgtgaccgtatacctcctgcattgatttctgagggtaaatattcacaggctcagaggaaagaactccgtttgccacttcgggatgcttctgaggcgttgcccacagaccaacttgagaacaatgaattaaatgagctgcagcagcctgatcttacagacagtgatggaaaatcaccacaggcgcaggctgactcagacggttctgagaatgtgctctgtggaaataatcaaatatctgacttaggcatactgcttccagaggtgtgtatggccccagaggaaaagggagataaagacgaccaactcaacaaagaaacagaagactatttgaacagccttttagaaggatgtttaaaagatactgaagattccctttcctatgaagataaccaagacgacgactccgatctccttcaagatctctctcctgaagaagcatcctatagtctccaggagaatctgccttctgatgagagctgtctttctcttgatgatcttgccaaaaggatagagattgcagaggtaaatcagagatgaagtacaattaaaagtaaaatggcatttaaaaaacatatatatgtattaaatattgccttgtttttgtaagttttcccttgtctcaaacatgagggaaaattctagttaacgtaagcttttaattattagtagtttttacatttgtatgtattgaataaaatgacttttaatcattgcaatgtt

SEQ ID NO: 2854 - protein, 263 aa, Homo sapiens
MDDSDTPTYYLQIEPQDGCHPGDSVERSVTCLPSASDENENQLDGDGHEHLTSSDSAMGKPQVSEQDSLNNNESCTLSCEVAAGENLQNTLCEASRDEQAFLGKDKKIPGKRSPRSKKGTAKKIPPGLFSGDIAPLMQEKVLSAVTYAVDDEEAAEVNANEQPEAPKLVLQSLFSLIRGEVEQLDSRALPLCLHQIAESYFQEEDYEKAMKFIQLERLYHEQLLANLSAIQEQWGKYRPTWNVELAVIQQVTIYKINIFDLVL

SEQ ID NO: 2855 - DNA, 5002 bp, Homo sapiens
ggctcagccgcccgaggattgtgagtggaccgttgaggagagcgaccgaccatccggctggtgtccggactcgtactctatggttgtccgcgctctgcgcttcctctctagccgccagtgctctatgctccgcggtcgcgggccgccagcctccagccggccagccgcgaggggtgcgcagagggaggcggggcggaaaggcgagaggtgtctcctccaccggagccaggggagacccgagcaagctccgtgacagcacgtcggccgccatgtcgccgagtggggctggaaacagacccggcgcccagcggtagccctccttgcgcctccgattcccagacatggaaggtctttaatgtaactttaaatggttcaccaaaggatgctctaatggatgacagcgatactcctacatattatctgcaaatagaaccacaagatggatgtcatcctggtgacagcgtggaaaggagtgtgacctgtctgccttctgcatcagatgaaaatgaaaatcagcttgacggggacgggcatgagcatctgaccagcagtgacagtgcgatgggaaagccccaagtgtctgagcaggacagtctcaataataatgaaagctgcacattgagctgcgaggtggctgcaggtgagaacttgcaaaacaccctttgtgaagcctccagagatgaacaggccttcttgggaaaggacaaaaaaattcctggaaaaagaagtccaagaagcaaaaaagggactgctaagaagataccaccaggacttttttcaggagatattgcacctttaatgcaagaaaaagtactaagcgcagtcacatatgctgttgatgatgaagaagctgctgaagtaaatgctaatgagcagccagaggcgccaaagcttgttctgcagtctctgttttcacttatacgaggtgaagttgagcagttggattcaagagcacttcccctttgccttcatcagatagcagaatcctatttccaggaggaggactatgagaaagcaatgaaattcattcagctagaacgattgtatcatgagcaattgctcgcaaatctttctgccattcaagaacagtgggaaacaaaatggaaaactgtgcaaccacatacagttacggctctaaggaattcagaaaagggatttaatggtgaagattttgaacggcttacgaaaatttgtgcaacacatcaagatcctcttttatccaaacataagatagcagctgtggagaagtcccaggaaaggaaatgctccacgcagttactagtgtctgaagatccaaaggaaggaggagctaccaccaaagagtcagagagtaaaacttgtctcggcacagagtcaagtaaagaaagccaacatacagtggagcccctggggagcagtccctgctgtcatcagatggacgtgcaaacagattccccaagcctttcggtaactgcaggaaaggaccacatggaggagctgctctgcagcgctgaagccacgttagcgctccacacccagtcctccgagacagcagggagcccgtctgggccagactcttctgaggatgcttgtgaggatgacagtcgcttgcagctggctcaaacagaggcctgccaggatgtggccagaatagagggcattgctgaagaccctaaggtgtttctttccagcaagtcaaagacagagccgttgatttcaccaggctgtgaccgtatacctcctgcattgatttctgagggtaaatattcacaggctcagaggaaagaactccgtttgccacttcgggatgcttctgaggcgttgcccacagaccaacttgagaacaatgaattaaatgagctgcagcagcctgatcttacagacagtgatggaaaatcaccacaggcgcaggctgactcagacggttctgagaatgtgctctgtggaaataatcaaatatctgacttaggcatactgcttccagaggtgtgtatggccccagaggaaaagggagataaagacgaccaactcaacaaagaaacagaagactatttgaacagccttttagaaggatgtttaaaagatactgaagattccctttcctatgaagataaccaagacgacgactccgatctccttcaagatctctctcctgaagaagcatcctatagtctccaggagaatctgccttctgatgagagctgtctttctcttgatgatcttgccaaaaggatagagattgcagaggttgttcctactgaaggattggtctccatattaaagaagaggaatgatactgtaggagatcatcctgcccaaatgcaacacaaaccatctaagcgaagagtgagattccaagaaatagacgatagcttggatcaagatgaagttggaggtggctcctgtattttgctggtcttgctgtgcatagcaacggttttcctcagtgttggaggaactgcattatactgcactttcggtgacatggagtcacctgtttgtactgactttgcagacaacatggacttctattacactaagttacttcagggagtggcagaactgaagcactggatctacctctcctagcagcattccagacacagacatgctggcagtgagagtgaaaggcgggagactttctaaacagtttttctttcaggaattctgtagcattcccccttccctctgttaggaaccaaggacatcagaaatagcaactttaagtggcaagccggaggaactctgttagaataatccacacagtgaggcaaatatcaatctaagcattgtggatggaaggaatggtctttggagagagcatatccatctcctcctcactgcctcctaatgtcatgaggtacactgagcagaattaaacagggtagtcttaaccacactatttttagctaccttgtcaagctaatggttaaagaacacttttggtttacacttgttgggtcatagaagttgctttccgccatcacgcaataagtttgtgtgtaatcagaaggagttaccttatggtttcagtgtcattctttagttaacttgggagctgtgtaatttaggctttgcgtattatttcacttctgttctccacttatgaagtgattgtgtgtttgcgtgtgtgtgcgtgcgcatgtgcttccggcagttaacataagcaaatacccaacatcacaaagatgatctttcttcttttaacttgatgatgatgtgcaggcacaaatctttggagaaggcttaactgtggaatagatgaattctagaactcttgaccctgcaatgagaaactgtgacagatctgtgtcaattaacttgattagccagaaattaatcacaggcctagagaccaaagaaaaagctcccctgagtctcaggcaacagttttgtcacggatgcaaagcttcctgaaatcatgaatgctggactcagtttggcaaacgcttacacctattatgttctgagattctgagaaccagaatgcaaacttaagtaagatacagttcccactgtaggtgttttaatcctggtcttatatagaataaaccagtactttgctgagtgaaatcaccatatagaattcagtattaacagatcatgcattcagatgcttgaatgtgcattcttgttgtgggcttgatttagatcctattgcggggtcattacgcaaaaattcaatcataccttccatagacaaatgtctgatttttgtttaaatctgtccgttaggtggcctttccttatctgaggtgtagtggtctaacatttaggaagccttgctttgactttatcgggcagcattaaaaaaaaaacaacaaagaaaaaccaaacatgaattatagtttttaacaagtgatctttatttcctgtcttctgttaggatcatttgaaagaaaaagggagaacttactttctagttgttactggctggcacagtacctccctttgtgtttctgcttatttatttagattatgtgaatcttaaagggctttttatatcagttgaaagtgtgttactgcgcatgcatttggtgattccagtgctagatatttaattactgtgtatttagtgttttgattttctataatttcagttccgcgtgtttttacacttgttcattttaaattgatgtttcattttcacttataatactgtttgacttgtctctatcatgtcaccataaactgtaatattttcaagggttatagatcaaagatatttatttagaaatgtacaagataatgaaatttagattccttatacttaaggctgattttattagaagattattttaatgttctattataaattttaagaatttgtattcaaattgtatgtaaaatatgtaaaatgttgacggtactatattaagtggttctataaaagctattcacaagttctactgtgatggacatcctcatcatagacaaacctcctctgttttatcctcaatttctagttacagaaatttggtgatgcttatttttgccaattttatgtcaaaataagttaaaacttccctcctgttcacctcttgggtctctatcctgtgtaacctctggtgtagtatttgcccataggcaaccagagccacttcctctgaacccaacatctcctggggaccttcgcagcaagaggaaagcactgagacaatagcttgctaagcaggggcccagtggtgtctcagagaaaccatgggtgtcctcgccacttcccagggagggtgaggtgagctcgggaacataacgatgttttgacttacaataggcatgaaatcgcaactagaaaaattagggcagtttttaaaaatgtcatagttatctattgcatgaactggagtaattccacctggtggtgaaaggattgttatttcacacatgaaaaattcatccagttttactaaaatgtaattttttctgtcatttgaaagtactgacaactatttgtaactaatcttccttaagaactgtatttgagggtatcaaatcaagcttgtaatttaaaatctgtaccaac

SEQ ID NO: 2856 - protein, 725 aa, Homo sapiens
MDDSDTPTYYLQIEPQDGCHPGDSVERSVTCLPSASDENENQLDGDGHEHLTSSDSAMGKPQVSEQDSLNNNESCTLSCEVAAGENLQNTLCEASRDEQAFLGKDKKIPGKRSPRSKKGTAKKIPPGLFSGDIAPLMQEKVLSAVTYAVDDEEAAEVNANEQPEAPKLVLQSLFSLIRGEVEQLDSRALPLCLHQIAESYFQEEDYEKAMKFIQLERLYHEQLLANLSAIQEQWETKWKTVQPHTVTALRNSEKGFNGEDFERLTKICATHQDPLLSKHKIAAVEKSQERKCSTQLLVSEDPKEGGATTKESESKTCLGTESSKESQHTVEPLGSSPCCHQMDVQTDSPSLSVTAGKDHMEELLCSAEATLALHTQSSETAGSPSGPDSSEDACEDDSRLQLAQTEACQDVARIEGIAEDPKVFLSSKSKTEPLISPGCDRIPPALISEGKYSQAQRKELRLPLRDASEALPTDQLENNELNELQQPDLTDSDGKSPQAQADSDGSENVLCGNNQISDLGILLPEVCMAPEEKGDKDDQLNKETEDYLNSLLEGCLKDTEDSLSYEDNQDDDSDLLQDLSPEEASYSLQENLPSDESCLSLDDLAKRIEIAEVVPTEGLVSILKKRNDTVGDHPAQMQHKPSKRRVRFQEIDDSLDQDEVGGGSCILLVLLCIATVFLSVGGTALYCTFGDMESPVCTDFADNMDFYYTKLLQGVAELKHWIYLS

SEQ ID NO: 2857 - DNA, 5258 bp, Homo sapiens
ggctcagccgcccgaggattgtgagtggaccgttgaggagagcgaccgaccatccggctggtgtccggactcgtactctatggttgtccgcgctctgcgcttcctctctagccgccagtgctctatgctccgcggtcgcgggccgccagcctccagccggccagccgcgaggggtgcgcagagggaggcggggcggaaaggcgagaggtgtctcctccaccggagccaggggagacccgagcaagctccgtgacagcacgtcggccgccatgtcgccgagtggggctggaaacagacccggcgcccagcggtagccctccttgcgcctccgattcccagacatggaaggtctttaatgtaactttaaatggttcaccaaaggatgctctaatggatgacagcgatactcctacatattatctgcaaatagaaccacaagatggatgtcatcctggtgacagcgtggaaaggagtgtgacctgtctgccttctgcatcagatgaaaatgaaaatcagcttgacggggacgggcatgagcatctgaccagcagtgacagtgcgatgggaaagccccaagtgtctgagcaggacagtctcaataataatgaaagctgcacattgagctgcgaggtggctgcaggtgagaacttgcaaaacaccctttgtgaagcctccagagatgaacaggccttcttgggaaaggacaaaaaaattcctggaaaaagaagtccaagaagcaaaaaagggactgctaagaagataccaccaggacttttttcaggagatattgcacctttaatgcaagaaaaagtactaagcgcagtcacatatgctgttgatgatgaagaagctgctgaagtaaatgctaatgagcagccagaggcgccaaagcttgttctgcagtctctgttttcacttatacgaggtgaagttgagcagttggattcaagagcacttcccctttgccttcatcagatagcagaatcctatttccaggaggaggactatgagaaagcaatgaaattcattcagctagaacgattgtatcatgagcaattgctcgcaaatctttctgccattcaagaacagtgggaaacaaaatggaaaactgtgcaaccacatacagttacggctctaaggaattcagaaaagggatttaatggtgaagattttgaacggcttacgaaaatttgtgcaacacatcaagatcctcttttatccaaacataagatagcagctgtggagaagtcccaggaaaggaaatgctccacgcagttactagtgtctgaagatccaaaggaaggaggagctaccaccaaagagtcagagagtaaaacttgtctcggcacagagtcaagtaaagaaagccaacatacagtggagcccctggggagcagtccctgctgtcatcagatggacgtgcaaacagattccccaagcctttcggtaactgcaggaaaggaccacatggaggagctgctctgcagcgctgaagccacgttagcgctccacacccagtcctccgagacagcagggagcccgtctgggccagactcttctgaggatgcttgtgaggatgacagtcgcttgcagctggctcaaacagaggcctgccaggatgtggccagaatagagggcattgctgaagaccctaaggtgtttctttccagcaagtcaaagacagagccgttgatttcaccaggctgtgaccgtatacctcctgcattgatttctgagggtaaatattcacaggctcagaggaaagaactccgtttgccacttcgggatgcttctgaggcgttgcccacagaccaacttgagaacaatgaattaaatgagctgcagcagcctgatcttacagacagtgatggaaaatcaccacaggcgcaggctgactcagacggttctgagaatgtgctctgtggaaataatcaaatatctgacttaggcatactgcttccagaggtgtgtatggccccagaggaaaagggagataaagacgaccaactcaacaaagaaacagaagactatttgaacagccttttagaaggatgtttaaaagatactgaagattccctttcctatgaagataaccaagacgacgactccgatctccttcaagatctctctcctgaagaagcatcctatagtctccaggagaatctgccttctgatgagagctgtctttctcttgatgatcttgccaaaaggatagagattgcagaggttgttcctactgaaggattggtctccatattaaagaagaggaatgatactgtaggagatcatcctgcccaaatgcaacacaaaccatctaagcgaagagtgagattccaagaaatagacgatagcttggatcaagatgaagttggaggtggctcctgtattttgctggtcttgctgtgcatagcaacggttttcctcagtgttggaggaactgcattatactgcactttcggtgacatggagtcacctgtttgtactgactttgcagacaacatggacttctattacactaagttacttcagggagtggcagaactgaagcactggatctacctctcctagcagcattccagacacagacatgctggcagtgagagtgaaaggcgggagactttctaaacagtttttctttcaggaattctgtagcattcccccttccctctgttaggaaccaaggacatcagaaatagcaactttaagtggcaagccggaggaactctgttagaataatccacacagtgaggcaaatatcaatctaagcattgtggatggaaggaatggtctttggagagagcatatccatctcctcctcactgcctcctaatgtcatgaggtacactgagcagaattaaacagggtagtcttaaccacactatttttagctaccttgtcaagctaatggttaaagaacacttttggtttacacttgttgggtcatagaagttgctttccgccatcacgcaataagtttgtgtgtaatcagaaggagttaccttatggtttcagtgtcattctttagttaacttgggagctgtgtaatttaggctttgcgtattatttcacttctgttctccacttatgaagtgattgtgtgtttgcgtgtgtgtgcgtgcgcatgtgcttccggcagttaacataagcaaatacccaacatcacaaagatgatctttcttcttttaacttgatgatgatgtgcaggcacaaatctttggagaaggcttaactgtggaatagatgaattctagaactcttgaccctgcaatgagaaactgtgacagatctgtgtcaattaacttgattagccagaaattaatcacaggcctagagaccaaagaaaaagctcccctgagtctcaggcaacagttttgtcacggatgcaaagcttcctgaaatcatgaatgctggactcagtttggcaaacgcttacacctattatgttctgagattctgagaaccagaatgcaaacttaagtaagatacagttcccactgtaggtgttttaatcctggtcttatatagaataaaccagtactttgctgagtgaaatcaccatatagaattcagtattaacagatcatgcattcagatgcttgaatgtgcattcttgttgtgggcttgatttagatcctattgcggggtcattacgcaaaaattcaatcataccttccatagacaaatgtctgatttttgtttaaatctgtccgttaggtggcctttccttatctgaggtgtagtggtctaacatttaggaagccttgctttgactttatcgggcagcattaaaaaaaaaacaacaaagaaaaaccaaacatgaattatagtttttaacaagtgatctttatttcctgtcttctgttaggatcatttgaaagaaaaagggagaacttactttctagttgttactggctggcacagtacctccctttgtgtttctgcttatttatttagattatgtgaatcttaaagggctttttatatcagttgaaagtgtgttactgcgcatgcatttggtgattccagtgctagatatttaattactgtgtatttagtgttttgattttctataatttcagttccgcgtgtttttacacttgttcattttaaattgatgtttcattttcacttataatactgtttgacttgtctctatcatgtcaccataaactgtaatattttcaagggttatagatcaaagatatttatttagaaatgtacaagataatgaaatttagattccttatacttaaggctgattttattagaagattattttaatgttctattataaattttaagaatttgtattcaaattgtatgtaaaatatgtaaaatgttgacggtactatattaagtggttctataaaagctattcacaagttctactgtgatggacatcctcatcatagacaaacctcctctgttttatcctcaatttctagttacagaaatttggtgatgcttatttttgccaattttatgtcaaaataagttaaaacttccctcctgttcacctcttgggtctctatcctgtgtaacctctggtgtagtatttgcccataggcaaccagagccacttcctctgaacccaacatctcctggggaccttcgcagcaagaggaaagcactgagacaatagcttgctaagcaggggcccagtggtgtctcagagaaaccatgggtgtcctcgccacttcccagggagggtgaggtgagctcgggaacataacgatgttttgacttacaataggcatgaaatcgcaactagaaaaattagggcagtttttaaaaatgtcatagttatctattgcatgaactggagtaattccacctggtggtgaaaggattgttatttcacacatgaaaaattcatccagttttactaaaatgtaattttttctgtcatttgaaagtactgacaactatttgtaactaatcttccttaagaactgtatttgagggtatcaaatcaagcttgtaatttaaaatctgtaccaacaaagtgtctcagagagtttatttgaaccattgggtgctgagaaaaaactgctttaaagtgaaactttgatttcagaagttgatctggccctacaagtagacagtcatctactttgggaagactaataggtccttaggtaacggctcttctgctttaaaatacctcccccatctgctgacagtagctgaagattattctaaacattcattcttttagatttaaaaataaaaatcttctggaggatttaagatttgaa

SEQ ID NO: 2858 - protein, 725 aa, Homo sapiens; identical to SEQ ID NO: 2856

SEQ ID NO: 2859 - DNA, 562 bp, Homo sapiens
gaggattgtgagtggaccgttgaggagagcgaccgaccatccggctggtgtccggactcgtactctatggttgtccgcgctctgcgcttcctctctagccgccagtgctctatgctccgcggtcgcgggccgccagcctccagccggccagccgcgaggggtgcgcagagggaggcggggcggaaaggcgagaggtgtctcctccaccggagccaggggagacccgagcaagctccgtgacagcacgtcggccgccatgtcgccgagtggggctggaaacagacccggcgcccagcggtagccctccttgcgcctccgattcccaggacttttttcaggagatattgcacctttaatgcaagaaaaagtactaagcgcagtcacatatgctgttgatgatgaagaagctgctgaagtaaatgctaatgagcagccagaggcgccaaagcttgttctgcagtctctgttttcacttatacgaggtgaagttgagcagttggattcaagagcacttcccctttgccttcatcagatagcagaatcctatttccaggaggaggac

SEQ ID NO: 2860 - protein, 68 aa, Homo sapiens
MQEKVLSAVTYAVDDEEAAEVNANEQPEAPKLVLQSLFSLIRGEVEQLDSRALPLCLHQIAESYFQEE

SEQ ID NO: 2861 - DNA, 2440 bp, Homo sapiens
agtgctctatgctccgcggtcgcgggccgccagcctccagccggccagccgcgaggggtgcgcagagggaggcggggcggaaaggcgagaggtgtctcctccaccggagccaggggagacccgagcaagctccgtgacagcacgtcggccgccatgtcgccgagtggggctggaaacagacccggcgcccagcggtagccctccttgcgcctccgattcccaggtgaggagaggaggagcgggatgcaggggacccgccggctcgcggccgggatggaaagcctttcggaagcctctcgctcctccccctgcgctgtcctcctccagccgcgcagcctctgccctccggacatggaaggtctttaatgtaactttaaatggttcaccaaaggatgctctaatggatgacagcgatactcctacatattatctgcaaatagaaccacaagatggatgtcatcctggtgacagcgtggaaaggagtgtgacctgtctgccttctgcatcagatgaaaatgaaaatcagcttgacggggacgggcatgagcatctgaccagcagtgacagtgcgatgggaaagccccaagtgtctgagcaggacagtctcaataataatgaaagctgcacattgagctgcgaggtggctgcaggtgagaacttgcaaaacaccctttgtgaagcctccagagatgaacaggccttcttgggaaaggacaaaaaaattcctggaaaaagaagtccaagaagcaaaaaagggactgctaagaagataccaccaggacttttttcaggagatattgcacctttaatgcaagaaaaagtactaagcgcagtcacatatgctgttgatgatgaagaagctgctgaagtaaatgctaatgagcagccagaggcgccaaagcttgttctgcagtctctgttttcacttatacgaggtgaagttgagcagttggattcaagagcacttcccctttgccttcatcagatagcagaatcctatttccaggaggaggactatgagaaagcaatgaaattcattcagctagaacgattgtatcatgagcaattgctcgcaaatctttctgccattcaagaacagtgggaaacaaaatggaaaactgtgcaaccacatacagttacggctctaaggaattcagaaaagggatttaatggtgaagattttgaacggcttacgaaaatttgtgcaacacatcaagatcctcttttatccaaacataagatagcagctgtggagaagtcccaggaaaggaaatgctccacgcagttactagtgtctgaagatccaaaggaaggaggagctaccaccaaagagtcagagagtaaaacttgtctcggcacagagtcaagtaaagaaagccaacatacagtggagcccctggggagcagtccctgctgtcatcagatggacgtgcaaacagattccccaagcctttcggtaactgcaggaaaggaccacatggaggagctgctctgcagcgctgaagccacgttagcgctccacacccagtcctccgagacagcagggagcccgtctgggccagactcttctgaggatgcttgtgaggatgacagtcgcttgcagctggctcaaacagaggcctgccaggatgtggccagaatagagggcattgctgaagaccctaaggtgtttctttccagcaagtcaaagacagagccgttgatttcaccaggctgtgaccgtatacctcctgcattgatttctgagggtaaatattcacaggctcagaggaaagaactccgtttgccacttcgggatgcttctgaggcgttgcccacagaccaacttgagaacaatgaattaaatgagctgcagcagcctgatcttacagacagtgatggaaaatcaccacaggcgcaggctgactcagacggttctgagaatgtgctctgtggaaataatcaaatatctgacttaggcatactgcttccagaggtgtgtatggccccagaggaaaagggagataaagacgaccaactcaacaaagaaacagaagactatttgaacagccttttagaaggatgtttaaaagatactgaagattccctttcctatgaagataaccaagacgacgactccgatctccttcaagatctctctcctgaagaagcatcctatagtctccaggagaatctgccttctgatgagagctgtctttctcttgatgatcttgccaaaaggatagagattgcagaggtaaatcagagatgaagtacaattaaaagtaaaatggcatttaaaaaacatatatatgtattaaatattgccttgtttttgtaagttttcccttgtctcaaacatgagggaaaattctagttaacgtaagcttttaattattagtagtttttacatttgtatgtattgaataaaatgacttttaatcattgcaatgttcatact

SEQ ID NO: 2862 - protein, 616 aa, Homo sapiens
MDDSDTPTYYLQIEPQDGCHPGDSVERSVTCLPSASDENENQLDGDGHEHLTSSDSAMGKPQVSEQDSLNNNESCTLSCEVAAGENLQNTLCEASRDEQAFLGKDKKIPGKRSPRSKKGTAKKIPPGLFSGDIAPLMQEKVLSAVTYAVDDEEAAEVNANEQPEAPKLVLQSLFSLIRGEVEQLDSRALPLCLHQIAESYFQEEDYEKAMKFIQLERLYHEQLLANLSAIQEQWETKWKTVQPHTVTALRNSEKGFNGEDFERLTKICATHQDPLLSKHKIAAVEKSQERKCSTQLLVSEDPKEGGATTKESESKTCLGTESSKESQHTVEPLGSSPCCHQMDVQTDSPSLSVTAGKDHMEELLCSAEATLALHTQSSETAGSPSGPDSSEDACEDDSRLQLAQTEACQDVARIEGIAEDPKVFLSSKSKTEPLISPGCDRIPPALISEGKYSQAQRKELRLPLRDASEALPTDQLENNELNELQQPDLTDSDGKSPQAQADSDGSENVLCGNNQISDLGILLPEVCMAPEEKGDKDDQLNKETEDYLNSLLEGCLKDTEDSLSYEDNQDDDSDLLQDLSPEEASYSLQENLPSDESCLSLDDLAKRIEIAEVNQR

SEQ ID NO: 2863 - DNA, 580 bp, Homo sapiens
atttggaaagaagacaagctccacccaagctgggaaggtccctgtcaagtgcctctgcccctgagacagccctgcgaacagctgaatgggggtggactcactacactggaatcaagaggccggttgggtttcagccgagcaagtctgaggcccctttcccgcgccctctggtggaaagtgttcgcttttctgtccacccatgtgaaggattcaccccgaccctcctcaggtggcctttactttgcaggagcaaagcaagttggatgaggagatacatgtatgtggcacacagctttcttcacttagcaacacgtcagatgcagcgtagatgtgcggatgaaaccaccattgcaaaattatcactgagacagtcagagaaacctgacatggctgactccatgttgcttttagcctcacaggctggctctcttagctcattcctaagcatgggcctgaaactgccattgcaaaatcgtaactgagacagcaaaagagacttgacctaaccaactccatcttgcttctaacctccaagctgtccttgttcattcctgggtgtaggctgaactaactttgggag

SEQ ID NO: 2864 - protein, 72 aa, Homo sapiens
MRRYMYVAHSFLHLATRQMQRRCADETTIAKLSLRQSEKPDMADSMLLLASQAGSLSSFLSMGLKLPLQNRN

SEQ ID NO: 2865 - DNA, 719 bp, Homo sapiens
aaaatttacattaaaataacataagctattggttagctatacatttttctttgtatcacaaacgctagcaacatggagataataggtgatgcagctagtcaggaacaaaatgcctttaaacaactgcccccgccttgcccccgcccccccatactgctgtctctctgagcctgataaattttgtatgcctcccggggaattgtttgaacccgggaggcaggggctgcagagagcctcgattacatcactgcgctccagcctaggtcacagagcaagactctgtctcaaaataaataaataaataaatgttgtatgccttacataactcagaatgttctcagctactctctcttctcacctccaggaatgggaaagtgaagatgcactcccagtggaggagggtttattatggctccaagcacagtgtctgctcttactactcattagcagtcgtgtagcctattctaaaattaaagtgtctcgagtgggacaaatcctgaaaagaatgttttttacaagtaatgtgctgctactggggattctggggtgatccatcctgggacagtcatcctctgcaccctgtctcatcctgtgacttagaaagccttaactgtctgggagtgcagccttccaggtctcagcctcaatttacccagcccatgttcaagatggaattgctctggttccaatgcctgtcacaattctgcggtattccagcc

SEQ ID NO: 2866 - protein, 65 aa, Homo sapiens
MCCYWGFWGDPSWDSHPLHPVSSCDLESLNCLGVQPSRSQPQFTQPMFKMELLWFQCLSQFCGIP

SEQ ID NO: 2867 - DNA, 4411 bp, Homo sapiens
catctcacttcaatccactggttgatagaagtgcagtcaaagactgtcccctcctctgcaagcttttatgttctctctcctctctccctagccacgtcctgttctgttatcaacacacttactcacctcctggccttctccttctattgtctctcatccctcttccctcacaaaaacagaagcaaagagccagagccttcagtttggaggaactgaaaacattctcttctgctttctcattttgtagatgaggaaactgaagttgaggaatagtgaagagtttgtccaatgtcatagccccgtaatcaacgggacaaaaattttcttgctgatgggtcaagatggcatcgtgaagtggttgttcaccgtaaactgtaatacaatcctgtttatggatttgtttgcatatttttccctccatagggaaacctttcttccatggctcaggacacactcctggatcgagccaacaggagaactttctggtaagcatttggctaacttttttttttttgagatggagtcttgctgtgtcgcctaggctggagtgcagtggcgtgatcttggctcactgcagcctccacttcccgggttcaatcaattctcctacctcaacttcctgagtagctgggattacaggcgcccgccaccacacccggctcatttttgtacttttagtagagacacagttttgccatgttggccaggctggtcttgaattcctcagctcaggtgatctgcctgccttggcctctcaaagtgctgggattacaggcgtgagccactgtgcccggccttggctaacttttcaaaattaaagattttgacttgttacagtcatgtgacatttttttctttctgtttgctgagtttttgataatttatatctctcaaagtggagactttaaaaaagactcatccgtgtgccgtgttcactgcctggtatcttagtgtggaccgaagcctaaggaccctgaaaacagctgcagatgaagatggcaagcacccgctgcaagctggccaggtacctggaggacctggaggatgtggacttgaagaaatttaagatgcacttagaggactatcctccccagaagggctgcatccccctcccgaggggtcagacagagaaggcagaccatgtggatctagccacgctaatgatcgacttcaatggggaggagaaggcgtgggccatggccgtgtggatcttcgctgcgatcaacaggagagacctttatgagaaagcaaaaagagatgagccgaagtggggttcagataatgcacgtgtttcgaatcccactgtgatatgccaggaagacagcattgaagaggagtggatgggtttactggagtacctttcgagaatctctatttgtaaaatgaagaaagattaccgtaagaagtacagaaagtacgtgagaagcagattccagtgcattgaagacaggaatgcccgtctgggtgagagtgtgagcctcaacaaacgctacacacgactgcgtctcatcaaggagcaccggagccagcaggagagggagcaggagcttctggccatcggcaagaccaagacgtgtgagagccccgtgagtcccattaagatggagttgctgtttgaccccgatgatgagcattctgagcctgtgcacaccgtggtgttccagggggcggcagggattgggaaaacaatcctggccaggaagatgatgttggactgggcgtcggggacactctaccaagacaggtttgactatctgttctatatccactgtcgagaggtgagccttgtgacacagaggagcctgggggacctgatcatgagctgctgccccgacccaaacccacccatccacaagatcgtgagaaaaccctccagaatcctcttcctcatggacggcttcgatgagctgcaaggtgcctttgacgagcacataggaccgctctgcactgactggcagaaggccgagcggggagacattctcctgagcagcctcatcagaaagaagctgcttcccgaggcctctctgctcatcaccacgagacctgtggccctggagaaactgcagcacttgctggaccatcctcggcatgtggagatcctgggtttctccgaggccaaaaggaaagagtacttcttcaagtacttctctgatgaggcccaagccagggcagccttcagtctgattcaggagaacgaggtcctcttcaccatgtgcttcatccccctggtctgctggatcgtgtgcactggactgaaacagcagatggagagtggcaagagccttgcccagacatccaagaccaccaccgcggtgtacgtcttcttcctttccagtttgctgcagccccggggagggagccaggagcacggcctctgcgcccacctctgggggctctgctctttggctgcagatggaatctggaaccagaaaatcctgtttgaggagtccgacctcaggaatcatggactgcagaaggcggatgtgtctgctttcctgaggatgaacctgttccaaaaggaagtggactgcgagaagttctacagcttcatccacatgactttccaggagttctttgccgccatgtactacctgctggaagaggaaaaggaaggaaggacgaacgttccagggagtcgtttgaagcttcccagccgagacgtgacagtccttctggaaaactatggcaaattcgaaaaggggtatttgatttttgttgtacgtttcctctttggcctggtaaaccaggagaggacctcctacttggagaagaaattaagttgcaagatctctcagcaaatcaggctggagctgctgaaatggattgaagtgaaagccaaagctaaaaagctgcagatccagcccagccagctggaattgttctactgtttgtacgagatgcaggaggaggacttcgtgcaaagggccatggactatttccccaagattgagatcaatctctccaccagaatggaccacatggtttcttccttttgcattgagaactgtcatcgggtggagtcactgtccctggggtttctccataacatgcccaaggaggaagaggaggaggaaaaggaaggccgacaccttgatatggtgcagtgtgtcctcccaagctcctctcatgctgcctgttctcatggattggtgaacagccacctcacttccagtttttgccggggcctcttttcagttctgagcaccagccagagtctaactgaattggacctcagtgacaattctctgggggacccagggatgagagtgttgtgtgaaacgctccagcatcctggctgtaacattcggagattgtggttggggcgctgtggcctctcgcatgagtgctgcttcgacatctccttggtcctcagcagcaaccagaagctggtggagctggacctgagtgacaacgccctcggtgacttcggaatcagacttctgtgtgtgggactgaagcacctgttgtgcaatctgaagaagctctggttggtcagctgctgcctcacatcagcatgttgtcaggatcttgcatcagtattgagcaccagccattccctgaccagactctatgtgggggagaatgccttgggagactcaggagtcgcaattttatgtgaaaaagccaagaatccacagtgtaacctgcagaaactggggttggtgaattctggccttacgtcagtctgttgttcagctttgtcctcggtactcagcactaatcagaatctcacgcacctttacctgcgaggcaacactctcggagacaaggggatcaaactactctgtgagggactcttgcaccccgactgcaagcttcaggtgttggaattagacaactgcaacctcacgtcacactgctgctgggatctttccacacttctgacctccagccagagcctgcgaaagctgagcctgggcaacaatgacctgggcgacctgggggtcatgatgttctgtgaagtgctgaaacagcagagctgcctcctgcagaacctggggttgtctgaaatgtatttcaattatgagacaaaaagtgcgttagaaacacttcaagaagaaaagcctgagctgaccgtcgtctttgagccttcttggtaggagtggaaacggggctgccagacgccagtgttctccggtccctccagctgggggccctcaggtggagagagctgcgatccatccaggccaagaccacagctctgtgatccttccggtggagtgtcggagaagagagcttgccgacgatgccttcctgtgcagagcttgggcatctcctttacgccagggtgaggaagacaccaggacaatgacagcatcgggtgttgttgtcatcacagcgcctcagttagaggatgttcctcttggtgacctcatgtaattagctcattcaataaagcactttctttatt

SEQ ID NO: 2868 - protein, 1036 aa, Homo sapiens; identical to SEQ ID NO: 191

SEQ ID NO: 2869 - DNA, 4069 bp, Homo sapiens
catctcacttcaatccactggttgatagaagtgcagtcaaagactgtcccctcctctgcaagcttttatgttctctctcctctctccctagccacgtcctgttctgttatcaacacacttactcacctcctggccttctccttctattgtctctcatccctcttccctcacaaaaacagaagcaaagagccagagccttcagtttggaggaactgaaaacattctcttctgctttctcattttgtagatgaggaaactgaagttgaggaatagtgaagagtttgtccaatgtcatagccccgtaatcaacgggacaaaaattttcttgctgatgggtcaagatggcatcgtgaagtggttgttcaccgtaaactgtaatacaatcctgtttatggatttgtttgcatatttttccctccatagggaaacctttcttccatggctcaggacacactcctggatcgagccaacaggagaactttctggtaagcatttggctaacttttttttttttgagatggagtcttgctgtgtcgcctaggctggagtgcagtggcgtgatcttggctcactgcagcctccacttcccgggttcaatcaattctcctacctcaacttcctgagtagctgggattacaggcgcccgccaccacacccggctcatttttgtacttttagtagagacacagttttgccatgttggccaggctggtcttgaattcctcagctcaggtgatctgcctgccttggcctctcaaagtgctgggattacaggcgtgagccactgtgcccggccttggctaacttttcaaaattaaagattttgacttgttacagtcatgtgacatttttttctttctgtttgctgagtttttgataatttatatctctcaaagtggagactttaaaaaagactcatccgtgtgccgtgttcactgcctggtatcttagtgtggaccgaagcctaaggaccctgaaaacagctgcagatgaagatggcaagcacccgctgcaagctggccaggtacctggaggacctggaggatgtggacttgaagaaatttaagatgcacttagaggactatcctccccagaagggctgcatccccctcccgaggggtcagacagagaaggcagaccatgtggatctagccacgctaatgatcgacttcaatggggaggagaaggcgtgggccatggccgtgtggatcttcgctgcgatcaacaggagagacctttatgagaaagcaaaaagagatgagccgaagtggggttcagataatgcacgtgtttcgaatcccactgtgatatgccaggaagacagcattgaagaggagtggatgggtttactggagtacctttcgagaatctctatttgtaaaatgaagaaagattaccgtaagaagtacagaaagtacgtgagaagcagattccagtgcattgaagacaggaatgcccgtctgggtgagagtgtgagcctcaacaaacgctacacacgactgcgtctcatcaaggagcaccggagccagcaggagagggagcaggagcttctggccatcggcaagaccaagacgtgtgagagccccgtgagtcccattaagatggagttgctgtttgaccccgatgatgagcattctgagcctgtgcacaccgtggtgttccagggggcggcagggattgggaaaacaatcctggccaggaagatgatgttggactgggcgtcggggacactctaccaagacaggtttgactatctgttctatatccactgtcgagaggtgagccttgtgacacagaggagcctgggggacctgatcatgagctgctgccccgacccaaacccacccatccacaagatcgtgagaaaaccctccagaatcctcttcctcatggacggcttcgatgagctgcaaggtgcctttgacgagcacataggaccgctctgcactgactggcagaaggccgagcggggagacattctcctgagcagcctcatcagaaagaagctgcttcccgaggcctctctgctcatcaccacgagacctgtggccctggagaaactgcagcacttgctggaccatcctcggcatgtggagatcctgggtttctccgaggccaaaaggaaagagtacttcttcaagtacttctctgatgaggcccaagccagggcagccttcagtctgattcaggagaacgaggtcctcttcaccatgtgcttcatccccctggtctgctggatcgtgtgcactggactgaaacagcagatggagagtggcaagagccttgcccagacatccaagaccaccaccgcggtgtacgtcttcttcctttccagtttgctgcagccccggggagggagccaggagcacggcctctgcgcccacctctgggggctctgctctttggctgcagatggaatctggaaccagaaaatcctgtttgaggagtccgacctcaggaatcatggactgcagaaggcggatgtgtctgctttcctgaggatgaacctgttccaaaaggaagtggactgcgagaagttctacagcttcatccacatgactttccaggagttctttgccgccatgtactacctgctggaagaggaaaaggaaggaaggacgaacgttccagggagtcgtttgaagcttcccagccgagacgtgacagtccttctggaaaactatggcaaattcgaaaaggggtatttgatttttgttgtacgtttcctctttggcctggtaaaccaggagaggacctcctacttggagaagaaattaagttgcaagatctctcagcaaatcaggctggagctgctgaaatggattgaagtgaaagccaaagctaaaaagctgcagatccagcccagccagctggaattgttctactgtttgtacgagatgcaggaggaggacttcgtgcaaagggccatggactatttccccaagattgagatcaatctctccaccagaatggaccacatggtttcttccttttgcattgagaactgtcatcgggtggagtcactgtccctggggtttctccataacatgcccaaggaggaagaggaggaggaaaaggaaggccgacaccttgatatggtgcagtgtgtcctcccaagctcctctcatgctgcctgttctcatgggttggggcgctgtggcctctcgcatgagtgctgcttcgacatctccttggtcctcagcagcaaccagaagctggtggagctggacctgagtgacaacgccctcggtgacttcggaatcagacttctgtgtgtgggactgaagcacctgttgtgcaatctgaagaagctctggttggtgaattctggccttacgtcagtctgttgttcagctttgtcctcggtactcagcactaatcagaatctcacgcacctttacctgcgaggcaacactctcggagacaaggggatcaaactactctgtgagggactcttgcaccccgactgcaagcttcaggtgttggaattagacaactgcaacctcacgtcacactgctgctgggatctttccacacttctgacctccagccagagcctgcgaaagctgagcctgggcaacaatgacctgggcgacctgggggtcatgatgttctgtgaagtgctgaaacagcagagctgcctcctgcagaacctggggttgtctgaaatgtatttcaattatgagacaaaaagtgcgttagaaacacttcaagaagaaaagcctgagctgaccgtcgtctttgagccttcttggtaggagtggaaacggggctgccagacgccagtgttctccggtccctccagctgggggccctcaggtggagagagctgcgatccatccaggccaagaccacagctctgtgatccttccggtggagtgtcggagaagagagcttgccgacgatgccttcctgtgcagagcttgggcatctcctttacgccagggtgaggaagacaccaggacaatgacagcatcgggtgttgttgtcatcacagcgcctcagttagaggatgttcctcttggtgacctcatgtaattagctcattcaataaagcactttctttatt

SEQ ID NO: 2870 - protein, 922 aa, Homo sapiens; identical to SEQ ID NO: 193

SEQ ID NO: 2871 - DNA, 4356 bp, Homo sapiens
catctcacttcaatccactggttgatagaagtgcagtcaaagactgtcccctcctctgcaagcttttatgttctctctcctctctccctagccacgtcctgttctgttatcaacacacttactcacctcctggccttctccttctattgtctctcatccctcttccctcacaaaaacagaagcaaagagccagagccttcagtttggaggaactgaaaacattctcttctgctttctcattttgtagatgaggaaactgaagttgaggaatagtgaagagtttgtccaatgtcatagccccgtaatcaacgggacaaaaattttcttgctgatgggtcaagatggcatcgtgaagtggttgttcaccgtaaactgtaatacaatcctgtttatggatttgtttgcatatttttccctccatagggaaacctttcttccatggctcaggacacactcctggatcgagccaacaggagaactttctggtaagcatttggctaacttttttttttttgagatggagtcttgctgtgtcgcctaggctggagtgcagtggcgtgatcttggctcactgcagcctccacttcccgggttcaatcaattctcctacctcaacttcctgagtagctgggattacaggcgcccgccaccacacccggctcatttttgtacttttagtagagacacagttttgccatgttggccaggctggtcttgaattcctcagctcaggtgatctgcctgccttggcctctcaaagtgctgggattacaggcgtgagccactgtgcccggccttggctaacttttcaaaattaaagattttgacttgttacagtcatgtgacatttttttctttctgtttgctgagtttttgataatttatatctctcaaagtggagactttaaaaaagactcatccgtgtgccgtgttcactgcctggtatcttagtgtggaccgaagcctaaggaccctgaaaacagctgcagatgaagatggcaagcacccgctgcaagctggccaggtacctggaggacctggaggatgtggacttgaagaaatttaagatgcacttagaggactatcctccccagaagggctgcatccccctcccgaggggtcagacagagaaggcagaccatgtggatctagccacgctaatgatcgacttcaatggggaggagaaggcgtgggccatggccgtgtggatcttcgctgcgatcaacaggagagacctttatgagaaagcaaaaagagatgagccgaagtggggttcagataatgcacgtgtttcgaatcccactgtgatatgccaggaagacagcattgaagaggagtggatgggtttactggagtacctttcgagaatctctatttgtaaaatgaagaaagattaccgtaagaagtacagaaagtacgtgagaagcagattccagtgcattgaagacaggaatgcccgtctgggtgagagtgtgagcctcaacaaacgctacacacgactgcgtctcatcaaggagcaccggagccagcaggagagggagcaggagcttctggccatcggcaagaccaagacgtgtgagagccccgtgagtcccattaagatggagttgctgtttgaccccgatgatgagcattctgagcctgtgcacaccgtggtgttccagggggcggcagggattgggaaaacaatcctggccaggaagatgatgttggactgggcgtcggggacactctaccaagacaggtttgactatctgttctatatccactgtcgagaggtgagccttgtgacacagaggagcctgggggacctgatcatgagctgctgccccgacccaaacccacccatccacaagatcgtgagaaaaccctccagaatcctcttcctcatggacggcttcgatgagctgcaaggtgcctttgacgagcacataggaccgctctgcactgactggcagaaggccgagcggggagacattctcctgagcagcctcatcagaaagaagctgcttcccgaggcctctctgctcatcaccacgagacctgtggccctggagaaactgcagcacttgctggaccatcctcggcatgtggagatcctgggtttctccgaggccaaaaggaaagagtacttcttcaagtacttctctgatgaggcccaagccagggcagccttcagtctgattcaggagaacgaggtcctcttcaccatgtgcttcatccccctggtctgctggatcgtgtgcactggactgaaacagcagatggagagtggcaagagccttgcccagacatccaagaccaccaccgcggtgtacgtcttcttcctttccagtttgctgcagccccggggagggagccaggagcacggcctctgcgcccacctctgggggctctgctctttggctgcagatggaatctggaaccagaaaatcctgtttgaggagtccgacctcaggaatcatggactgcagaaggcggatgtgtctgctttcctgaggatgaacctgttccaaaaggaagtggactgcgagaagttctacagcttcatccacatgactttccaggagttctttgccgccatgtactacctgctggaagaggaaaaggaaggaaggacgaacgttccagggagtcgtttgaagcttcccagccgagacgtgacagtccttctggaaaactatggcaaattcgaaaaggggtatttgatttttgttgtacgtttcctctttggcctggtaaaccaggagaggacctcctacttggagaagaaattaagttgcaagatctctcagcaaatcaggctggagctgctgaaatggattgaagtgaaagccaaagctaaaaagctgcagatccagcccagccagctggaattgttctactgtttgtacgagatgcaggaggaggacttcgtgcaaagggccatggactatttccccaagattgagatcaatctctccaccagaatggaccacatggtttcttccttttgcattgagaactgtcatcgggtggagtcactgtccctggggtttctccataacatgcccaaggaggaagaggaggaggaaaaggaaggccgacaccttgatatggtgcagtgtgtcctcccaagctcctctcatgctgcctgttctcatgggttggggcgctgtggcctctcgcatgagtgctgcttcgacatctccttggtcctcagcagcaaccagaagctggtggagctggacctgagtgacaacgccctcggtgacttcggaatcagacttctgtgtgtgggactgaagcacctgttgtgcaatctgaagaagctctggttggtgaattctggccttacgtcagtctgttgttcagctttgtcctcggtactcagcactaatcagaatctcacgcacctttacctgcgaggcaacactctcggagacaaggggatcaaactactctgtgagggactcttgcaccccgactgcaagcttcaggtgttggaattagacaactgcaacctcacgtcacactgctgctgggatctttccacacttctgacctccagccagagcctgcgaaagctgagcctgggcaacaatgacctgggcgacctgggggtcatgatgttctgtgaagtgctgaaacagcagagctgcctcctgcagaacctggggttgtctgaaatgtatttcaattatgagacaaaaagtgcgttagaaacacttcaagaagaaaagcctgagctgaccgtcgtctttgagccttcttggtaggagtggaaacggggctgccagacgccagtgttctccggtccctccagctgggggccctcaggtggagagagctgcgatccatccaggccaagaccacagctctgtgatccttccggtggagtgtcggagaagagagcttgccgacgatgccttcctgtgcagagcttgggcatctcctttacgccagggtgaggaagacaccaggacaatgacagcatcgggtgttgttgtcatcacagcgcctcagttagaggatgttcctcttggtgacctcatgtaattagctcattcaataaagcactttctttatttttctcttctctgtctaactttctttttcctatcttttttcttctttgttctgtttacttttgctcatatcatcattcccgctatctttctattaactgaccataacacagaactagttgactatatattatgttgaaattttatggcagctatttatttatttaaattttttgtaacagttttgttttctaataagaaaaatccatgctttttgtagctggttgaaaattcaggaatatgtaaaactttttggtatttaattaaattgattccttttcttaatttt

SEQ ID NO: 2872 - protein, 922 aa, Homo sapiens; identical to SEQ ID NO: 193

SEQ ID NO: 2873 - DNA, 4698 bp, Homo sapiens
catctcacttcaatccactggttgatagaagtgcagtcaaagactgtcccctcctctgcaagcttttatgttctctctcctctctccctagccacgtcctgttctgttatcaacacacttactcacctcctggccttctccttctattgtctctcatccctcttccctcacaaaaacagaagcaaagagccagagccttcagtttggaggaactgaaaacattctcttctgctttctcattttgtagatgaggaaactgaagttgaggaatagtgaagagtttgtccaatgtcatagccccgtaatcaacgggacaaaaattttcttgctgatgggtcaagatggcatcgtgaagtggttgttcaccgtaaactgtaatacaatcctgtttatggatttgtttgcatatttttccctccatagggaaacctttcttccatggctcaggacacactcctggatcgagccaacaggagaactttctggtaagcatttggctaacttttttttttttgagatggagtcttgctgtgtcgcctaggctggagtgcagtggcgtgatcttggctcactgcagcctccacttcccgggttcaatcaattctcctacctcaacttcctgagtagctgggattacaggcgcccgccaccacacccggctcatttttgtacttttagtagagacacagttttgccatgttggccaggctggtcttgaattcctcagctcaggtgatctgcctgccttggcctctcaaagtgctgggattacaggcgtgagccactgtgcccggccttggctaacttttcaaaattaaagattttgacttgttacagtcatgtgacatttttttctttctgtttgctgagtttttgataatttatatctctcaaagtggagactttaaaaaagactcatccgtgtgccgtgttcactgcctggtatcttagtgtggaccgaagcctaaggaccctgaaaacagctgcagatgaagatggcaagcacccgctgcaagctggccaggtacctggaggacctggaggatgtggacttgaagaaatttaagatgcacttagaggactatcctccccagaagggctgcatccccctcccgaggggtcagacagagaaggcagaccatgtggatctagccacgctaatgatcgacttcaatggggaggagaaggcgtgggccatggccgtgtggatcttcgctgcgatcaacaggagagacctttatgagaaagcaaaaagagatgagccgaagtggggttcagataatgcacgtgtttcgaatcccactgtgatatgccaggaagacagcattgaagaggagtggatgggtttactggagtacctttcgagaatctctatttgtaaaatgaagaaagattaccgtaagaagtacagaaagtacgtgagaagcagattccagtgcattgaagacaggaatgcccgtctgggtgagagtgtgagcctcaacaaacgctacacacgactgcgtctcatcaaggagcaccggagccagcaggagagggagcaggagcttctggccatcggcaagaccaagacgtgtgagagccccgtgagtcccattaagatggagttgctgtttgaccccgatgatgagcattctgagcctgtgcacaccgtggtgttccagggggcggcagggattgggaaaacaatcctggccaggaagatgatgttggactgggcgtcggggacactctaccaagacaggtttgactatctgttctatatccactgtcgagaggtgagccttgtgacacagaggagcctgggggacctgatcatgagctgctgccccgacccaaacccacccatccacaagatcgtgagaaaaccctccagaatcctcttcctcatggacggcttcgatgagctgcaaggtgcctttgacgagcacataggaccgctctgcactgactggcagaaggccgagcggggagacattctcctgagcagcctcatcagaaagaagctgcttcccgaggcctctctgctcatcaccacgagacctgtggccctggagaaactgcagcacttgctggaccatcctcggcatgtggagatcctgggtttctccgaggccaaaaggaaagagtacttcttcaagtacttctctgatgaggcccaagccagggcagccttcagtctgattcaggagaacgaggtcctcttcaccatgtgcttcatccccctggtctgctggatcgtgtgcactggactgaaacagcagatggagagtggcaagagccttgcccagacatccaagaccaccaccgcggtgtacgtcttcttcctttccagtttgctgcagccccggggagggagccaggagcacggcctctgcgcccacctctgggggctctgctctttggctgcagatggaatctggaaccagaaaatcctgtttgaggagtccgacctcaggaatcatggactgcagaaggcggatgtgtctgctttcctgaggatgaacctgttccaaaaggaagtggactgcgagaagttctacagcttcatccacatgactttccaggagttctttgccgccatgtactacctgctggaagaggaaaaggaaggaaggacgaacgttccagggagtcgtttgaagcttcccagccgagacgtgacagtccttctggaaaactatggcaaattcgaaaaggggtatttgatttttgttgtacgtttcctctttggcctggtaaaccaggagaggacctcctacttggagaagaaattaagttgcaagatctctcagcaaatcaggctggagctgctgaaatggattgaagtgaaagccaaagctaaaaagctgcagatccagcccagccagctggaattgttctactgtttgtacgagatgcaggaggaggacttcgtgcaaagggccatggactatttccccaagattgagatcaatctctccaccagaatggaccacatggtttcttccttttgcattgagaactgtcatcgggtggagtcactgtccctggggtttctccataacatgcccaaggaggaagaggaggaggaaaaggaaggccgacaccttgatatggtgcagtgtgtcctcccaagctcctctcatgctgcctgttctcatggattggtgaacagccacctcacttccagtttttgccggggcctcttttcagttctgagcaccagccagagtctaactgaattggacctcagtgacaattctctgggggacccagggatgagagtgttgtgtgaaacgctccagcatcctggctgtaacattcggagattgtggttggggcgctgtggcctctcgcatgagtgctgcttcgacatctccttggtcctcagcagcaaccagaagctggtggagctggacctgagtgacaacgccctcggtgacttcggaatcagacttctgtgtgtgggactgaagcacctgttgtgcaatctgaagaagctctggttggtcagctgctgcctcacatcagcatgttgtcaggatcttgcatcagtattgagcaccagccattccctgaccagactctatgtgggggagaatgccttgggagactcaggagtcgcaattttatgtgaaaaagccaagaatccacagtgtaacctgcagaaactggggttggtgaattctggccttacgtcagtctgttgttcagctttgtcctcggtactcagcactaatcagaatctcacgcacctttacctgcgaggcaacactctcggagacaaggggatcaaactactctgtgagggactcttgcaccccgactgcaagcttcaggtgttggaattagacaactgcaacctcacgtcacactgctgctgggatctttccacacttctgacctccagccagagcctgcgaaagctgagcctgggcaacaatgacctgggcgacctgggggtcatgatgttctgtgaagtgctgaaacagcagagctgcctcctgcagaacctggggttgtctgaaatgtatttcaattatgagacaaaaagtgcgttagaaacacttcaagaagaaaagcctgagctgaccgtcgtctttgagccttcttggtaggagtggaaacggggctgccagacgccagtgttctccggtccctccagctgggggccctcaggtggagagagctgcgatccatccaggccaagaccacagctctgtgatccttccggtggagtgtcggagaagagagcttgccgacgatgccttcctgtgcagagcttgggcatctcctttacgccagggtgaggaagacaccaggacaatgacagcatcgggtgttgttgtcatcacagcgcctcagttagaggatgttcctcttggtgacctcatgtaattagctcattcaataaagcactttctttatttttctcttctctgtctaactttctttttcctatcttttttcttctttgttctgtttacttttgctcatatcatcattcccgctatctttctattaactgaccataacacagaactagttgactatatattatgttgaaattttatggcagctatttatttatttaaattttttgtaacagttttgttttctaataagaaaaatccatgctttttgtagctggttgaaaattcaggaatatgtaaaactttttggtatttaattaaattgattccttttcttaatttt

SEQ ID NO: 2874 - protein, 1036 aa, Homo sapiens; identical to SEQ ID NO: 191

SEQ ID NO: 2875 - DNA, 4603 bp, Homo sapiens
catctcacttcaatccactggttgatagaagtgcagtcaaagactgtcccctcctctgcaagcttttatgttctctctcctctctccctagccacgtcctgttctgttatcaacacacttactcacctcctggccttctccttctattgtctctcatccctcttccctcacaaaaacagaagcaaagagccagagccttcagtttggaggaactgaaaacattctcttctgctttctcattttgtagatgaggaaactgaagttgaggaatagtgaagagtttgtccaatgtcatagccccgtaatcaacgggacaaaaattttcttgctgatgggtcaagatggcatcgtgaagtggttgttcaccgtaaactgtaatacaatcctgtttatggatttgtttgcatatttttccctccatagggaaacctttcttccatggctcaggacacactcctggatcgagccaacaggagaactttctggtaagcatttggctaacttttttttttttgagatggagtcttgctgtgtcgcctaggctggagtgcagtggcgtgatcttggctcactgcagcctccacttcccgggttcaatcaattctcctacctcaacttcctgagtagctgggattacaggcgcccgccaccacacccggctcatttttgtacttttagtagagacacagttttgccatgttggccaggctggtcttgaattcctcagctcaggtgatctgcctgccttggcctctcaaagtgctgggattacaggcgtgagccactgtgcccggccttggctaacttttcaaaattaaagattttgacttgttacagtcatgtgacatttttttctttctgtttgctgagtttttgataatttatatctctcaaagtggagactttaaaaaagactcatccgtgtgccgtgttcactgcctggtatcttagtgtggaccgaagcctaaggaccctgaaaacagctgcagatgaagatggcaagcacccgctgcaagctggccaggtacctggaggacctggaggatgtggacttgaagaaatttaagatgcacttagaggactatcctccccagaagggctgcatccccctcccgaggggtcagacagagaaggcagaccatgtggatctagccacgctaatgatcgacttcaatggggaggagaaggcgtgggccatggccgtgtggatcttcgctgcgatcaacaggagagacctttatgagaaagcaaaaagagatgagccgaagtggggttcagataatgcacgtgtttcgaatcccactgtgatatgccaggaagacagcattgaagaggagtggatgggtttactggagtacctttcgagaatctctatttgtaaaatgaagaaagattaccgtaagaagtacagaaagtacgtgagaagcagattccagtgcattgaagacaggaatgcccgtctgggtgagagtgtgagcctcaacaaacgctacacacgactgcgtctcatcaaggagcaccggagccagcaggagagggagcaggagcttctggccatcggcaagaccaagacgtgtgagagccccgtgagtcccattaagatggagttgctgtttgaccccgatgatgagcattctgagcctgtgcacaccgtggtgttccagggggcggcagggattgggaaaacaatcctggccaggaagatgatgttggactgggcgtcggggacactctaccaagacaggtttgactatctgttctatatccactgtcgagaggtgagccttgtgacacagaggagcctgggggacctgatcatgagctgctgccccgacccaaacccacccatccacaagatcgtgagaaaaccctccagaatcctcttcctcatggacggcttcgatgagctgcaaggtgcctttgacgagcacataggaccgctctgcactgactggcagaaggccgagcggggagacattctcctgagcagcctcatcagaaagaagctgcttcccgaggcctctctgctcatcaccacgagacctgtggccctggagaaactgcagcacttgctggaccatcctcggcatgtggagatcctgggtttctccgaggccaaaaggaaagagtacttcttcaagtacttctctgatgaggcccaagccagggcagccttcagtctgattcaggagaacgaggtcctcttcaccatgtgcttcatccccctggtctgctggatcgtgtgcactggactgaaacagcagatggagagtggcaagagccttgcccagacatccaagaccaccaccgcggtgtacgtcttcttcctttccagtttgctgcagccccggggagggagccaggagcacggcctctgcgcccacctctgggggctctgctctttggctgcagatggaatctggaaccagaaaatcctgtttgaggagtccgacctcaggaatcatggactgcagaaggcggatgtgtctgctttcctgaggatgaacctgttccaaaaggaagtggactgcgagaagttctacagcttcatccacatgactttccaggagttctttgccgccatgtactacctgctggaagaggaaaaggaaggaaggacgaacgttccagggagtcgtttgaagcttcccagccgagacgtgacagtccttctggaaaactatggcaaattcgaaaaggggtatttgatttttgttgtacgtttcctctttggcctggtaaaccaggagaggacctcctacttggagaagaaattaagttgcaagatctctcagcaaatcaggctggagctgctgaaatggattgaagtgaaagccaaagctaaaaagctgcagatccagcccagccagctggaattgttctactgtttgtacgagatgcaggaggaggacttcgtgcaaagggccatggactatttccccaagattgagatcaatctctccaccagaatggaccacatggtttcttccttttgcattgagaactgtcatcgggtggagtcactgtccctggggtttctccataacatgcccaaggaggaagaggaggaggaaaaggaaggccgacaccttgatatggtgcagtgtgtcctcccaagctcctctcatgctgcctgttctcatggattggtgaacagccacctcacttccagtttttgccggggcctcttttcagttctgagcaccagccagagtctaactgaattggacctcagtgacaattctctgggggacccagggatgagagtgttgtgtgaaacgctccagcatcctggctgtaacattcggagattgtggttggggcgctgtggcctctcgcatgagtgctgcttcgacatctccttggtcctcagcagcaaccagaagctggtggagctggacctgagtgacaacgccctcggtgacttcggaatcagacttctgtgtgtgggactgaagcacctgttgtgcaatctgaagaagctctggttggtgaattctggccttacgtcagtctgttgttcagctttgtcctcggtactcagcactaatcagaatctcacgcacctttacctgcgaggcaacactctcggagacaaggggatcaaactactctgtgagggactcttgcaccccgactgcaagcttcaggtgttggaattagacaactgcaacctcacgtcacactgctgctgggatctttccacacttctgacctccagccagagcctgcgaaagctgagcctgggcaacaatgacctgggcgacctgggggtcatgatgttctgtgaagtgctgaaacagcagagctgcctcctgcagaacctggggttgtctgaaatgtatttcaattatgagacaaaaagtgcgttagaaacacttcaagaagaaaagcctgagctgaccgtcgtctttgagccttcttggtaggagtggaaacggggctgccagacgccagtgttctccggtccctccagctgggggccctcaggtggagagagctgcgatccatccaggccaagaccacagctctgtgatccttccggtggagtgtcggagaagagagcttgccgacgatgccttcctgtgcagagcttgggcatctcctttacgccagggtgaggaagacaccaggacaatgacagcatcgggtgttgttgtcatcacagcgcctcagttagaggatgttcctcttggtgacctcatgtaattagctcattcaataaagcactttctttatttttctcttctctgtctaactttctttttcctatcttttttcttctttgttctgtttacttttgctcatatcatcattcccgctatctttctattaactgaccataacacagaactagttgactatatattatgttgaaattttatggcagctatttatttatttaaattttttgtaacagttttgttttctaataagaaaaatccatgctttttgtagctggttgaaaattcaggaatatgtaaaactttttggtatttaattaaattgattccttttcttaattttaaaaaagagtacctagaaatttttcaaattatttctctaaaccactaaagataaattaaattgtttggtgcatttt

SEQ ID NO: 2876 - protein, 979 aa, Homo sapiens
MKMASTRCKLARYLEDLEDVDLKKFKMHLEDYPPQKGCIPLPRGQTEKADHVDLATLMIDFNGEEKAWAMAVWIFAAINRRDLYEKAKRDEPKWGSDNARVSNPTVICQEDSIEEEWMGLLEYLSRISICKMKKDYRKKYRKYVRSRFQCIEDRNARLGESVSLNKRYTRLRLIKEHRSQQEREQELLAIGKTKTCESPVSPIKMELLFDPDDEHSEPVHTVVFQGAAGIGKTILARKMMLDWASGTLYQDRFDYLFYIHCREVSLVTQRSLGDLIMSCCPDPNPPIHKIVRKPSRILFLMDGFDELQGAFDEHIGPLCTDWQKAERGDILLSSLIRKKLLPEASLLITTRPVALEKLQHLLDHPRHVEILGFSEAKRKEYFFKYFSDEAQARAAFSLIQENEVLFTMCFIPLVCWIVCTGLKQQMESGKSLAQTSKTTTAVYVFFLSSLLQPRGGSQEHGLCAHLWGLCSLAADGIWNQKILFEESDLRNHGLQKADVSAFLRMNLFQKEVDCEKFYSFIHMTFQEFFAAMYYLLEEEKEGRTNVPGSRLKLPSRDVTVLLENYGKFEKGYLIFVVRFLFGLVNQERTSYLEKKLSCKISQQIRLELLKWIEVKAKAKKLQIQPSQLELFYCLYEMQEEDFVQRAMDYFPKIEINLSTRMDHMVSSFCIENCHRVESLSLGFLHNMPKEEEEEEKEGRHLDMVQCVLPSSSHAACSHGLVNSHLTSSFCRGLFSVLSTSQSLTELDLSDNSLGDPGMRVLCETLQHPGCNIRRLWLGRCGLSHECCFDISLVLSSNQKLVELDLSDNALGDFGIRLLCVGLKHLLCNLKKLWLVNSGLTSVCCSALSSVLSTNQNLTHLYLRGNTLGDKGIKLLCEGLLHPDCKLQVLELDNCNLTSHCCWDLSTLLTSSQSLRKLSLGNNDLGDLGVMMFCEVLKQQSCLLQNLGLSEMYFNYETKSALETLQEEKPELTVVFEPSW

SEQ ID NO: 2877 - DNA, 4432 bp, Homo sapiens
catctcacttcaatccactggttgatagaagtgcagtcaaagactgtcccctcctctgcaagcttttatgttctctctcctctctccctagccacgtcctgttctgttatcaacacacttactcacctcctggccttctccttctattgtctctcatccctcttccctcacaaaaacagaagcaaagagccagagccttcagtttggaggaactgaaaacattctcttctgctttctcattttgtagatgaggaaactgaagttgaggaatagtgaagagtttgtccaatgtcatagccccgtaatcaacgggacaaaaattttcttgctgatgggtcaagatggcatcgtgaagtggttgttcaccgtaaactgtaatacaatcctgtttatggatttgtttgcatatttttccctccatagggaaacctttcttccatggctcaggacacactcctggatcgagccaacaggagaactttctggtaagcatttggctaacttttttttttttgagatggagtcttgctgtgtcgcctaggctggagtgcagtggcgtgatcttggctcactgcagcctccacttcccgggttcaatcaattctcctacctcaacttcctgagtagctgggattacaggcgcccgccaccacacccggctcatttttgtacttttagtagagacacagttttgccatgttggccaggctggtcttgaattcctcagctcaggtgatctgcctgccttggcctctcaaagtgctgggattacaggcgtgagccactgtgcccggccttggctaacttttcaaaattaaagattttgacttgttacagtcatgtgacatttttttctttctgtttgctgagtttttgataatttatatctctcaaagtggagactttaaaaaagactcatccgtgtgccgtgttcactgcctggtatcttagtgtggaccgaagcctaaggaccctgaaaacagctgcagatgaagatggcaagcacccgctgcaagctggccaggtacctggaggacctggaggatgtggacttgaagaaatttaagatgcacttagaggactatcctccccagaagggctgcatccccctcccgaggggtcagacagagaaggcagaccatgtggatctagccacgctaatgatcgacttcaatggggaggagaaggcgtgggccatggccgtgtggatcttcgctgcgatcaacaggagagacctttatgagaaagcaaaaagagatgagccgaagtggggttcagataatgcacgtgtttcgaatcccactgtgatatgccaggaagacagcattgaagaggagtggatgggtttactggagtacctttcgagaatctctatttgtaaaatgaagaaagattaccgtaagaagtacagaaagtacgtgagaagcagattccagtgcattgaagacaggaatgcccgtctgggtgagagtgtgagcctcaacaaacgctacacacgactgcgtctcatcaaggagcaccggagccagcaggagagggagcaggagcttctggccatcggcaagaccaagacgtgtgagagccccgtgagtcccattaagatggagttgctgtttgaccccgatgatgagcattctgagcctgtgcacaccgtggtgttccagggggcggcagggattgggaaaacaatcctggccaggaagatgatgttggactgggcgtcggggacactctaccaagacaggtttgactatctgttctatatccactgtcgagaggtgagccttgtgacacagaggagcctgggggacctgatcatgagctgctgccccgacccaaacccacccatccacaagatcgtgagaaaaccctccagaatcctcttcctcatggacggcttcgatgagctgcaaggtgcctttgacgagcacataggaccgctctgcactgactggcagaaggccgagcggggagacattctcctgagcagcctcatcagaaagaagctgcttcccgaggcctctctgctcatcaccacgagacctgtggccctggagaaactgcagcacttgctggaccatcctcggcatgtggagatcctgggtttctccgaggccaaaaggaaagagtacttcttcaagtacttctctgatgaggcccaagccagggcagccttcagtctgattcaggagaacgaggtcctcttcaccatgtgcttcatccccctggtctgctggatcgtgtgcactggactgaaacagcagatggagagtggcaagagccttgcccagacatccaagaccaccaccgcggtgtacgtcttcttcctttccagtttgctgcagccccggggagggagccaggagcacggcctctgcgcccacctctgggggctctgctctttggctgcagatggaatctggaaccagaaaatcctgtttgaggagtccgacctcaggaatcatggactgcagaaggcggatgtgtctgctttcctgaggatgaacctgttccaaaaggaagtggactgcgagaagttctacagcttcatccacatgactttccaggagttctttgccgccatgtactacctgctggaagaggaaaaggaaggaaggacgaacgttccagggagtcgtttgaagcttcccagccgagacgtgacagtccttctggaaaactatggcaaattcgaaaaggggtatttgatttttgttgtacgtttcctctttggcctggtaaaccaggagaggacctcctacttggagaagaaattaagttgcaagatctctcagcaaatcaggctggagctgctgaaatggattgaagtgaaagccaaagctaaaaagctgcagatccagcccagccagctggaattgttctactgtttgtacgagatgcaggaggaggacttcgtgcaaagggccatggactatttccccaagattgagatcaatctctccaccagaatggaccacatggtttcttccttttgcattgagaactgtcatcgggtggagtcactgtccctggggtttctccataacatgcccaaggaggaagaggaggaggaaaaggaaggccgacaccttgatatggtgcagtgtgtcctcccaagctcctctcatgctgcctgttctcatgggttggggcgctgtggcctctcgcatgagtgctgcttcgacatctccttggtcctcagcagcaaccagaagctggtggagctggacctgagtgacaacgccctcggtgacttcggaatcagacttctgtgtgtgggactgaagcacctgttgtgcaatctgaagaagctctggttggtgaattctggccttacgtcagtctgttgttcagctttgtcctcggtactcagcactaatcagaatctcacgcacctttacctgcgaggcaacactctcggagacaaggggatcaaactactctgtgagggactcttgcaccccgactgcaagcttcaggtgttggaattagacaactgcaacctcacgtcacactgctgctgggatctttccacacttctgacctccagccagagcctgcgaaagctgagcctgggcaacaatgacctgggcgacctgggggtcatgatgttctgtgaagtgctgaaacagcagagctgcctcctgcagaacctggggttgtctgaaatgtatttcaattatgagacaaaaagtgcgttagaaacacttcaagaagaaaagcctgagctgaccgtcgtctttgagccttcttggtaggagtggaaacggggctgccagacgccagtgttctccggtccctccagctgggggccctcaggtggagagagctgcgatccatccaggccaagaccacagctctgtgatccttccggtggagtgtcggagaagagagcttgccgacgatgccttcctgtgcagagcttgggcatctcctttacgccagggtgaggaagacaccaggacaatgacagcatcgggtgttgttgtcatcacagcgcctcagttagaggatgttcctcttggtgacctcatgtaattagctcattcaataaagcactttctttatttttctcttctctgtctaactttctttttcctatcttttttcttctttgttctgtttacttttgctcatatcatcattcccgctatctttctattaactgaccataacacagaactagttgactatatattatgttgaaattttatggcagctatttatttatttaaattttttgtaacagttttgttttctaataagaaaaatccatgctttttgtagctggttgaaaattcaggaatatgtaaaactttttggtatttaattaaattgattccttttcttaattttaaaaaagagtacctagaaatttttcaaattatttctctaaaccactaaagataaattaaattgtttggtgcatttt

SEQ ID NO: 2878 - protein, 922 aa, Homo sapiens; identical to SEQ ID NO: 193

SEQ ID NO: 2879 - DNA, 4774 bp, Homo sapiens
catctcacttcaatccactggttgatagaagtgcagtcaaagactgtcccctcctctgcaagcttttatgttctctctcctctctccctagccacgtcctgttctgttatcaacacacttactcacctcctggccttctccttctattgtctctcatccctcttccctcacaaaaacagaagcaaagagccagagccttcagtttggaggaactgaaaacattctcttctgctttctcattttgtagatgaggaaactgaagttgaggaatagtgaagagtttgtccaatgtcatagccccgtaatcaacgggacaaaaattttcttgctgatgggtcaagatggcatcgtgaagtggttgttcaccgtaaactgtaatacaatcctgtttatggatttgtttgcatatttttccctccatagggaaacctttcttccatggctcaggacacactcctggatcgagccaacaggagaactttctggtaagcatttggctaacttttttttttttgagatggagtcttgctgtgtcgcctaggctggagtgcagtggcgtgatcttggctcactgcagcctccacttcccgggttcaatcaattctcctacctcaacttcctgagtagctgggattacaggcgcccgccaccacacccggctcatttttgtacttttagtagagacacagttttgccatgttggccaggctggtcttgaattcctcagctcaggtgatctgcctgccttggcctctcaaagtgctgggattacaggcgtgagccactgtgcccggccttggctaacttttcaaaattaaagattttgacttgttacagtcatgtgacatttttttctttctgtttgctgagtttttgataatttatatctctcaaagtggagactttaaaaaagactcatccgtgtgccgtgttcactgcctggtatcttagtgtggaccgaagcctaaggaccctgaaaacagctgcagatgaagatggcaagcacccgctgcaagctggccaggtacctggaggacctggaggatgtggacttgaagaaatttaagatgcacttagaggactatcctccccagaagggctgcatccccctcccgaggggtcagacagagaaggcagaccatgtggatctagccacgctaatgatcgacttcaatggggaggagaaggcgtgggccatggccgtgtggatcttcgctgcgatcaacaggagagacctttatgagaaagcaaaaagagatgagccgaagtggggttcagataatgcacgtgtttcgaatcccactgtgatatgccaggaagacagcattgaagaggagtggatgggtttactggagtacctttcgagaatctctatttgtaaaatgaagaaagattaccgtaagaagtacagaaagtacgtgagaagcagattccagtgcattgaagacaggaatgcccgtctgggtgagagtgtgagcctcaacaaacgctacacacgactgcgtctcatcaaggagcaccggagccagcaggagagggagcaggagcttctggccatcggcaagaccaagacgtgtgagagccccgtgagtcccattaagatggagttgctgtttgaccccgatgatgagcattctgagcctgtgcacaccgtggtgttccagggggcggcagggattgggaaaacaatcctggccaggaagatgatgttggactgggcgtcggggacactctaccaagacaggtttgactatctgttctatatccactgtcgagaggtgagccttgtgacacagaggagcctgggggacctgatcatgagctgctgccccgacccaaacccacccatccacaagatcgtgagaaaaccctccagaatcctcttcctcatggacggcttcgatgagctgcaaggtgcctttgacgagcacataggaccgctctgcactgactggcagaaggccgagcggggagacattctcctgagcagcctcatcagaaagaagctgcttcccgaggcctctctgctcatcaccacgagacctgtggccctggagaaactgcagcacttgctggaccatcctcggcatgtggagatcctgggtttctccgaggccaaaaggaaagagtacttcttcaagtacttctctgatgaggcccaagccagggcagccttcagtctgattcaggagaacgaggtcctcttcaccatgtgcttcatccccctggtctgctggatcgtgtgcactggactgaaacagcagatggagagtggcaagagccttgcccagacatccaagaccaccaccgcggtgtacgtcttcttcctttccagtttgctgcagccccggggagggagccaggagcacggcctctgcgcccacctctgggggctctgctctttggctgcagatggaatctggaaccagaaaatcctgtttgaggagtccgacctcaggaatcatggactgcagaaggcggatgtgtctgctttcctgaggatgaacctgttccaaaaggaagtggactgcgagaagttctacagcttcatccacatgactttccaggagttctttgccgccatgtactacctgctggaagaggaaaaggaaggaaggacgaacgttccagggagtcgtttgaagcttcccagccgagacgtgacagtccttctggaaaactatggcaaattcgaaaaggggtatttgatttttgttgtacgtttcctctttggcctggtaaaccaggagaggacctcctacttggagaagaaattaagttgcaagatctctcagcaaatcaggctggagctgctgaaatggattgaagtgaaagccaaagctaaaaagctgcagatccagcccagccagctggaattgttctactgtttgtacgagatgcaggaggaggacttcgtgcaaagggccatggactatttccccaagattgagatcaatctctccaccagaatggaccacatggtttcttccttttgcattgagaactgtcatcgggtggagtcactgtccctggggtttctccataacatgcccaaggaggaagaggaggaggaaaaggaaggccgacaccttgatatggtgcagtgtgtcctcccaagctcctctcatgctgcctgttctcatggattggtgaacagccacctcacttccagtttttgccggggcctcttttcagttctgagcaccagccagagtctaactgaattggacctcagtgacaattctctgggggacccagggatgagagtgttgtgtgaaacgctccagcatcctggctgtaacattcggagattgtggttggggcgctgtggcctctcgcatgagtgctgcttcgacatctccttggtcctcagcagcaaccagaagctggtggagctggacctgagtgacaacgccctcggtgacttcggaatcagacttctgtgtgtgggactgaagcacctgttgtgcaatctgaagaagctctggttggtcagctgctgcctcacatcagcatgttgtcaggatcttgcatcagtattgagcaccagccattccctgaccagactctatgtgggggagaatgccttgggagactcaggagtcgcaattttatgtgaaaaagccaagaatccacagtgtaacctgcagaaactggggttggtgaattctggccttacgtcagtctgttgttcagctttgtcctcggtactcagcactaatcagaatctcacgcacctttacctgcgaggcaacactctcggagacaaggggatcaaactactctgtgagggactcttgcaccccgactgcaagcttcaggtgttggaattagacaactgcaacctcacgtcacactgctgctgggatctttccacacttctgacctccagccagagcctgcgaaagctgagcctgggcaacaatgacctgggcgacctgggggtcatgatgttctgtgaagtgctgaaacagcagagctgcctcctgcagaacctggggttgtctgaaatgtatttcaattatgagacaaaaagtgcgttagaaacacttcaagaagaaaagcctgagctgaccgtcgtctttgagccttcttggtaggagtggaaacggggctgccagacgccagtgttctccggtccctccagctgggggccctcaggtggagagagctgcgatccatccaggccaagaccacagctctgtgatccttccggtggagtgtcggagaagagagcttgccgacgatgccttcctgtgcagagcttgggcatctcctttacgccagggtgaggaagacaccaggacaatgacagcatcgggtgttgttgtcatcacagcgcctcagttagaggatgttcctcttggtgacctcatgtaattagctcattcaataaagcactttctttatttttctcttctctgtctaactttctttttcctatcttttttcttctttgttctgtttacttttgctcatatcatcattcccgctatctttctattaactgaccataacacagaactagttgactatatattatgttgaaattttatggcagctatttatttatttaaattttttgtaacagttttgttttctaataagaaaaatccatgctttttgtagctggttgaaaattcaggaatatgtaaaactttttggtatttaattaaattgattccttttcttaattttaaaaaagagtacctagaaatttttcaaattatttctctaaaccactaaagataaattaaattgtttggtgcatttt

SEQ ID NO: 2880 - protein, 1036 aa, Homo sapiens; identical to SEQ ID NO: 191

SEQ ID NO: 2881 - DNA, 3092 bp, Homo sapiens
gatgaggaaactgaagttgaggaatagtgaagagtttgtccaatgtcatagccccgtaatcaacgggacaaaaattttcttgctgatgggtcaagatggcatcgtgaagtggttgttcaccgtaaactgtaatacaatcctgtttatggatttgtttgcatatttttccctccatagggaaacctttcttccatggctcaggacacactcctggatcgagccaacaggagaactttctggtaagcatttggctaacttttttttttttgagatggagtcttgctgtgtcgcctaggctggagtgcagtggcgtgatcttggctcactgcagcctccacttcccgggttcaatcaattctcctacctcaacttcctgagtagctgggattacaggcgcccgccaccacacccggctcatttttgtacttttagtagagacacagttttgccatgttggccaggctggtcttgaattcctcagctcaggtgatctgcctgccttggcctctcaaagtgctgggattacaggcgtgagccactgtgcccggccttggctaacttttcaaaattaaagattttgacttgttacagtcatgtgacatttttttctttctgtttgctgagtttttgataatttatatctctcaaagtggagactttaaaaaagactcatccgtgtgccgtgttcactgcctggtatcttagtgtggaccgaagcctaaggaccctgaaaacagctgcagatgaagatggcaagcacccgctgcaagctggccaggtacctggaggacctggaggatgtggacttgaagaaatttaagatgcacttagaggactatcctccccagaagggctgcatccccctcccgaggggtcagacagagaaggcagaccatgtggatctagccacgctaatgatcgacttcaatggggaggagaaggcgtgggccatggccgtgtggatcttcgctgcgatcaacaggagagacctttatgagaaagcaaaaagagatgagccgaagtggggttcagataatgcacgtgtttcgaatcccactgtgatatgccaggaagacagcattgaagaggagtggatgggtttactggagtacctttcgagaatctctatttgtaaaatgaagaaagattaccgtaagaagtacagaaagtacgtgagaagcagattccagtgcattgaagacaggaatgcccgtctgggtgagagtgtgagcctcaacaaacgctacacacgactgcgtctcatcaaggagcaccggagccagcaggagagggagcaggagcttctggccatcggcaagaccaagacgtgtgagagccccgtgagtcccattaagatggagttgctgtttgaccccgatgatgagcattctgagcctgtgcacaccgtggtgttccagggggcggcagggattgggaaaacaatcctggccaggaagatgatgttggactgggcgtcggggacactctaccaagacaggtttgactatctgttctatatccactgtcgagaggtgagccttgtgacacagaggagcctgggggacctgatcatgagctgctgccccgacccaaacccacccatccacaagatcgtgagaaaaccctccagaatcctcttcctcatggacggcttcgatgagctgcaaggtgcctttgacgagcacataggaccgctctgcactgactggcagaaggccgagcggggagacattctcctgagcagcctcatcagaaagaagctgcttcccgaggcctctctgctcatcaccacgagacctgtggccctggagaaactgcagcacttgctggaccatcctcggcatgtggagatcctgggtttctccgaggccaaaaggaaagagtacttcttcaagtacttctctgatgaggcccaagccagggcagccttcagtctgattcaggagaacgaggtcctcttcaccatgtgcttcatccccctggtctgctggatcgtgtgcactggactgaaacagcagatggagagtggcaagagccttgcccagacatccaagaccaccaccgcggtgtacgtcttcttcctttccagtttgctgcagccccggggagggagccaggagcacggcctctgcgcccacctctgggggctctgctctttggctgcagatggaatctggaaccagaaaatcctgtttgaggagtccgacctcaggaatcatggactgcagaaggcggatgtgtctgctttcctgaggatgaacctgttccaaaaggaagtggactgcgagaagttctacagcttcatccacatgactttccaggagttctttgccgccatgtactacctgctggaagaggaaaaggaaggaaggacgaacgttccagggagtcgtttgaagcttcccagccgagacgtgacagtccttctggaaaactatggcaaattcgaaaaggggtatttgatttttgttgtacgtttcctctttggcctggtaaaccaggagaggacctcctacttggagaagaaattaagttgcaagatctctcagcaaatcaggctggagctgctgaaatggattgaagtgaaagccaaagctaaaaagctgcagatccagcccagccagctggaattgttctactgtttgtacgagatgcaggaggaggacttcgtgcaaagggccatggactatttccccaagattgagatcaatctctccaccagaatggaccacatggtttcttccttttgcattgagaactgtcatcgggtggagtcactgtccctggggtttctccataacatgcccaaggaggaagaggaggaggaaaaggaaggccgacaccttgatatggtgcagtgtgtcctcccaagctcctctcatgctgcctgttctcatgggtaaggaaactcggcttccaggtgcttcctcctgcttcctcgccagcttcttcttggcgcttgcctcctctcatctcttttcaactatcttccaaatactgttgccacagctacatcataatgccaccactgtctgtttgagactccttcatgagcaaagattgatgtatggtaggtggataaatgggatgag

SEQ ID NO: 2882 - protein, 719 aa, Homo sapiens
MKMASTRCKLARYLEDLEDVDLKKFKMHLEDYPPQKGCIPLPRGQTEKADHVDLATLMIDFNGEEKAWAMAVWIFAAINRRDLYEKAKRDEPKWGSDNARVSNPTVICQEDSIEEEWMGLLEYLSRISICKMKKDYRKKYRKYVRSRFQCIEDRNARLGESVSLNKRYTRLRLIKEHRSQQEREQELLAIGKTKTCESPVSPIKMELLFDPDDEHSEPVHTVVFQGAAGIGKTILARKMMLDWASGTLYQDRFDYLFYIHCREVSLVTQRSLGDLIMSCCPDPNPPIHKIVRKPSRILFLMDGFDELQGAFDEHIGPLCTDWQKAERGDILLSSLIRKKLLPEASLLITTRPVALEKLQHLLDHPRHVEILGFSEAKRKEYFFKYFSDEAQARAAFSLIQENEVLFTMCFIPLVCWIVCTGLKQQMESGKSLAQTSKTTTAVYVFFLSSLLQPRGGSQEHGLCAHLWGLCSLAADGIWNQKILFEESDLRNHGLQKADVSAFLRMNLFQKEVDCEKFYSFIHMTFQEFFAAMYYLLEEEKEGRTNVPGSRLKLPSRDVTVLLENYGKFEKGYLIFVVRFLFGLVNQERTSYLEKKLSCKISQQIRLELLKWIEVKAKAKKLQIQPSQLELFYCLYEMQEEDFVQRAMDYFPKIEINLSTRMDHMVSSFCIENCHRVESLSLGFLHNMPKEEEEEEKEGRHLDMVQCVLPSSSHAACSHG

SEQ ID NO: 2883 - DNA, 3526 bp, Homo sapiens
agccgccgcgagcgccgggagggagggcagcgccgcgccagacggagcccggggttcgacgccaggattggctgcaagtagggagctttcgccgccgccccgggcccctcggactgtgccggcgccgcacccgaggctctcgccagcccggcgccccggtgctgaggaatcattgacatagagtaactccacagcatgtgtcttcaagagcttccctaaaagattaaaggttatacaaaacttaaaagaagcagcaattctattcgcttgttattggacttgaaactccctttgacctcggaaactgaagatgaggttgccatgggaactgctggtactgcaatcattcattttgtgccttgcagatgattccacactgcatggcccgatttttattcaagaaccaagtcctgtaatgttccctttggattctgaggagaaaaaagtgaagctcaattgtgaagttaaaggaaatccaaaacctcatatcaggtggaagttaaatggaacagatgttgacactggtatggatttccgctacagtgttgttgaagggagcttgttgatcaataaccccaataaaacccaagatgctggaacgtaccagtgcacagcgacaaactcgtttggaacaattgttagcagagaagcaaagcttcagtttgcttatcttgacaactttaaaacaagaacaagaagcactgtgtctgtccgtcgaggtcaaggaatggtgctactgtgtggcccgccaccccattctggagagctgagttatgcctggatcttcaatgaatacccttcctatcaggataatcgccgctttgtttctcaagagactgggaatctgtatattgccaaagtagaaaaatcagatgttgggaattatacctgtgtggttaccaataccgtgacaaaccacaaggtcctggggccacctacaccactaatattgagaaatgatggagtgatgggtgaatatgagcccaaaatagaagtgcagttcccagaaacagttccgactgcaaaaggagcaacggtgaagctggaatgctttgctttaggaaatccagtaccaactattatctggcgaagagctgatggaaagccaatagcaaggaaagccagaagacacaagtcaaatggaattcttgagatccctaattttcagcaggaggatgctggtttatatgaatgtgtagctgaaaattccagagggaaaaatgtagcaaggggacagctaactttctatgctcaacctaattggattcaaaaaataaatgatattcacgtggccatggaagaaaatgtcttttgggaatgtaaagcaaatggaaggcctaagcctacatacaagtggctaaaaaatggcgaacctctgctaactcgggatagaattcaaattgagcaaggaacactcaacataacaatagtgaacctctcagatgctggcatgtatcagtgtttggcagagaataaacatggagttatcttttccaacgcagagcttagtgttatagctgtaggtccagatttttcaagaacactcttgaaaagagtaactcttgtcaaagtgggaggtgaagttgtcattgagtgtaagccaaaagcgtctccaaaacctgtttacacctggaagaaaggaagggatatattaaaagaaaatgaaagaattaccatttctgaagatggaaacctcagaatcatcaacgttactaaatcagacgctgggagttatacctgtatagccactaaccattttggaactgctagcagtactggaaacttggtagtgaaagatccaacaagggtaatggtacccccttccagtatggatgtcactgttggagagagtattgttttaccgtgccaggtaacgcatgatcactcgctagacatcgtgtttacttggtcatttaatggacacctgatagactttgacagagatggggaccactttgaaagagttggagggcaggattcagctggtgatttgatgatccgaaacatccaactgaagcatgctgggaaatatgtctgcatggtccaaacaagtgtggacaggctatctgctgctgcagacctgattgtaagaggtcctccaggtcccccagaggctgtgacaatagacgaaatcacagataccactgctcagctctcctggagacccgggcctgacaaccacagccccatcaccatgtatgtcattcaagccaggactccattctccgtgggctggcaagcagtcagtacagtcccagaactcattgatgggaagacattcacagcgaccgtggtgggtttgaacccttgggttgaatatgaattccgcacagttgcagccaacgtgattgggattggggagcccagccgcccctcagagaaacggagaacagaagaagctctccccgaagtcacaccagcgaatgtcagtggtggcggaggcagcaaatctgaactggttataacctgggagacggtccctgaggaattacagaatggtcgaggctttggttatgtggtggccttccggccctacggtaaaatgatctggatgctgacagtgctggcctcagctgatgcctctagatacgtgttcaggaatgagagcgtgcaccccttctctccctttgaggttaaagtaggtgtcttcaacaacaaaggagaaggccctttcagtcccaccacggtggtgtattctgcagaagaagaacccaccaaaccaccagccagtatctttgccagaagtctttctgccacagatattgaagttttctgggcctccccactggagaagaatagaggacgaatacaaggttatgaggttaaatattggagacatgaagacaaagaagaaaatgctagaaaaatacgaacagttggaaatcagacatcaacaaaaatcacgaacttaaaaggcagtgtgctgtatcacttagctgtcaaggcatataattctgctgggacaggcccctctagtgcaacagtcaatgtgacaacccgaaagccaccaccaagtcaaccccccggaaacatcatatggaattcatcagactccaaaattatcctgaattgggatcaagtgaaggccctggataatgagtcggaagtaaaaggatacaaagtcttgtacagatggaacagacaaagcagcacatctgtcattgaaacaaataaaacatcggtggagctttctttgcctttcgatgaagattatataatagaaattaagccattcagcgacggaggagatggcagcagcagtgaacaaattcgaattccaaagatatcaaatgcctacgcgagaggatctggggcttccacttcgaatgcatgtacgctgtcagccatcagtacaataatgatttccctcacagctaggtccagtttatgacaaaagttatctgaaggacttgctgtttataatataagcaacatttagctagttgttttgaagacacccagtactaagtaatattgttgttcaagtacatcttattactggaataaaaatgttttttgcttcttt

SEQ ID NO: 2884 - protein, 1026 aa, Homo sapiens; identical to SEQ ID NO: 312

SEQ ID NO: 2885 - DNA, 5293 bp, Homo sapiens
agccgccgcgagcgccgggagggagggcagcgccgcgccagacggagcccggggttcgacgccaggattggctgcaagtagggagctttcgccgccgccccgggcccctcggactgtgccggcgccgcacccgaggctctcgccagcccggcgccccggtgctgaggaatcattgacatagagtaactccacagcatgtgtcttcaagagcttccctaaaagattaaaggttatacaaaacttaaaagaagcagcaattctattcgcttgttattggacttgaaactccctttgacctcggaaactgaagatgaggttgccatgggaactgctggtactgcaatcattcattttgtgccttgcagatgattccacactgcatggcccgatttttattcaagaaccaagtcctgtaatgttccctttggattctgaggagaaaaaagtgaagctcaattgtgaagttaaaggaaatccaaaacctcatatcaggtggaagttaaatggaacagatgttgacactggtatggatttccgctacagtgttgttgaagggagcttgttgatcaataaccccaataaaacccaagatgctggaacgtaccagtgcacagcgacaaactcgtttggaacaattgttagcagagaagcaaagcttcagtttgcttatcttgacaactttaaaacaagaacaagaagcactgtgtctgtccgtcgaggtcaaggaatggtgctactgtgtggcccgccaccccattctggagagctgagttatgcctggatcttcaatgaatacccttcctatcaggataatcgccgctttgtttctcaagagactgggaatctgtatattgccaaagtagaaaaatcagatgttgggaattatacctgtgtggttaccaataccgtgacaaaccacaaggtcctggggccacctacaccactaatattgagaaatgatggagtgatgggtgaatatgagcccaaaatagaagtgcagttcccagaaacagttccgactgcaaaaggagcaacggtgaagctggaatgctttgctttaggaaatccagtaccaactattatctggcgaagagctgatggaaagccaatagcaaggaaagccagaagacacaagtcaaatggaattcttgagatccctaattttcagcaggaggatgctggtttatatgaatgtgtagctgaaaattccagagggaaaaatgtagcaaggggacagctaactttctatgctcaacctaattggattcaaaaaataaatgatattcacgtggccatggaagaaaatgtcttttgggaatgtaaagcaaatggaaggcctaagcctacatacaagtggctaaaaaatggcgaacctctgctaactcgggatagaattcaaattgagcaaggaacactcaacataacaatagtgaacctctcagatgctggcatgtatcagtgtttggcagagaataaacatggagttatcttttccaacgcagagcttagtgttatagctgtaggtccagatttttcaagaacactcttgaaaagagtaactcttgtcaaagtgggaggtgaagttgtcattgagtgtaagccaaaagcgtctccaaaacctgtttacacctggaagaaaggaagggatatattaaaagaaaatgaaagaattaccatttctgaagatggaaacctcagaatcatcaacgttactaaatcagacgctgggagttatacctgtatagccactaaccattttggaactgctagcagtactggaaacttggtagtgaaagatccaacaagggtaatggtacccccttccagtatggatgtcactgttggagagagtattgttttaccgtgccaggtaacgcatgatcactcgctagacatcgtgtttacttggtcatttaatggacacctgatagactttgacagagatggggaccactttgaaagagttggagggcaggattcagctggtgatttgatgatccgaaacatccaactgaagcatgctgggaaatatgtctgcatggtccaaacaagtgtggacaggctatctgctgctgcagacctgattgtaagaggtcctccaggtcccccagaggctgtgacaatagacgaaatcacagataccactgctcagctctcctggagacccgggcctgacaaccacagccccatcaccatgtatgtcattcaagccaggactccattctccgtgggctggcaagcagtcagtacagtcccagaactcattgatgggaagacattcacagcgaccgtggtgggtttgaacccttgggttgaatatgaattccgcacagttgcagccaacgtgattgggattggggagcccagccgcccctcagagaaacggagaacagaagaagctctccccgaagtcacaccagcgaatgtcagtggtggcggaggcagcaaatctgaactggttataacctgggagacggtccctgaggaattacagaatggtcgaggctttggttatgtggtggccttccggccctacggtaaaatgatctggatgctgacagtgctggcctcagctgatgcctctagatacgtgttcaggaatgagagcgtgcaccccttctctccctttgaggttaaagtaggtgtcttcaacaacaaaggagaaggccctttcagtcccaccacggtggtgtattctgcagaagaagaacccaccaaaccaccagccagtatctttgccagaagtctttctgccacagatattgaagttttctgggcctccccactggagaagaatagaggacgaatacaaggttatgaggttaaatattggagacatgaagacaaagaagaaaatgctagaaaaatacgaacagttggaaatcagacatcaacaaaaatcacgaacttaaaaggcagtgtgctgtatcacttagctgtcaaggcatataattctgctgggacaggcccctctagtgcaacagtcaatgtgacaacccgaaagccaccaccaagtcaaccccccggaaacatcatatggaattcatcagactccaaaattatcctgaattgggatcaagtgaaggccctggataatgagtcggaagtaaaaggatacaaagtcttgtacagatggaacagacaaagcagcacatctgtcattgaaacaaataaaacatcggtggagctttctttgcctttcgatgaagattatataatagaaattaagccattcagcgacggaggagatggcagcagcagtgaacaaattcgaattccaaagatatcaaatgcctacgcgagaggatctggggcttccacttcgaatgcatgtacgctgtcagccatcagtacaataatgatttccctcacagctaggtccagtttatgacaaaagttatctgaaggacttgctgtttataatataagcaacatttagctagttgttttgaagacacccagtactaagtaatattgttgttcaagtacatcttattactggaataaaaatgttttttgcttctttaggaatggcattatacagtacttcctcaaagcaaatctagctttgtctgaagtttctttggaaactctgcaatgcactgaagacatctgtaatatgatgttaccaaagcagtttacatatgtccttatatgccctcggctgtaaaatgctatgggcaacacaatcatgcaattataatttgaaaatatttcctttaaagacagagtttgaaactcatcttggtaaataaattgcaaattactcgtacagttttacaaggatctcatggcagaacagcggaagacttggtccgtaactcaaggctgttgtatgcaaactactcttctagtggttaatgcacttgacatgtacagtatgtttcccatgccgttgtgattttgacatgtacagtatgttttcatgccgttgtgaattttgttgttcaacccaacttgagatggtttcaggaatggctgcaatctcaaaagctcaatgtactgcccaagaggcaccttgtgcaatattcccatccctgaatttagcattgtacaggaagattttcttttcactcaactgagttagcattgtctttgtggtagcattatcttagacattaaatttgaagtaacatatatcctgtagtaacatagacccaaagttactatagtcaaccaagtctttcaaaggataaaagatcattttattatctttaactgtatctattttgaatgtaaatttaaaaaaagtaattctctgtcaatggattcgtaatttctttacaaaatttcttatatataatatgtgtatctctgtaataatagagcccttcttttgaatcaaaattacatatggactttggaagattgctcctatttcaacaaatagttgctgcaagaatttttaatatgactctataaaagctctttagtacaattgtatggtttcttgatgattctgttttgcaataggtagcctagttgctttatatgctttaccttctaggtcttaaaatcacacattggaaaatgacaatatcaacaaaactgtattcttatgaaaagaactatttgttacaatgagaaaggttttgtgagtaaaccctactggacagtgacataaaaggcaatggaattttctataaacattttctcatgtaaacatgctgccaccttttcttctttctcagagaactcaaatttgctatagtttgtcatttttgcttacaaataatataacttttcaaccttctagttatatttatccaataaagtcataatcgggattccatttgtgtaaaaactagggtggtaaccggaaaaaaatattgtcagtatttcaagctgtgttcctttcttagtttgatatggttacttctatgttgaaataaaatttaaaatcacatgcaaaaaaaaaatcagcaaaataataaaatgaacgaaaaaaaatgacacccagggagttcccaaccccagtgtaaatgatatttaccagtgatctagcatatgtaatcttttttaaaggtattgttaataaatattctgtcatttgtaaagatacttgtctttcgggagcatttttcctgcctgcctgtcagggaatttgttagcttacctttgtgctagttataatttgggatcatagagggactcaaaagtctctacccaaatctagatgacccagagcttttcctttggaattgacaaccctgaagcaccatttcaaatcctctttggaagtagagagggtcctaatccacaagtaaatgtcctgaagatgagacttgaatat

SEQ ID NO: 2886 - protein, 1026 aa, Homo sapiens; identical to SEQ ID NO: 312

SEQ ID NO: 2887 - DNA, 3849 bp, Homo sapiens
gttcgacgccaggattggctgcaagtagggagctttcgccgccgccccgggcccctcggactgtgccggcgccgcacccgaggctctcgccagcccggcgccccggtgctgagccggaaaataagtttgttgcgctgcgaggcagccacaaaacaaggaaccgagagcccggaatgctgcgggaagccttcaagtcagctcctccgactggttcgggctactgccccctctccgtgcgccctggcctctggcgccgggttcccggcggggcttttcttctgacagcccagtcacagcccgcagcagagggacgcgaacctggggagtggagggacctgggactaaaggaacaggagcccgtagccgtggtggaaggagccgcgtggagacggaggctgatgtctgtggcgcccgctgggtgccgggctggctgctgagcgctgaggctgcggcggcgagcgacaggccaggtgcctgctcttagggaaggaatcattgacatagagtaactccacagcatgtgtcttcaagagcttccctaaaagattaaaggttatacaaaacttaaaagaagcagcaattctattcgcttgttattggacttgaaactccctttgacctcggaaactgaagatgaggttgccatgggaactgctggtactgcaatcattcattttgtgccttgcagatgattccacactgcatggcccgatttttattcaagaaccaagtcctgtaatgttccctttggattctgaggagaaaaaagtgaagctcaattgtgaagttaaaggaaatccaaaacctcatatcaggtggaagttaaatggaacagatgttgacactggtatggatttccgctacagtgttgttgaagggagcttgttgatcaataaccccaataaaacccaagatgctggaacgtaccagtgcacagcgacaaactcgtttggaacaattgttagcagagaagcaaagcttcagtttgcttatcttgacaactttaaaacaagaacaagaagcactgtgtctgtccgtcgaggtcaaggaatggtgctactgtgtggcccgccaccccattctggagagctgagttatgcctggatcttcaatgaatacccttcctatcaggataatcgccgctttgtttctcaagagactgggaatctgtatattgccaaagtagaaaaatcagatgttgggaattatacctgtgtggttaccaataccgtgacaaaccacaaggtcctggggccacctacaccactaatattgagaaatgatggagtgatgggtgaatatgagcccaaaatagaagtgcagttcccagaaacagttccgactgcaaaaggagcaacggtgaagctggaatgctttgctttaggaaatccagtaccaactattatctggcgaagagctgatggaaagccaatagcaaggaaagccagaagacacaagtcaaatggaattcttgagatccctaattttcagcaggaggatgctggtttatatgaatgtgtagctgaaaattccagagggaaaaatgtagcaaggggacagctaactttctatgctcaacctaattggattcaaaaaataaatgatattcacgtggccatggaagaaaatgtcttttgggaatgtaaagcaaatggaaggcctaagcctacatacaagtggctaaaaaatggcgaacctctgctaactcgggatagaattcaaattgagcaaggaacactcaacataacaatagtgaacctctcagatgctggcatgtatcagtgtttggcagagaataaacatggagttatcttttccaacgcagagcttagtgttatagctgtaggtccagatttttcaagaacactcttgaaaagagtaactcttgtcaaagtgggaggtgaagttgtcattgagtgtaagccaaaagcgtctccaaaacctgtttacacctggaagaaaggaagggatatattaaaagaaaatgaaagaattaccatttctgaagatggaaacctcagaatcatcaacgttactaaatcagacgctgggagttatacctgtatagccactaaccattttggaactgctagcagtactggaaacttggtagtgaaagatccaacaagggtaatggtacccccttccagtatggatgtcactgttggagagagtattgttttaccgtgccaggtaacgcatgatcactcgctagacatcgtgtttacttggtcatttaatggacacctgatagactttgacagagatggggaccactttgaaagagttggagggcaggattcagctggtgatttgatgatccgaaacatccaactgaagcatgctgggaaatatgtctgcatggtccaaacaagtgtggacaggctatctgctgctgcagacctgattgtaagaggtcctccaggtcccccagaggctgtgacaatagacgaaatcacagataccactgctcagctctcctggagacccgggcctgacaaccacagccccatcaccatgtatgtcattcaagccaggactccattctccgtgggctggcaagcagtcagtacagtcccagaactcattgatgggaagacattcacagcgaccgtggtgggtttgaacccttgggttgaatatgaattccgcacagttgcagccaacgtgattgggattggggagcccagccgcccctcagagaaacggagaacagaagaagctctccccgaagtcacaccagcgaatgtcagtggtggcggaggcagcaaatctgaactggttataacctgggagacggtccctgaggaattacagaatggtcgaggctttggttatgtggtggccttccggccctacggtaaaatgatctggatgctgacagtgctggcctcagctgatgcctctagatacgtgttcaggaatgagagcgtgcaccccttctctccctttgaggttaaagtaggtgtcttcaacaacaaaggagaaggccctttcagtcccaccacggtggtgtattctgcagaagaagaacccaccaaaccaccagccagtatctttgccagaagtctttctgccacagatattgaagttttctgggcctccccactggagaagaatagaggacgaatacaaggttatgaggttaaatattggagacatgaagacaaagaagaaaatgctagaaaaatacgaacagttggaaatcagacatcaacaaaaatcacgaacttaaaaggcagtgtgctgtatcacttagctgtcaaggcatataattctgctgggacaggcccctctagtgcaacagtcaatgtgacaacccgaaagccaccaccaagtcaaccccccggaaacatcatatggaattcatcagactccaaaattatcctgaattgggatcaagtgaaggccctggataatgagtcggaagtaaaaggatacaaagtcttgtacagatggaacagacaaagcagcacatctgtcattgaaacaaataaaacatcggtggagctttctttgcctttcgatgaagattatataatagaaattaagccattcagcgacggaggagatggcagcagcagtgaacaaattcgaattccaaagatatcaaatgcctacgcgagaggatctggggcttccacttcgaatgcatgtacgctgtcagccatcagtacaataatgatttccctcacagctaggtccagtttatgacaaaagttatctgaaggacttgctgtttataatataagcaacatttagctagttgttttgaagacacccagtactaagtaatattgttgttcaagtacatcttattactggaataaaaatgttttttgcttcttt

SEQ ID NO: 2888 - protein, 1026 aa, Homo sapiens; identical to SEQ ID NO: 312

SEQ ID NO: 2889 - DNA, 3746 bp, Homo sapiens
gttcgacgccaggattggctgcaagtagggagctttcgccgccgccccgggcccctcggactgtgccggcgccgcacccgaggctctcgccagcccggcgccccggtgctgagccggaaaataagtttgttgcgctgcgaggcagccacaaaacaaggaaccgagagcccggaatgctgcgggaagccttcaagtcagctcctccgactggttcgggctactgccccctctccgtgcgccctggcctctggcgccgggttcccggcggggcttttcttctgacagcccagtcacagcccgcagcagagggacgcgaacctggggagtggagggacctgggactaaaggaacaggagcccgtagccgtggtggaaggagccgcgtggagacggaggctgatgtctgtggcgcccgctgggtgccgggctggctgctgagcgctgaggctgcggcggcgagcgacaggccaggtgcctgctcttagggaaggaatcattgacatagagtaactccacagcatgtgtcttcaagagcttccctaaaagattaaaggttatacaaaacttaaaagaagcagcaattctattcgcttgttattggacttgaaactccctttgacctcggaaactgaagatgaggttgccatgggaactgctggtactgcaatcattcattttgtgccttgcagatgattccacactgcatggcccgatttttattcaagaaccaagtcctgtaatgttccctttggattctgaggagaaaaaagtgaagctcaattgtgaagttaaaggaaatccaaaacctcatatcaggtggaagttaaatggaacagatgttgacactggtatggatttccgctacagtgttgttgaagggagcttgttgatcaataaccccaataaaacccaagatgctggaacgtaccagtgcacagcgacaaactcgtttggaacaattgttagcagagaagcaaagcttcagtttgcttatcttgacaactttaaaacaagaacaagaagcactgtgtctgtccgtcgaggtcaaggaatggtgctactgtgtggcccgccaccccattctggagagctgagttatgcctggatcttcaatgaatacccttcctatcaggataatcgccgctttgtttctcaagagactgggaatctgtatattgccaaagtagaaaaatcagatgttgggaattatacctgtgtggttaccaataccgtgacaaaccacaaggtcctggggccacctacaccactaatattgagaaatgatgtccagtaccaactattatctggcgaagagctgatggaaagccaatagcaaggaaagccagaagacacaagtcaaatggaattcttgagatccctaattttcagcaggaggatgctggtttatatgaatgtgtagctgaaaattccagagggaaaaatgtagcaaggggacagctaactttctatgctcaacctaattggattcaaaaaataaatgatattcacgtggccatggaagaaaatgtcttttgggaatgtaaagcaaatggaaggcctaagcctacatacaagtggctaaaaaatggcgaacctctgctaactcgggatagaattcaaattgagcaaggaacactcaacataacaatagtgaacctctcagatgctggcatgtatcagtgtttggcagagaataaacatggagttatcttttccaacgcagagcttagtgttatagctgtaggtccagatttttcaagaacactcttgaaaagagtaactcttgtcaaagtgggaggtgaagttgtcattgagtgtaagccaaaagcgtctccaaaacctgtttacacctggaagaaaggaagggatatattaaaagaaaatgaaagaattaccatttctgaagatggaaacctcagaatcatcaacgttactaaatcagacgctgggagttatacctgtatagccactaaccattttggaactgctagcagtactggaaacttggtagtgaaagatccaacaagggtaatggtacccccttccagtatggatgtcactgttggagagagtattgttttaccgtgccaggtaacgcatgatcactcgctagacatcgtgtttacttggtcatttaatggacacctgatagactttgacagagatggggaccactttgaaagagttggagggcaggattcagctggtgatttgatgatccgaaacatccaactgaagcatgctgggaaatatgtctgcatggtccaaacaagtgtggacaggctatctgctgctgcagacctgattgtaagaggtcctccaggtcccccagaggctgtgacaatagacgaaatcacagataccactgctcagctctcctggagacccgggcctgacaaccacagccccatcaccatgtatgtcattcaagccaggactccattctccgtgggctggcaagcagtcagtacagtcccagaactcattgatgggaagacattcacagcgaccgtggtgggtttgaacccttgggttgaatatgaattccgcacagttgcagccaacgtgattgggattggggagcccagccgcccctcagagaaacggagaacagaagaagctctccccgaagtcacaccagcgaatgtcagtggtggcggaggcagcaaatctgaactggttataacctgggagacggtccctgaggaattacagaatggtcgaggctttggttatgtggtggccttccggccctacggtaaaatgatctggatgctgacagtgctggcctcagctgatgcctctagatacgtgttcaggaatgagagcgtgcaccccttctctccctttgaggttaaagtaggtgtcttcaacaacaaaggagaaggccctttcagtcccaccacggtggtgtattctgcagaagaagaacccaccaaaccaccagccagtatctttgccagaagtctttctgccacagatattgaagttttctgggcctccccactggagaagaatagaggacgaatacaaggttatgaggttaaatattggagacatgaagacaaagaagaaaatgctagaaaaatacgaacagttggaaatcagacatcaacaaaaatcacgaacttaaaaggcagtgtgctgtatcacttagctgtcaaggcatataattctgctgggacaggcccctctagtgcaacagtcaatgtgacaacccgaaagccaccaccaagtcaaccccccggaaacatcatatggaattcatcagactccaaaattatcctgaattgggatcaagtgaaggccctggataatgagtcggaagtaaaaggatacaaagtcttgtacagatggaacagacaaagcagcacatctgtcattgaaacaaataaaacatcggtggagctttctttgcctttcgatgaagattatataatagaaattaagccattcagcgacggaggagatggcagcagcagtgaacaaattcgaattccaaagatatcaaatgcctacgcgagaggatctggggcttccacttcgaatgcatgtacgctgtcagccatcagtacaataatgatttccctcacagctaggtccagtttatgacaaaagttatctgaaggacttgctgtttataatataagcaacatttagctagttgttttgaagacacccagtactaagtaatattgttgttcaagtacatcttattactggaataaaaatgttttttgcttcttt

SEQ ID NO: 2890 - protein, 698 aa, Homo sapiens; identical to SEQ ID NO: 316

SEQ ID NO: 2891 - DNA, 5616 bp, Homo sapiens
gttcgacgccaggattggctgcaagtagggagctttcgccgccgccccgggcccctcggactgtgccggcgccgcacccgaggctctcgccagcccggcgccccggtgctgagccggaaaataagtttgttgcgctgcgaggcagccacaaaacaaggaaccgagagcccggaatgctgcgggaagccttcaagtcagctcctccgactggttcgggctactgccccctctccgtgcgccctggcctctggcgccgggttcccggcggggcttttcttctgacagcccagtcacagcccgcagcagagggacgcgaacctggggagtggagggacctgggactaaaggaacaggagcccgtagccgtggtggaaggagccgcgtggagacggaggctgatgtctgtggcgcccgctgggtgccgggctggctgctgagcgctgaggctgcggcggcgagcgacaggccaggtgcctgctcttagggaaggaatcattgacatagagtaactccacagcatgtgtcttcaagagcttccctaaaagattaaaggttatacaaaacttaaaagaagcagcaattctattcgcttgttattggacttgaaactccctttgacctcggaaactgaagatgaggttgccatgggaactgctggtactgcaatcattcattttgtgccttgcagatgattccacactgcatggcccgatttttattcaagaaccaagtcctgtaatgttccctttggattctgaggagaaaaaagtgaagctcaattgtgaagttaaaggaaatccaaaacctcatatcaggtggaagttaaatggaacagatgttgacactggtatggatttccgctacagtgttgttgaagggagcttgttgatcaataaccccaataaaacccaagatgctggaacgtaccagtgcacagcgacaaactcgtttggaacaattgttagcagagaagcaaagcttcagtttgcttatcttgacaactttaaaacaagaacaagaagcactgtgtctgtccgtcgaggtcaaggaatggtgctactgtgtggcccgccaccccattctggagagctgagttatgcctggatcttcaatgaatacccttcctatcaggataatcgccgctttgtttctcaagagactgggaatctgtatattgccaaagtagaaaaatcagatgttgggaattatacctgtgtggttaccaataccgtgacaaaccacaaggtcctggggccacctacaccactaatattgagaaatgatggagtgatgggtgaatatgagcccaaaatagaagtgcagttcccagaaacagttccgactgcaaaaggagcaacggtgaagctggaatgctttgctttaggaaatccagtaccaactattatctggcgaagagctgatggaaagccaatagcaaggaaagccagaagacacaagtcaaatggaattcttgagatccctaattttcagcaggaggatgctggtttatatgaatgtgtagctgaaaattccagagggaaaaatgtagcaaggggacagctaactttctatgctcaacctaattggattcaaaaaataaatgatattcacgtggccatggaagaaaatgtcttttgggaatgtaaagcaaatggaaggcctaagcctacatacaagtggctaaaaaatggcgaacctctgctaactcgggatagaattcaaattgagcaaggaacactcaacataacaatagtgaacctctcagatgctggcatgtatcagtgtttggcagagaataaacatggagttatcttttccaacgcagagcttagtgttatagctgtaggtccagatttttcaagaacactcttgaaaagagtaactcttgtcaaagtgggaggtgaagttgtcattgagtgtaagccaaaagcgtctccaaaacctgtttacacctggaagaaaggaagggatatattaaaagaaaatgaaagaattaccatttctgaagatggaaacctcagaatcatcaacgttactaaatcagacgctgggagttatacctgtatagccactaaccattttggaactgctagcagtactggaaacttggtagtgaaagatccaacaagggtaatggtacccccttccagtatggatgtcactgttggagagagtattgttttaccgtgccaggtaacgcatgatcactcgctagacatcgtgtttacttggtcatttaatggacacctgatagactttgacagagatggggaccactttgaaagagttggagggcaggattcagctggtgatttgatgatccgaaacatccaactgaagcatgctgggaaatatgtctgcatggtccaaacaagtgtggacaggctatctgctgctgcagacctgattgtaagaggtcctccaggtcccccagaggctgtgacaatagacgaaatcacagataccactgctcagctctcctggagacccgggcctgacaaccacagccccatcaccatgtatgtcattcaagccaggactccattctccgtgggctggcaagcagtcagtacagtcccagaactcattgatgggaagacattcacagcgaccgtggtgggtttgaacccttgggttgaatatgaattccgcacagttgcagccaacgtgattgggattggggagcccagccgcccctcagagaaacggagaacagaagaagctctccccgaagtcacaccagcgaatgtcagtggtggcggaggcagcaaatctgaactggttataacctgggagacggtccctgaggaattacagaatggtcgaggctttggttatgtggtggccttccggccctacggtaaaatgatctggatgctgacagtgctggcctcagctgatgcctctagatacgtgttcaggaatgagagcgtgcaccccttctctccctttgaggttaaagtaggtgtcttcaacaacaaaggagaaggccctttcagtcccaccacggtggtgtattctgcagaagaagaacccaccaaaccaccagccagtatctttgccagaagtctttctgccacagatattgaagttttctgggcctccccactggagaagaatagaggacgaatacaaggttatgaggttaaatattggagacatgaagacaaagaagaaaatgctagaaaaatacgaacagttggaaatcagacatcaacaaaaatcacgaacttaaaaggcagtgtgctgtatcacttagctgtcaaggcatataattctgctgggacaggcccctctagtgcaacagtcaatgtgacaacccgaaagccaccaccaagtcaaccccccggaaacatcatatggaattcatcagactccaaaattatcctgaattgggatcaagtgaaggccctggataatgagtcggaagtaaaaggatacaaagtcttgtacagatggaacagacaaagcagcacatctgtcattgaaacaaataaaacatcggtggagctttctttgcctttcgatgaagattatataatagaaattaagccattcagcgacggaggagatggcagcagcagtgaacaaattcgaattccaaagatatcaaatgcctacgcgagaggatctggggcttccacttcgaatgcatgtacgctgtcagccatcagtacaataatgatttccctcacagctaggtccagtttatgacaaaagttatctgaaggacttgctgtttataatataagcaacatttagctagttgttttgaagacacccagtactaagtaatattgttgttcaagtacatcttattactggaataaaaatgttttttgcttctttaggaatggcattatacagtacttcctcaaagcaaatctagctttgtctgaagtttctttggaaactctgcaatgcactgaagacatctgtaatatgatgttaccaaagcagtttacatatgtccttatatgccctcggctgtaaaatgctatgggcaacacaatcatgcaattataatttgaaaatatttcctttaaagacagagtttgaaactcatcttggtaaataaattgcaaattactcgtacagttttacaaggatctcatggcagaacagcggaagacttggtccgtaactcaaggctgttgtatgcaaactactcttctagtggttaatgcacttgacatgtacagtatgtttcccatgccgttgtgattttgacatgtacagtatgttttcatgccgttgtgaattttgttgttcaacccaacttgagatggtttcaggaatggctgcaatctcaaaagctcaatgtactgcccaagaggcaccttgtgcaatattcccatccctgaatttagcattgtacaggaagattttcttttcactcaactgagttagcattgtctttgtggtagcattatcttagacattaaatttgaagtaacatatatcctgtagtaacatagacccaaagttactatagtcaaccaagtctttcaaaggataaaagatcattttattatctttaactgtatctattttgaatgtaaatttaaaaaaagtaattctctgtcaatggattcgtaatttctttacaaaatttcttatatataatatgtgtatctctgtaataatagagcccttcttttgaatcaaaattacatatggactttggaagattgctcctatttcaacaaatagttgctgcaagaatttttaatatgactctataaaagctctttagtacaattgtatggtttcttgatgattctgttttgcaataggtagcctagttgctttatatgctttaccttctaggtcttaaaatcacacattggaaaatgacaatatcaacaaaactgtattcttatgaaaagaactatttgttacaatgagaaaggttttgtgagtaaaccctactggacagtgacataaaaggcaatggaattttctataaacattttctcatgtaaacatgctgccaccttttcttctttctcagagaactcaaatttgctatagtttgtcatttttgcttacaaataatataacttttcaaccttctagttatatttatccaataaagtcataatcgggattccatttgtgtaaaaactagggtggtaaccggaaaaaaatattgtcagtatttcaagctgtgttcctttcttagtttgatatggttacttctatgttgaaataaaatttaaaatcacatgcaaaaaaaaaatcagcaaaataataaaatgaacgaaaaaaaatgacacccagggagttcccaaccccagtgtaaatgatatttaccagtgatctagcatatgtaatcttttttaaaggtattgttaataaatattctgtcatttgtaaagatacttgtctttcgggagcatttttcctgcctgcctgtcagggaatttgttagcttacctttgtgctagttataatttgggatcatagagggactcaaaagtctctacccaaatctagatgacccagagcttttcctttggaattgacaaccctgaagcaccatttcaaatcctctttggaagtagagagggtcctaatccacaagtaaatgtcctgaagatgagacttgaatat

SEQ ID NO: 2892 - protein, 1026 aa, Homo sapiens; identical to SEQ ID NO: 312

SEQ ID NO: 2893 - DNA, 3618 bp, Homo sapiens
aagtagggagctttcgccgccgccccgggcccctcggactgtgccggcgccgcacccgaggctctcgccagcccggcgccccggtgctgagtgggtgaaaaagaacagtgtgtcatgaagacaggcacctggaggtgatttgggtggcattcatgagaaaattcacgttacccacttcgctaactgatgaaacactgccagagcccacttggactgtttcgcaactttacttaagggaataaaagctctcatgctgaggaatcattgacatagagtaactccacagcatgtgtcttcaagagcttccctaaaagattaaaggttatacaaaacttaaaagaagcagcaattctattcgcttgttattggacttgaaactccctttgacctcggaaactgaagatgaggttgccatgggaactgctggtactgcaatcattcattttgtgccttgcagatgattccacactgcatggcccgatttttattcaagaaccaagtcctgtaatgttccctttggattctgaggagaaaaaagtgaagctcaattgtgaagttaaaggaaatccaaaacctcatatcaggtggaagttaaatggaacagatgttgacactggtatggatttccgctacagtgttgttgaagggagcttgttgatcaataaccccaataaaacccaagatgctggaacgtaccagtgcacagcgacaaactcgtttggaacaattgttagcagagaagcaaagcttcagtttgcttatcttgacaactttaaaacaagaacaagaagcactgtgtctgtccgtcgaggtcaaggaatggtgctactgtgtggcccgccaccccattctggagagctgagttatgcctggatcttcaatgaatacccttcctatcaggataatcgccgctttgtttctcaagagactgggaatctgtatattgccaaagtagaaaaatcagatgttgggaattatacctgtgtggttaccaataccgtgacaaaccacaaggtcctggggccacctacaccactaatattgagaaatgatggagtgatgggtgaatatgagcccaaaatagaagtgcagttcccagaaacagttccgactgcaaaaggagcaacggtgaagctggaatgctttgctttaggaaatccagtaccaactattatctggcgaagagctgatggaaagccaatagcaaggaaagccagaagacacaagtcaaatggaattcttgagatccctaattttcagcaggaggatgctggtttatatgaatgtgtagctgaaaattccagagggaaaaatgtagcaaggggacagctaactttctatgctcaacctaattggattcaaaaaataaatgatattcacgtggccatggaagaaaatgtcttttgggaatgtaaagcaaatggaaggcctaagcctacatacaagtggctaaaaaatggcgaacctctgctaactcgggatagaattcaaattgagcaaggaacactcaacataacaatagtgaacctctcagatgctggcatgtatcagtgtttggcagagaataaacatggagttatcttttccaacgcagagcttagtgttatagctgtaggtccagatttttcaagaacactcttgaaaagagtaactcttgtcaaagtgggaggtgaagttgtcattgagtgtaagccaaaagcgtctccaaaacctgtttacacctggaagaaaggaagggatatattaaaagaaaatgaaagaattaccatttctgaagatggaaacctcagaatcatcaacgttactaaatcagacgctgggagttatacctgtatagccactaaccattttggaactgctagcagtactggaaacttggtagtgaaagatccaacaagggtaatggtacccccttccagtatggatgtcactgttggagagagtattgttttaccgtgccaggtaacgcatgatcactcgctagacatcgtgtttacttggtcatttaatggacacctgatagactttgacagagatggggaccactttgaaagagttggagggcaggattcagctggtgatttgatgatccgaaacatccaactgaagcatgctgggaaatatgtctgcatggtccaaacaagtgtggacaggctatctgctgctgcagacctgattgtaagaggtcctccaggtcccccagaggctgtgacaatagacgaaatcacagataccactgctcagctctcctggagacccgggcctgacaaccacagccccatcaccatgtatgtcattcaagccaggactccattctccgtgggctggcaagcagtcagtacagtcccagaactcattgatgggaagacattcacagcgaccgtggtgggtttgaacccttgggttgaatatgaattccgcacagttgcagccaacgtgattgggattggggagcccagccgcccctcagagaaacggagaacagaagaagctctccccgaagtcacaccagcgaatgtcagtggtggcggaggcagcaaatctgaactggttataacctgggagacggtccctgaggaattacagaatggtcgaggctttggttatgtggtggccttccggccctacggtaaaatgatctggatgctgacagtgctggcctcagctgatgcctctagatacgtgttcaggaatgagagcgtgcaccccttctctccctttgaggttaaagtaggtgtcttcaacaacaaaggagaaggccctttcagtcccaccacggtggtgtattctgcagaagaagaacccaccaaaccaccagccagtatctttgccagaagtctttctgccacagatattgaagttttctgggcctccccactggagaagaatagaggacgaatacaaggttatgaggttaaatattggagacatgaagacaaagaagaaaatgctagaaaaatacgaacagttggaaatcagacatcaacaaaaatcacgaacttaaaaggcagtgtgctgtatcacttagctgtcaaggcatataattctgctgggacaggcccctctagtgcaacagtcaatgtgacaacccgaaagccaccaccaagtcaaccccccggaaacatcatatggaattcatcagactccaaaattatcctgaattgggatcaagtgaaggccctggataatgagtcggaagtaaaaggatacaaagtcttgtacagatggaacagacaaagcagcacatctgtcattgaaacaaataaaacatcggtggagctttctttgcctttcgatgaagattatataatagaaattaagccattcagcgacggaggagatggcagcagcagtgaacaaattcgaattccaaagatatcaaatgcctacgcgagaggatctggggcttccacttcgaatgcatgtacgctgtcagccatcagtacaataatgatttccctcacagctaggtccagtttatgacaaaagttatctgaaggacttgctgtttataatataagcaacatttagctagttgttttgaagacacccagtactaagtaatattgttgttcaagtacatcttattactggaataaaaatgttttttgcttcttt

SEQ ID NO: 2894 - protein, 1026 aa, Homo sapiens; identical to SEQ ID NO: 312

SEQ ID NO: 2895 - DNA, 5385 bp, Homo sapiens
aagtagggagctttcgccgccgccccgggcccctcggactgtgccggcgccgcacccgaggctctcgccagcccggcgccccggtgctgagtgggtgaaaaagaacagtgtgtcatgaagacaggcacctggaggtgatttgggtggcattcatgagaaaattcacgttacccacttcgctaactgatgaaacactgccagagcccacttggactgtttcgcaactttacttaagggaataaaagctctcatgctgaggaatcattgacatagagtaactccacagcatgtgtcttcaagagcttccctaaaagattaaaggttatacaaaacttaaaagaagcagcaattctattcgcttgttattggacttgaaactccctttgacctcggaaactgaagatgaggttgccatgggaactgctggtactgcaatcattcattttgtgccttgcagatgattccacactgcatggcccgatttttattcaagaaccaagtcctgtaatgttccctttggattctgaggagaaaaaagtgaagctcaattgtgaagttaaaggaaatccaaaacctcatatcaggtggaagttaaatggaacagatgttgacactggtatggatttccgctacagtgttgttgaagggagcttgttgatcaataaccccaataaaacccaagatgctggaacgtaccagtgcacagcgacaaactcgtttggaacaattgttagcagagaagcaaagcttcagtttgcttatcttgacaactttaaaacaagaacaagaagcactgtgtctgtccgtcgaggtcaaggaatggtgctactgtgtggcccgccaccccattctggagagctgagttatgcctggatcttcaatgaatacccttcctatcaggataatcgccgctttgtttctcaagagactgggaatctgtatattgccaaagtagaaaaatcagatgttgggaattatacctgtgtggttaccaataccgtgacaaaccacaaggtcctggggccacctacaccactaatattgagaaatgatggagtgatgggtgaatatgagcccaaaatagaagtgcagttcccagaaacagttccgactgcaaaaggagcaacggtgaagctggaatgctttgctttaggaaatccagtaccaactattatctggcgaagagctgatggaaagccaatagcaaggaaagccagaagacacaagtcaaatggaattcttgagatccctaattttcagcaggaggatgctggtttatatgaatgtgtagctgaaaattccagagggaaaaatgtagcaaggggacagctaactttctatgctcaacctaattggattcaaaaaataaatgatattcacgtggccatggaagaaaatgtcttttgggaatgtaaagcaaatggaaggcctaagcctacatacaagtggctaaaaaatggcgaacctctgctaactcgggatagaattcaaattgagcaaggaacactcaacataacaatagtgaacctctcagatgctggcatgtatcagtgtttggcagagaataaacatggagttatcttttccaacgcagagcttagtgttatagctgtaggtccagatttttcaagaacactcttgaaaagagtaactcttgtcaaagtgggaggtgaagttgtcattgagtgtaagccaaaagcgtctccaaaacctgtttacacctggaagaaaggaagggatatattaaaagaaaatgaaagaattaccatttctgaagatggaaacctcagaatcatcaacgttactaaatcagacgctgggagttatacctgtatagccactaaccattttggaactgctagcagtactggaaacttggtagtgaaagatccaacaagggtaatggtacccccttccagtatggatgtcactgttggagagagtattgttttaccgtgccaggtaacgcatgatcactcgctagacatcgtgtttacttggtcatttaatggacacctgatagactttgacagagatggggaccactttgaaagagttggagggcaggattcagctggtgatttgatgatccgaaacatccaactgaagcatgctgggaaatatgtctgcatggtccaaacaagtgtggacaggctatctgctgctgcagacctgattgtaagaggtcctccaggtcccccagaggctgtgacaatagacgaaatcacagataccactgctcagctctcctggagacccgggcctgacaaccacagccccatcaccatgtatgtcattcaagccaggactccattctccgtgggctggcaagcagtcagtacagtcccagaactcattgatgggaagacattcacagcgaccgtggtgggtttgaacccttgggttgaatatgaattccgcacagttgcagccaacgtgattgggattggggagcccagccgcccctcagagaaacggagaacagaagaagctctccccgaagtcacaccagcgaatgtcagtggtggcggaggcagcaaatctgaactggttataacctgggagacggtccctgaggaattacagaatggtcgaggctttggttatgtggtggccttccggccctacggtaaaatgatctggatgctgacagtgctggcctcagctgatgcctctagatacgtgttcaggaatgagagcgtgcaccccttctctccctttgaggttaaagtaggtgtcttcaacaacaaaggagaaggccctttcagtcccaccacggtggtgtattctgcagaagaagaacccaccaaaccaccagccagtatctttgccagaagtctttctgccacagatattgaagttttctgggcctccccactggagaagaatagaggacgaatacaaggttatgaggttaaatattggagacatgaagacaaagaagaaaatgctagaaaaatacgaacagttggaaatcagacatcaacaaaaatcacgaacttaaaaggcagtgtgctgtatcacttagctgtcaaggcatataattctgctgggacaggcccctctagtgcaacagtcaatgtgacaacccgaaagccaccaccaagtcaaccccccggaaacatcatatggaattcatcagactccaaaattatcctgaattgggatcaagtgaaggccctggataatgagtcggaagtaaaaggatacaaagtcttgtacagatggaacagacaaagcagcacatctgtcattgaaacaaataaaacatcggtggagctttctttgcctttcgatgaagattatataatagaaattaagccattcagcgacggaggagatggcagcagcagtgaacaaattcgaattccaaagatatcaaatgcctacgcgagaggatctggggcttccacttcgaatgcatgtacgctgtcagccatcagtacaataatgatttccctcacagctaggtccagtttatgacaaaagttatctgaaggacttgctgtttataatataagcaacatttagctagttgttttgaagacacccagtactaagtaatattgttgttcaagtacatcttattactggaataaaaatgttttttgcttctttaggaatggcattatacagtacttcctcaaagcaaatctagctttgtctgaagtttctttggaaactctgcaatgcactgaagacatctgtaatatgatgttaccaaagcagtttacatatgtccttatatgccctcggctgtaaaatgctatgggcaacacaatcatgcaattataatttgaaaatatttcctttaaagacagagtttgaaactcatcttggtaaataaattgcaaattactcgtacagttttacaaggatctcatggcagaacagcggaagacttggtccgtaactcaaggctgttgtatgcaaactactcttctagtggttaatgcacttgacatgtacagtatgtttcccatgccgttgtgattttgacatgtacagtatgttttcatgccgttgtgaattttgttgttcaacccaacttgagatggtttcaggaatggctgcaatctcaaaagctcaatgtactgcccaagaggcaccttgtgcaatattcccatccctgaatttagcattgtacaggaagattttcttttcactcaactgagttagcattgtctttgtggtagcattatcttagacattaaatttgaagtaacatatatcctgtagtaacatagacccaaagttactatagtcaaccaagtctttcaaaggataaaagatcattttattatctttaactgtatctattttgaatgtaaatttaaaaaaagtaattctctgtcaatggattcgtaatttctttacaaaatttcttatatataatatgtgtatctctgtaataatagagcccttcttttgaatcaaaattacatatggactttggaagattgctcctatttcaacaaatagttgctgcaagaatttttaatatgactctataaaagctctttagtacaattgtatggtttcttgatgattctgttttgcaataggtagcctagttgctttatatgctttaccttctaggtcttaaaatcacacattggaaaatgacaatatcaacaaaactgtattcttatgaaaagaactatttgttacaatgagaaaggttttgtgagtaaaccctactggacagtgacataaaaggcaatggaattttctataaacattttctcatgtaaacatgctgccaccttttcttctttctcagagaactcaaatttgctatagtttgtcatttttgcttacaaataatataacttttcaaccttctagttatatttatccaataaagtcataatcgggattccatttgtgtaaaaactagggtggtaaccggaaaaaaatattgtcagtatttcaagctgtgttcctttcttagtttgatatggttacttctatgttgaaataaaatttaaaatcacatgcaaaaaaaaaatcagcaaaataataaaatgaacgaaaaaaaatgacacccagggagttcccaaccccagtgtaaatgatatttaccagtgatctagcatatgtaatcttttttaaaggtattgttaataaatattctgtcatttgtaaagatacttgtctttcgggagcatttttcctgcctgcctgtcagggaatttgttagcttacctttgtgctagttataatttgggatcatagagggactcaaaagtctctacccaaatctagatgacccagagcttttcctttggaattgacaaccctgaagcaccatttcaaatcctctttggaagtagagagggtcctaatccacaagtaaatgtcctgaagatgagacttgaatat

SEQ ID NO: 2896 - protein, 1026 aa, Homo sapiens; identical to SEQ ID NO: 312

SEQ ID NO: 2897 - DNA, 3495 bp, Homo sapiens
ctgtgccggcgccgcacccgaggctctcgccagcccggcgccccggtgctgagtgggtgaaaaagaacagtgtgtcatgaagacaggcacctggaggtgatttgggtggcattcatgagaaaattcacgttacccgaatcattgacatagagtaactccacagcatgtgtcttcaagagcttccctaaaagattaaaggttatacaaaacttaaaagaagcagcaattctattcgcttgttattggacttgaaactccctttgacctcggaaactgaagatgaggttgccatgggaactgctggtactgcaatcattcattttgtgccttgcagatgattccacactgcatggcccgatttttattcaagaaccaagtcctgtaatgttccctttggattctgaggagaaaaaagtgaagctcaattgtgaagttaaaggaaatccaaaacctcatatcaggtggaagttaaatggaacagatgttgacactggtatggatttccgctacagtgttgttgaagggagcttgttgatcaataaccccaataaaacccaagatgctggaacgtaccagtgcacagcgacaaactcgtttggaacaattgttagcagagaagcaaagcttcagtttgcttatcttgacaactttaaaacaagaacaagaagcactgtgtctgtccgtcgaggtcaaggaatggtgctactgtgtggcccgccaccccattctggagagctgagttatgcctggatcttcaatgaatacccttcctatcaggataatcgccgctttgtttctcaagagactgggaatctgtatattgccaaagtagaaaaatcagatgttgggaattatacctgtgtggttaccaataccgtgacaaaccacaaggtcctggggccacctacaccactaatattgagaaatgatggagtgatgggtgaatatgagcccaaaatagaagtgcagttcccagaaacagttccgactgcaaaaggagcaacggtgaagctggaatgctttgctttaggaaatccagtaccaactattatctggcgaagagctgatggaaagccaatagcaaggaaagccagaagacacaagtcaaatggaattcttgagatccctaattttcagcaggaggatgctggtttatatgaatgtgtagctgaaaattccagagggaaaaatgtagcaaggggacagctaactttctatgctcaacctaattggattcaaaaaataaatgatattcacgtggccatggaagaaaatgtcttttgggaatgtaaagcaaatggaaggcctaagcctacatacaagtggctaaaaaatggcgaacctctgctaactcgggatagaattcaaattgagcaaggaacactcaacataacaatagtgaacctctcagatgctggcatgtatcagtgtttggcagagaataaacatggagttatcttttccaacgcagagcttagtgttatagctgtaggtccagatttttcaagaacactcttgaaaagagtaactcttgtcaaagtgggaggtgaagttgtcattgagtgtaagccaaaagcgtctccaaaacctgtttacacctggaagaaaggaagggatatattaaaagaaaatgaaagaattaccatttctgaagatggaaacctcagaatcatcaacgttactaaatcagacgctgggagttatacctgtatagccactaaccattttggaactgctagcagtactggaaacttggtagtgaaagatccaacaagggtaatggtacccccttccagtatggatgtcactgttggagagagtattgttttaccgtgccaggtaacgcatgatcactcgctagacatcgtgtttacttggtcatttaatggacacctgatagactttgacagagatggggaccactttgaaagagttggagggcaggattcagctggtgatttgatgatccgaaacatccaactgaagcatgctgggaaatatgtctgcatggtccaaacaagtgtggacaggctatctgctgctgcagacctgattgtaagaggtcctccaggtcccccagaggctgtgacaatagacgaaatcacagataccactgctcagctctcctggagacccgggcctgacaaccacagccccatcaccatgtatgtcattcaagccaggactccattctccgtgggctggcaagcagtcagtacagtcccagaactcattgatgggaagacattcacagcgaccgtggtgggtttgaacccttgggttgaatatgaattccgcacagttgcagccaacgtgattgggattggggagcccagccgcccctcagagaaacggagaacagaagaagctctccccgaagtcacaccagcgaatgtcagtggtggcggaggcagcaaatctgaactggttataacctgggagacggtccctgaggaattacagaatggtcgaggctttggttatgtggtggccttccggccctacggtaaaatgatctggatgctgacagtgctggcctcagctgatgcctctagatacgtgttcaggaatgagagcgtgcaccccttctctccctttgaggttaaagtaggtgtcttcaacaacaaaggagaaggccctttcagtcccaccacggtggtgtattctgcagaagaagaacccaccaaaccaccagccagtatctttgccagaagtctttctgccacagatattgaagttttctgggcctccccactggagaagaatagaggacgaatacaaggttatgaggttaaatattggagacatgaagacaaagaagaaaatgctagaaaaatacgaacagttggaaatcagacatcaacaaaaatcacgaacttaaaaggcagtgtgctgtatcacttagctgtcaaggcatataattctgctgggacaggcccctctagtgcaacagtcaatgtgacaacccgaaagccaccaccaagtcaaccccccggaaacatcatatggaattcatcagactccaaaattatcctgaattgggatcaagtgaaggccctggataatgagtcggaagtaaaaggatacaaagtcttgtacagatggaacagacaaagcagcacatctgtcattgaaacaaataaaacatcggtggagctttctttgcctttcgatgaagattatataatagaaattaagccattcagcgacggaggagatggcagcagcagtgaacaaattcgaattccaaagatatcaaatgcctacgcgagaggatctggggcttccacttcgaatgcatgtacgctgtcagccatcagtacaataatgatttccctcacagctaggtccagtttatgacaaaagttatctgaaggacttgctgtttataatataagcaacatttagctagttgttttgaagacacccagtactaagtaatattgttgttcaagtacatcttattactggaataaaaatgttttttgcttcttt

SEQ ID NO: 2898 - protein, 1026 aa, Homo sapiens; identical to SEQ ID NO: 312

SEQ ID NO: 2899 - DNA, 5262 bp, Homo sapiens
ctgtgccggcgccgcacccgaggctctcgccagcccggcgccccggtgctgagtgggtgaaaaagaacagtgtgtcatgaagacaggcacctggaggtgatttgggtggcattcatgagaaaattcacgttacccgaatcattgacatagagtaactccacagcatgtgtcttcaagagcttccctaaaagattaaaggttatacaaaacttaaaagaagcagcaattctattcgcttgttattggacttgaaactccctttgacctcggaaactgaagatgaggttgccatgggaactgctggtactgcaatcattcattttgtgccttgcagatgattccacactgcatggcccgatttttattcaagaaccaagtcctgtaatgttccctttggattctgaggagaaaaaagtgaagctcaattgtgaagttaaaggaaatccaaaacctcatatcaggtggaagttaaatggaacagatgttgacactggtatggatttccgctacagtgttgttgaagggagcttgttgatcaataaccccaataaaacccaagatgctggaacgtaccagtgcacagcgacaaactcgtttggaacaattgttagcagagaagcaaagcttcagtttgcttatcttgacaactttaaaacaagaacaagaagcactgtgtctgtccgtcgaggtcaaggaatggtgctactgtgtggcccgccaccccattctggagagctgagttatgcctggatcttcaatgaatacccttcctatcaggataatcgccgctttgtttctcaagagactgggaatctgtatattgccaaagtagaaaaatcagatgttgggaattatacctgtgtggttaccaataccgtgacaaaccacaaggtcctggggccacctacaccactaatattgagaaatgatggagtgatgggtgaatatgagcccaaaatagaagtgcagttcccagaaacagttccgactgcaaaaggagcaacggtgaagctggaatgctttgctttaggaaatccagtaccaactattatctggcgaagagctgatggaaagccaatagcaaggaaagccagaagacacaagtcaaatggaattcttgagatccctaattttcagcaggaggatgctggtttatatgaatgtgtagctgaaaattccagagggaaaaatgtagcaaggggacagctaactttctatgctcaacctaattggattcaaaaaataaatgatattcacgtggccatggaagaaaatgtcttttgggaatgtaaagcaaatggaaggcctaagcctacatacaagtggctaaaaaatggcgaacctctgctaactcgggatagaattcaaattgagcaaggaacactcaacataacaatagtgaacctctcagatgctggcatgtatcagtgtttggcagagaataaacatggagttatcttttccaacgcagagcttagtgttatagctgtaggtccagatttttcaagaacactcttgaaaagagtaactcttgtcaaagtgggaggtgaagttgtcattgagtgtaagccaaaagcgtctccaaaacctgtttacacctggaagaaaggaagggatatattaaaagaaaatgaaagaattaccatttctgaagatggaaacctcagaatcatcaacgttactaaatcagacgctgggagttatacctgtatagccactaaccattttggaactgctagcagtactggaaacttggtagtgaaagatccaacaagggtaatggtacccccttccagtatggatgtcactgttggagagagtattgttttaccgtgccaggtaacgcatgatcactcgctagacatcgtgtttacttggtcatttaatggacacctgatagactttgacagagatggggaccactttgaaagagttggagggcaggattcagctggtgatttgatgatccgaaacatccaactgaagcatgctgggaaatatgtctgcatggtccaaacaagtgtggacaggctatctgctgctgcagacctgattgtaagaggtcctccaggtcccccagaggctgtgacaatagacgaaatcacagataccactgctcagctctcctggagacccgggcctgacaaccacagccccatcaccatgtatgtcattcaagccaggactccattctccgtgggctggcaagcagtcagtacagtcccagaactcattgatgggaagacattcacagcgaccgtggtgggtttgaacccttgggttgaatatgaattccgcacagttgcagccaacgtgattgggattggggagcccagccgcccctcagagaaacggagaacagaagaagctctccccgaagtcacaccagcgaatgtcagtggtggcggaggcagcaaatctgaactggttataacctgggagacggtccctgaggaattacagaatggtcgaggctttggttatgtggtggccttccggccctacggtaaaatgatctggatgctgacagtgctggcctcagctgatgcctctagatacgtgttcaggaatgagagcgtgcaccccttctctccctttgaggttaaagtaggtgtcttcaacaacaaaggagaaggccctttcagtcccaccacggtggtgtattctgcagaagaagaacccaccaaaccaccagccagtatctttgccagaagtctttctgccacagatattgaagttttctgggcctccccactggagaagaatagaggacgaatacaaggttatgaggttaaatattggagacatgaagacaaagaagaaaatgctagaaaaatacgaacagttggaaatcagacatcaacaaaaatcacgaacttaaaaggcagtgtgctgtatcacttagctgtcaaggcatataattctgctgggacaggcccctctagtgcaacagtcaatgtgacaacccgaaagccaccaccaagtcaaccccccggaaacatcatatggaattcatcagactccaaaattatcctgaattgggatcaagtgaaggccctggataatgagtcggaagtaaaaggatacaaagtcttgtacagatggaacagacaaagcagcacatctgtcattgaaacaaataaaacatcggtggagctttctttgcctttcgatgaagattatataatagaaattaagccattcagcgacggaggagatggcagcagcagtgaacaaattcgaattccaaagatatcaaatgcctacgcgagaggatctggggcttccacttcgaatgcatgtacgctgtcagccatcagtacaataatgatttccctcacagctaggtccagtttatgacaaaagttatctgaaggacttgctgtttataatataagcaacatttagctagttgttttgaagacacccagtactaagtaatattgttgttcaagtacatcttattactggaataaaaatgttttttgcttctttaggaatggcattatacagtacttcctcaaagcaaatctagctttgtctgaagtttctttggaaactctgcaatgcactgaagacatctgtaatatgatgttaccaaagcagtttacatatgtccttatatgccctcggctgtaaaatgctatgggcaacacaatcatgcaattataatttgaaaatatttcctttaaagacagagtttgaaactcatcttggtaaataaattgcaaattactcgtacagttttacaaggatctcatggcagaacagcggaagacttggtccgtaactcaaggctgttgtatgcaaactactcttctagtggttaatgcacttgacatgtacagtatgtttcccatgccgttgtgattttgacatgtacagtatgttttcatgccgttgtgaattttgttgttcaacccaacttgagatggtttcaggaatggctgcaatctcaaaagctcaatgtactgcccaagaggcaccttgtgcaatattcccatccctgaatttagcattgtacaggaagattttcttttcactcaactgagttagcattgtctttgtggtagcattatcttagacattaaatttgaagtaacatatatcctgtagtaacatagacccaaagttactatagtcaaccaagtctttcaaaggataaaagatcattttattatctttaactgtatctattttgaatgtaaatttaaaaaaagtaattctctgtcaatggattcgtaatttctttacaaaatttcttatatataatatgtgtatctctgtaataatagagcccttcttttgaatcaaaattacatatggactttggaagattgctcctatttcaacaaatagttgctgcaagaatttttaatatgactctataaaagctctttagtacaattgtatggtttcttgatgattctgttttgcaataggtagcctagttgctttatatgctttaccttctaggtcttaaaatcacacattggaaaatgacaatatcaacaaaactgtattcttatgaaaagaactatttgttacaatgagaaaggttttgtgagtaaaccctactggacagtgacataaaaggcaatggaattttctataaacattttctcatgtaaacatgctgccaccttttcttctttctcagagaactcaaatttgctatagtttgtcatttttgcttacaaataatataacttttcaaccttctagttatatttatccaataaagtcataatcgggattccatttgtgtaaaaactagggtggtaaccggaaaaaaatattgtcagtatttcaagctgtgttcctttcttagtttgatatggttacttctatgttgaaataaaatttaaaatcacatgcaaaaaaaaaatcagcaaaataataaaatgaacgaaaaaaaatgacacccagggagttcccaaccccagtgtaaatgatatttaccagtgatctagcatatgtaatcttttttaaaggtattgttaataaatattctgtcatttgtaaagatacttgtctttcgggagcatttttcctgcctgcctgtcagggaatttgttagcttacctttgtgctagttataatttgggatcatagagggactcaaaagtctctacccaaatctagatgacccagagcttttcctttggaattgacaaccctgaagcaccatttcaaatcctctttggaagtagagagggtcctaatccacaagtaaatgtcctgaagatgagacttgaatat

SEQ ID NO: 2900 - protein, 1026 aa, Homo sapiens; identical to SEQ ID NO: 312

SEQ ID NO: 2901 - DNA, 3258 bp, Homo sapiens
aatctccatccctcccccgaaatctatcaacagctgtgtgagcctctgtgtatttttgaaaggttgaacacatttgatcggagaacaaacttgatttcctaatcaggttcgatgcgaggagagccagttagagatgtgtgtgattctcccagtgtgcgtctttgattcgtgtgctaattatgtcgatcctttggggaacacagccaggaagctgggtcctccttgatgaatgctggcggagagccatgcagcgcgcagcggagagcagttcagcatctctagtcccagctgagaatatggtcccattatctcccagctgcctaagcaatccataagggcctgttctgcgtggatgatcagtgtagtggaagcagggacttgctgagagctgaaatctctgtttgatttgctgtaacatgtaaagcgaaactgggacattttactttacagtctattaaaggttatacaaaacttaaaagaagcagcaattctattcgcttgttattggacttgaaactccctttgacctcggaaactgaagatgaggttgccatgggaactgctggtactgcaatcattcattttgtgccttgcagatgattccacactgcatggcccgatttttattcaagaaccaagtcctgtaatgttccctttggattctgaggagaaaaaagtgaagctcaattgtgaagttaaaggaaatccaaaacctcatatcaggtggaagttaaatggaacagatgttgacactggtatggatttccgctacagtgttgttgaagggagcttgttgatcaataaccccaataaaacccaagatgctggaacgtaccagtgcacagcgacaaactcgtttggaacaattgttagcagagaagcaaagcttcagtttgcttatcttgacaactttaaaacaagaacaagaagcactgtgtctgtccgtcgaggtcaaggaatggtgctactgtgtggcccgccaccccattctggagagctgagttatgcctggatcttcaatgaatacccttcctatcaggataatcgccgctttgtttctcaagagactgggaatctgtatattgccaaagtagaaaaatcagatgttgggaattatacctgtgtggttaccaataccgtgacaaaccacaaggtcctggggccacctacaccactaatattgagaaatgatggagtgatgggtgaatatgagcccaaaatagaagtgcagttcccagaaacagttccgactgcaaaaggagcaacggtgaagctggaatgctttgctttaggaaatccagtaccaactattatctggcgaagagctgatggaaagccaatagcaaggaaagccagaagacacaagtcaaatggaattcttgagatccctaattttcagcaggaggatgctggtttatatgaatgtgtagctgaaaattccagagggaaaaatgtagcaaggggacagctaactttctatgctcaacctaattggattcaaaaaataaatgatattcacgtggccatggaagaaaatgtcttttgggaatgtaaagcaaatggaaggcctaagcctacatacaagtggctaaaaaatggcgaacctctgctaactcgggatagaattcaaattgagcaaggaacactcaacataacaatagtgaacctctcagatgctggcatgtatcagtgtttggcagagaataaacatggagttatcttttccaacgcagagcttagtgttatagctgtaggtccagatttttcaagaacactcttgaaaagagtaactcttgtcaaagtgggaggtgaagttgtcattgagtgtaagccaaaagcgtctccaaaacctgtttacacctggaagaaaggaagggatatattaaaagaaaatgaaagaattaccatttctgaagatggaaacctcagaatcatcaacgttactaaatcagacgctgggagttatacctgtatagccactaaccattttggaactgctagcagtactggaaacttggtagtgaaagatccaacaagggtaatggtacccccttccagtatggatgtcactgttggagagagtattgttttaccgtgccaggtaacgcatgatcactcgctagacatcgtgtttacttggtcatttaatggacacctgatagactttgacagagatggggaccactttgaaagagttggagggcaggattcagctggtgatttgatgatccgaaacatccaactgaagcatgctgggaaatatgtctgcatggtccaaacaagtgtggacaggctatctgctgctgcagacctgattgtaagaggtcctccaggtcccccagaggctgtgacaatagacgaaatcacagataccactgctcagctctcctggagacccgggcctgacaaccacagccccatcaccatgtatgtcattcaagccaggactccattctccgtgggctggcaagcagtcagtacagtcccagaactcattgatgggaagacattcacagcgaccgtggtgggtttgaacccttgggttgaatatgaattccgcacagttgcagccaacgtgattgggattggggagcccagccgcccctcagagaaacggagaacagaagaagctcgtgagtagcacccgagattcagatcatctgttctgccagctgctgttccttaggaaaagcgtttgaattcttgctgctcttcagcgctcatgcggctctgtgttagctcacccttccctttaaatgtttataatgatagaaatcaggccaggagaagcccagctgaacacgcaacgggtttcaatcaagagttgttttcttcattaggtccacttgtacagcaagagacacacggtgcttagtcctctcaaaagccagccctttcttcattggttcatttgtcaccaagattctaacagaatttcaaaaaaaaatcccacatttcaaataaaattatctcacataagtaactaatggcaaagaataatttgtgactgctctggacacagccaccatggggtaatcctgtttagaatagaaataaaaaataatttcttcagaaatgttcacttagattatctttcttagggtataaaccattcccagaaacgaagattcagaacatcgtgctcattcgaacaagaccagtcagcaattcagtatggccctctgcatatgcagcttgaatgagcacggggagagaagaacaagttcatcagggtcagccgtacttttacttagctgg

SEQ ID NO: 2902 - protein, 699 aa, Homo sapiens
MRLPWELLVLQSFILCLADDSTLHGPIFIQEPSPVMFPLDSEEKKVKLNCEVKGNPKPHIRWKLNGTDVDTGMDFRYSVVEGSLLINNPNKTQDAGTYQCTATNSFGTIVSREAKLQFAYLDNFKTRTRSTVSVRRGQGMVLLCGPPPHSGELSYAWIFNEYPSYQDNRRFVSQETGNLYIAKVEKSDVGNYTCVVTNTVTNHKVLGPPTPLILRNDGVMGEYEPKIEVQFPETVPTAKGATVKLECFALGNPVPTIIWRRADGKPIARKARRHKSNGILEIPNFQQEDAGLYECVAENSRGKNVARGQLTFYAQPNWIQKINDIHVAMEENVFWECKANGRPKPTYKWLKNGEPLLTRDRIQIEQGTLNITIVNLSDAGMYQCLAENKHGVIFSNAELSVIAVGPDFSRTLLKRVTLVKVGGEVVIECKPKASPKPVYTWKKGRDILKENERITISEDGNLRIINVTKSDAGSYTCIATNHFGTASSTGNLVVKDPTRVMVPPSSMDVTVGESIVLPCQVTHDHSLDIVFTWSFNGHLIDFDRDGDHFERVGGQDSAGDLMIRNIQLKHAGKYVCMVQTSVDRLSAAADLIVRGPPGPPEAVTIDEITDTTAQLSWRPGPDNHSPITMYVIQARTPFSVGWQAVSTVPELIDGKTFTATVVGLNPWVEYEFRTVAANVIGIGEPSRPSEKRRTEEARE

SEQ ID NO: 2903 - DNA, 3811 bp, Homo sapiens
aatctccatccctcccccgaaatctatcaacagctgtgtgagcctctgtgtatttttgaaaggttgaacacatttgatcggagaacaaacttgatttcctaatcaggttcgatgcgaggagagccagttagagatgtgtgtgattctcccagtgtgcgtctttgattcgtgtgctaattatgtcgatcctttggggaacacagccaggaagctgggtcctccttgatgaatgctggcggagagccatgcagcgcgcagcggagagcagttcagcatctctagtcccagctgagaatatggtcccattatctcccagctgcctaagcaatccataagggcctgttctgcgtggatgatcagtgtagtggaagcagggacttgctgagagctgaaatctctgtttgatttgctgtaacatgtaaagcgaaactgggacattttactttacagtctattaaaggttatacaaaacttaaaagaagcagcaattctattcgcttgttattggacttgaaactccctttgacctcggaaactgaagatgaggttgccatgggaactgctggtactgcaatcattcattttgtgccttgcaggttcacagactgacttctggtccttgctgggggtgctgccagccttggaggctgatgattccacactgcatggcccgatttttattcaagaaccaagtcctgtaatgttccctttggattctgaggagaaaaaagtgaagctcaattgtgaagttaaaggaaatccaaaacctcatatcaggtggaagttaaatggaacagatgttgacactggtatggatttccgctacagtgttgttgaagggagcttgttgatcaataaccccaataaaacccaagatgctggaacgtaccagtgcacagcgacaaactcgtttggaacaattgttagcagagaagcaaagcttcagtttgcttatcttgacaactttaaaacaagaacaagaagcactgtgtctgtccgtcgaggtcaaggaatggtgctactgtgtggcccgccaccccattctggagagctgagttatgcctggatcttcaatgaatacccttcctatcaggataatcgccgctttgtttctcaagagactgggaatctgtatattgccaaagtagaaaaatcagatgttgggaattatacctgtgtggttaccaataccgtgacaaaccacaaggtcctggggccacctacaccactaatattgagaaatgatggagtgatgggtgaatatgagcccaaaatagaagtgcagttcccagaaacagttccgactgcaaaaggagcaacggtgaagctggaatgctttgctttaggaaatccagtaccaactattatctggcgaagagctgatggaaagccaatagcaaggaaagccagaagacacaagtcaaatggaattcttgagatccctaattttcagcaggaggatgctggtttatatgaatgtgtagctgaaaattccagagggaaaaatgtagcaaggggacagctaactttctatgctcaacctaattggattcaaaaaataaatgatattcacgtggccatggaagaaaatgtcttttgggaatgtaaagcaaatggaaggcctaagcctacatacaagtggctaaaaaatggcgaacctctgctaactcgggatagaattcaaattgagcaaggaacactcaacataacaatagtgaacctctcagatgctggcatgtatcagtgtttggcagagaataaacatggagttatcttttccaacgcagagcttagtgttatagctgtaggtccagatttttcaagaacactcttgaaaagagtaactcttgtcaaagtgggaggtgaagttgtcattgagtgtaagccaaaagcgtctccaaaacctgtttacacctggaagaaaggaagggatatattaaaagaaaatgaaagaattaccatttctgaagatggaaacctcagaatcatcaacgttactaaatcagacgctgggagttatacctgtatagccactaaccattttggaactgctagcagtactggaaacttggtagtgaaagatccaacaagggtaatggtacccccttccagtatggatgtcactgttggagagagtattgttttaccgtgccaggtaacgcatgatcactcgctagacatcgtgtttacttggtcatttaatggacacctgatagactttgacagagatggggaccactttgaaagagttggagggcaggattcagctggtgatttgatgatccgaaacatccaactgaagcatgctgggaaatatgtctgcatggtccaaacaagtgtggacaggctatctgctgctgcagacctgattgtaagaggtcctccaggtcccccagaggctgtgacaatagacgaaatcacagataccactgctcagctctcctggagacccgggcctgacaaccacagccccatcaccatgtatgtcattcaagccaggactccattctccgtgggctggcaagcagtcagtacagtcccagaactcattgatgggaagacattcacagcgaccgtggtgggtttgaacccttgggttgaatatgaattccgcacagttgcagccaacgtgattgggattggggagcccagccgcccctcagagaaacggagaacagaagaagctctccccgaagtcacaccagcgaatgtcagtggtggcggaggcagcaaatctgaactggttataacctgggagacggtccctgaggaattacagaatggtcgaggctttggttatgtggtggccttccggccctacggtaaaatgatctggatgctgacagtgctggcctcagctgatgcctctagatacgtgttcaggaatgagagcgtgcaccccttctctccctttgaggttaaagtaggtgtcttcaacaacaaaggagaaggccctttcagtcccaccacggtggtgtattctgcagaagaagaacccaccaaaccaccagccagtatctttgccagaagtctttctgccacagatattgaagttttctgggcctccccactggagaagaatagaggacgaatacaaggttatgaggttaaatattggagacatgaagacaaagaagaaaatgctagaaaaatacgaacagttggaaatcagacatcaacaaaaatcacgaacttaaaaggcagtgtgctgtatcacttagctgtcaaggcatataattctgctgggacaggcccctctagtgcaacagtcaatgtgacaacccgaaagccaccaccaagtcaaccccccggaaacatcatatggaattcatcagactccaaaattatcctgaattgggatcaagtgaaggccctggataatgagtcggaagtaaaaggatacaaagtcttgtacagatggaacagacaaagcagcacatctgtcattgaaacaaataaaacatcggtggagctttctttgcctttcgatgaagattatataatagaaattaagccattcagcgacggaggagatggcagcagcagtgaacaaattcgaattccaaagatatcaaatgcctacgcgagaggatctggggcttccacttcgaatgcatgtacgctgtcagccatcagtacaataatgatttccctcacagctaggtccagtttatgacaaaagttatctgaaggacttgctgtttataatataagcaacatttagctagttgttttgaagacacccagtactaagtaatattgttgttcaagtacatcttattactggaataaaaatgttttttgcttcttt

SEQ ID NO: 2904 - protein, 1044 aa, Homo sapiens
MRLPWELLVLQSFILCLAGSQTDFWSLLGVLPALEADDSTLHGPIFIQEPSPVMFPLDSEEKKVKLNCEVKGNPKPHIRWKLNGTDVDTGMDFRYSVVEGSLLINNPNKTQDAGTYQCTATNSFGTIVSREAKLQFAYLDNFKTRTRSTVSVRRGQGMVLLCGPPPHSGELSYAWIFNEYPSYQDNRRFVSQETGNLYIAKVEKSDVGNYTCVVTNTVTNHKVLGPPTPLILRNDGVMGEYEPKIEVQFPETVPTAKGATVKLECFALGNPVPTIIWRRADGKPIARKARRHKSNGILEIPNFQQEDAGLYECVAENSRGKNVARGQLTFYAQPNWIQKINDIHVAMEENVFWECKANGRPKPTYKWLKNGEPLLTRDRIQIEQGTLNITIVNLSDAGMYQCLAENKHGVIFSNAELSVIAVGPDFSRTLLKRVTLVKVGGEVVIECKPKASPKPVYTWKKGRDILKENERITISEDGNLRIINVTKSDAGSYTCIATNHFGTASSTGNLVVKDPTRVMVPPSSMDVTVGESIVLPCQVTHDHSLDIVFTWSFNGHLIDFDRDGDHFERVGGQDSAGDLMIRNIQLKHAGKYVCMVQTSVDRLSAAADLIVRGPPGPPEAVTIDEITDTTAQLSWRPGPDNHSPITMYVIQARTPFSVGWQAVSTVPELIDGKTFTATVVGLNPWVEYEFRTVAANVIGIGEPSRPSEKRRTEEALPEVTPANVSGGGGSKSELVITWETVPEELQNGRGFGYVVAFRPYGKMIWMLTVLASADASRYVFRNESVHPFSPFEVKVGVFNNKGEGPFSPTTVVYSAEEEPTKPPASIFARSLSATDIEVFWASPLEKNRGRIQGYEVKYWRHEDKEENARKIRTVGNQTSTKITNLKGSVLYHLAVKAYNSAGTGPSSATVNVTTRKPPPSQPPGNIIWNSSDSKIILNWDQVKALDNESEVKGYKVLYRWNRQSSTSVIETNKTSVELSLPFDEDYIIEIKPFSDGGDGSSSEQIRIPKISNAYARGSGASTSNACTLSAISTIMISLTARSSL

SEQ ID NO: 2905 - DNA, 3757 bp, Homo sapiens
aatctccatccctcccccgaaatctatcaacagctgtgtgagcctctgtgtatttttgaaaggttgaacacatttgatcggagaacaaacttgatttcctaatcaggttcgatgcgaggagagccagttagagatgtgtgtgattctcccagtgtgcgtctttgattcgtgtgctaattatgtcgatcctttggggaacacagccaggaagctgggtcctccttgatgaatgctggcggagagccatgcagcgcgcagcggagagcagttcagcatctctagtcccagctgagaatatggtcccattatctcccagctgcctaagcaatccataagggcctgttctgcgtggatgatcagtgtagtggaagcagggacttgctgagagctgaaatctctgtttgatttgctgtaacatgtaaagcgaaactgggacattttactttacagtctattaaaggttatacaaaacttaaaagaagcagcaattctattcgcttgttattggacttgaaactccctttgacctcggaaactgaagatgaggttgccatgggaactgctggtactgcaatcattcattttgtgccttgcagatgattccacactgcatggcccgatttttattcaagaaccaagtcctgtaatgttccctttggattctgaggagaaaaaagtgaagctcaattgtgaagttaaaggaaatccaaaacctcatatcaggtggaagttaaatggaacagatgttgacactggtatggatttccgctacagtgttgttgaagggagcttgttgatcaataaccccaataaaacccaagatgctggaacgtaccagtgcacagcgacaaactcgtttggaacaattgttagcagagaagcaaagcttcagtttgcttatcttgacaactttaaaacaagaacaagaagcactgtgtctgtccgtcgaggtcaaggaatggtgctactgtgtggcccgccaccccattctggagagctgagttatgcctggatcttcaatgaatacccttcctatcaggataatcgccgctttgtttctcaagagactgggaatctgtatattgccaaagtagaaaaatcagatgttgggaattatacctgtgtggttaccaataccgtgacaaaccacaaggtcctggggccacctacaccactaatattgagaaatgatggagtgatgggtgaatatgagcccaaaatagaagtgcagttcccagaaacagttccgactgcaaaaggagcaacggtgaagctggaatgctttgctttaggaaatccagtaccaactattatctggcgaagagctgatggaaagccaatagcaaggaaagccagaagacacaagtcaaatggaattcttgagatccctaattttcagcaggaggatgctggtttatatgaatgtgtagctgaaaattccagagggaaaaatgtagcaaggggacagctaactttctatgctcaacctaattggattcaaaaaataaatgatattcacgtggccatggaagaaaatgtcttttgggaatgtaaagcaaatggaaggcctaagcctacatacaagtggctaaaaaatggcgaacctctgctaactcgggatagaattcaaattgagcaaggaacactcaacataacaatagtgaacctctcagatgctggcatgtatcagtgtttggcagagaataaacatggagttatcttttccaacgcagagcttagtgttatagctgtaggtccagatttttcaagaacactcttgaaaagagtaactcttgtcaaagtgggaggtgaagttgtcattgagtgtaagccaaaagcgtctccaaaacctgtttacacctggaagaaaggaagggatatattaaaagaaaatgaaagaattaccatttctgaagatggaaacctcagaatcatcaacgttactaaatcagacgctgggagttatacctgtatagccactaaccattttggaactgctagcagtactggaaacttggtagtgaaagatccaacaagggtaatggtacccccttccagtatggatgtcactgttggagagagtattgttttaccgtgccaggtaacgcatgatcactcgctagacatcgtgtttacttggtcatttaatggacacctgatagactttgacagagatggggaccactttgaaagagttggagggcaggattcagctggtgatttgatgatccgaaacatccaactgaagcatgctgggaaatatgtctgcatggtccaaacaagtgtggacaggctatctgctgctgcagacctgattgtaagaggtcctccaggtcccccagaggctgtgacaatagacgaaatcacagataccactgctcagctctcctggagacccgggcctgacaaccacagccccatcaccatgtatgtcattcaagccaggactccattctccgtgggctggcaagcagtcagtacagtcccagaactcattgatgggaagacattcacagcgaccgtggtgggtttgaacccttgggttgaatatgaattccgcacagttgcagccaacgtgattgggattggggagcccagccgcccctcagagaaacggagaacagaagaagctctccccgaagtcacaccagcgaatgtcagtggtggcggaggcagcaaatctgaactggttataacctgggagacggtccctgaggaattacagaatggtcgaggctttggttatgtggtggccttccggccctacggtaaaatgatctggatgctgacagtgctggcctcagctgatgcctctagatacgtgttcaggaatgagagcgtgcaccccttctctccctttgaggttaaagtaggtgtcttcaacaacaaaggagaaggccctttcagtcccaccacggtggtgtattctgcagaagaagaacccaccaaaccaccagccagtatctttgccagaagtctttctgccacagatattgaagttttctgggcctccccactggagaagaatagaggacgaatacaaggttatgaggttaaatattggagacatgaagacaaagaagaaaatgctagaaaaatacgaacagttggaaatcagacatcaacaaaaatcacgaacttaaaaggcagtgtgctgtatcacttagctgtcaaggcatataattctgctgggacaggcccctctagtgcaacagtcaatgtgacaacccgaaagccaccaccaagtcaaccccccggaaacatcatatggaattcatcagactccaaaattatcctgaattgggatcaagtgaaggccctggataatgagtcggaagtaaaaggatacaaagtcttgtacagatggaacagacaaagcagcacatctgtcattgaaacaaataaaacatcggtggagctttctttgcctttcgatgaagattatataatagaaattaagccattcagcgacggaggagatggcagcagcagtgaacaaattcgaattccaaagatatcaaatgcctacgcgagaggatctggggcttccacttcgaatgcatgtacgctgtcagccatcagtacaataatgatttccctcacagctaggtccagtttatgacaaaagttatctgaaggacttgctgtttataatataagcaacatttagctagttgttttgaagacacccagtactaagtaatattgttgttcaagtacatcttattactggaataaaaatgttttttgcttcttt

SEQ ID NO: 2906 - protein, 1026 aa, Homo sapiens; identical to SEQ ID NO: 312

SEQ ID NO: 2907 - DNA, 5524 bp, Homo sapiens
aatctccatccctcccccgaaatctatcaacagctgtgtgagcctctgtgtatttttgaaaggttgaacacatttgatcggagaacaaacttgatttcctaatcaggttcgatgcgaggagagccagttagagatgtgtgtgattctcccagtgtgcgtctttgattcgtgtgctaattatgtcgatcctttggggaacacagccaggaagctgggtcctccttgatgaatgctggcggagagccatgcagcgcgcagcggagagcagttcagcatctctagtcccagctgagaatatggtcccattatctcccagctgcctaagcaatccataagggcctgttctgcgtggatgatcagtgtagtggaagcagggacttgctgagagctgaaatctctgtttgatttgctgtaacatgtaaagcgaaactgggacattttactttacagtctattaaaggttatacaaaacttaaaagaagcagcaattctattcgcttgttattggacttgaaactccctttgacctcggaaactgaagatgaggttgccatgggaactgctggtactgcaatcattcattttgtgccttgcagatgattccacactgcatggcccgatttttattcaagaaccaagtcctgtaatgttccctttggattctgaggagaaaaaagtgaagctcaattgtgaagttaaaggaaatccaaaacctcatatcaggtggaagttaaatggaacagatgttgacactggtatggatttccgctacagtgttgttgaagggagcttgttgatcaataaccccaataaaacccaagatgctggaacgtaccagtgcacagcgacaaactcgtttggaacaattgttagcagagaagcaaagcttcagtttgcttatcttgacaactttaaaacaagaacaagaagcactgtgtctgtccgtcgaggtcaaggaatggtgctactgtgtggcccgccaccccattctggagagctgagttatgcctggatcttcaatgaatacccttcctatcaggataatcgccgctttgtttctcaagagactgggaatctgtatattgccaaagtagaaaaatcagatgttgggaattatacctgtgtggttaccaataccgtgacaaaccacaaggtcctggggccacctacaccactaatattgagaaatgatggagtgatgggtgaatatgagcccaaaatagaagtgcagttcccagaaacagttccgactgcaaaaggagcaacggtgaagctggaatgctttgctttaggaaatccagtaccaactattatctggcgaagagctgatggaaagccaatagcaaggaaagccagaagacacaagtcaaatggaattcttgagatccctaattttcagcaggaggatgctggtttatatgaatgtgtagctgaaaattccagagggaaaaatgtagcaaggggacagctaactttctatgctcaacctaattggattcaaaaaataaatgatattcacgtggccatggaagaaaatgtcttttgggaatgtaaagcaaatggaaggcctaagcctacatacaagtggctaaaaaatggcgaacctctgctaactcgggatagaattcaaattgagcaaggaacactcaacataacaatagtgaacctctcagatgctggcatgtatcagtgtttggcagagaataaacatggagttatcttttccaacgcagagcttagtgttatagctgtaggtccagatttttcaagaacactcttgaaaagagtaactcttgtcaaagtgggaggtgaagttgtcattgagtgtaagccaaaagcgtctccaaaacctgtttacacctggaagaaaggaagggatatattaaaagaaaatgaaagaattaccatttctgaagatggaaacctcagaatcatcaacgttactaaatcagacgctgggagttatacctgtatagccactaaccattttggaactgctagcagtactggaaacttggtagtgaaagatccaacaagggtaatggtacccccttccagtatggatgtcactgttggagagagtattgttttaccgtgccaggtaacgcatgatcactcgctagacatcgtgtttacttggtcatttaatggacacctgatagactttgacagagatggggaccactttgaaagagttggagggcaggattcagctggtgatttgatgatccgaaacatccaactgaagcatgctgggaaatatgtctgcatggtccaaacaagtgtggacaggctatctgctgctgcagacctgattgtaagaggtcctccaggtcccccagaggctgtgacaatagacgaaatcacagataccactgctcagctctcctggagacccgggcctgacaaccacagccccatcaccatgtatgtcattcaagccaggactccattctccgtgggctggcaagcagtcagtacagtcccagaactcattgatgggaagacattcacagcgaccgtggtgggtttgaacccttgggttgaatatgaattccgcacagttgcagccaacgtgattgggattggggagcccagccgcccctcagagaaacggagaacagaagaagctctccccgaagtcacaccagcgaatgtcagtggtggcggaggcagcaaatctgaactggttataacctgggagacggtccctgaggaattacagaatggtcgaggctttggttatgtggtggccttccggccctacggtaaaatgatctggatgctgacagtgctggcctcagctgatgcctctagatacgtgttcaggaatgagagcgtgcaccccttctctccctttgaggttaaagtaggtgtcttcaacaacaaaggagaaggccctttcagtcccaccacggtggtgtattctgcagaagaagaacccaccaaaccaccagccagtatctttgccagaagtctttctgccacagatattgaagttttctgggcctccccactggagaagaatagaggacgaatacaaggttatgaggttaaatattggagacatgaagacaaagaagaaaatgctagaaaaatacgaacagttggaaatcagacatcaacaaaaatcacgaacttaaaaggcagtgtgctgtatcacttagctgtcaaggcatataattctgctgggacaggcccctctagtgcaacagtcaatgtgacaacccgaaagccaccaccaagtcaaccccccggaaacatcatatggaattcatcagactccaaaattatcctgaattgggatcaagtgaaggccctggataatgagtcggaagtaaaaggatacaaagtcttgtacagatggaacagacaaagcagcacatctgtcattgaaacaaataaaacatcggtggagctttctttgcctttcgatgaagattatataatagaaattaagccattcagcgacggaggagatggcagcagcagtgaacaaattcgaattccaaagatatcaaatgcctacgcgagaggatctggggcttccacttcgaatgcatgtacgctgtcagccatcagtacaataatgatttccctcacagctaggtccagtttatgacaaaagttatctgaaggacttgctgtttataatataagcaacatttagctagttgttttgaagacacccagtactaagtaatattgttgttcaagtacatcttattactggaataaaaatgttttttgcttctttaggaatggcattatacagtacttcctcaaagcaaatctagctttgtctgaagtttctttggaaactctgcaatgcactgaagacatctgtaatatgatgttaccaaagcagtttacatatgtccttatatgccctcggctgtaaaatgctatgggcaacacaatcatgcaattataatttgaaaatatttcctttaaagacagagtttgaaactcatcttggtaaataaattgcaaattactcgtacagttttacaaggatctcatggcagaacagcggaagacttggtccgtaactcaaggctgttgtatgcaaactactcttctagtggttaatgcacttgacatgtacagtatgtttcccatgccgttgtgattttgacatgtacagtatgttttcatgccgttgtgaattttgttgttcaacccaacttgagatggtttcaggaatggctgcaatctcaaaagctcaatgtactgcccaagaggcaccttgtgcaatattcccatccctgaatttagcattgtacaggaagattttcttttcactcaactgagttagcattgtctttgtggtagcattatcttagacattaaatttgaagtaacatatatcctgtagtaacatagacccaaagttactatagtcaaccaagtctttcaaaggataaaagatcattttattatctttaactgtatctattttgaatgtaaatttaaaaaaagtaattctctgtcaatggattcgtaatttctttacaaaatttcttatatataatatgtgtatctctgtaataatagagcccttcttttgaatcaaaattacatatggactttggaagattgctcctatttcaacaaatagttgctgcaagaatttttaatatgactctataaaagctctttagtacaattgtatggtttcttgatgattctgttttgcaataggtagcctagttgctttatatgctttaccttctaggtcttaaaatcacacattggaaaatgacaatatcaacaaaactgtattcttatgaaaagaactatttgttacaatgagaaaggttttgtgagtaaaccctactggacagtgacataaaaggcaatggaattttctataaacattttctcatgtaaacatgctgccaccttttcttctttctcagagaactcaaatttgctatagtttgtcatttttgcttacaaataatataacttttcaaccttctagttatatttatccaataaagtcataatcgggattccatttgtgtaaaaactagggtggtaaccggaaaaaaatattgtcagtatttcaagctgtgttcctttcttagtttgatatggttacttctatgttgaaataaaatttaaaatcacatgcaaaaaaaaaatcagcaaaataataaaatgaacgaaaaaaaatgacacccagggagttcccaaccccagtgtaaatgatatttaccagtgatctagcatatgtaatcttttttaaaggtattgttaataaatattctgtcatttgtaaagatacttgtctttcgggagcatttttcctgcctgcctgtcagggaatttgttagcttacctttgtgctagttataatttgggatcatagagggactcaaaagtctctacccaaatctagatgacccagagcttttcctttggaattgacaaccctgaagcaccatttcaaatcctctttggaagtagagagggtcctaatccacaagtaaatgtcctgaagatgagacttgaatat

SEQ ID NO: 2908 - protein, 1026 aa, Homo sapiens; identical to SEQ ID NO: 312

SEQ ID NO: 2909 - DNA, 3653 bp, Homo sapiens
gacattttactttacagtctgtaagtaccaggttttacccccctctttctccctacagctccatgtgaatgtgactttgcaagctgcatttgattttctgttccattgctctttgttgaatcaagctggtgaggtagagtgtgatctgtttagagcttgctgtttctgttaaatctcttatataattgattcatacaaggaaataggagcctttcagaatgcttttatagaaattagaaattattggctttgtttttaatttgggagtgtggttgcattatctttggtgccaggatgattagagcatatatttatcttcttctgtacctctggccattgcaagaaaaatattaaaggttatacaaaacttaaaagaagcagcaattctattcgcttgttattggacttgaaactccctttgacctcggaaactgaagatgaggttgccatgggaactgctggtactgcaatcattcattttgtgccttgcagatgattccacactgcatggcccgatttttattcaagaaccaagtcctgtaatgttccctttggattctgaggagaaaaaagtgaagctcaattgtgaagttaaaggaaatccaaaacctcatatcaggtggaagttaaatggaacagatgttgacactggtatggatttccgctacagtgttgttgaagggagcttgttgatcaataaccccaataaaacccaagatgctggaacgtaccagtgcacagcgacaaactcgtttggaacaattgttagcagagaagcaaagcttcagtttgcttatcttgacaactttaaaacaagaacaagaagcactgtgtctgtccgtcgaggtcaaggaatggtgctactgtgtggcccgccaccccattctggagagctgagttatgcctggatcttcaatgaatacccttcctatcaggataatcgccgctttgtttctcaagagactgggaatctgtatattgccaaagtagaaaaatcagatgttgggaattatacctgtgtggttaccaataccgtgacaaaccacaaggtcctggggccacctacaccactaatattgagaaatgatggagtgatgggtgaatatgagcccaaaatagaagtgcagttcccagaaacagttccgactgcaaaaggagcaacggtgaagctggaatgctttgctttaggaaatccagtaccaactattatctggcgaagagctgatggaaagccaatagcaaggaaagccagaagacacaagtcaaatggaattcttgagatccctaattttcagcaggaggatgctggtttatatgaatgtgtagctgaaaattccagagggaaaaatgtagcaaggggacagctaactttctatgctcaacctaattggattcaaaaaataaatgatattcacgtggccatggaagaaaatgtcttttgggaatgtaaagcaaatggaaggcctaagcctacatacaagtggctaaaaaatggcgaacctctgctaactcgggatagaattcaaattgagcaaggaacactcaacataacaatagtgaacctctcagatgctggcatgtatcagtgtttggcagagaataaacatggagttatcttttccaacgcagagcttagtgttatagctgtaggtccagatttttcaagaacactcttgaaaagagtaactcttgtcaaagtgggaggtgaagttgtcattgagtgtaagccaaaagcgtctccaaaacctgtttacacctggaagaaaggaagggatatattaaaagaaaatgaaagaattaccatttctgaagatggaaacctcagaatcatcaacgttactaaatcagacgctgggagttatacctgtatagccactaaccattttggaactgctagcagtactggaaacttggtagtgaaagatccaacaagggtaatggtacccccttccagtatggatgtcactgttggagagagtattgttttaccgtgccaggtaacgcatgatcactcgctagacatcgtgtttacttggtcatttaatggacacctgatagactttgacagagatggggaccactttgaaagagttggagggcaggattcagctggtgatttgatgatccgaaacatccaactgaagcatgctgggaaatatgtctgcatggtccaaacaagtgtggacaggctatctgctgctgcagacctgattgtaagaggtcctccaggtcccccagaggctgtgacaatagacgaaatcacagataccactgctcagctctcctggagacccgggcctgacaaccacagccccatcaccatgtatgtcattcaagccaggactccattctccgtgggctggcaagcagtcagtacagtcccagaactcattgatgggaagacattcacagcgaccgtggtgggtttgaacccttgggttgaatatgaattccgcacagttgcagccaacgtgattgggattggggagcccagccgcccctcagagaaacggagaacagaagaagctctccccgaagtcacaccagcgaatgtcagtggtggcggaggcagcaaatctgaactggttataacctgggagacggtccctgaggaattacagaatggtcgaggctttggttatgtggtggccttccggccctacggtaaaatgatctggatgctgacagtgctggcctcagctgatgcctctagatacgtgttcaggaatgagagcgtgcaccccttctctccctttgaggttaaagtaggtgtcttcaacaacaaaggagaaggccctttcagtcccaccacggtggtgtattctgcagaagaagaacccaccaaaccaccagccagtatctttgccagaagtctttctgccacagatattgaagttttctgggcctccccactggagaagaatagaggacgaatacaaggttatgaggttaaatattggagacatgaagacaaagaagaaaatgctagaaaaatacgaacagttggaaatcagacatcaacaaaaatcacgaacttaaaaggcagtgtgctgtatcacttagctgtcaaggcatataattctgctgggacaggcccctctagtgcaacagtcaatgtgacaacccgaaagccaccaccaagtcaaccccccggaaacatcatatggaattcatcagactccaaaattatcctgaattgggatcaagtgaaggccctggataatgagtcggaagtaaaaggatacaaagtcttgtacagatggaacagacaaagcagcacatctgtcattgaaacaaataaaacatcggtggagctttctttgcctttcgatgaagattatataatagaaattaagccattcagcgacggaggagatggcagcagcagtgaacaaattcgaattccaaagatatcaaatgcctacgcgagaggatctggggcttccacttcgaatgcatgtacgctgtcagccatcagtacaataatgatttccctcacagctaggtccagtttatgacaaaagttatctgaaggacttgctgtttataatataagcaacatttagctagttgttttgaagacacccagtactaagtaatattgttgttcaagtacatcttattactggaataaaaatgttttttgcttcttt

SEQ ID NO: 2910 - protein, 1026 aa, Homo sapiens; identical to SEQ ID NO: 312

SEQ ID NO: 2911 - DNA, 5420 bp, Homo sapiens
gacattttactttacagtctgtaagtaccaggttttacccccctctttctccctacagctccatgtgaatgtgactttgcaagctgcatttgattttctgttccattgctctttgttgaatcaagctggtgaggtagagtgtgatctgtttagagcttgctgtttctgttaaatctcttatataattgattcatacaaggaaataggagcctttcagaatgcttttatagaaattagaaattattggctttgtttttaatttgggagtgtggttgcattatctttggtgccaggatgattagagcatatatttatcttcttctgtacctctggccattgcaagaaaaatattaaaggttatacaaaacttaaaagaagcagcaattctattcgcttgttattggacttgaaactccctttgacctcggaaactgaagatgaggttgccatgggaactgctggtactgcaatcattcattttgtgccttgcagatgattccacactgcatggcccgatttttattcaagaaccaagtcctgtaatgttccctttggattctgaggagaaaaaagtgaagctcaattgtgaagttaaaggaaatccaaaacctcatatcaggtggaagttaaatggaacagatgttgacactggtatggatttccgctacagtgttgttgaagggagcttgttgatcaataaccccaataaaacccaagatgctggaacgtaccagtgcacagcgacaaactcgtttggaacaattgttagcagagaagcaaagcttcagtttgcttatcttgacaactttaaaacaagaacaagaagcactgtgtctgtccgtcgaggtcaaggaatggtgctactgtgtggcccgccaccccattctggagagctgagttatgcctggatcttcaatgaatacccttcctatcaggataatcgccgctttgtttctcaagagactgggaatctgtatattgccaaagtagaaaaatcagatgttgggaattatacctgtgtggttaccaataccgtgacaaaccacaaggtcctggggccacctacaccactaatattgagaaatgatggagtgatgggtgaatatgagcccaaaatagaagtgcagttcccagaaacagttccgactgcaaaaggagcaacggtgaagctggaatgctttgctttaggaaatccagtaccaactattatctggcgaagagctgatggaaagccaatagcaaggaaagccagaagacacaagtcaaatggaattcttgagatccctaattttcagcaggaggatgctggtttatatgaatgtgtagctgaaaattccagagggaaaaatgtagcaaggggacagctaactttctatgctcaacctaattggattcaaaaaataaatgatattcacgtggccatggaagaaaatgtcttttgggaatgtaaagcaaatggaaggcctaagcctacatacaagtggctaaaaaatggcgaacctctgctaactcgggatagaattcaaattgagcaaggaacactcaacataacaatagtgaacctctcagatgctggcatgtatcagtgtttggcagagaataaacatggagttatcttttccaacgcagagcttagtgttatagctgtaggtccagatttttcaagaacactcttgaaaagagtaactcttgtcaaagtgggaggtgaagttgtcattgagtgtaagccaaaagcgtctccaaaacctgtttacacctggaagaaaggaagggatatattaaaagaaaatgaaagaattaccatttctgaagatggaaacctcagaatcatcaacgttactaaatcagacgctgggagttatacctgtatagccactaaccattttggaactgctagcagtactggaaacttggtagtgaaagatccaacaagggtaatggtacccccttccagtatggatgtcactgttggagagagtattgttttaccgtgccaggtaacgcatgatcactcgctagacatcgtgtttacttggtcatttaatggacacctgatagactttgacagagatggggaccactttgaaagagttggagggcaggattcagctggtgatttgatgatccgaaacatccaactgaagcatgctgggaaatatgtctgcatggtccaaacaagtgtggacaggctatctgctgctgcagacctgattgtaagaggtcctccaggtcccccagaggctgtgacaatagacgaaatcacagataccactgctcagctctcctggagacccgggcctgacaaccacagccccatcaccatgtatgtcattcaagccaggactccattctccgtgggctggcaagcagtcagtacagtcccagaactcattgatgggaagacattcacagcgaccgtggtgggtttgaacccttgggttgaatatgaattccgcacagttgcagccaacgtgattgggattggggagcccagccgcccctcagagaaacggagaacagaagaagctctccccgaagtcacaccagcgaatgtcagtggtggcggaggcagcaaatctgaactggttataacctgggagacggtccctgaggaattacagaatggtcgaggctttggttatgtggtggccttccggccctacggtaaaatgatctggatgctgacagtgctggcctcagctgatgcctctagatacgtgttcaggaatgagagcgtgcaccccttctctccctttgaggttaaagtaggtgtcttcaacaacaaaggagaaggccctttcagtcccaccacggtggtgtattctgcagaagaagaacccaccaaaccaccagccagtatctttgccagaagtctttctgccacagatattgaagttttctgggcctccccactggagaagaatagaggacgaatacaaggttatgaggttaaatattggagacatgaagacaaagaagaaaatgctagaaaaatacgaacagttggaaatcagacatcaacaaaaatcacgaacttaaaaggcagtgtgctgtatcacttagctgtcaaggcatataattctgctgggacaggcccctctagtgcaacagtcaatgtgacaacccgaaagccaccaccaagtcaaccccccggaaacatcatatggaattcatcagactccaaaattatcctgaattgggatcaagtgaaggccctggataatgagtcggaagtaaaaggatacaaagtcttgtacagatggaacagacaaagcagcacatctgtcattgaaacaaataaaacatcggtggagctttctttgcctttcgatgaagattatataatagaaattaagccattcagcgacggaggagatggcagcagcagtgaacaaattcgaattccaaagatatcaaatgcctacgcgagaggatctggggcttccacttcgaatgcatgtacgctgtcagccatcagtacaataatgatttccctcacagctaggtccagtttatgacaaaagttatctgaaggacttgctgtttataatataagcaacatttagctagttgttttgaagacacccagtactaagtaatattgttgttcaagtacatcttattactggaataaaaatgttttttgcttctttaggaatggcattatacagtacttcctcaaagcaaatctagctttgtctgaagtttctttggaaactctgcaatgcactgaagacatctgtaatatgatgttaccaaagcagtttacatatgtccttatatgccctcggctgtaaaatgctatgggcaacacaatcatgcaattataatttgaaaatatttcctttaaagacagagtttgaaactcatcttggtaaataaattgcaaattactcgtacagttttacaaggatctcatggcagaacagcggaagacttggtccgtaactcaaggctgttgtatgcaaactactcttctagtggttaatgcacttgacatgtacagtatgtttcccatgccgttgtgattttgacatgtacagtatgttttcatgccgttgtgaattttgttgttcaacccaacttgagatggtttcaggaatggctgcaatctcaaaagctcaatgtactgcccaagaggcaccttgtgcaatattcccatccctgaatttagcattgtacaggaagattttcttttcactcaactgagttagcattgtctttgtggtagcattatcttagacattaaatttgaagtaacatatatcctgtagtaacatagacccaaagttactatagtcaaccaagtctttcaaaggataaaagatcattttattatctttaactgtatctattttgaatgtaaatttaaaaaaagtaattctctgtcaatggattcgtaatttctttacaaaatttcttatatataatatgtgtatctctgtaataatagagcccttcttttgaatcaaaattacatatggactttggaagattgctcctatttcaacaaatagttgctgcaagaatttttaatatgactctataaaagctctttagtacaattgtatggtttcttgatgattctgttttgcaataggtagcctagttgctttatatgctttaccttctaggtcttaaaatcacacattggaaaatgacaatatcaacaaaactgtattcttatgaaaagaactatttgttacaatgagaaaggttttgtgagtaaaccctactggacagtgacataaaaggcaatggaattttctataaacattttctcatgtaaacatgctgccaccttttcttctttctcagagaactcaaatttgctatagtttgtcatttttgcttacaaataatataacttttcaaccttctagttatatttatccaataaagtcataatcgggattccatttgtgtaaaaactagggtggtaaccggaaaaaaatattgtcagtatttcaagctgtgttcctttcttagtttgatatggttacttctatgttgaaataaaatttaaaatcacatgcaaaaaaaaaatcagcaaaataataaaatgaacgaaaaaaaatgacacccagggagttcccaaccccagtgtaaatgatatttaccagtgatctagcatatgtaatcttttttaaaggtattgttaataaatattctgtcatttgtaaagatacttgtctttcgggagcatttttcctgcctgcctgtcagggaatttgttagcttacctttgtgctagttataatttgggatcatagagggactcaaaagtctctacccaaatctagatgacccagagcttttcctttggaattgacaaccctgaagcaccatttcaaatcctctttggaagtagagagggtcctaatccacaagtaaatgtcctgaagatgagacttgaatat

SEQ ID NO: 2912 - protein, 1026 aa, Homo sapiens; identical to SEQ ID NO: 312

SEQ ID NO: 2913 - DNA, 2841 bp, Homo sapiens
gagcattactcaatacatgttacatagtgcctgacacctgattagcaaactataaatgcttagcccttgacttaaagagagctgagttatgcctggatcttcaatgaatacccttcctatcaggataatcgccgctttgtttctcaagagactgggaatctgtatattgccaaagtagaaaaatcagatgttgggaattatacctgtgtggttaccaataccgtgacaaaccacaaggtcctggggccacctacaccactaatattgagaaatgatggagtgatgggtgaatatgagcccaaaatagaagtgcagttcccagaaacagttccgactgcaaaaggagcaacggtgaagctggaatgctttgctttaggaaatccagtaccaactattatctggcgaagagctgatggaaagccaatagcaaggaaagccagaagacacaagtcaaatggaattcttgagatccctaattttcagcaggaggatgctggtttatatgaatgtgtagctgaaaattccagagggaaaaatgtagcaaggggacagctaactttctatgctcaacctaattggattcaaaaaataaatgatattcacgtggccatggaagaaaatgtcttttgggaatgtaaagcaaatggaaggcctaagcctacatacaagtggctaaaaaatggcgaacctctgctaactcgggatagaattcaaattgagcaaggaacactcaacataacaatagtgaacctctcagatgctggcatgtatcagtgtttggcagagaataaacatggagttatcttttccaacgcagagcttagtgttatagctgtaggtccagatttttcaagaacactcttgaaaagagtaactcttgtcaaagtgggaggtgaagttgtcattgagtgtaagccaaaagcgtctccaaaacctgtttacacctggaagaaaggaagggatatattaaaagaaaatgaaagaattaccatttctgaagatggaaacctcagaatcatcaacgttactaaatcagacgctgggagttatacctgtatagccactaaccattttggaactgctagcagtactggaaacttggtagtgaaagatccaacaagggtaatggtacccccttccagtatggatgtcactgttggagagagtattgttttaccgtgccaggtaacgcatgatcactcgctagacatcgtgtttacttggtcatttaatggacacctgatagactttgacagagatggggaccactttgaaagagttggagggcaggattcagctggtgatttgatgatccgaaacatccaactgaagcatgctgggaaatatgtctgcatggtccaaacaagtgtggacaggctatctgctgctgcagacctgattgtaagaggtcctccaggtcccccagaggctgtgacaatagacgaaatcacagataccactgctcagctctcctggagacccgggcctgacaaccacagccccatcaccatgtatgtcattcaagccaggactccattctccgtgggctggcaagcagtcagtacagtcccagaactcattgatgggaagacattcacagcgaccgtggtgggtttgaacccttgggttgaatatgaattccgcacagttgcagccaacgtgattgggattggggagcccagccgcccctcagagaaacggagaacagaagaagctctccccgaagtcacaccagcgaatgtcagtggtggcggaggcagcaaatctgaactggttataacctgggagacggtccctgaggaattacagaatggtcgaggctttggttatgtggtggccttccggccctacggtaaaatgatctggatgctgacagtgctggcctcagctgatgcctctagatacgtgttcaggaatgagagcgtgcaccccttctctccctttgaggttaaagtaggtgtcttcaacaacaaaggagaaggccctttcagtcccaccacggtggtgtattctgcagaagaagaacccaccaaaccaccagccagtatctttgccagaagtctttctgccacagatattgaagttttctgggcctccccactggagaagaatagaggacgaatacaaggttatgaggttaaatattggagacatgaagacaaagaagaaaatgctagaaaaatacgaacagttggaaatcagacatcaacaaaaatcacgaacttaaaaggcagtgtgctgtatcacttagctgtcaaggcatataattctgctgggacaggcccctctagtgcaacagtcaatgtgacaacccgaaagccaccaccaagtcaaccccccggaaacatcatatggaattcatcagactccaaaattatcctgaattgggatcaagtgaaggccctggataatgagtcggaagtaaaaggatacaaagtcttgtacagatggaacagacaaagcagcacatctgtcattgaaacaaataaaacatcggtggagctttctttgcctttcgatgaagattatataatagaaattaagccattcagcgacggaggagatggcagcagcagtgaacaaattcgaattccaaagatatcaaatgcctacgcgagaggatctggggcttccacttcgaatgcatgtacgctgtcagccatcagtacaataatgatttccctcacagctaggtccagtttatgacaaaagttatctgaaggacttgctgtttataatataagcaacatttagctagttgttttgaagacacccagtactaagtaatattgttgttcaagtacatcttattactggaataaaaatgttttttgcttcttt

SEQ ID NO: 2914 - protein, 807 aa, Homo sapiens
MGEYEPKIEVQFPETVPTAKGATVKLECFALGNPVPTIIWRRADGKPIARKARRHKSNGILEIPNFQQEDAGLYECVAENSRGKNVARGQLTFYAQPNWIQKINDIHVAMEENVFWECKANGRPKPTYKWLKNGEPLLTRDRIQIEQGTLNITIVNLSDAGMYQCLAENKHGVIFSNAELSVIAVGPDFSRTLLKRVTLVKVGGEVVIECKPKASPKPVYTWKKGRDILKENERITISEDGNLRIINVTKSDAGSYTCIATNHFGTASSTGNLVVKDPTRVMVPPSSMDVTVGESIVLPCQVTHDHSLDIVFTWSFNGHLIDFDRDGDHFERVGGQDSAGDLMIRNIQLKHAGKYVCMVQTSVDRLSAAADLIVRGPPGPPEAVTIDEITDTTAQLSWRPGPDNHSPITMYVIQARTPFSVGWQAVSTVPELIDGKTFTATVVGLNPWVEYEFRTVAANVIGIGEPSRPSEKRRTEEALPEVTPANVSGGGGSKSELVITWETVPEELQNGRGFGYVVAFRPYGKMIWMLTVLASADASRYVFRNESVHPFSPFEVKVGVFNNKGEGPFSPTTVVYSAEEEPTKPPASIFARSLSATDIEVFWASPLEKNRGRIQGYEVKYWRHEDKEENARKIRTVGNQTSTKITNLKGSVLYHLAVKAYNSAGTGPSSATVNVTTRKPPPSQPPGNIIWNSSDSKIILNWDQVKALDNESEVKGYKVLYRWNRQSSTSVIETNKTSVELSLPFDEDYIIEIKPFSDGGDGSSSEQIRIPKISNAYARGSGASTSNACTLSAISTIMISLTARSSL

SEQ ID NO: 2915 - DNA, 3782 bp, Homo sapiens
gagcattactcaatacatgttacatagtgcctgacacctgattagcaaactataaatgcttagcccttgacttaaagagagctgagttatgcctggatcttcaatgaatacccttcctatcaggataatcgccgctttgtttctcaagagactgggaatctgtatattgccaaagtagaaaaatcagatgttgggaattatacctgtgtggttaccaataccgtgacaaaccacaaggtcctggggccacctacaccactaatattgagaaatgatggagtgatgggtgaatatgagcccaaaatagaagtgcagttcccagaaacagttccgactgcaaaaggagcaacggtgaagctggaatgctttgctttaggaaatccagtaccaactattatctggcgaagagctgatggaaagccaatagcaaggaaagccagaagacacaagtcaaatggaattcttgagatccctaattttcagcaggaggatgctggtttatatgaatgtgtagctgaaaattccagagggaaaaatgtagcaaggggacagctaactttctatgctcaacctaattggattcaaaaaataaatgatattcacgtggccatggaagaaaatgtcttttgggaatgtaaagcaaatggaaggcctaagcctacatacaagtggctaaaaaatggcgaacctctgctaactcgggatagaattcaaattgagcaaggaacactcaacataacaatagtgaacctctcagatgctggcatgtatcagtgtttggcagagaataaacatggagttatcttttccaacgcagagcttagtgttatagctgtaggtccagatttttcaagaacactcttgaaaagagtaactcttgtcaaagtgggaggtgaagttgtcattgagtgtaagccaaaagcgtctccaaaacctgtttacacctggaagaaaggaagggatatattaaaagaaaatgaaagaattaccatttctgaagatggaaacctcagaatcatcaacgttactaaatcagacgctgggagttatacctgtatagccactaaccattttggaactgctagcagtactggaaacttggtagtgaaagatccaacaagggtaatggtacccccttccagtatggatgtcactgttggagagagtattgttttaccgtgccaggtaacgcatgatcactcgctagacatcgtgtttacttggtcatttaatggacacctgatagactttgacagagatggggaccactttgaaagagttggagggcaggattcagctggtgatttgatgatccgaaacatccaactgaagcatgctgggaaatatgtctgcatggtccaaacaagtgtggacaggctatctgctgctgcagacctgattgtaagaggtcctccaggtcccccagaggctgtgacaatagacgaaatcacagataccactgctcagctctcctggagacccgggcctgacaaccacagccccatcaccatgtatgtcattcaagccaggactccattctccgtgggctggcaagcagtcagtacagtcccagaactcattgatgggaagacattcacagcgaccgtggtgggtttgaacccttgggttgaatatgaattccgcacagttgcagccaacgtgattgggattggggagcccagccgcccctcagagaaacggagaacagaagaagctctccccgaagtcacaccagcgaatgtcagtggtggcggaggcagcaaatctgaactggttataacctgggagacggtccctgaggaattacagaatggtcgaggctttggttatgtggtggccttccggccctacggtaaaatgatctggatgctgacagtgctggcctcagctgatgcctctagatacgtgttcaggaatgagagcgtgcaccccttctctccctttgaggttaaagtaggtgtcttcaacaacaaaggagaaggccctttcagtcccaccacggtggtgtattctgcagaagaagaacccaccaaaccaccagccagtatctttgccagaagtctttctgccacagatattgaagttttctgggcctccccactggagaagaatagaggacgaatacaaggttatgaggttaaatattggagacatgaagacaaagaagaaaatgctagaaaaatacgaacagttggaaatcagacatcaacaaaaatcacgaacttaaaaggcagtgtgctgtatcacttagctgtcaaggcatataattctgctgggacaggcccctctagtgcaacagtcaatgtgacaacccgaaagccaccaccaagtcaaccccccggaaacatcatatggaattcatcagactccaaaattatcctgaattgggatcaagtgaaggccctggataatgagtcggaagtaaaaggatacaaagtcttgtacagatggaacagacaaagcagcacatctgtcattgaaacaaataaaacatcggtggagctttctttgcctttcgatgaagattatataatagaaattaagccattcagcgacggaggagatggcagcagcagtgaacaaattcgaattccaaagatatcaaatgcctacgcgagaggatctggggcttccacttcgaatgcatgtacgctgtcagccatcagtacaataatgatttccctcacagctaggtccagtttatgacaaaagttatctgaaggacttgctgtttataatataagcaacatttagctagttgttttgaagacacccagtactaagtaatattgttgttcaagtacatcttattactggaataaaaatgttttttgcttctttaggaatggcattatacagtacttcctcaaagcaaatctagctttgtctgaagtttctttggaaactctgcaatgcactgaagacatctgtaatatgatgttaccaaagcagtttacatatgtccttatatgcatattttttattatatatttagtgttttatagaattttttaaagttaacatataatgtagatattaattttttcctcggctgtaaaatgctatgggcaacacaatcatgcaattataatttgaaaatatttcctttaaagacagagtttgaaactcatcttggtaaataaattgcaaattactcgtacagttttacaaggatctcatggcagaacagcggaagacttggtccgtaactcaaggctgttgtatgcaaactactcttctagtggttaatgcacttgacatgtacagtatgtttcccatgccgttgtgattttgacatgtacagtatgttttcatgccgttgtgaattttgttgttcaacccaacttgagatggtttcaggaatggctgcaatctcaaaagctcaatgtactgcccaagaggcaccttgtgcaatattcccatccctgaatttagcattgtacaggaagattttcttttcactcaactgagttagcattgtctttgtggtagcattatcttagacattaaatttgaagtaacatatatcctgtagtaacatagacccaaagttactatagtcaaccaagtctttcaaaggataaaagatcattttattatctttaactgtatctattttgaatgtaaatttaaaaaaagtaattctctgtcaatggattcgtaatttctttacaaaatttcttatatataatatgtgtatctctgtaataatagagcccttcttttgaatcaaaattacatatggactttggaagattgctcctatttcaacaaatagttgc

SEQ ID NO: 2916 - protein, 807 aa, Homo sapiens; identical to SEQ ID NO: 2914

SEQ ID NO: 2917 - DNA, 1920 bp, Homo sapiens
gggggctggaggcagcagcgcccccgcactccccgcgtctcgcacacttgcaccggtcgctcgcgcgcagcccggcgtcgccccacgccgcgctcgctcctccctccctcctcccgctccgtggctcccgtgctcctggcgaggctcaggcgcggagcgcgcggacgggcgcaccgacagacggccccggggacgcctcggctcgcgcctcccgggcgggctatgttgattgccccgccggggccggcccgcgggatcagcacagcccggcccgcggccccggcggccaatcgggactatgaaccggaaagcgcggcgctgcctgggccacctctttctcagcctgggcatggtctacctccggatcggtggcttctcctcagtggtagctctgggcgcaagcatcatctgtaacaagatcccaggcctggctcccagacagcgggcgatctgccagagccggcccgacgccatcatcgtcataggagaaggctcacaaatgggcctggacgagtgtcagtttcagttccgcaatggccgctggaactgctctgcactgggagagcgcaccgtcttcgggaaggagctcaaagtggggagccgggaggctgcgttcacctacgccatcattgccgccggcgtggcccacgccatcacagctgcctgtacccagggcaacctgagcgactgtggctgcgacaaagagaagcaaggccagtaccaccgggacgagggctggaagtggggtggctgctctgccgacatccgctacggcatcggcttcgccaaggtctttgtggatgcccgggagatcaagcagaatgcccggactctcatgaacttgcacaacaacgaggcaggccgaaagatcctggaggagaacatgaagctggaatgtaagtgccacggcgtgtcaggctcgtgcaccaccaagacgtgctggaccacactgccacagtttcgggagctgggctacgtgctcaaggacaagtacaacgaggccgttcacgtggagcctgtgcgtgccagccgcaacaagcggcccaccttcctgaagatcaagaagccactgtcgtaccgcaagcccatggacacggacctggtgtacatcgagaagtcgcccaactactgcgaggaggacccggtgaccggcagtgtgggcacccagggccgcgcctgcaacaagacggctccccaggccagcggctgtgacctcatgtgctgtgggcgtggctacaacacccaccagtacgcccgcgtgtggcagtgcaactgtaagttccactggtgctgctatgtcaagtgcaacacgtgcagcgagcgcacggagatgtacacgtgcaagtgagccccgtgtgcacaccaccctcccgctgcaagtcagattgctgggaggactggaccgtttccaagctgcgggctccctggcaggatgctgagcttgtcttttctgctgaggagggtacttttcctgggtttcctgcaggcatccgtgggggaaaaaaaatctctcagagccctcaactattctgttccacacccaatgctgctccaccctcccccagacacagcccaggtccctccgcggctggagcgaagccttctgcagcaggaactctggacccctgggcctcatcacagcaatatttaacaatttattctgataaaaataatattaatttatttaattaaaaagaattcttccacctcgtcgggatccgttttctgcaatcaaagtggactgcttgctttcctagcaggatgattttgttgctaggacaaggagccgtgtagaagtgtacataactattctttatgcagatatttctactagctgattttgcaggtacccaccttgcagcactagatgtttaagtacaagaggagacatcttttatgcatatatagatatacacacac

SEQ ID NO: 2918 - protein, 349 aa, Homo sapiens; identical to SEQ ID NO: 318

SEQ ID NO: 2919 - DNA, 1717 bp, Homo sapiens
gaggggcgggggctggaggcagcagcgcccccgcactccccgcgtctcgcacacttgcaccggtcgctcgcgcgcagcccggcgtcgccccacgccgcgctcgctcctccctccctcctcccgctccgtggctcccgtgctcctggcgaggctcaggcgcggagcgcgcggacgggcgcaccgacagacggccccggggacgcctcggctcgcgcctcccgggcgggctatgttgattgccccgccggggccggcccgcgggatcagcacagcccggcccgcggccccggcggccaatcgggactatgaaccggaaagcgcggcgctgcctgggccacctctttctcagcctgggcatggtctacctccggatcggtggcttctcctcagtggtagctctgggcgcaagcatcatctgtaacaagatcccaggcctggctcccagacagcgggcgatctgccagagccggcccgacgccatcatcgtcataggagaaggctcacaaatgggcctggacgagtgtcagtttcagttccgcaatggccgctggaactgctctgcactgggagagcgcaccgtcttcgggaaggagctcaaagtggggagccgggaggctgcgttcacctacgccatcattgccgccggcgtggcccacgccatcacagctgcctgtacccagggcaacctgagcgactgtggctgcgacaaagagaagcaaggccagtaccaccgggacgagggctggaagtggggtggctgctctgccgacatccgctacggcatcggcttcgccaaggtctttgtggatgcccgggagatcaagcagaatgcccggactctcatgaacttgcacaacaacgaggcaggccgaaagatcctggaggagaacatgaagctggaatgtaagtgccacggcgtgtcaggctcgtgcaccaccaagacgtgctggaccacactgccacagtttcgggagctgggctacgtgctcaaggacaagtacaacgaggccgttcacgtggagcctgtgcgtgccagccgcaacaagcggcccaccttcctgaagatcaagaagccactgtcgtaccgcaagcccatggacacggacctggtgtacatcgagaagtcgcccaactactgcgaggaggacccggtgaccggcagtgtgggcacccagggccgcgcctgcaacaagacggctccccaggccagcggctgtgacctcatgtgctgtgggcgtggctacaacacccaccagtacgcccgcgtgtggcagtgcaactgtaagttccactggtgctgctatgtcaagtgcaacacgtgcagcgagcgcacggagatgtacacgtgcaagtgagccccgtgtgcacaccaccctcccgctgcaagtcagattgctgggaggactggaccgtttccaagctgcgggctccctggcaggatgctgagcttgtcttttctgctgaggagggtacttttcctgggtttcctgcaggcatccgtgggggaaaaaaaatctctcagagccctcaactattctgttccacacccaatgctgctccaccctcccccagacacagcccaggtccctccgcggctggagcgaagccttctgcagcaggaactctggacccctgggcctcatcacagcaatatttaacaatttattctgataaaaataatattaatttatttaattaaaaagaattcttccacctc

SEQ ID NO: 2920 - protein, 349 aa, Homo sapiens; identical to SEQ ID NO: 318

SEQ ID NO: 2921 - DNA, 732 bp, Homo sapiens
atgaataaaaacaacaaaccttccagtttcatagccataagaaatgctgctttctctgaagtcggcattgggatctctgccaatgccatgctccttctcttccacatcctcacgtgccttctcaagcacaggaccaagcccgctgacctgatcgtttgtcatgtggctctaatccatatcatattgctgctacccacagagttcatagctacagatatttttgggtctcaggattcagaggatgacatcaaacataagtcagttatctacaggtacaggttgatgagaggcctctccatttccaccacctgcctgctgagtatcctcccggccatcacctgcagccccagaagctcctgtttggcagtgttcaaagattctcacatcaccaaccacgttgctttctcttcctatgggtcttccacatatccattaggctcacggcccccctccagtggatacatggtgattctcttgtccaggcgtaacaggcagtcccagcattttcacagcaccaacctttctccaaaagcacccccagaaaaaatggccacgcagaccattcttctgctcgtgagttgctttgtgattgtgtatgttttggactgtgttgtcgcctcctgctcaggactggtgtggaacagtgatccagtccgtcatcgagtccagatgctggtggacaatggctatgccaccatcagtccttcagtgctagtcagtactgaaaaatga

SEQ ID NO: 2922 - protein, 243 aa, Homo sapiens
MNKNNKPSSFIAIRNAAFSEVGIGISANAMLLLFHILTCLLKHRTKPADLIVCHVALIHIILLLPTEFIATDIFGSQDSEDDIKHKSVIYRYRLMRGLSISTTCLLSILPAITCSPRSSCLAVFKDSHITNHVAFSSYGSSTYPLGSRPPSSGYMVILLSRRNRQSQHFHSTNLSPKAPPEKMATQTILLLVSCFVIVYVLDCVVASCSGLVWNSDPVRHRVQMLVDNGYATISPSVLVSTEK

SEQ ID NO: 2923 - DNA, 3377 bp, Homo sapiens
gcgacttccggcggcgccgaggcacgcgcgccataagttggagctcccggggcgcccgggacgagcttcccaggattccccgaccttcccgtgctgctcggccttggccgaagcatgcgcggctccggggtcccctcgccgagaatcggggtcccccccaccgtccaaatcgccccgcctcagggacccgcctcagccttggcgaggccgcgccctggccgtgtgagcccatatcccactctcacggcggtccccagagtgagggtcccttccacaacggagaaagacgtccctttcgcaaaagcgacttggtcgggtccccagacccttgccctccactcccagacgtcacagacaggcctcgctcccttctcaggggccccacctgactgaggcttggctggacacaatcctgaagcatgcagattccagacatgacccccagcagaaacacacatcactgtttcaaacctttggcgtgtcattcgtgaagggatgagatggcagctattcagtcatagtactccaagggtccccggctctaccctccagttattctaactcaacgatttgccaaaaccacctgtcgctcccaagccaaagactaccagtccactgacgccagtgaccgcacccaaattcccttcctcagccaggctcgagagtcttcacagtccaaactccatgttcacgggtctgaagcccccccattgcccccaagcccaggctgactgccccaaacgagtggagagccagtgtgtacctgaatgacagcttgaacaaatgcagcaacggacggctgctctgtgtagacagggggcttgatgaggggccccggtccgtcccaaagtgctctgagtcagagaccgacgaggattacatcgtcctcagggctccgctgagggaggacgaacccaaggacgggggcagtgtggggaatgcagccctggtgtctcccgaggcctctgcagaagaggaagaggagcgtgaggagggaggcgaggcatgtggcctggagaggacaggagctggtaaggactcggcggctattgctgccccagctgcagtattgctgagcagggagggtgaagaaggcacagacctcactcctgaggaccaaggagagggctgcggatgagccagggacagaagagcaggtgtccagaagtgaggaggaagagaagctggtgcagccacacagggagtgcagcctggacaatggcaggccttgggctggagaggtggtcttccagagcgacctcctcctgcctcacatccatggagaggaccacaagccccccgacaaccctggggaggcagaggaggatgatgaggaaggctgtgccaggacagacccagcggggcacatgagggttcggatcctgacaggcccactgaggacatgggagaggatgctgaggaagccagcgaggaggcccctgagaaggaggaactggccggggtccggaggcagagacggccatgaacagccctgaggttcttgaggagggatgtgaagaggccacaggtgtcataggtggggagcaggttgaccttggtgaactacctgaccatgaggagaaaagcaaccagaaagtggcagctgccaccctggaggaccgcacacaggatgagcctgctgaggagagctgccagatcgtccttttccagaacaactgcatggacaactttgtgacttccctcacaggaagcccctacgagttcttcccaaccaagagcacctctttttgcagggagagctgttctcctttttctgagtcagtgaaaagcttagaatcagagcaggcaccaaagttggggctgtgtgcggaggaggaccccgtggttggggctttgtgtggccagcatggacccttgcaagatggagtggcggagggtcccacagcccctgatgtggtggtcctgccgaaggaggaggagaaggaggaggtcattgtggatgacatgctggccaacccctatgtgatgggagtgggcctgctgggaggatgagggggaggaggaggaggaggagttcgtggatgacacactggccaacccctatgtgatgggagtgggcctgccaggaagaggaggggaggaggaggaggaggaggaggtcgtggatgacacgcgtggccagcctctatgtgatgggagtgggcctgctgggaggaggagggggaagaggaggaggaggctgtggatgacacactggccaacccctatgtgatgggagtgggactgccaggaggaggagaggaggaggggaggagaaggaggaggaagccatggatgacatgctgaccagcctctatgtgatgggagtgagcctcccgggtaggaggagggggaagaggaggaggaggttgttgatgacacactggccaacccctatgtgatgggagtgggcctgccggtctggcagccccttgagaaggagggcaggctgcattggatgaccctgggtggttatggctcagaagaagaaatgaactgtgaaggagagggcagcctggtctccgtggacaggaagaacatcgacacaagggcctggccccactctgggaaggtggccagaaaccgtcccagaaactgcccccaaagaaaccagatctgaggcaggttcctcagcacctggcatcggaggtgccgcagaggaggcaggaaagagctgttgtcactgaagggaggcccctggaagccagcagggccttgccagcaaagcccagggccttcactttataccctcggtcgttctccgtggaaggccaagagattcctgtttccatctctgtgtactgggagccagaagggtcggggttagatgaccacaggataaagaggaaagaggaacatctctctgtcgtgtctgggagtttctcccagagaaaccaccttccatccagcggcacctccacgccttcttccatggtcgacatcccacctcctttcgacctggcctgcatcaccaagaagcccatcacaaagagctctccctctctcctgatcgacagcgactccccggacaagtacaagaagaagaagtcatcctttaagcggttcctggcgctgatgtttaacaagatggagaggccaggcacgatggctcatgcctgtcatcccagcactttgggaagctgaggcgagcagatcaccgaaggtcaggagttcgagagcagcctggtcaacatagtgaaaccccgtctctaataaaaatacaaaaattagccaggcatggtggtgtgcacctgtaatcccagctacttgggaggctgaaacaggagaattgcttgaacctgggaggcggaggttgcagtgagccgagattgtgccattgcactccagcctgggcaacaagagtgagactccatctc

SEQ ID NO: 2924 - protein, 176 aa, Homo sapiens [sequence omitted]

SEQ ID NO: 2925 - DNA, 2503 bp, Homo sapiens
agactatgagaacattccaaccatgaactcagactatgagaatatccagattctgccctggaggcctgcagggctggtgtgttcaggaagctgtttgaagatcagagcagagccctgtccacagcaaactaaaatgatggctatgtggacatgagcagcttcaacacctttaagaacaatcagcagagcacagaccaggacgcagaaaggagtggacaacacctggccccagctgagtgcctcctagcactgaggaaagcagaaccaagctttgcaacaatgaactctccttgctggaagagaccgcccacctctaacagaattttgtagctggaggaaacttcagacacaagtcctgttacagaagaggaaactggcacagagaggaaatggtgcttgcataaggtctctggacagagtcttgccctgttgcccaggctggagtatagtagtgcagtggtgtgatcatagctcactgtaacttcgaccacctgggctcaaacaatccttcttcctctgcctcccaagtagctgggactacagagcaggacccaggatgcaagaccctaggcatccccaaggccttccactgtccccaggccttccaaagagacagcggcaggaccgcacaatctacaactggaaacagcaggaagtgctagaaaatcactttaaggaggaacagtacccagactatgacacacgacaagagctggcggagatgctcaatctcagggagtaccaagtgcaggtgtggttcaagaatcgccgggccaaacgctctcgggagcggtggttccagaagcagctccagcagctccagaagcatcctcagcagcagcatcctcagcagcagcatccccagcagcagctccagcagcagcagccccagcagcagccccagcagcagcagccccagcagcagccacagcagcagcagccccagcagcagcagctccaccagcagccccagtagcagctctagcagcagcagcagcagccccagcagcagcaactccagtagcagctccagcagcagcagccccagcagtagctccagcagcagcagcagcagccccagtagcagctccagcagccccagtagcagctccagcagcagcagcagcagccccagtagcagctccagcagccccagtagcagctctagcagcagcagctccagcagcagcagtcccagcagcagcagccccagtagcagcggcagcagccccagtagcagcaacagcagccccagtagtagcagcagcagccccagtagcagcagcagcagccccagcccccgtagcagcagccccagcagcagcagctccagcaccagcagtcccagcagcagcagtcccagcagcagcagccccagcagcagctgccccagtgcagccctgggcaggaggccacagagcccacagagctcgcactgtgccccctttccctgaagctgcggcctctgccccccatcagcctggcctcttgggaattctcccacagggagaggccccgtgggtattctcccacaatctgcagcctccaccaggccttgagtagctttgggtgcagagccaggagggcgtttggctgtcctaggtctagcccctggcccaatcccagccccattccaggcccactcaaaagccaaggcccaatcccaggtccaggctcaatcctaggccctggcctgattccaagccaggcttactcccaggcccaggcttagtcctagccccaatcccaggtcctggcccaatcccaaacttaggatccctcccagccccagccctagtccccttgtgacctcagagcacttatgcctccaatttcttgccagacagtcattccctgacttcacagagctcctcccacccctagaccagttcgaggaatccttggtctccaccacgacatctcagtaccaagagggggatggctctatggacaaaaagactcgggccccaagtgattaatggatttatagggggcctgtgtctgcaaagtcctgcggataccagtggacctggagtggctggttggtctacactgctggtgaatgcaccaccaccatttaaccaccctgccgctggtgggcatttgctgtcttcactgtgtggccatcacgactagctctgctatgaatgcacctgccctcatttgagttgagcctgagcatttcgcagctgggattggagtcgctgctcatggggatgtttggcattagtggatgctacttgagagctttgtaaagagctttactcagcacttctgatagtcagcattctccctgacacttaggattgtgagactttttaatgtttgtggatccaatggcttatggcttccctgatgactgagaggttgagaagttctcacatgttaattgaaccttagaaatcctcatatgtgtccatttgtttgcccatttttcttcatttatttgaatgtatttttatattctcttgataattaaagtgctgcaaacaccccccaaaaa

SEQ ID NO: 2926 - protein, 59 aa, Homo sapiens
MSSFNTFKNNQQSTDQDAERSGQHLAPAECLLALRKAEPSFATMNSPCWKRPPTSNRIL

SEQ ID NO: 2927 - DNA, 2263 bp, Homo sapiens
tgagaatatccagattctgccctggaggcctgcagggctggtgtgttcaggaagctgtttgaagatcagagcagagccctgtccacagcaaactaaaatgatggctatgtggacatgagcagcttcaacacctttaagaacaatcagcagagcacagaccaggacgcagaaagacagagtcttgccctgttgcccaggctggagtatagtagtgcagtggtgtgatcatagctcactgtaacttcgaccacctgggctcaaacaatccttcttcctctgcctcccaagtagctgggactacagagcaggacccaggatgcaagaccctaggcatccccaaggccttccactgtccccaggccttccaaagagacagcggcaggaccgcacaatctacaactggaaacagcaggaagtgctagaaaatcactttaaggaggaacagtacccagactatgacacacgacaagagctggcggagatgctcaatctcagggagtaccaagtgcaggtgtggttcaagaatcgccgggccaaacgctctcgggagcggtggttccagaagcagctccagcagctccagaagcatcctcagcagcagcatcctcagcagcagcatccccagcagcagctccagcagcagcagccccagcagcagccccagcagcagcagccccagcagcagccacagcagcagcagccccagcagcagcagctccaccagcagccccagtagcagctctagcagcagcagcagcagccccagcagcagcaactccagtagcagctccagcagcagcagccccagcagtagctccagcagcagcagcagcagccccagtagcagctccagcagccccagtagcagctccagcagcagcagcagcagccccagtagcagctccagcagccccagtagcagctctagcagcagcagctccagcagcagcagtcccagcagcagcagccccagtagcagcggcagcagccccagtagcagcaacagcagccccagtagtagcagcagcagccccagtagcagcagcagcagccccagcccccgtagcagcagccccagcagcagcagctccagcaccagcagtcccagcagcagcagtcccagcagcagcagccccagcagcagctgccccagtgcagccctgggcaggaggccacagagcccacagagctcgcactgtgccccctttccctgaagctgcggcctctgccccccatcagcctggcctcttgggaattctcccacagggagaggccccgtgggtattctcccacaatctgcagcctccaccaggccttgagtagctttgggtgcagagccaggagggcgtttggctgtcctaggtctagcccctggcccaatcccagccccattccaggcccactcaaaagccaaggcccaatcccaggtccaggctcaatcctaggccctggcctgattccaagccaggcttactcccaggcccaggcttagtcctagccccaatcccaggtcctggcccaatcccaaacttaggatccctcccagccccagccctagtccccttgtgacctcagagcacttatgcctccaatttcttgccagacagtcattccctgacttcacagagctcctcccacccctagaccagttcgaggaatccttggtctccaccacgacatctcagtaccaagagggggatggctctatggacaaaaagactcgggccccaagtgattaatggatttatagggggcctgtgtctgcaaagtcctgcggataccagtggacctggagtggctggttggtctacactgctggtgaatgcaccaccaccatttaaccaccctgccgctggtgggcatttgctgtcttcactgtgtggccatcacgactagctctgctatgaatgcacctgccctcatttgagttgagcctgagcatttcgcagctgggattggagtcgctgctcatggggatgtttggcattagtggatgctacttgagagctttgtaaagagctttactcagcacttctgatagtcagcattctccctgacacttaggattgtgagactttttaatgtttgtggatccaatggcttatggcttccctgatgactgagaggttgagaagttctcacatgttaattgaaccttagaaatcctcatatgtgtccatttgtttgcccatttttcttcatttatttgaatgtatttttatattctcttgataattaaagtgctgcaaacaccccccaaaaa

SEQ ID NO: 2928 - protein, 36 aa, Homo sapiens
MSSFNTFKNNQQSTDQDAERQSLALLPRLEYSSAVV

SEQ ID NO: 2929 - DNA, 2300 bp, Homo sapiens
agagccctgtccacagcaaactaaaatgatggctatgtggacatgagcagcttcaacacctttaagaacaatcagcagagcacagaccaggacgcagaaagattatttatgaaaactgcaatagtcatcatttaaagttatggaactgtgtccggaattggtgggttcttggtctcactgacttcaagaatgaagccgcggacccttgcgacagagtcttgccctgttgcccaggctggagtatagtagtgcagtggtgtgatcatagctcactgtaacttcgaccacctgggctcaaacaatccttcttcctctgcctcccaagtagctgggactacagagcaggacccaggatgcaagaccctaggcatccccaaggccttccactgtccccaggccttccaaagagacagcggcaggaccgcacaatctacaactggaaacagcaggaagtgctagaaaatcactttaaggaggaacagtacccagactatgacacacgacaagagctggcggagatgctcaatctcagggagtaccaagtgcaggtgtggttcaagaatcgccgggccaaacgctctcgggagcggtggttccagaagcagctccagcagctccagaagcatcctcagcagcagcatcctcagcagcagcatccccagcagcagctccagcagcagcagccccagcagcagccccagcagcagcagccccagcagcagccacagcagcagcagccccagcagcagcagctccaccagcagccccagtagcagctctagcagcagcagcagcagccccagcagcagcaactccagtagcagctccagcagcagcagccccagcagtagctccagcagcagcagcagcagccccagtagcagctccagcagccccagtagcagctccagcagcagcagcagcagccccagtagcagctccagcagccccagtagcagctctagcagcagcagctccagcagcagcagtcccagcagcagcagccccagtagcagcggcagcagccccagtagcagcaacagcagccccagtagtagcagcagcagccccagtagcagcagcagcagccccagcccccgtagcagcagccccagcagcagcagctccagcaccagcagtcccagcagcagcagtcccagcagcagcagccccagcagcagctgccccagtgcagccctgggcaggaggccacagagcccacagagctcgcactgtgccccctttccctgaagctgcggcctctgccccccatcagcctggcctcttgggaattctcccacagggagaggccccgtgggtattctcccacaatctgcagcctccaccaggccttgagtagctttgggtgcagagccaggagggcgtttggctgtcctaggtctagcccctggcccaatcccagccccattccaggcccactcaaaagccaaggcccaatcccaggtccaggctcaatcctaggccctggcctgattccaagccaggcttactcccaggcccaggcttagtcctagccccaatcccaggtcctggcccaatcccaaacttaggatccctcccagccccagccctagtccccttgtgacctcagagcacttatgcctccaatttcttgccagacagtcattccctgacttcacagagctcctcccacccctagaccagttcgaggaatccttggtctccaccacgacatctcagtaccaagagggggatggctctatggacaaaaagactcgggccccaagtgattaatggatttatagggggcctgtgtctgcaaagtcctgcggataccagtggacctggagtggctggttggtctacactgctggtgaatgcaccaccaccatttaaccaccctgccgctggtgggcatttgctgtcttcactgtgtggccatcacgactagctctgctatgaatgcacctgccctcatttgagttgagcctgagcatttcgcagctgggattggagtcgctgctcatggggatgtttggcattagtggatgctacttgagagctttgtaaagagctttactcagcacttctgatagtcagcattctccctgacacttaggattgtgagactttttaatgtttgtggatccaatggcttatggcttccctgatgactgagaggttgagaagttctcacatgttaattgaaccttagaaatcctcatatgtgtccatttgtttgcccatttttcttcatttatttgaatgtatttttatattctcttgataattaaagtgctgcaaacaccccccaaaaa

SEQ ID NO: 2930 - protein, 30 aa, Homo sapiens
MSSFNTFKNNQQSTDQDAERLFMKTAIVII

SEQ ID NO: 2931 - DNA, 478 bp, Homo sapiens
agagccctgtccacagcaaactaaaatgatggctatgtggacatgagcagcttcaacacctttaagaacaatcagcagagcacagaccaggacgcagaaagaattttgtagctggaggaaacttcagacacaagtcctgttacagaagaggaaactggcacagagaggaaatggtgcttgcataaggtctctggacagagtcttgccctgttgcccaggctggagtatagtagtgcagtggtgtgatcatagctcactgtaacttcgaccacctgggctcaaacaatccttcttcctctgcctcccaagtagctgggactacagctatagaaagaactcaacaaagaaatcttgaagaatgacttttagcagcaacaatagaagacaaaacaacagaactcacagctctgacaaagtctctctctgctacctaggctggaatgcagtggtgtgatctctgccactgcaacattcgcct

SEQ ID NO: 2932 - protein, 31 aa, Homo sapiens
MTFSSNNRRQNNRTHSSDKVSLCYLGWNAVV

SEQ ID NO: 2933 - DNA, 2205 bp, Homo sapiens
aaactaaaatgatggctatgtggacatgagcagcttcaacacctttaagaacaatcagcagagcacagaccaggacgcagaaagattatttatgaaaactgcaatagtcatcatttaaagttatggaactgtgtccggaattggtgggttcttggtctcactgacttcaagaatgaagccgcggacccttgcggtaagtcagggatttcttcttggtttggatccactgctggtgagcagaacagagcaggacccaggatgcaagaccctaggcatccccaaggccttccactgtccccaggccttccaaagagacagcggcaggaccgcacaatctacaactggaaacagcaggaagtgctagaaaatcactttaaggaggaacagtacccagactatgacacacgacaagagctggcggagatgctcaatctcagggagtaccaagtgcaggtgtggttcaagaatcgccgggccaaacgctctcgggagcggtggttccagaagcagctccagcagctccagaagcatcctcagcagcagcatcctcagcagcagcatccccagcagcagctccagcagcagcagccccagcagcagccccagcagcagcagccccagcagcagccacagcagcagcagccccagcagcagcagctccaccagcagccccagtagcagctctagcagcagcagcagcagccccagcagcagcaactccagtagcagctccagcagcagcagccccagcagtagctccagcagcagcagcagcagccccagtagcagctccagcagccccagtagcagctccagcagcagcagcagcagccccagtagcagctccagcagccccagtagcagctctagcagcagcagctccagcagcagcagtcccagcagcagcagccccagtagcagcggcagcagccccagtagcagcaacagcagccccagtagtagcagcagcagccccagtagcagcagcagcagccccagcccccgtagcagcagccccagcagcagcagctccagcaccagcagtcccagcagcagcagtcccagcagcagcagccccagcagcagctgccccagtgcagccctgggcaggaggccacagagcccacagagctcgcactgtgccccctttccctgaagctgcggcctctgccccccatcagcctggcctcttgggaattctcccacagggagaggccccgtgggtattctcccacaatctgcagcctccaccaggccttgagtagctttgggtgcagagccaggagggcgtttggctgtcctaggtctagcccctggcccaatcccagccccattccaggcccactcaaaagccaaggcccaatcccaggtccaggctcaatcctaggccctggcctgattccaagccaggcttactcccaggcccaggcttagtcctagccccaatcccaggtcctggcccaatcccaaacttaggatccctcccagccccagccctagtccccttgtgacctcagagcacttatgcctccaatttcttgccagacagtcattccctgacttcacagagctcctcccacccctagaccagttcgaggaatccttggtctccaccacgacatctcagtaccaagagggggatggctctatggacaaaaagactcgggccccaagtgattaatggatttatagggggcctgtgtctgcaaagtcctgcggataccagtggacctggagtggctggttggtctacactgctggtgaatgcaccaccaccatttaaccaccctgccgctggtgggcatttgctgtcttcactgtgtggccatcacgactagctctgctatgaatgcacctgccctcatttgagttgagcctgagcatttcgcagctgggattggagtcgctgctcatggggatgtttggcattagtggatgctacttgagagctttgtaaagagctttactcagcacttctgatagtcagcattctccctgacacttaggattgtgagactttttaatgtttgtggatccaatggcttatggcttccctgatgactgagaggttgagaagttctcacatgttaattgaaccttagaaatcctcatatgtgtccatttgtttgcccatttttcttcatttatttgaatgtatttttatattctcttgataattaaagtgctgcaaacaccccccaaaaa

SEQ ID NO: 2934 - protein, 63 aa, Homo sapiens
MKPRTLAVSQGFLLGLDPLLVSRTEQDPGCKTLGIPKAFHCPQAFQRDSGRTAQSTTGNSRKC

SEQ ID NO: 2935 - DNA, 2232 bp, Homo sapiens
gattttttgtataaggtgagagatgaggatccagttttggtctcctacacgtggctagccaattatcccagcaccatttgtggaaaaggatgccctttccccactttatgattttgtttgctttgttgaagatcatttgcagacagagtcttgccctgttgcccaggctggagtatagtagtgcagtggtgtgatcatagctcactgtaacttcgaccacctgggctcaaacaatccttcttcctctgcctcccaagtagctgggactacagagcaggacccaggatgcaagaccctaggcatccccaaggccttccactgtccccaggccttccaaagagacagcggcaggaccgcacaatctacaactggaaacagcaggaagtgctagaaaatcactttaaggaggaacagtacccagactatgacacacgacaagagctggcggagatgctcaatctcagggagtaccaagtgcaggtgtggttcaagaatcgccgggccaaacgctctcgggagcggtggttccagaagcagctccagcagctccagaagcatcctcagcagcagcatcctcagcagcagcatccccagcagcagctccagcagcagcagccccagcagcagccccagcagcagcagccccagcagcagccacagcagcagcagccccagcagcagcagctccaccagcagccccagtagcagctctagcagcagcagcagcagccccagcagcagcaactccagtagcagctccagcagcagcagccccagcagtagctccagcagcagcagcagcagccccagtagcagctccagcagccccagtagcagctccagcagcagcagcagcagccccagtagcagctccagcagccccagtagcagctctagcagcagcagctccagcagcagcagtcccagcagcagcagccccagtagcagcggcagcagccccagtagcagcaacagcagccccagtagtagcagcagcagccccagtagcagcagcagcagccccagcccccgtagcagcagccccagcagcagcagctccagcaccagcagtcccagcagcagcagtcccagcagcagcagccccagcagcagctgccccagtgcagccctgggcaggaggccacagagcccacagagctcgcactgtgccccctttccctgaagctgcggcctctgccccccatcagcctggcctcttgggaattctcccacagggagaggccccgtgggtattctcccacaatctgcagcctccaccaggccttgagtagctttgggtgcagagccaggagggcgtttggctgtcctaggtctagcccctggcccaatcccagccccattccaggcccactcaaaagccaaggcccaatcccaggtccaggctcaatcctaggccctggcctgattccaagccaggcttactcccaggcccaggcttagtcctagccccaatcccaggtcctggcccaatcccaaacttaggatccctcccagccccagccctagtccccttgtgacctcagagcacttatgcctccaatttcttgccagacagtcattccctgacttcacagagctcctcccacccctagaccagttcgaggaatccttggtctccaccacgacatctcagtaccaagagggggatggctctatggacaaaaagactcgggccccaagtgattaatggatttatagggggcctgtgtctgcaaagtcctgcggataccagtggacctggagtggctggttggtctacactgctggtgaatgcaccaccaccatttaaccaccctgccgctggtgggcatttgctgtcttcactgtgtggccatcacgactagctctgctatgaatgcacctgccctcatttgagttgagcctgagcatttcgcagctgggattggagtcgctgctcatggggatgtttggcattagtggatgctacttgagagctttgtaaagagctttactcagcacttctgatagtcagcattctccctgacacttaggattgtgagactttttaatgtttgtggatccaatggcttatggcttccctgatgactgagaggttgagaagttctcacatgttaattgaaccttagaaatcctcatatgtgtccatttgtttgcccatttttcttcatttatttgaatgtatttttatattctcttgataattaaagtgctgcaaacaccccccaaaaa

SEQ ID NO: 2936 - protein, 34 aa, Homo sapiens [sequence omitted]

SEQ ID NO: 2937 - DNA, 2276 bp, Homo sapiens
agagtctcgctctgtcgcccaggctggcagcctccctagtagctgggactacaggcacctgccaccacgcctagctaattttttgtatttttttagtagagacggggtttcactgtgttagccaggtctccatctcctgacctcgtgatctgcctgcctcggcatcccaaagtgctgggattacagacagagtcttgccctgttgcccaggctggagtatagtagtgcagtggtgtgatcatagctcactgtaacttcgaccacctgggctcaaacaatccttcttcctctgcctcccaagtagctgggactacagagcaggacccaggatgcaagaccctaggcatccccaaggccttccactgtccccaggccttccaaagagacagcggcaggaccgcacaatctacaactggaaacagcaggaagtgctagaaaatcactttaaggaggaacagtacccagactatgacacacgacaagagctggcggagatgctcaatctcagggagtaccaagtgcaggtgtggttcaagaatcgccgggccaaacgctctcgggagcggtggttccagaagcagctccagcagctccagaagcatcctcagcagcagcatcctcagcagcagcatccccagcagcagctccagcagcagcagccccagcagcagccccagcagcagcagccccagcagcagccacagcagcagcagccccagcagcagcagctccaccagcagccccagtagcagctctagcagcagcagcagcagccccagcagcagcaactccagtagcagctccagcagcagcagccccagcagtagctccagcagcagcagcagcagccccagtagcagctccagcagccccagtagcagctccagcagcagcagcagcagccccagtagcagctccagcagccccagtagcagctctagcagcagcagctccagcagcagcagtcccagcagcagcagccccagtagcagcggcagcagccccagtagcagcaacagcagccccagtagtagcagcagcagccccagtagcagcagcagcagccccagcccccgtagcagcagccccagcagcagcagctccagcaccagcagtcccagcagcagcagtcccagcagcagcagccccagcagcagctgccccagtgcagccctgggcaggaggccacagagcccacagagctcgcactgtgccccctttccctgaagctgcggcctctgccccccatcagcctggcctcttgggaattctcccacagggagaggccccgtgggtattctcccacaatctgcagcctccaccaggccttgagtagctttgggtgcagagccaggagggcgtttggctgtcctaggtctagcccctggcccaatcccagccccattccaggcccactcaaaagccaaggcccaatcccaggtccaggctcaatcctaggccctggcctgattccaagccaggcttactcccaggcccaggcttagtcctagccccaatcccaggtcctggcccaatcccaaacttaggatccctcccagccccagccctagtccccttgtgacctcagagcacttatgcctccaatttcttgccagacagtcattccctgacttcacagagctcctcccacccctagaccagttcgaggaatccttggtctccaccacgacatctcagtaccaagagggggatggctctatggacaaaaagactcgggccccaagtgattaatggatttatagggggcctgtgtctgcaaagtcctgcggataccagtggacctggagtggctggttggtctacactgctggtgaatgcaccaccaccatttaaccaccctgccgctggtgggcatttgctgtcttcactgtgtggccatcacgactagctctgctatgaatgcacctgccctcatttgagttgagcctgagcatttcgcagctgggattggagtcgctgctcatggggatgtttggcattagtggatgctacttgagagctttgtaaagagctttactcagcacttctgatagtcagcattctccctgacacttaggattgtgagactttttaatgtttgtggatccaatggcttatggcttccctgatgactgagaggttgagaagttctcacatgttaattgaaccttagaaatcctcatatgtgtccatttgtttgcccatttttcttcatttatttgaatgtatttttatattctcttgataattaaagtgctgcaaacaccccccaaaaa

SEQ ID NO: 2938 - protein, 252 aa, Homo sapiens [sequence omitted]

SEQ ID NO: 2939 - DNA, 2359 bp, Homo sapiens
aaaagactagtctcagtcccactgtgccctctccaatagcactgagtttgtttccatgctatgtgtgaacaggactgagaacttgccccaggctaccagcctcccagctgagaaagcaagcagggctttcatgcctccctgcctgtcgagtctgcacacgggtttcacgccctcccctgtgttctggccaggagactttgcgttcggttggaattgttacagagttcagctggaggtttccttctccctgtggccttttcccagttcctctggcagccctcctcaaggacccctgtgagataagtcagaggtgactttcctggggacccagagaacccacaaggcttttcccactgcttactgtattttgctcggctctctaaattgaatcaattgcagagcaggacccaggatgcaagaccctaggcatccccaaggccttccactgtccccaggccttccaaagagacagcggcaggaccgcacaatctacaactggaaacagcaggaagtgctagaaaatcactttaaggaggaacagtacccagactatgacacacgacaagagctggcggagatgctcaatctcagggagtaccaagtgcaggtgtggttcaagaatcgccgggccaaacgctctcgggagcggtggttccagaagcagctccagcagctccagaagcatcctcagcagcagcatcctcagcagcagcatccccagcagcagctccagcagcagcagccccagcagcagccccagcagcagcagccccagcagcagccacagcagcagcagccccagcagcagcagctccaccagcagccccagtagcagctctagcagcagcagcagcagccccagcagcagcaactccagtagcagctccagcagcagcagccccagcagtagctccagcagcagcagcagcagccccagtagcagctccagcagccccagtagcagctccagcagcagcagcagcagccccagtagcagctccagcagccccagtagcagctctagcagcagcagctccagcagcagcagtcccagcagcagcagccccagtagcagcggcagcagccccagtagcagcaacagcagccccagtagtagcagcagcagccccagtagcagcagcagcagccccagcccccgtagcagcagccccagcagcagcagctccagcaccagcagtcccagcagcagcagtcccagcagcagcagccccagcagcagctgccccagtgcagccctgggcaggaggccacagagcccacagagctcgcactgtgccccctttccctgaagctgcggcctctgccccccatcagcctggcctcttgggaattctcccacagggagaggccccgtgggtattctcccacaatctgcagcctccaccaggccttgagtagctttgggtgcagagccaggagggcgtttggctgtcctaggtctagcccctggcccaatcccagccccattccaggcccactcaaaagccaaggcccaatcccaggtccaggctcaatcctaggccctggcctgattccaagccaggcttactcccaggcccaggcttagtcctagccccaatcccaggtcctggcccaatcccaaacttaggatccctcccagccccagccctagtccccttgtgacctcagagcacttatgcctccaatttcttgccagacagtcattccctgacttcacagagctcctcccacccctagaccagttcgaggaatccttggtctccaccacgacatctcagtaccaagagggggatggctctatggacaaaaagactcgggccccaagtgattaatggatttatagggggcctgtgtctgcaaagtcctgcggataccagtggacctggagtggctggttggtctacactgctggtgaatgcaccaccaccatttaaccaccctgccgctggtgggcatttgctgtcttcactgtgtggccatcacgactagctctgctatgaatgcacctgccctcatttgagttgagcctgagcatttcgcagctgggattggagtcgctgctcatggggatgtttggcattagtggatgctacttgagagctttgtaaagagctttactcagcacttctgatagtcagcattctccctgacacttaggattgtgagactttttaatgtttgtggatccaatggcttatggcttccctgatgactgagaggttgagaagttctcacatgttaattgaaccttagaaatcctcatatgtgtccatttgtttgcccatttttcttcatttatttgaatgtatttttatattctcttgataattaaagtgctgcaaacaccccccaaaaa

SEQ ID NO: 2940 - protein, 252 aa, Homo sapiens [sequence omitted]

SEQ ID NO: 2941 - DNA, 2355 bp, Homo sapiens
ctccctgcctgtcgagtctgcacacgggtttcacgccctcccctgtgttctggccaggagactttgcgttcggttggaattgttacagagttcagctggaggtttccttctccctgtggccttttcccagttcctctggcagccctcctcaaggacccctgtgagataagtcagaggtgactttcctggggacccagagaacccacaaggcttttcccactgcttactgtattttgctcggctctctaaattgaatcaattgcagacagagtcttgccctgttgcccaggctggagtatagtagtgcagtggtgtgatcatagctcactgtaacttcgaccacctgggctcaaacaatccttcttcctctgcctcccaagtagctgggactacagagcaggacccaggatgcaagaccctaggcatccccaaggccttccactgtccccaggccttccaaagagacagcggcaggaccgcacaatctacaactggaaacagcaggaagtgctagaaaatcactttaaggaggaacagtacccagactatgacacacgacaagagctggcggagatgctcaatctcagggagtaccaagtgcaggtgtggttcaagaatcgccgggccaaacgctctcgggagcggtggttccagaagcagctccagcagctccagaagcatcctcagcagcagcatcctcagcagcagcatccccagcagcagctccagcagcagcagccccagcagcagccccagcagcagcagccccagcagcagccacagcagcagcagccccagcagcagcagctccaccagcagccccagtagcagctctagcagcagcagcagcagccccagcagcagcaactccagtagcagctccagcagcagcagccccagcagtagctccagcagcagcagcagcagccccagtagcagctccagcagccccagtagcagctccagcagcagcagcagcagccccagtagcagctccagcagccccagtagcagctctagcagcagcagctccagcagcagcagtcccagcagcagcagccccagtagcagcggcagcagccccagtagcagcaacagcagccccagtagtagcagcagcagccccagtagcagcagcagcagccccagcccccgtagcagcagccccagcagcagcagctccagcaccagcagtcccagcagcagcagtcccagcagcagcagccccagcagcagctgccccagtgcagccctgggcaggaggccacagagcccacagagctcgcactgtgccccctttccctgaagctgcggcctctgccccccatcagcctggcctcttgggaattctcccacagggagaggccccgtgggtattctcccacaatctgcagcctccaccaggccttgagtagctttgggtgcagagccaggagggcgtttggctgtcctaggtctagcccctggcccaatcccagccccattccaggcccactcaaaagccaaggcccaatcccaggtccaggctcaatcctaggccctggcctgattccaagccaggcttactcccaggcccaggcttagtcctagccccaatcccaggtcctggcccaatcccaaacttaggatccctcccagccccagccctagtccccttgtgacctcagagcacttatgcctccaatttcttgccagacagtcattccctgacttcacagagctcctcccacccctagaccagttcgaggaatccttggtctccaccacgacatctcagtaccaagagggggatggctctatggacaaaaagactcgggccccaagtgattaatggatttatagggggcctgtgtctgcaaagtcctgcggataccagtggacctggagtggctggttggtctacactgctggtgaatgcaccaccaccatttaaccaccctgccgctggtgggcatttgctgtcttcactgtgtggccatcacgactagctctgctatgaatgcacctgccctcatttgagttgagcctgagcatttcgcagctgggattggagtcgctgctcatggggatgtttggcattagtggatgctacttgagagctttgtaaagagctttactcagcacttctgatagtcagcattctccctgacacttaggattgtgagactttttaatgtttgtggatccaatggcttatggcttccctgatgactgagaggttgagaagttctcacatgttaattgaaccttagaaatcctcatatgtgtccatttgtttgcccatttttcttcatttatttgaatgtatttttatattctcttgataattaaagtgctgcaaacaccccccaaaaa

SEQ ID NO: 2942 - protein, 252 aa, Homo sapiens [sequence omitted]

SEQ ID NO: 2943 - DNA, 2335 bp, Homo sapiens
gttcggttggaattgttacagagttcagctggaggtttccttctccctgtggccttttcccagttcctctggcagccctcctcaaggacccctgtgagataagtcagaggtgactttcctggggacccagagaacccacaaggcttttcccactgcttactgtattttgctcggctctctaaattgaatcaattgcaggtaagtcagggatttcttcttggtttggatccactgctggtgagcagacagagtcttgccctgttgcccaggctggagtatagtagtgcagtggtgtgatcatagctcactgtaacttcgaccacctgggctcaaacaatccttcttcctctgcctcccaagtagctgggactacagagcaggacccaggatgcaagaccctaggcatccccaaggccttccactgtccccaggccttccaaagagacagcggcaggaccgcacaatctacaactggaaacagcaggaagtgctagaaaatcactttaaggaggaacagtacccagactatgacacacgacaagagctggcggagatgctcaatctcagggagtaccaagtgcaggtgtggttcaagaatcgccgggccaaacgctctcgggagcggtggttccagaagcagctccagcagctccagaagcatcctcagcagcagcatcctcagcagcagcatccccagcagcagctccagcagcagcagccccagcagcagccccagcagcagcagccccagcagcagccacagcagcagcagccccagcagcagcagctccaccagcagccccagtagcagctctagcagcagcagcagcagccccagcagcagcaactccagtagcagctccagcagcagcagccccagcagtagctccagcagcagcagcagcagccccagtagcagctccagcagccccagtagcagctccagcagcagcagcagcagccccagtagcagctccagcagccccagtagcagctctagcagcagcagctccagcagcagcagtcccagcagcagcagccccagtagcagcggcagcagccccagtagcagcaacagcagccccagtagtagcagcagcagccccagtagcagcagcagcagccccagcccccgtagcagcagccccagcagcagcagctccagcaccagcagtcccagcagcagcagtcccagcagcagcagccccagcagcagctgccccagtgcagccctgggcaggaggccacagagcccacagagctcgcactgtgccccctttccctgaagctgcggcctctgccccccatcagcctggcctcttgggaattctcccacagggagaggccccgtgggtattctcccacaatctgcagcctccaccaggccttgagtagctttgggtgcagagccaggagggcgtttggctgtcctaggtctagcccctggcccaatcccagccccattccaggcccactcaaaagccaaggcccaatcccaggtccaggctcaatcctaggccctggcctgattccaagccaggcttactcccaggcccaggcttagtcctagccccaatcccaggtcctggcccaatcccaaacttaggatccctcccagccccagccctagtccccttgtgacctcagagcacttatgcctccaatttcttgccagacagtcattccctgacttcacagagctcctcccacccctagaccagttcgaggaatccttggtctccaccacgacatctcagtaccaagagggggatggctctatggacaaaaagactcgggccccaagtgattaatggatttatagggggcctgtgtctgcaaagtcctgcggataccagtggacctggagtggctggttggtctacactgctggtgaatgcaccaccaccatttaaccaccctgccgctggtgggcatttgctgtcttcactgtgtggccatcacgactagctctgctatgaatgcacctgccctcatttgagttgagcctgagcatttcgcagctgggattggagtcgctgctcatggggatgtttggcattagtggatgctacttgagagctttgtaaagagctttactcagcacttctgatagtcagcattctccctgacacttaggattgtgagactttttaatgtttgtggatccaatggcttatggcttccctgatgactgagaggttgagaagttctcacatgttaattgaaccttagaaatcctcatatgtgtccatttgtttgcccatttttcttcatttatttgaatgtatttttatattctcttgataattaaagtgctgcaaacaccccccaaaaa

SEQ ID NO: 2944 - protein, 252 aa, Homo sapiens [sequence omitted]

SEQ ID NO: 2945 - DNA, 2247 bp, Homo sapiens
gattatttatgaaaactgcaatagtcatcatttaaagttatggaactgtgtccggaattggtgggttcttggtctcactgacttcaagaatgaagccgcggacccttgcggtaagtcagggatttcttcttggtttggatccactgctggtgagcagacagagtcttgccctgttgcccaggctggagtatagtagtgcagtggtgtgatcatagctcactgtaacttcgaccacctgggctcaaacaatccttcttcctctgcctcccaagtagctgggactacagagcaggacccaggatgcaagaccctaggcatccccaaggccttccactgtccccaggccttccaaagagacagcggcaggaccgcacaatctacaactggaaacagcaggaagtgctagaaaatcactttaaggaggaacagtacccagactatgacacacgacaagagctggcggagatgctcaatctcagggagtaccaagtgcaggtgtggttcaagaatcgccgggccaaacgctctcgggagcggtggttccagaagcagctccagcagctccagaagcatcctcagcagcagcatcctcagcagcagcatccccagcagcagctccagcagcagcagccccagcagcagccccagcagcagcagccccagcagcagccacagcagcagcagccccagcagcagcagctccaccagcagccccagtagcagctctagcagcagcagcagcagccccagcagcagcaactccagtagcagctccagcagcagcagccccagcagtagctccagcagcagcagcagcagccccagtagcagctccagcagccccagtagcagctccagcagcagcagcagcagccccagtagcagctccagcagccccagtagcagctctagcagcagcagctccagcagcagcagtcccagcagcagcagccccagtagcagcggcagcagccccagtagcagcaacagcagccccagtagtagcagcagcagccccagtagcagcagcagcagccccagcccccgtagcagcagccccagcagcagcagctccagcaccagcagtcccagcagcagcagtcccagcagcagcagccccagcagcagctgccccagtgcagccctgggcaggaggccacagagcccacagagctcgcactgtgccccctttccctgaagctgcggcctctgccccccatcagcctggcctcttgggaattctcccacagggagaggccccgtgggtattctcccacaatctgcagcctccaccaggccttgagtagctttgggtgcagagccaggagggcgtttggctgtcctaggtctagcccctggcccaatcccagccccattccaggcccactcaaaagccaaggcccaatcccaggtccaggctcaatcctaggccctggcctgattccaagccaggcttactcccaggcccaggcttagtcctagccccaatcccaggtcctggcccaatcccaaacttaggatccctcccagccccagccctagtccccttgtgacctcagagcacttatgcctccaatttcttgccagacagtcattccctgacttcacagagctcctcccacccctagaccagttcgaggaatccttggtctccaccacgacatctcagtaccaagagggggatggctctatggacaaaaagactcgggccccaagtgattaatggatttatagggggcctgtgtctgcaaagtcctgcggataccagtggacctggagtggctggttggtctacactgctggtgaatgcaccaccaccatttaaccaccctgccgctggtgggcatttgctgtcttcactgtgtggccatcacgactagctctgctatgaatgcacctgccctcatttgagttgagcctgagcatttcgcagctgggattggagtcgctgctcatggggatgtttggcattagtggatgctacttgagagctttgtaaagagctttactcagcacttctgatagtcagcattctccctgacacttaggattgtgagactttttaatgtttgtggatccaatggcttatggcttccctgatgactgagaggttgagaagttctcacatgttaattgaaccttagaaatcctcatatgtgtccatttgtttgcccatttttcttcatttatttgaatgtatttttatattctcttgataattaaagtgctgcaaacaccccccaaaaa

SEQ ID NO: 2946 - protein, 39 aa, Homo sapiens
MKPRTLAVSQGFLLGLDPLLVSRQSLALLPRLEYSSAVV

SEQ ID NO: 2947 - DNA, 2254 bp, Homo sapiens
ttgcataaatgtttcaagtatctaacagacagcttacagtagatgtacacaatggtttgcaataagatctactctccttcctctggttcaaggaaaaaaattatctggatttttgccacttcaagaccaagactgctgccatgctagaaaagggctggggtaagacagagtcttgccctgttgcccaggctggagtatagtagtgcagtggtgtgatcatagctcactgtaacttcgaccacctgggctcaaacaatccttcttcctctgcctcccaagtagctgggactacagagcaggacccaggatgcaagaccctaggcatccccaaggccttccactgtccccaggccttccaaagagacagcggcaggaccgcacaatctacaactggaaacagcaggaagtgctagaaaatcactttaaggaggaacagtacccagactatgacacacgacaagagctggcggagatgctcaatctcagggagtaccaagtgcaggtgtggttcaagaatcgccgggccaaacgctctcgggagcggtggttccagaagcagctccagcagctccagaagcatcctcagcagcagcatcctcagcagcagcatccccagcagcagctccagcagcagcagccccagcagcagccccagcagcagcagccccagcagcagccacagcagcagcagccccagcagcagcagctccaccagcagccccagtagcagctctagcagcagcagcagcagccccagcagcagcaactccagtagcagctccagcagcagcagccccagcagtagctccagcagcagcagcagcagccccagtagcagctccagcagccccagtagcagctccagcagcagcagcagcagccccagtagcagctccagcagccccagtagcagctctagcagcagcagctccagcagcagcagtcccagcagcagcagccccagtagcagcggcagcagccccagtagcagcaacagcagccccagtagtagcagcagcagccccagtagcagcagcagcagccccagcccccgtagcagcagccccagcagcagcagctccagcaccagcagtcccagcagcagcagtcccagcagcagcagccccagcagcagctgccccagtgcagccctgggcaggaggccacagagcccacagagctcgcactgtgccccctttccctgaagctgcggcctctgccccccatcagcctggcctcttgggaattctcccacagggagaggccccgtgggtattctcccacaatctgcagcctccaccaggccttgagtagctttgggtgcagagccaggagggcgtttggctgtcctaggtctagcccctggcccaatcccagccccattccaggcccactcaaaagccaaggcccaatcccaggtccaggctcaatcctaggccctggcctgattccaagccaggcttactcccaggcccaggcttagtcctagccccaatcccaggtcctggcccaatcccaaacttaggatccctcccagccccagccctagtccccttgtgacctcagagcacttatgcctccaatttcttgccagacagtcattccctgacttcacagagctcctcccacccctagaccagttcgaggaatccttggtctccaccacgacatctcagtaccaagagggggatggctctatggacaaaaagactcgggccccaagtgattaatggatttatagggggcctgtgtctgcaaagtcctgcggataccagtggacctggagtggctggttggtctacactgctggtgaatgcaccaccaccatttaaccaccctgccgctggtgggcatttgctgtcttcactgtgtggccatcacgactagctctgctatgaatgcacctgccctcatttgagttgagcctgagcatttcgcagctgggattggagtcgctgctcatggggatgtttggcattagtggatgctacttgagagctttgtaaagagctttactcagcacttctgatagtcagcattctccctgacacttaggattgtgagactttttaatgtttgtggatccaatggcttatggcttccctgatgactgagaggttgagaagttctcacatgttaattgaaccttagaaatcctcatatgtgtccatttgtttgcccatttttcttcatttatttgaatgtatttttatattctcttgataattaaagtgctgcaaacaccccccaaaaa

SEQ ID NO: 2948 - protein, 252 aa, Homo sapiens [sequence omitted]

SEQ ID NO: 2949 - DNA, 960 bp, Homo sapiens
ggaatggccagcggtccctgtggagaacagtttaagtcagccttttcctgcttccactatagcacggaggagatcaaggggtcagactgtgtagaccagttccgggccatgcaggaatgcatgcagaaatacccagacctctatccccaagaggatgaggatgaggaagaggaaagagagaagaagccagcagaacaagcagaagaaacagctcccattgaggccactgcaaccaaagaagaggagggatcaagttaatgaaggccacaaggcactgggcaccagtccttttggagtggaccttttgcaaaaggccttgtcatcaccttccaagaaagtttccttctgttgtcctgtgcattataatatacaaaataacttattttgatgatcagaggtcttgaggtcttgacatcttgacatatacactgaaaaaaatgggggttgtatgtatgtgtgtcctacccaaacctgtggccgccacttttgaattctcagattgccctgaattttgccacttttaaataatgtgctgaataagctcagcaactaaaaaccattacccaagaacgtttcttgtgagtgagctgatttattctgattcattatattccttttggtagattttataccccttggggaaataatacaacaaaaacatctcttaaaaatgctgggatggggccatatctactagcagaggccagatggtcagatatgatttctgcaaacccatcttgaccttgagtatgtgaaggggtactgtactttattcctgatacattttgttccttgttattccgaaagccctggtttggggcccatgttcacactggctctcagtctagtcaggtgcaatgttcttgagaggtggggacctaattattaccagagtagcagcaagagaggaaacgttgtgaattaagtattcaattaaaaggaaacatgatttctacctga

SEQ ID NO: 2950 - protein, 84 aa, Homo sapiens [sequence omitted]

SEQ ID NO: 2951 - DNA, 1556 bp, Homo sapiens
caggcgcgcggcgggcaggcctgggagggggcgggtccgcgcgggcttcggaggagcccgccctgccagaggagagggaggtcacggcgtaaaggtgcagctgccgccaccgccgcttctgcaaggtctcagggacgggctgcagccatgtcctattgccggcaggaaggctttgcccaggatggttccttctggaatgtctattcccctccttccctccctgaagctctttgtcagggacaaaggtaggatccctccccttccgtcttctccactggatgcctgtgtcgtattcatctgtgaccaccaggtactaccacagagctggagctgaggaagggaaggatcgaatcatatttgtaaccaaagaagatcatgaaactccaagcagtgcagaattggtggctgatgaccccaacgatccatacgaggagcatggattgatactgccaaatggaaacattaactggaactgcccatgccttgggggaatggccagcggtccctgtggagaacagtttaagtcagccttttcctgcttccactatagcacggaggagatcaaggggtcagactgtgtagaccagttccgggccatgcaggaatgcatgcagaaatacccagacctctatccccaagaggatgaggatgaggaagaggaaagagagaagaagccagcagaacaagcagaagaaacagctcccattgaggccactgcaaccaaagaagaggagggatcaagttaatgaaggccacaaggcactgggcaccagtccttttggagtggaccttttgcaaaaggccttgtcatcaccttccaagaaagtttccttctgttgtcctgtgcattataatatacaaaataacttattttgatgatcagaggtcttgaggtcttgacatcttgacatatacactgaaaaaaatgggggttgtatgtatgtgtgtcctacccaaacctgtggccgccacttttgaattctcagattgccctgaattttgccacttttaaataatgtgctgaataagctcagcaactaaaaaccattacccaagaacgtttcttgtgagtgagctgatttattctgattcattatattccttttggtagattttataccccttggggaaataatacaacaaaaacatctcttaaaaatgctgggatggggccatatctactagcagaggccagatggtcagatatgatttctgcaaacccatcttgaccttgagtatgtgaaggggtactgtactttattcctgatacattttggtttccatgtaggtgttgagctcctggttttctgtgtttggatgatgaagatttggacccttccattcataatccctttctaagtgaagggagaggctggcttggctgttccttgttattccgaaagccctggtttggggcccatgttcacactggctctcagtctagtcaggtgcaatgttcttgagaggtggggacctaattattaccagagtagcagcaagagaggaaacgttgtgaattaagtattcaattaaaaggaaacatgatttctacctga

SEQ ID NO: 2952 - protein, 155 aa, Homo sapiens; identical to SEQ ID NO: 321

SEQ ID NO: 2953 - DNA, 1421 bp, Homo sapiens
aggttggcctggccgcggttgcgagggcgccgaggcaggcgcgcggcgggcaggcctgggagggggcgggtccgcgcgggcttcggaggagcccgccctgccagaggagagggaggtcacggcgtaaaggtgcagctgccgccaccgccgcttctgcaaggtctcagggacgggctgcagccatgtcctattgccggcaggaagggaaggatcgaatcatatttgtaaccaaagaagatcatgaaactccaagcagtgcagaattggtggctgatgaccccaacgatccatacgaggagcatggattgatactgccaaatggaaacattaactggaactgcccatgccttgggggaatggccagcggtccctgtggagaacagtttaagtcagccttttcctgcttccactatagcacggaggagatcaaggggtcagactgtgtagaccagttccgggccatgcaggaatgcatgcagaaatacccagacctctatccccaagaggatgaggatgaggaagaggaaagagagaagaagccagcagaacaagcagaagaaacagctcccattgaggccactgcaaccaaagaagaggagggatcaagttaatgaaggccacaaggcactgggcaccagtccttttggagtggaccttttgcaaaaggccttgtcatcaccttccaagaaagtttccttctgttgtcctgtgcattataatatacaaaataacttattttgatgatcagaggtcttgaggtcttgacatcttgacatatacactgaaaaaaatgggggttgtatgtatgtgtgtcctacccaaacctgtggccgccacttttgaattctcagattgccctgaattttgccacttttaaataatgtgctgaataagctcagcaactaaaaaccattacccaagaacgtttcttgtgagtgagctgatttattctgattcattatattccttttggtagattttataccccttggggaaataatacaacaaaaacatctcttaaaaatgctgggatggggccatatctactagcagaggccagatggtcagatatgatttctgcaaacccatcttgaccttgagtatgtgaaggggtactgtactttattcctgatacattttggtttccatgtaggtgttgagctcctggttttctgtgtttggatgatgaagatttggacccttccattcataatccctttctaagtgaagggagaggctggcttggctgttccttgttattccgaaagccctggtttggggcccatgttcacactggctctcagtctagtcaggtgcaatgttcttgagaggtggggacctaattattaccagagtagcagcaagagaggaaacgttgtgaattaagtattcaattaaaaggaaacatgatttctacctga

SEQ ID NO: 2954 - protein, 142 aa, Homo sapiens
MSYCRQEGKDRIIFVTKEDHETPSSAELVADDPNDPYEEHGLILPNGNINWNCPCLGGMASGPCGEQFKSAFSCFHYSTEEIKGSDCVDQFRAMQECMQKYPDLYPQEDEDEEEEREKKPAEQAEETAPIEATATKEEEGSS

SEQ ID NO: 2955 - DNA, 520 bp, Homo sapiens
tgaaaaaaatgggggttgtatgtatgtgtgtcctacccaaacctgtggccgccacttttgaattctcagattgccctgaattttgccacttttaaataatgtgaacaaaaacatctcttaaaaatgctgggatggggccatatctactagcagaggccagatggtcagatatgatttctgcaaacccatcttgaccttgagtatgtgaaggggtactgtactttattcctgatacattttggtttccatgtaggtgttgagctcctggttttctgtgtttggatgatgaagatttggacccttccattcataatccctttctaagtgaagggagaggctggcttggctgttccttgttattccgaaagccctggtttggggcccatgttcacactggctctcagtctagtcaggtgcaatgttcttgagaggtggggacctaattattaccagagtagcagcaagagaggaaacgttgtgaattaagtattcaattaaaaggaaacatgatttctacctg

SEQ ID NO: 2956 - protein, 33 aa, Homo sapiens
MFTLALSLVRCNVLERWGPNYYQSSSKRGNVVN

SEQ ID NO: 2957 - DNA, 469 bp, Homo sapiens
tgcaaggtctcagggacgggctgcagccatgtcctattgccggcaggaagggaaggatcgaatcatatttgtaaccaaagaagatcatgaaactccaagcagtgcagaattggtggctgatgaccccaacgatccatacgaggagcatggattgatactgccaaatggaaacattaactggaactgcccatgccttgggggaatggccagcggtccctgtggagaacagtttaagtcagccttttcctccttccattcataatccctttctaagtgaagggagaggctggcttggctgttccttgttattccgaaagccctggtttggggcccatgttcacactggctctcagtctagtcaggtgcaatgttcttgagaggtggggacctaattattaccagagtagcagcaagagaggaaacgttgtgaattaagtattcaattaaaaggaaacatgatttctacctg

SEQ ID NO: 2958 - protein, 77 aa, Homo sapiens
MSYCRQEGKDRIIFVTKEDHETPSSAELVADDPNDPYEEHGLILPNGNINWNCPCLGGMASGPCGEQFKSAFSSFHS

SEQ ID NO: 2959 - DNA, 779 bp, Homo sapiens
ggaatggccagcggtccctgtggagaacagtttaagtcagccttttcctgcttccactatagcacggaggagatcaaggggtcagactgtgtagaccagttccgggccatgcaggaatgcatgcagaaatacccagacctctatccccaagaggatgaggatgaggaagaggaaagagagaagaagccagcagaacaagcagaagaaacagctcccattgaggccactgcaaccaaagaagaggagggatcaagttaatgaaggccacaaggcactgggcaccagtccttttggagtggaccttttgcaaaaggccttgtcatcaccttccaagaaagtttccttctgttgtcctgtgcattataatatacaaaataacttattttgatgatcagaggtcttgaggtcttgacatcttgacatatacactgaaaaaaatgggggttgtatgtatgtgtgtcctacccaaacctgtggccgccacttttgaattctcagattgccctgaattttgccacttttaaataatgtgctgaataagctcagcaactaaaaaccattacccaagaacgtttcttgtgagtgagctgatttattctgattcattatattccttgttattccgaaagccctggtttggggcccatgttcacactggctctcagtctagtcaggtgcaatgttcttgagaggtggggacctaattattaccagagtagcagcaagagaggaaacgttgtgaattaagtattcaattaaaaggaaacatgatttctacc

SEQ ID NO: 2960 - protein, 84 aa, Homo sapiens [sequence omitted]

SEQ ID NO: 2961 - DNA, 2846 bp, Homo sapiens
aaagctttgcagtgcgcaggcgcatcaatgaggtactgcaatgtcccggaccgtatagtttccaggacgtctcgccgcgcgcatgcgcagaaacactgggcacagggggaggtaactgcagtaagtcccgcttggccctggagtccacgcggattttcgaagctggggctggcaagaggccgctggacaccacgctccagtcgtcagcccacttcctagctgaacagcgcgaggcggcggcagcgagccgggtcccaccatggccgcgaattattccagtaccagtacccggagagaacatgtcaaagttaaaaccagctcccagccaggcttcctggaacggctgagcgagacctcgggtgggatgtttgtggggctcatggccttcctgctctccttctacctaattttcaccaatgagggccgcgcattgaagacggcaacctcattggctgaggggctctcgcttgtggtgtctcccgacagcatccacagtgtggctccggagaatgaaggaaggctggtgcacatcattggcgccttacggacatccaagcttttgtctgatccaaactatggggtccatcttccggctgtgaaactgcggaggcacgtggagatgtaccaatgggtagaaactgaggagtccagggagtacaccgaggatgggcaggtgaagaaggagacgaggtattcctacaacactgaatggaggtcagaaatcatcaacagcaaaaacttcgaccgagagattggccacaaaaaccccagtgccatggcagtggagtcattcatggcaacagccccctttgtccaaattggcaggtttttcctctcgtcaggcctcatcgacaaagtcgacaacttcaagtccctgagcctatccaagctggaggaccctcatgtggacatcattcgccgtggagactttttctaccacagcgaaaatcccaagtatccagaggtgggagacttgcgtgtctccttttcctatgctggactgagcggcgatgaccctgacctgggcccagctcacgtggtcactgtgattgcccggcagcggggtgaccagctagtcccattctccaccaagtctggggataccttactgctcctgcaccacggggacttctcagcagaggaggtgtttcatagagaactaaggagcaactccatgaagacctggggcctgcgggcagctggctggatggccatgttcatgggcctcaaccttatgacacggatcctctacaccttggtggactggtttcctgttttccgagacctggtcaacattggcctgaaagcctttgccttctgtgtggccacctcgctgaccctgctgaccgtggcggctggctggctcttctaccgacccctgtgggccctcctcattgccggcctggcccttgtgcccatccttgttgctcggacacgggtgccagccaaaaagttggagtgaaaagaccctggcacccgcccgacacctgcgtgagccctaggatccaggtcctctctcacctctgacccagctccatgccagagcaggagccccggtcaattttggactctgcactccctctcctcttcaggggccagacttggcagcatgtgcaccaggttggtgttcaccagctcatgtcttccccacatctcttcttgccagtaagcagctttggtgggcagcagcagctcatgaatggcaagctgacagcttctcctgctgtttccttcctctcttggactgagtgggtacggccagccactcagcccattggcagctgacaacgcagacacgctctacggaggcctgctgataaagggctcagccttgccgtgtgctgcttctcatcactgcacacaagtgccatgctttgccaccaccaccaagcacatctgtgatcctgaagggcggccgttagtcattactgctgagtcctgggtcaccagcagacacactgggcatggacccctcaaagcaggcacacccaaaacacaagtctgtggctagaacctgatgtggtgtttaaaagagaagaaacactgaagatgtcctgaggagaaaagctggacatatactgggcttcacacttatcttatggcttggcagaatctttgtagtgtgtgggatctctgaaggccctatttaagtttttcttcgttactttgctgcttcatgtgtactttcctaccccaagaggaagttttctgaaataagatttaaaaacaaaacaaaaaaaacacttaatatttcagactgttacaggaaacaccctttagtctgtcagttgaattcagagcactgaaaggtgttaaattggggtatgtggtttgattgataaaaagttacctctcagtattttgtgtcactgagaagctttacaatggatgcttttgaaacaagtatcagcaaaaggatttgttttcactctgggaggagagggtggagaaagcacttgctttcatcctctggcatcggaaactcccctatgcacttgaagatggtttaaaagattaaagaaacgattaagagaaaaggttggaagctttatactaaatgggctccttcatggtgacgccccgtcaaccacaatcaagaactgaggcctgaggctggttgtacaatgcccacgcctgcctggctgctttcacctgggagtgctttcgatgtgggcacctgggcttcctagggctgcttctgagtggttctttcacgtgttgtgtccatagctttagtcttcctaaataagatccacccacacctaagtcacagaatttctaagttccccaactactctcacacccttttaaagataaagtatgttgtaaccaggatgtcttaaatg

SEQ ID NO: 2962 - protein, 400 aa, Homo sapiens; identical to SEQ ID NO: 323

SEQ ID NO: 2963 - DNA, 2243 bp, Homo sapiens
aaagctttgcagtgcgcaggcgcatcaatgaggtactgcaatgtcccggaccgtatagtttccaggacgtctcgccgcgcgcatgcgcagaaacactgggcacagggggaggtaactgcagtaagtcccgcttggccctggagtccacgcggattttcgaagctggggctggcaagaggccgctggacaccacgctccagtcgtcagcccacttcctagctgaacagcgcgaggcggcggcagcgagccgggtcccaccatggccgcgaattattccagtaccagtacccggagagaacatgtcaaagttaaaaccagctcccagccaggcttcctggaacggctgagcgagacctcgggtgggatgtttgtggggctcatggccttcctgctctccttctacctaattttcaccaatgagggccgcgcattgaagacggcaacctcattggctgaggggctctcgcttgtggtgtctcccgacagcatccacagtgtggctccggagaatgaaggaaggctggtgcacatcattggcgccttacggacatccaagcttttgtctgatccaaactatggggtccatcttccggctgtgaaactgcggaggcacgtggagatgtaccaatgggtagaaactgaggagtccagggagtacaccgaggatgggcaggtgaagaaggagacgaggtattcctacaacactgaatggaggtcagaaatcatcaacagcaaaaacttcgaccgagagattggccacaaaaaccccagtgccatggcagtggagtcattcatggcaacagccccctttgtccaaattggcaggtttttcctctcgtcaggcctcatcgacaaagtcgacaacttcaagtccctgagcctatccaagctggaggaccctcatgtggacatcattcgccgtggagactttttctaccacagcgaaaatcccaagtatccagaggtgggagacttgcgtgtctccttttcctatgctggactgagcggcgatgaccctgacctgggcccagctcacgtggtcactgtgattgcccggcagcggggtgaccagctagtcccattctccaccaagtctggggataccttactgctcctgcaccacggggacttctcagcagaggaggtgtttcatagagaactaaggagcaactccatgaagacctggggcctgcgggcagctggctggatggccatgttcatgggcctcaaccttatgacacggatcctctacaccttggtggactggtttcctgttttccgagacctggtcaacattggcctgaaagcctttgccttctgtgtggccacctcgctgaccctgctgaccgtggcggctggctggctcttctaccgacccctgtgggccctcctcattgccggcctggcccttgtgcccatccttgttgctcggacacgggtgccagccaaaaagttggagtgaaaagaccctggcacccgcccgacacctgcgtgagcctgaggctggttgtacaatgcccacgcctgcctggctgctttcacctgggagtgctttcgatgtgggcacctgggcttcctagggctgcttctgagtggttctttcacgtgttgtgtccatagctttagtcttcctaaataagatccacccacacctaagtcacagaatttctaagttccccaactactctcacacccttttaaagataaagtatgttgtaaccaggatgtcttaaatgattctttgtgtaccttttctgtcatattcagaaaccgttttgtgcctgctgggagtaattcctttagcaattaagtatttggtagctgaataaggggtcagaacttctgaaaccagagatctgtaatcatctctattggcctggggtgcctgtgctataaatgagtttcttcacatgaaaaacacagccagcccaagatgacttatctgggtttaggattcaatagtattcactaactgcttattacatgagcaatttcatcaaatctccaaactcttaaaggatgctttcggaaaacacgctgtatacctagatgatgactaaatgcaaaatccttgggctttggtttttttctagtaaggattttaaataactgccgacttcaaaagtgttcttaaaacgaaagataatgttaagaaaaatttgaaagctttggaaaaccaaatttgtaatatcattgtattttttattaaaagttttgtaataaatttctaaattatcttctgg

SEQ ID NO: 2964 - protein, 400 aa, Homo sapiens; identical to SEQ ID NO: 323

SEQ ID NO: 2965 - DNA, 3353 bp, Homo sapiens
aaagctttgcagtgcgcaggcgcatcaatgaggtactgcaatgtcccggaccgtatagtttccaggacgtctcgccgcgcgcatgcgcagaaacactgggcacagggggaggtaactgcagtaagtcccgcttggccctggagtccacgcggattttcgaagctggggctggcaagaggccgctggacaccacgctccagtcgtcagcccacttcctagctgaacagcgcgaggcggcggcagcgagccgggtcccaccatggccgcgaattattccagtaccagtacccggagagaacatgtcaaagttaaaaccagctcccagccaggcttcctggaacggctgagcgagacctcgggtgggatgtttgtggggctcatggccttcctgctctccttctacctaattttcaccaatgagggccgcgcattgaagacggcaacctcattggctgaggggctctcgcttgtggtgtctcccgacagcatccacagtgtggctccggagaatgaaggaaggctggtgcacatcattggcgccttacggacatccaagcttttgtctgatccaaactatggggtccatcttccggctgtgaaactgcggaggcacgtggagatgtaccaatgggtagaaactgaggagtccagggagtacaccgaggatgggcaggtgaagaaggagacgaggtattcctacaacactgaatggaggtcagaaatcatcaacagcaaaaacttcgaccgagagattggccacaaaaaccccagtgccatggcagtggagtcattcatggcaacagccccctttgtccaaattggcaggtttttcctctcgtcaggcctcatcgacaaagtcgacaacttcaagtccctgagcctatccaagctggaggaccctcatgtggacatcattcgccgtggagactttttctaccacagcgaaaatcccaagtatccagaggtgggagacttgcgtgtctccttttcctatgctggactgagcggcgatgaccctgacctgggcccagctcacgtggtcactgtgattgcccggcagcggggtgaccagctagtcccattctccaccaagtctggggataccttactgctcctgcaccacggggacttctcagcagaggaggtgtttcatagagaactaaggagcaactccatgaagacctggggcctgcgggcagctggctggatggccatgttcatgggcctcaaccttatgacacggatcctctacaccttggtggactggtttcctgttttccgagacctggtcaacattggcctgaaagcctttgccttctgtgtggccacctcgctgaccctgctgaccgtggcggctggctggctcttctaccgacccctgtgggccctcctcattgccggcctggcccttgtgcccatccttgttgctcggacacgggtgccagccaaaaagttggagtgaaaagaccctggcacccgcccgacacctgcgtgagccctaggatccaggtcctctctcacctctgacccagctccatgccagagcaggagccccggtcaattttggactctgcactccctctcctcttcaggggccagacttggcagcatgtgcaccaggttggtgttcaccagctcatgtcttccccacatctcttcttgccagtaagcagctttggtgggcagcagcagctcatgaatggcaagctgacagcttctcctgctgtttccttcctctcttggactgagtgggtacggccagccactcagcccattggcagctgacaacgcagacacgctctacggaggcctgctgataaagggctcagccttgccgtgtgctgcttctcatcactgcacacaagtgccatgctttgccaccaccaccaagcacatctgtgatcctgaagggcggccgttagtcattactgctgagtcctgggtcaccagcagacacactgggcatggacccctcaaagcaggcacacccaaaacacaagtctgtggctagaacctgatgtggtgtttaaaagagaagaaacactgaagatgtcctgaggagaaaagctggacatatactgggcttcacacttatcttatggcttggcagaatctttgtagtgtgtgggatctctgaaggccctatttaagtttttcttcgttactttgctgcttcatgtgtactttcctaccccaagaggaagttttctgaaataagatttaaaaacaaaacaaaaaaaacacttaatatttcagactgttacaggaaacaccctttagtctgtcagttgaattcagagcactgaaaggtgttaaattggggtatgtggtttgattgataaaaagttacctctcagtattttgtgtcactgagaagctttacaatggatgcttttgaaacaagtatcagcaaaaggatttgttttcactctgggaggagagggtggagaaagcacttgctttcatcctctggcatcggaaactcccctatgcacttgaagatggtttaaaagattaaagaaacgattaagagaaaaggttggaagctttatactaaatgggctccttcatggtgacgccccgtcaaccacaatcaagaactgaggcctgaggctggttgtacaatgcccacgcctgcctggctgctttcacctgggagtgctttcgatgtgggcacctgggcttcctagggctgcttctgagtggttctttcacgtgttgtgtccatagctttagtcttcctaaataagatccacccacacctaagtcacagaatttctaagttccccaactactctcacacccttttaaagataaagtatgttgtaaccaggatgtcttaaatgattctttgtgtaccttttctgtcatattcagaaaccgttttgtgcctgctgggagtaattcctttagcaattaagtatttggtagctgaataaggggtcagaacttctgaaaccagagatctgtaatcatctctattggcctggggtgcctgtgctataaatgagtttcttcacatgaaaaacacagccagcccaagatgacttatctgggtttaggattcaatagtattcactaactgcttattacatgagcaatttcatcaaatctccaaactcttaaaggatgctttcggaaaacacgctgtatacctagatgatgactaaatgcaaaatccttgggctttggtttttttctagtaaggattttaaataactgccgacttcaaaagtgttcttaaaacgaaagataatgttaagaaaaatttgaaagctttggaaaaccaaatttgtaatatcattgtattttttattaaaagttttgtaataaatttctaaattatcttctgg

SEQ ID NO: 2966 - protein, 400 aa, Homo sapiens; identical to SEQ ID NO: 323

SEQ ID NO: 2967 - DNA, 2163 bp, Homo sapiens
aaagctttgcagtgcgcaggcgcatcaatgaggtactgcaatgtcccggaccgtatagtttccaggacgtctcgccgcgcgcatgcgcagaaacactgggcacagggggaggtaactgcagtaagtcccgcttggccctggagtccacgcggattttcgaagctggggctggcaagaggccgctggacaccacgctccagtcgtcagcccacttcctagctgaacagcgcgaggcggcggcagcgagccgggtcccaccatggccgcgaattattccagtaccagtacccggagagaacatgtcaaagttaaaaccagctcccagccaggcttcctggaacggctgagcgagacctcgggtgggatgtttgtggggctcatggccttcctgctctccttctacctaattttcaccaatgagggccgcgcattgaagacggcaacctcattggctgaggggctctcgcttgtggtgtctcccgacagcatccacagtgtggctccggagaatgaaggaaggctggtgcacatcattggcgccttacggacatccaagcttttgtctgatccaaactatggggtccatcttccggctgtgaaactgcggaggcacgtggagatgtaccaatgggtagaaactgaggagtccagggagtacaccgaggatgggcaggtgaagaaggagacgaggtattcctacaacactgaatggaggtcagaaatcatcaacagcaaaaacttcgaccgagagattggccacaaaaaccccagtgccatggcagtggagtcattcatggcaacagccccctttgtccaaattggcaggtttttcctctcgtcaggcctcatcgacaaagtcgacaacttcaagtccctgagcctatccaagctggaggaccctcatgtggacatcattcgccgtggagactttttctaccacagcgaaaatcccaagtatccagaggtgggagacttgcgtgtctccttttcctatgctggactgagcggcgatgaccctgacctgggcccagctcacgtggtcactgtgattgcccggcagcggggtgaccagctagtcccattctccaccaagtctggggataccttactgctcctgcaccacggggacttctcagcagaggaggtgtttcatagagaactaaggagcaactccatgaagacctggggcctgcgggcagctggctggatggccatgttcatgggcctcaaccttatgacacggatcctctacaccttggtggactggtttcctgttttccgagacctggtcaacattggcctgaaagcctttgccttctgtgtggccacctcgctgaccctgctgaccgtggcggctggctggctcttctaccgacccctgtgggccctcctcattgccggcctggcccttgtgcccatccttgttgctcggacacgggtgccagccaaaaagttggagtgaaaagaccctggcacccgcccgacacctgggcttcctagggctgcttctgagtggttctttcacgtgttgtgtccatagctttagtcttcctaaataagatccacccacacctaagtcacagaatttctaagttccccaactactctcacacccttttaaagataaagtatgttgtaaccaggatgtcttaaatgattctttgtgtaccttttctgtcatattcagaaaccgttttgtgcctgctgggagtaattcctttagcaattaagtatttggtagctgaataaggggtcagaacttctgaaaccagagatctgtaatcatctctattggcctggggtgcctgtgctataaatgagtttcttcacatgaaaaacacagccagcccaagatgacttatctgggtttaggattcaatagtattcactaactgcttattacatgagcaatttcatcaaatctccaaactcttaaaggatgctttcggaaaacacgctgtatacctagatgatgactaaatgcaaaatccttgggctttggtttttttctagtaaggattttaaataactgccgacttcaaaagtgttcttaaaacgaaagataatgttaagaaaaatttgaaagctttggaaaaccaaatttgtaatatcattgtattttttattaaaagttttgtaataaatttctaaattatcttctgg

SEQ ID NO: 2968 - protein, 400 aa, Homo sapiens; identical to SEQ ID NO: 323

SEQ ID NO: 2969 - DNA, 482 bp, Homo sapiens
atgcgcagaaacactgggcacagggggaggtaactgcagtaagtcccgcttggccctggagtccacgcggattttcgaagctggggctggcaagaggccgctggacaccacgctccagtcgtcagcccacttcctagctgaacagcgcgaggcggcggcagcgagccgggtcccaccatggccgcgaatccaaaacctggaagctgtcaagatacccatccactgacgaatgattcagcacactgtggtatagtcataaatggaatactactcagccatgaaaaggaacaaattcctgataaacaccacaacatgaatgaattgcaaaagcagtgctctgagtccaagaagctgggcagaaaggagttggtgccctgattccatttttctcaagttgtagaagaaacaaactaatctacgtattccagtaccagtacccggagagaacatgtcaaagttaaaaccagctcccagccaggctt

SEQ ID NO: 2970 - protein, 66 aa, Homo sapiens
MAANPKPGSCQDTHPLTNDSAHCGIVINGILLSHEKEQIPDKHHNMNELQKQCSESKKLGRKELVP

SEQ ID NO: 2971 - DNA, 699 bp, Homo sapiens
atgcgcagaaacactgggcacagggggaggtaactgcagtaagtcccgcttggccctggagtccacgcggattttcgaagctggggctggcaagaggccgctggacaccacgctccagtcgtcagcccacttcctagctgaacagcgcgaggcggcggcagcgagccgggtcccaccatggccgcgaattattccagtaccagtacccggagagaacatgtcaaagttaaaaccagctcccagccaggcttcctggaacggctgagcgagacctcgggtgggatgtttgtggggctcatggccttcctgctctccttctacctaattttcaccaatgaggtaaaatgtctggggtcttcctgtgcagagtgagagtccccaccatgtcagagagcaaaggcgatgaacccggaggctggatttggtaatcaagggcctagattttaaaaagagaaaggaggatactgagttaatcacagttctttccattgtgatccatcccacagctgatgtgagcaggaaggggagtagatcagttcacacacctgaatatccaggggttagcacctgcctcaggcgtagttggatccaggtgttcatgctgggtcaccaggaatctccatttcttcatcttttgcctgtttttctctattatggtgtttttcttgggcaggcacttcatctgtgatggcaaatgtg

SEQ ID NO: 2972 - protein, 64 aa, Homo sapiens
MAANYSSTSTRREHVKVKTSSQPGFLERLSETSGGMFVGLMAFLLSFYLIFTNEVKCLGSSCAE

SEQ ID NO: 2973 - DNA, 1861 bp, Homo sapiens
atgcgcagaaacactgggcacagggggaggtaactgcagtaagtcccgcttggccctggagtccacgcggattttcgaagctggggctggcaagaggccgctggacaccacgctccagtcgtcagcccacttcctagctgaacagcgcgaggcggcggcagcgagccgggtcccaccatggccgcgaattattccagtaccagtacccggagagaacatgtcaaagttaaaaccagctcccagccaggcttcctggaacggctgagcgagacctcgggtgggatgtttgtggggctcatggccttcctgctctccttctacctaattttcaccaatgagggccgcgcattgaagacggcaacctcattggctgaggggctcttctaccgacccctgtgggccctcctcattgccggcctggcccttgtgcccatccttgttgctcggacacgggtgccagccaaaaagttggagtgaaaagaccctggcacccgcccgacacctgcgtgagccctaggatccaggtcctctctcacctctgacccagctccatgccagagcaggagccccggtcaattttggactctgcactccctctcctcttcaggggccagacttggcagcatgtgcaccaggttggtgttcaccagctcatgtcttccccacatctcttcttgccagtaagcagctttggtgggcagcagcagctcatgaatggcaagctgacagcttctcctgctgtttccttcctctcttggactgagtgggtacggccagccactcagcccattggcagctgacaacgcagacacgctctacggaggcctgctgataaagggctcagccttgccgtgtgctgcttctcatcactgcacacaagtgccatgctttgccaccaccaccaagcacatctgtgatcctgaagggcggccgttagtcattactgctgagtcctgggtcaccagcagacacactgggcatggacccctcaaagcaggcacacccaaaacacaagtctgtggctagaacctgatgtggtgtttaaaagagaagaaacactgaagatgtcctgaggagaaaagctggacatatactgggcttcacacttatcttatggcttggcagaatctttgtagtgtgtgggatctctgaaggccctatttaagtttttcttcgttactttgctgcttcatgtgtactttcctaccccaagaggaagttttctgaaataagatttaaaaacaaaacaaaaaaaacacttaatatttcagactgttacaggaaacaccctttagtctgtcagttgaattcagagcactgaaaggtgttaaattggggtatgtggtttgattgataaaaagttacctctcagtattttgtgtcactgagaagctttacaatggatgcttttgaaacaagtatcagcaaaaggatttgttttcactctgggaggagagggtggagaaagcacttgctttcatcctctggcatcggaaactcccctatgcacttgaagatggtttaaaagattaaagaaacgattaagagaaaaggttggaagctttatactaaatgggctccttcatggtgacgccccgtcaaccacaatcaagaactgaggcctgaggctggttgtacaatgcccacgcctgcctggctgctttcacctgggagtgctttcgatgtgggcacctgggcttcctagggctgcttctgagtggttctttcacgtgttgtgtccatagctttagtcttcctaaataagatccacccacacctaagtcacagaatttctaagttccccaactactctcacacccttttaaagataaagtatgttgtaaccaggatgtcttaaatg

SEQ ID NO: 2974 - protein, 99 aa, Homo sapiens
MAANYSSTSTRREHVKVKTSSQPGFLERLSETSGGMFVGLMAFLLSFYLIFTNEGRALKTATSLAEGLFYRPLWALLIAGLALVPILVARTRVPAKKLE

SEQ ID NO: 2975 - DNA, 2368 bp, Homo sapiens
atgcgcagaaacactgggcacagggggaggtaactgcagtaagtcccgcttggccctggagtccacgcggattttcgaagctggggctggcaagaggccgctggacaccacgctccagtcgtcagcccacttcctagctgaacagcgcgaggcggcggcagcgagccgggtcccaccatggccgcgaattattccagtaccagtacccggagagaacatgtcaaagttaaaaccagctcccagccaggcttcctggaacggctgagcgagacctcgggtgggatgtttgtggggctcatggccttcctgctctccttctacctaattttcaccaatgagggccgcgcattgaagacggcaacctcattggctgaggggctcttctaccgacccctgtgggccctcctcattgccggcctggcccttgtgcccatccttgttgctcggacacgggtgccagccaaaaagttggagtgaaaagaccctggcacccgcccgacacctgcgtgagccctaggatccaggtcctctctcacctctgacccagctccatgccagagcaggagccccggtcaattttggactctgcactccctctcctcttcaggggccagacttggcagcatgtgcaccaggttggtgttcaccagctcatgtcttccccacatctcttcttgccagtaagcagctttggtgggcagcagcagctcatgaatggcaagctgacagcttctcctgctgtttccttcctctcttggactgagtgggtacggccagccactcagcccattggcagctgacaacgcagacacgctctacggaggcctgctgataaagggctcagccttgccgtgtgctgcttctcatcactgcacacaagtgccatgctttgccaccaccaccaagcacatctgtgatcctgaagggcggccgttagtcattactgctgagtcctgggtcaccagcagacacactgggcatggacccctcaaagcaggcacacccaaaacacaagtctgtggctagaacctgatgtggtgtttaaaagagaagaaacactgaagatgtcctgaggagaaaagctggacatatactgggcttcacacttatcttatggcttggcagaatctttgtagtgtgtgggatctctgaaggccctatttaagtttttcttcgttactttgctgcttcatgtgtactttcctaccccaagaggaagttttctgaaataagatttaaaaacaaaacaaaaaaaacacttaatatttcagactgttacaggaaacaccctttagtctgtcagttgaattcagagcactgaaaggtgttaaattggggtatgtggtttgattgataaaaagttacctctcagtattttgtgtcactgagaagctttacaatggatgcttttgaaacaagtatcagcaaaaggatttgttttcactctgggaggagagggtggagaaagcacttgctttcatcctctggcatcggaaactcccctatgcacttgaagatggtttaaaagattaaagaaacgattaagagaaaaggttggaagctttatactaaatgggctccttcatggtgacgccccgtcaaccacaatcaagaactgaggcctgaggctggttgtacaatgcccacgcctgcctggctgctttcacctgggagtgctttcgatgtgggcacctgggcttcctagggctgcttctgagtggttctttcacgtgttgtgtccatagctttagtcttcctaaataagatccacccacacctaagtcacagaatttctaagttccccaactactctcacacccttttaaagataaagtatgttgtaaccaggatgtcttaaatgattctttgtgtaccttttctgtcatattcagaaaccgttttgtgcctgctgggagtaattcctttagcaattaagtatttggtagctgaataaggggtcagaacttctgaaaccagagatctgtaatcatctctattggcctggggtgcctgtgctataaatgagtttcttcacatgaaaaacacagccagcccaagatgacttatctgggtttaggattcaatagtattcactaactgcttattacatgagcaatttcatcaaatctccaaactcttaaaggatgctttcggaaaacacgctgtatacctagatgatgactaaatgcaaaatccttgggctttggtttttttctagtaaggattttaaataactgccgacttcaaaagtgttcttaaaacgaaagataatgttaagaaaaatttgaaagctttggaaaaccaaatttgtaatatcattgtattttttattaaaagttttgtaataaatttctaaattatcttctgg

SEQ ID NO: 2976 - protein, 99 aa, Homo sapiens; identical to SEQ ID NO: 2974

SEQ ID NO: 2977 - DNA, 251 bp, Homo sapiens
cagtcgtcagcccacttcctagctgaacagcgcgaggcggcggcagcgagccgggtccctgtccaggcttcttttgtccgtgttccttggctcgcctcgtcctcggcgttcgtgcggaggcggactcggaggtgttgctcccgtactgggatctgcttgtacgcctctccgcggcccctccttgcattcccagttccctcctgtaccttggggccctgaaacttgcgcattatgagagctggacgcgacct

SEQ ID NO: 2978 - protein, 74 aa, Homo sapiens
TARGGGSEPGPCPGFFCPCSLARLVLGVRAEADSEVLLPYWDLLVRLSAAPPCIPSSLLYLGALKLAHYESWTR

SEQ ID NO: 2979 - DNA, 2718 bp, Homo sapiens
atgtaggaagctggccaggcatgactgcaggcaatcgttgtaggcagagcaaacccacgcgcagatacacaggcgagaggacacttgacctggactggggacagcagccagcagggtcagggcactggcagcagggtcggtgtccggggggtgtggcagggctctggcaggtgactgtgtggagaacacagagtgggtgatagaagcagggccagtgaggctcctgcgggcagacagtggtaagagactcgggaatatgtggcctggactggatggggtggtaggggaggagcgagccatgtctttcccatagatgtgagtgggtgggtgggtgtgccatgtgctgagatggagaaggcgccagtgtcagcactagacaggctgagatgtcaagtggaaatgtcaaggaggtggtggaggtggtgggagctgcagggctgtgaggcccgggagagggccagagctgcagctttaaattggagggtcacggcatgtggaggccaaggaagcagatgggatgtccggggagagagtatggactgaagcagctaaagaattgcagcatctaatggacaggaagaggggcagcgacagcgatggagcctgagaaggagggtgcagtgtccccaagccatgtggagaggttctgagattaaacagatcacacacatagcgcagagcatgctgcccagcagacatcctccaacctgctcaggggtggtgggcagggtcctgctcattccaggtgagaccgtgggctgagggctccaggtgctggcaggctctgagctgaggaaggcccgtacgttccacagagatctcatgccttgccctgtgctctgccagatgggcagaaggacttagccctataggaggcttgcccccactccgtctggcctgttcagaaatggccaacagctcccgagttggtacagccccctcaggacctgccctgccgactgggtacgccactggccctcagcatcctgacctgcccccaccttgtcctgcaggaggtgtttcatagagaactaaggagcaactccatgaagacctggggcctgcgggcagctggctggatggccatgttcatgggcctcaaccttatgacacggatcctctacaccttggtggactggtttcctgttttccgagacctggtcaacattggcctgaaagcctttgccttctgtgtggccacctcgctgaccctgctgaccgtggcggctggctggctcttctaccgacccctgtgggccctcctcattgccggcctggcccttgtgcccatccttgttgctcggacacgggtgccagccaaaaagttggagtgaaaagaccctggcacccgcccgacacctgcgtgagccctaggatccaggtcctctctcacctctgacccagctccatgccagagcaggagccccggtcaattttggactctgcactccctctcctcttcaggggccagacttggcagcatgtgcaccaggttggtgttcaccagctcatgtcttccccacatctcttcttgccagtaagcagctttggtgggcagcagcagctcatgaatggcaagctgacagcttctcctgctgtttccttcctctcttggactgagtgggtacggccagccactcagcccattggcagctgacaacgcagacacgctctacggaggcctgctgataaagggctcagccttgccgtgtgctgcttctcatcactgcacacaagtgccatgctttgccaccaccaccaagcacatctgtgatcctgaagggcggccgttagtcattactgctgagtcctgggtcaccagcagacacactgggcatggacccctcaaagcaggcacacccaaaacacaagtctgtggctagaacctgatgtggtgtttaaaagagaagaaacactgaagatgtcctgaggagaaaagctggacatatactgggcttcacacttatcttatggcttggcagaatctttgtagtgtgtgggatctctgaaggccctatttaagtttttcttcgttactttgctgcttcatgtgtactttcctaccccaagaggaagttttctgaaataagatttaaaaacaaaacaaaaaaaacacttaatatttcagactgttacaggaaacaccctttagtctgtcagttgaattcagagcactgaaaggtgttaaattggggtatgtggtttgattgataaaaagttacctctcagtattttgtgtcactgagaagctttacaatggatgcttttgaaacaagtatcagcaaaaggatttgttttcactctgggaggagagggtggagaaagcacttgctttcatcctctggcatcggaaactcccctatgcacttgaagatggtttaaaagattaaagaaacgattaagagaaaaggttggaagctttatactaaatgggctccttcatggtgacgccccgtcaaccacaatcaagaactgaggcctgaggctggttgtacaatgcccacgcctgcctggctgctttcacctgggagtgctttcgatgtgggcacctgggcttcctagggctgcttctgagtggttctttcacgtgttgtgtccatagctttagtcttcctaaataagatccacccacacctaagtcacagaatttctaagttccccaactactctcacacccttttaaagataaagtatgttgtaaccaggatgtcttaaatg

SEQ ID NO: 2980 - protein, 95 aa, Homo sapiens [sequence omitted]

SEQ ID NO: 2981 - DNA, 2718 bp, Homo sapiens; identical to SEQ ID NO: 2979

SEQ ID NO: 2982 - protein, 95 aa, Homo sapiens [sequence omitted]

SEQ ID NO: 2983 - DNA, 3225 bp, Homo sapiens
atgtaggaagctggccaggcatgactgcaggcaatcgttgtaggcagagcaaacccacgcgcagatacacaggcgagaggacacttgacctggactggggacagcagccagcagggtcagggcactggcagcagggtcggtgtccggggggtgtggcagggctctggcaggtgactgtgtggagaacacagagtgggtgatagaagcagggccagtgaggctcctgcgggcagacagtggtaagagactcgggaatatgtggcctggactggatggggtggtaggggaggagcgagccatgtctttcccatagatgtgagtgggtgggtgggtgtgccatgtgctgagatggagaaggcgccagtgtcagcactagacaggctgagatgtcaagtggaaatgtcaaggaggtggtggaggtggtgggagctgcagggctgtgaggcccgggagagggccagagctgcagctttaaattggagggtcacggcatgtggaggccaaggaagcagatgggatgtccggggagagagtatggactgaagcagctaaagaattgcagcatctaatggacaggaagaggggcagcgacagcgatggagcctgagaaggagggtgcagtgtccccaagccatgtggagaggttctgagattaaacagatcacacacatagcgcagagcatgctgcccagcagacatcctccaacctgctcaggggtggtgggcagggtcctgctcattccaggtgagaccgtgggctgagggctccaggtgctggcaggctctgagctgaggaaggcccgtacgttccacagagatctcatgccttgccctgtgctctgccagatgggcagaaggacttagccctataggaggcttgcccccactccgtctggcctgttcagaaatggccaacagctcccgagttggtacagccccctcaggacctgccctgccgactgggtacgccactggccctcagcatcctgacctgcccccaccttgtcctgcaggaggtgtttcatagagaactaaggagcaactccatgaagacctggggcctgcgggcagctggctggatggccatgttcatgggcctcaaccttatgacacggatcctctacaccttggtggactggtttcctgttttccgagacctggtcaacattggcctgaaagcctttgccttctgtgtggccacctcgctgaccctgctgaccgtggcggctggctggctcttctaccgacccctgtgggccctcctcattgccggcctggcccttgtgcccatccttgttgctcggacacgggtgccagccaaaaagttggagtgaaaagaccctggcacccgcccgacacctgcgtgagccctaggatccaggtcctctctcacctctgacccagctccatgccagagcaggagccccggtcaattttggactctgcactccctctcctcttcaggggccagacttggcagcatgtgcaccaggttggtgttcaccagctcatgtcttccccacatctcttcttgccagtaagcagctttggtgggcagcagcagctcatgaatggcaagctgacagcttctcctgctgtttccttcctctcttggactgagtgggtacggccagccactcagcccattggcagctgacaacgcagacacgctctacggaggcctgctgataaagggctcagccttgccgtgtgctgcttctcatcactgcacacaagtgccatgctttgccaccaccaccaagcacatctgtgatcctgaagggcggccgttagtcattactgctgagtcctgggtcaccagcagacacactgggcatggacccctcaaagcaggcacacccaaaacacaagtctgtggctagaacctgatgtggtgtttaaaagagaagaaacactgaagatgtcctgaggagaaaagctggacatatactgggcttcacacttatcttatggcttggcagaatctttgtagtgtgtgggatctctgaaggccctatttaagtttttcttcgttactttgctgcttcatgtgtactttcctaccccaagaggaagttttctgaaataagatttaaaaacaaaacaaaaaaaacacttaatatttcagactgttacaggaaacaccctttagtctgtcagttgaattcagagcactgaaaggtgttaaattggggtatgtggtttgattgataaaaagttacctctcagtattttgtgtcactgagaagctttacaatggatgcttttgaaacaagtatcagcaaaaggatttgttttcactctgggaggagagggtggagaaagcacttgctttcatcctctggcatcggaaactcccctatgcacttgaagatggtttaaaagattaaagaaacgattaagagaaaaggttggaagctttatactaaatgggctccttcatggtgacgccccgtcaaccacaatcaagaactgaggcctgaggctggttgtacaatgcccacgcctgcctggctgctttcacctgggagtgctttcgatgtgggcacctgggcttcctagggctgcttctgagtggttctttcacgtgttgtgtccatagctttagtcttcctaaataagatccacccacacctaagtcacagaatttctaagttccccaactactctcacacccttttaaagataaagtatgttgtaaccaggatgtcttaaatgattctttgtgtaccttttctgtcatattcagaaaccgttttgtgcctgctgggagtaattcctttagcaattaagtatttggtagctgaataaggggtcagaacttctgaaaccagagatctgtaatcatctctattggcctggggtgcctgtgctataaatgagtttcttcacatgaaaaacacagccagcccaagatgacttatctgggtttaggattcaatagtattcactaactgcttattacatgagcaatttcatcaaatctccaaactcttaaaggatgctttcggaaaacacgctgtatacctagatgatgactaaatgcaaaatccttgggctttggtttttttctagtaaggattttaaataactgccgacttcaaaagtgttcttaaaacgaaagataatgttaagaaaaatttgaaagctttggaaaaccaaatttgtaatatcattgtattttttattaaaagttttgtaataaatttctaaattatcttctgg

SEQ ID NO: 2984 - protein, 95 aa, Homo sapiens [sequence omitted]

SEQ ID NO: 2985 - DNA, 1466 bp, Homo sapiens
gtggactggtttcctgttttccgagacctggtcaacattggcctgaaagcctttgccttctgtgtggccacctcgctgaccctgctgaccgtggcggctggctggctcttctaccgacccctgtgggccctcctcattgccggcctggcccttgtgcccatccttgttgctcggacacgggtgccagccaaaaagttggagtgaaaagaccctggcacccgcccgacacctgcgtgagccctaggatccaggtcctctctcacctctgacccagctccatgccagagcaggagccccggtcaattttggactctgcactccctctcctcttcaggggccagacttggcagcatgtgcaccaggttggtgttcaccagctcatgtcttccccacatctcttcttgccagtaagcagctttggtgggcagcagcagctcatgaatggcaagctgacagcttctcctgctgtttccttcctctcttggactgagtgggtacggccagccactcagcccattggcagctgacaacgcagacacgctctacggaggcctgctgataaagggctcagccttgccgtgtgctgcttctcatcactgcacacaagtgccatgctttgccaccaccaccaagcacatctgtgatcctgaagggcggccgttagtcattactgctgagtcctgggtcaccagcagacacactgggcatggacccctcaaagcaggcacacccaaaacacaagtctgtggctagaacctgatgtggtgtttaaaagagaagaaacactgaagatgtcctgaggagaaaagctggacatatactgggcttcacacttatcttatggcttggcagaatctttgtagtgtgtgggatctctgaaggccctatttaagtttttcttcgttactttgctgcttcatgtgtactttcctaccccaagaggaagttttctgaaataagatttaaaaacaaaacaaaaaaaacacttaatatttcagactgttacaggaaacaccctttagtctgtcagttgaattcagagcactgaaaggtgttaaattggggtatgtggtttgattgataaaaagttacctctcagtattttgtgtcactgagaagctttacaatggatgcttttgaaacaagtatcagcaaaaggttggaagctttatactaaatgggctccttcatggtgacgccccgtcaaccacaatcaagaactgaggcctgaggctggttgtacaatgcccacgcctgcctggctgctttcacctgggagtgctttcgatgtgggcacctgggcttcctagggctgcttctgagtggttctttcacgtgttgtgtccatagctttagtcttcctaaataagatccacccacacctaagtcacagaatttctaagttccccaactactctcacacccttttaaagataaagtatgttgtaaccaggatgtcttaaatg

SEQ ID NO: 2986 - protein, 82 aa, Homo sapiens [sequence omitted]

SEQ ID NO: 2987 - DNA, 1415 bp, Homo sapiens
agcctttgccttctgtgtggccacctcgctgaccctgctgaccgtggcggctggctggctcttctaccgacccctgtgggccctcctcattgccggcctggcccttgtgcccatccttgttgctcggacacgggtgccagccaaaaagttggagtgaaaagaccctggcacccgcccgacacctgcgtgagccctaggatccaggtcctctctcacctctgacccagctccatgccagagcaggagccccggtcaattttggactctgcactccctctcctcttcaggggccagacttggcagcatgtgcaccaggttggtgttcaccagctcatgtcttccccacatctcttcttgccagtaagcagctttggtgggcagcagcagctcatgaatggcaagctgacagcttctcctgctgtttccttcctctcttggactgagtgggtacggccagccactcagcccattggcagctgacaacgcagacacgctctacggaggcctgctgataaagggctcagccttgccgtgtgctgcttctcatcactgcacacccaaaacacaagtctgtggctagaacctgatgtggtgtttaaaagagaagaaacactgaagatgtcctgaggagaaaagctggacatatactgggcttcacacttatcttatggcttggcagaatctttgtagtgtgtgggatctctgaaggccctatttaagtttttcttcgttactttgctgcttcatgtgtactttcctaccccaagaggaagttttctgaaataagatttaaaaacaaaacaaaaaaaacacttaatatttcagactgttacaggaaacaccctttagtctgtcagttgaattcagagcactgaaaggtgttaaattggggtatgtggtttgattgataaaaagttacctctcagtattttgtgtcactgagaagctttacaatggatgcttttgaaacaagtatcagcaaaaggatttgttttcactctgggaggagagggtggagaaagcacttgctttcatcctctggcatcggaaactcccctatgcacttgaagatggtttaaaagattaaagaaacgattaagagaaaaggttggaagctttatactaaatgggctccttcatggtgacgccccgtcaaccacaatcaagaactgaggcctgaggctggttgtacaatgcccacgcctgcctggctgctttcacctgggagtgctttcgatgtgggcacctgggcttcctagggctgcttctgagtggttctttcacgtgttgtgtccatagctttagtcttcctaaataagatccacccacacctaagtcacagaatttctaagttccccaactactctcacacccttttaaagataaagtatgttgtaaccaggatgtcttaaatg

SEQ ID NO: 2988 - protein, 82 aa, Homo sapiens [sequence omitted]

SEQ ID NO: 2989 - DNA, 1922 bp, Homo sapiens
agcctttgccttctgtgtggccacctcgctgaccctgctgaccgtggcggctggctggctcttctaccgacccctgtgggccctcctcattgccggcctggcccttgtgcccatccttgttgctcggacacgggtgccagccaaaaagttggagtgaaaagaccctggcacccgcccgacacctgcgtgagccctaggatccaggtcctctctcacctctgacccagctccatgccagagcaggagccccggtcaattttggactctgcactccctctcctcttcaggggccagacttggcagcatgtgcaccaggttggtgttcaccagctcatgtcttccccacatctcttcttgccagtaagcagctttggtgggcagcagcagctcatgaatggcaagctgacagcttctcctgctgtttccttcctctcttggactgagtgggtacggccagccactcagcccattggcagctgacaacgcagacacgctctacggaggcctgctgataaagggctcagccttgccgtgtgctgcttctcatcactgcacacccaaaacacaagtctgtggctagaacctgatgtggtgtttaaaagagaagaaacactgaagatgtcctgaggagaaaagctggacatatactgggcttcacacttatcttatggcttggcagaatctttgtagtgtgtgggatctctgaaggccctatttaagtttttcttcgttactttgctgcttcatgtgtactttcctaccccaagaggaagttttctgaaataagatttaaaaacaaaacaaaaaaaacacttaatatttcagactgttacaggaaacaccctttagtctgtcagttgaattcagagcactgaaaggtgttaaattggggtatgtggtttgattgataaaaagttacctctcagtattttgtgtcactgagaagctttacaatggatgcttttgaaacaagtatcagcaaaaggatttgttttcactctgggaggagagggtggagaaagcacttgctttcatcctctggcatcggaaactcccctatgcacttgaagatggtttaaaagattaaagaaacgattaagagaaaaggttggaagctttatactaaatgggctccttcatggtgacgccccgtcaaccacaatcaagaactgaggcctgaggctggttgtacaatgcccacgcctgcctggctgctttcacctgggagtgctttcgatgtgggcacctgggcttcctagggctgcttctgagtggttctttcacgtgttgtgtccatagctttagtcttcctaaataagatccacccacacctaagtcacagaatttctaagttccccaactactctcacacccttttaaagataaagtatgttgtaaccaggatgtcttaaatgattctttgtgtaccttttctgtcatattcagaaaccgttttgtgcctgctgggagtaattcctttagcaattaagtatttggtagctgaataaggggtcagaacttctgaaaccagagatctgtaatcatctctattggcctggggtgcctgtgctataaatgagtttcttcacatgaaaaacacagccagcccaagatgacttatctgggtttaggattcaatagtattcactaactgcttattacatgagcaatttcatcaaatctccaaactcttaaaggatgctttcggaaaacacgctgtatacctagatgatgactaaatgcaaaatccttgggctttggtttttttctagtaaggattttaaataactgccgacttcaaaagtgttcttaaaacgaaagataatgttaagaaaaatttgaaagctttggaaaaccaaatttgtaatatcattgtattttttattaaaagttttgtaataaatttctaaattatcttctgg

SEQ ID NO: 2990 - protein, 82 aa, Homo sapiens [sequence omitted]

SEQ ID NO: 2991 - DNA, 1023 bp, Homo sapiens
cctcattgccggcctggcccttgtgcccatccttgttgctcggacacgggtgccagccaaaaagttggagtgaaaagaccctggcacccgcccgacacctgcgtgagccctaggatccaggtcctctctcacctctgacccagctccatgccagagcaggagccccggtcaattttggactctgcactccctctcctcttcaggggccagacttggcagcatgtgcaccaggttggtgttcaccagctcatgtcttccccacatctcttcttgccagtaagcagctttggtgggcagcagcagctcatgaatggcaagctgacagcttctcctgctgtttccttcctctcttggactgagtgggtacggccagccactcagcccattggcagctgacaacgcagacacgctctacggaggcctgctgataaagggctcagccttgccgtgtgctgcttctcatcactgcacacaagtgccatgctttgccaccaccaccaagcacatctgtgatcctgaagggcggccgttagtcattactgctgagtcctgggtcaccagcagacacatgggagtaattcctttagcaattaagtatttggtagctgaataaggggtcagaacttctgaaaccagagatctgtaatcatctctattggcctggggtgcctgtgctataaatgagtttcttcacatgaaaaacacagccagcccaagatgacttatctgggtttaggattcaatagtattcactaactgcttattacatgagcaatttcatcaaatctccaaactcttaaaggatgctttcggaaaacacgctgtatacctagatgatgactaaatgcaaaatccttgggctttggtttttttctagtaaggattttaaataactgccgacttcaaaagtgttcttaaaacgaaagataatgttaagaaaaatttgaaagctttggaaaaccaaatttgtaatatcattgtattttttattaaaagttttgtaataaatttctaaattatctt

SEQ ID NO: 2992 - protein, 82 aa, Homo sapiens [sequence omitted]

SEQ ID NO: 2993 - DNA, 2354 bp, Homo sapiens
aatgaggtagcaaatgcaaggcacgaatcacaggcatccccagatgaggcagtgtgctcctagagggcagcttcctgcccagccatcatccttgtgttcccctgcactcagctcgtagcaggtgctccagtgtctgcttggatgcaccccaggctgggacggctcagtaagaagggtctgggctctctccctgccctgtcccatgcccttgtcctcccagagttacacagcttagggcaggctgggaacttgctgcctcttcatggggcttcctggtatctgattactaaccctcgcctgtgtcctcccaccactgccacctgtccagagtgaggcagcagctccccacacagatgcaggaggtggactctcttctgatgaagaggaggggaccagctctcaagcagaagcggccaggatactggctgcctcctggcctcaaaaccgagaagatgaagaaaagcagaagctgaagggtgggcccaagaagaccaaaagggaaaagaaagcagcagcttcccacctgttcccatttgagcagctgtgagctgagcgcccactagaggggcacccaccagttgctgctgccccactacaggccccacacctgccctgggcatgcccagcccctggtggtgggggcttctctgctgagaaggcaaactgaggcagcatgcacggaggcggggtcaggggagacgaggccaagctgaggaggtgctgcaggtcccgtctggctccagcccttgtcagattcacccagggtgaagccttcaaagctttttgctaccaaagcccactcaccctttgagctacagaacactttgctaggagatactcttctgcctcctagacctgttctttccatctttagaaacatcagtttttgtatggaagccaccgggagatttctggatggtggtgcatccgtgaatgcgctgatcgtttcttccagttagagtcttcatctgtccgacaagttcactcgcctcggttgcggacctaggaccatttctctgcaggccacttaccttcccctgaggctttgcctcagctggccctcacaaccaccgtgtgtggtggaaaggcattgttcgggaaacagtcccagctcctcaggactgcaggcacccacacaccactgccgtgcccagcttctttcagatttaagtcggtaataacacccaggtgacagagcaatgtattcatatgttgagacagcatgaaagagtccattttgttttcatggaggctggaaattcattacatatggaattcttctgtatttagtgaagagatgttaatctttgagaggagccattaaaaatcggagtcacttttatccaagggaaacaaacaaaacacttgagttatgactcatatgtggcaagaggctggctggaacctcttgttgagaaacagactggggttgctatggaaactggtctcacacttcctcaccagagctcggccctcctatagaggcaacttgttttctgttatttttttttttaaattattttttgagacagggagggttccactcttgcccaggctggggtgcagtggtgtgatcccagctagtggtgtgatcccagctgactgcagcctcaagcaatcctctcagcctcctgagtagctgggaccatgggtatgcaccaccacgcttgtctttctggggttttgagatgatggcattgccatgtctctgcagaaataacttcttcaggcatatgtcagctacaaggaggcattatttaaatgaaacagtaggttctgagaaacagaagagtaggtttgggaaagttctcactcacgtgcttgtaaaaaataaagcaaactgctagcatcagagtgggcagttagcagccgcctttcagaacaggaagcaaaatgaatgaaaaattaatgcctcatgtgtcaggcattctatgggctttgtctcatttggccctcacaacaactttgtgaggtggacaagtgttattcccattgtactgatgagggaacagactcaaatcgttgatttacccaacatcacagccagtatgtagcaatctttggctcagaactcaggtctcccgtgtcaactcaggatgcctctggcagtggagcacactgctgccccttccactttttctagcacattctgaagatgcatgaagcctgagtcattcactttaaatcaagccaaaacaaagtgggcttcagtgtggacttctgagtgctagatactgagttgcccttaaaaaaaaattaacttattttaagcactgaaagctcagatttccacaaaattcagttctcaataaatcctatggctgaattctttacagacattttggaaagaatgc

SEQ ID NO: 2994 - protein, 88 aa, Homo sapiens
MTHMWQEAGWNLLLRNRLGLLWKLVSHFLTRARPSYRGNLFSVIFFFKLFFETGRVPLLPRLGCSGVIPASGVIPADCSLKQSSQPPE

SEQ ID NO: 2995 - DNA, 3129 bp, Homo sapiens
atggatacatcgtctgcgaggaattcaaagacgtgctcctgactgcctgggaaaatgagcaggcagtcattgaaaggaaggagaaggaggtaagcgcatatgcaggactgagggacagcagaagcgggaagcaacactcagcgggtggcctcttccttccccaggccgcctccgtgtgctcccaggctcttcccagccctctctgacatcatggcaggcacccgagggagcgagcactgaatacagcaggctcctgcccaccccgcagactatcactgtccctgaggagcctgggtccgggctctggggtctactgcccctgctgcccacacctgcctctgtcttgaattgcctgtgtccaggttctggaagacctcacccactaaagattttggagtcagtaacgattaaaaagttatctgtttttgtggctttcaggtatagtatatcactttgtaaatcagatcaattttttggaagtgagacttggtgtgaaggagaggctatattctaaagtggtgtatatatctgtctttacattcacagtttccatcttaatatttttcctgaaaatgtcagtgcttaacacttttctcccacttcatttttgcctgcagaaaaaggagaagcgggctctagggaactggaagttgctggccaaaggtctgctcatcagggagaggctgaagcgtcgctacgggcccaagagtgaggcagcagctccccacacagatgcaggaggtggactctcttctgatgaagaggaggggaccagctctcaagcagaagcggccaggatactggctgcctcctggcctcaaaaccgagaagatgaagaaaagcagaagctgaagggtgggcccaagaagaccaaaagggaaaagaaagcagcagcttcccacctgttcccatttgagcagctgtgagctgagcgcccactagaggggcacccaccagttgctgctgccccactacaggccccacacctgccctgggcatgcccagcccctggtggtgggggcttctctgctgagaaggcaaactgaggcagcatgcacggaggcggggtcaggggagacgaggccaagctgaggaggtgctgcaggtcccgtctggctccagcccttgtcagattcacccagggtgaagccttcaaagctttttgctaccaaagcccactcaccctttgagctacagaacactttgctaggagatactcttctgcctcctagacctgttctttccatctttagaaacatcagtttttgtatggaagccaccgggagatttctggatggtggtgcatccgtgaatgcgctgatcgtttcttccagttagagtcttcatctgtccgacaagttcactcgcctcggttgcggacctaggaccatttctctgcaggccacttaccttcccctgagtcaggcttactaatgctgccctcactgcctctttgcagtaggggagagagcagagaagtacaggtcatctgctgggatctagttttccaagtaacattttgtggtgacagaagcctaaaaaaagctaaaatcaggaaagaaaaggaaaaatacgaattgaaaattaaggaaatgttagtaaaatagatgagtgttaaactagattgtattcattactagataaaatgtataaagctctctgtactaaggagaaatgacttttataacattttgagaaaataataaagcatttatctaaagatttggctctatattttctttcagatttttttttttttaaggggtcttactgtcttgcgcaggctggactcctgggcttgagtggtcttcctgagggctttgcctcagctggccctcacaaccaccgtgtgtggtggaaaggcattgttcgggaaacagtcccagctcctcaggactgcaggcacccacacaccactgccgtgcccagcttctttcagatttaagtcggtaataacacccaggtgacagagcaatgtattcatatgttgagacagcatgaaagagtccattttgttttcatggaggctggaaattcattacatatggaattcttctgtatttagtgaagagatgttaatctttgagaggagccattaaaaatcggagtcacttttatccaagggaaacaaacaaaacacttgagttatgactcatatgtggcaagaggctggctggaacctcttgttgagaaacagactggggttgctatggaaactggtctcacacttcctcaccagagctcggccctcctatagaggcaacttgttttctgttatttttttttttaaattattttttgagacagggagggttccactcttgcccaggctggggtgcagtggtgtgatcccagctagtggtgtgatcccagctgactgcagcctcaagcaatcctctcagcctcctgagtagctgggaccatgggtatgcaccaccacgcttgtctttctggggttttgagatgatggcattgccatgtctctgcagaaataacttcttcaggcatatgtcagctacaaggaggcattatttaaatgaaacagtaggttctgagaaacagaagagtaggtttgggaaagttctcactcacgtgcttgtaaaaaataaagcaaactgctagcatcagagtgggcagttagcagccgcctttcagaacaggaagcaaaatgaatgaaaaattaatgcctcatgtgtcaggcattctatgggctttgtctcatttggccctcacaacaactttgtgaggtggacaagtgttattcccattgtactgatgagggaacagactcaaatcgttgatttacccaacatcacagccagtatgtagcaatctttggctcagaactcaggtctcccgtgtcaactcaggatgcctctggcagtggagcacactgctgccccttccactttttctagcacattctgaagatgcatgaagcctgagtcattcactttaaatcaagccaaaacaaagtgggcttcagtgtggacttctgagtgctagatactgagttgcccttaaaaaaaaattaacttattttaagcactgaaagctcagatttccacaaaattcagttctcaataaatcctatggctgaattctttacagacattttggaaagaatgc

SEQ ID NO: 2996 - protein, 117 aa, Homo sapiens
MSVLNTFLPLHFCLQKKEKRALGNWKLLAKGLLIRERLKRRYGPKSEAAAPHTDAGGGLSSDEEEGTSSQAEAARILAASWPQNREDEEKQKLKGGPKKTKREKKAAASHLFPFEQL

SEQ ID NO: 2997 - DNA, 5133 bp, Homo sapiens
cgaaggggcgtggccaagcgcaccgcctcggggcggggccggcgttctagcgcatcgcggccgggtgcgtcactcgcgaagtggaatttgcccagacaagcaacatggctcggaaacgcgcggccggcggggagccgcggggacgcgaactgcgcagccagaaatccaaggccaagagcaaggcccggcgtgaggaggaggaggaggatgcctttgaagatgagaaacccccaaagaagagccttctctccaaagtttcacaaggaaagaggaaaagaggctgcagtcatcctgggggttcagcagatggtccagcaaaaaagaaagtggccaaggtgactgttaaatctgaaaacctcaaggttataaaggatgaagccctcagcgatggggatgacctcagggactttccaagtgacctcaagaaggcacaccatctgaagagaggggctaccatgaatgaagacagcaatgaagaagaggaagaaagtgaaaatgattgggaagaggttgaagaacttagtgagcctgtgctgggtgacgtgagagaaagtacagccttctctcgatctcttctgcctgtgaagccagtggagatagagattgaaacgccagagcaggcgaagacaagagaaagaagtgaaaagataaaactggagtttgagacatatcttcggagggcgatgaaacgtttcaataaaggggtccatgaggacacacacaaggttcaccttctctgcctgctagcaaatggcttctatcgaaataacatctgcagccagccagatctgcatgctattggcctgtccatcatcccagcccgctttaccagagtgctgcctcgagatgtggacacctactacctctcaaacctggtgaagtggttcattggaacatttacagttaatgcagaactttcagccagtgaacaagataacctgcagactacattggaaaggagatttgctatttactctgctcgagatgatgaggaattggtccatatattcttactgattctccgggctctgcagctcttgacccggctggtattgtctctacagccaattcctctgaagtcagcaacagcaaagggaaagaaaccttccaaggaaagattgactgcggatccaggaggctcctcagaaacttccagccaagttctagaaaaccacaccaaaccaaagaccagcaaaggaaccaaacaagaggaaacctttgctaagggcacctgcaggccaagtgccaaagggaagaggaacaagggaggcagaaagaaacggagcaagccctcctccagcgaggaagatgagggcccaggagacaagcaggagaaggcaacccagcgacgtccgcatggccgggagcggcgggtggcctccagggtgtcttataaagaggagagtgggagtgatgaggctggcagcggctctgattttgagctctcgcagtggagaagcctctgatccctctgatgaggattccgaacctggccctccaaagcagaggaaagcccccggatcctcagaggacaaaggctgggtccaagagtgcctccaggacccatcgtgggagccatcgtaaggacccaagcttgccagcggcatcctcaagctcttcaagcagtaaaagaggcaagaaaatgtgcagcgatggtgagaaggcagaaaaaagaagcatagctggtatagaccagtggctagaggtgttctgtgagcaggaggaaaagtgggtatgtgtagactgtgtgcacggtgtggtgggccagcctctgacctgttacaagtacgccaccaagcccatgacctatgtggtgggcattgacagtgacggctgggtccgagatgtcacacagaggtacgacccagtctggatgacagtgacccgcaagtgccgggttgatgctgagtggtgggccgagaccttgagaccataccagagcccatttatggacagggagaagaaagaagacttggagtttcaggctaaacacatggaccagcctttgcccactgccattggcttatataagaaccaccctctgtatgccctgaagcggcatctcctgaaatatgaggccatctatcccgagacagctcgccatccttgggtattgtcgtggagaagcggtctactccagggattgtgtgcacactctgcattccagggacacgtggctgaagaaagcaagagtggtgaggcttggagaagtaccctacaagatggtgaaaggcttttctaaccgtgctcggaaagcccgacttgctgagccccagctgcgggaagaaaatgacctgggcctgtttggctactggcagacagaggagtatcagcccccagtggccgtggacgggaaggtgccccggaacgagtttgggaatgtgtacctcttcctgcccagcatgatgcctattggctgtgtccagctgaacctgcccaatctacaccgcgtggcccgcaagctggacatcgactgtgtccaggccatcactggctttgatttccatggcggctactcccatcccgtgactgatggatacatcgtctgcgaggaattcaaagacgtgctcctgactgcctgggaaaatgagcaggcagtcattgaaaggaaggagaaggagaaaaaggagaagcgggctctagggaactggaagttgctggccaaaggtctgctcatcagggagaggctgaagcgtcgctacgggcccaagagtgaggcagcagctccccacacagatgcaggaggtggactctcttctgatgaagaggaggggaccagctctcaagcagaagcggccaggatactggctgcctcctggcctcaaaaccgagaagatgaagaaaagcagaagctgaagggtgggcccaagaagaccaaaagggaaaagaaagcagcagcttcccacctgttcccatttgagcagctgtgagctgagcgcccactagaggggcacccaccagttgctgctgccccactacaggccccacacctgccctgggcatgcccagcccctggtggtgggggcttctctgctgagaaggcaaactgaggcagcatgcacggaggcggggtcaggggagacgaggccaagctgaggaggtgctgcaggtcccgtctggctccagcccttgtcagattcacccagggtgaagccttcaaagctttttgctaccaaagcccactcaccctttgagctacagaacactttgctaggagatactcttctgcctcctagacctgttctttccatctttagaaacatcagtttttgtatggaagccaccgggagatttctggatggtggtgcatccgtgaatgcgctgatcgtttcttccagttagagtcttcatctgtccgacaagttcactcgcctcggttgcggacctaggaccatttctctgcaggccacttaccttcccctgagtcaggcttactaatgctgccctcactgcctctttgcagtaggggagagagcagagaagtacaggtcatctgctgggatctagttttccaagtaacattttgtggtgacagaagcctaaaaaaagctaaaatcaggaaagaaaaggaaaaatacgaattgaaaattaaggaaatgttagtaaaatagatgagtgttaaactagattgtattcattactagataaaatgtataaagctctctgtactaaggagaaatgacttttataacattttgagaaaataataaagcatttatctaaagatttggctctatattttctttcagatttttttttttttaaggggtcttactgtcttgcgcaggctggactcctgggcttgagtggtcttcctgagggctttgcctcagctggccctcacaaccaccgtgtgtggtggaaaggcattgttcgggaaacagtcccagctcctcaggactgcaggcacccacacaccactgccgtgcccagcttctttcagatttaagtcggtaataacacccaggtgacagagcaatgtattcatatgttgagacagcatgaaagagtccattttgttttcatggaggctggaaattcattacatatggaattcttctgtatttagtgaagagatgttaatctttgagaggagccattaaaaatcggagtcacttttatccaagggaaacaaacaaaacacttgagttatgactcatatgtggcaagaggctggctggaacctcttgttgagaaacagactggggttgctatggaaactggtctcacacttcctcaccagagctcggccctcctatagaggcaacttgttttctgttatttttttttttaaattattttttgagacagggagggttccactcttgcccaggctggggtgcagtggtgtgatcccagctagtggtgtgatcccagctgactgcagcctcaagcaatcctctcagcctcctgagtagctgggaccatgggtatgcaccaccacgcttgtctttctggggttttgagatgatggcattgccatgtctctgcagaaataacttcttcaggcatatgtcagctacaaggaggcattatttaaatgaaacagtaggttctgagaaacagaagagtaggtttgggaaagttctcactcacgtgcttgtaaaaaataaagcaaactgctagcatcagagtgggcagttagcagccgcctttcagaacaggaagcaaaatgaatgaaaaattaatgcctcatgtgtcaggcattctatgggctttgtctcatttggccctcacaacaactttgtgaggtggacaagtgttattcccattgtactgatgagggaacagactcaaatcgttgatttacccaacatcacagccagtatgtagcaatctttggctcagaactcaggtctcccgtgtcaactcaggatgcctctggcagtggagcacactgctgccccttccactttttctagcacattctgaagatgcatgaagcctgagtcattcactttaaatcaagccaaaacaaagtgggcttcagtgtggacttctgagtgctagatactgagttgcccttaaaaaaaaattaacttattttaagcactgaaagctcagatttccacaaaattcagttctcaataaatcctatggctgaattctttacagacattttggaaagaatgc

SEQ ID NO: 2998 - protein, 453 aa, Homo sapiens
MARKRAAGGEPRGRELRSQKSKAKSKARREEEEEDAFEDEKPPKKSLLSKVSQGKRKRGCSHPGGSADGPAKKKVAKVTVKSENLKVIKDEALSDGDDLRDFPSDLKKAHHLKRGATMNEDSNEEEEESENDWEEVEELSEPVLGDVRESTAFSRSLLPVKPVEIEIETPEQAKTRERSEKIKLEFETYLRRAMKRFNKGVHEDTHKVHLLCLLANGFYRNNICSQPDLHAIGLSIIPARFTRVLPRDVDTYYLSNLVKWFIGTFTVNAELSASEQDNLQTTLERRFAIYSARDDEELVHIFLLILRALQLLTRLVLSLQPIPLKSATAKGKKPSKERLTADPGGSSETSSQVLENHTKPKTSKGTKQEETFAKGTCRPSAKGKRNKGGRKKRSKPSSSEEDEGPGDKQEKATQRRPHGRERRVASRVSYKEESGSDEAGSGSDFELSQWRSL

SEQ ID NO: 2999 - DNA, 851 bp, Homo sapiens
cccgaacaatgcctttccaccacacacggtggttgtgagggccagctgaggcaaagccctcaggaagaccactcaagcccaggagtccagcctgcgcaagacactttttttaggcttctgtcaccacaaaatgttacttggaaaactagatcccagcagatgacctgtacttctctgctctctcccctactgcaaagaggcagtgagggcagcattagtaagcctgactcaggggaaggcagtcaggagcacgtctttgaattcctcgcagacgatgtatccatcagtcctgtggggacacaacgcgatgtcaaccctcgaacctgctgcctgctctgcctctcctccctccccagtttgtggaagacagtgggccacatctgagcactaggggtcctgaaggatgtcgcgggtcagccagtgtcccacatcctccgtgcagaaggcaggcctgtggaagctggcactgcctcttcctccccagattctgccgaagaaagctggggtgaaagcccctatccagcctcacccatcatggaacagagctcactaaccaggcagctgccggggaaagatgctgactgttttttgctcactagcctgtgagtccctaaacctgggaagaacgttttaatccagcattacgatgccagtttcattggctccgttccctctggagggaagccagaattggtaaagcactgactttgcaaatccagtgtaacatcctgaaaattggagccaccaggcctcaactcccagcagccccatgccagctttccatccccatctctggagccacccctccccatccctgtgtttagcctccatcgaaggcccctcacgcacac

SEQ ID NO: 3000 - protein, 74 aa, Homo sapiens
MTCTSLLSPLLQRGSEGSISKPDSGEGSQEHVFEFLADDVSISPVGTQRDVNPRTCCLLCLSSLPSLWKTVGHI

SEQ ID NO: 3001 - DNA, 1721 bp, Homo sapiens
atggatacatcgtctgcgaggaattcaaagacgtgctcctgactgcctgggaaaatgagcaggcagtcattgaaaggaaggagaaggaggtaagcgcatatgcaggactgagggacagcagaagcgggaagcaacactcagcgggtggcctcttccttccccaggccgcctccgtgtgctcccaggctcttcccagccctctctgacatcatggcaggcacccgagggagcgagcactgaatacagcaggctcctgcccaccccgcagactatcactgtccctgaggagcctgggtccgggctctggggtctactgcccctgctgcccacacctgcctctgtcttgaattgcctgtgtccaggttctggaagacctcacccactaaagattttggagtcagtaacgattaaaaagttatctgtttttgtggctttcaggtatagtatatcactttgtaaatcagatcaattttttggaagtgagacttggtgtgaaggagaggctatattctaaagtggtgtatatatctgtctttacattcacagtttccatcttaatatttttcctgaaaatgtcagtgcttaacacttttctcccacttcatttttgcctgcagaaaaaggagaagcgggctctagggaactggaagttgctggccaaaggtctgctcatcagggagaggctgaagcgtcgctacgggcccaagagtgaggcagcagctccccacacagatgcaggaggtggactctcttctgatgaagaggaggggaccagctctcaagcagaagcggccaggatactggctgcctcctggcctcaaaaccgagaagatgaagaaaagcagaagctgaagggtgggcccaagaagaccaaaagggaaaagaaagcagcagcttcccacctgttcccatttgagcagctgtgagctgagcgcccactagaggggcacccaccagttgctgctgccccactacaggccccacacctgccctgggcatgcccagcccctggtggtgggggcttctctgctgagaaggcaaactgaggcagcatgcacggaggcggggtcaggggagacgaggccaagctgaggaggtgctgcaggtcccgtctggctccagcccttgtcagattcacccagggtgaagccttcaaagctttttgctaccaaagcccactcaccctttgagctacagaacactttgctaggagatactcttctgcctcctagacctgttctttccatctttagaaacatcagtttttgtatggaagccaccgggagatttctggatggtggtgcatccgtgaatgcgctgatcgtttcttccagttagagtcttcatctgtccgacaagttcactcgcctcggttgcggacctaggaccatttctctgcaggccacttaccttcccctgagtcaggcttactaatgctgccctcactgcctctttgcagtaggggagagagcagagaagtacaggtcatctgctgggatctagttttccaagtaacattttgtggtgacagaagcctaaaaaaagctaaaatcaggaaagaaaaggaaaaatacgaattgaaaattaaggaaatgttagtaaaatagatgagtgttaaactagattgtattcattactagataaaatgtataaagctctctgtactaaggagaaatgacttttataacattttgagaaaataataaagcatttatctaaag

SEQ ID NO: 3002 - protein, 117 aa, Homo sapiens; identical to SEQ ID NO: 2996

SEQ ID NO: 3003 - DNA, 3725 bp, Homo sapiens
cgaaggggcgtggccaagcgcaccgcctcggggcggggccggcgttctagcgcatcgcggccgggtgcgtcactcgcgaagtggaatttgcccagacaagcaacatggctcggaaacgcgcggccggcggggagccgcggggacgcgaactgcgcagccagaaatccaaggccaagagcaaggcccggcgtgaggaggaggaggaggatgcctttgaagatgagaaacccccaaagaagagccttctctccaaagtttcacaaggaaagaggaaaagaggctgcagtcatcctgggggttcagcagatggtccagcaaaaaagaaagtggccaaggtgactgttaaatctgaaaacctcaaggttataaaggatgaagccctcagcgatggggatgacctcagggactttccaagtgacctcaagaaggcacaccatctgaagagaggggctaccatgaatgaagacagcaatgaagaagaggaagaaagtgaaaatgattgggaagaggttgaagaacttagtgagcctgtgctgggtgacgtgagagaaagtacagccttctctcgatctcttctgcctgtgaagccagtggagatagagattgaaacgccagagcaggcgaagacaagagaaagaagtgaaaagataaaactggagtttgagacatatcttcggagggcgatgaaacgtttcaataaaggggtccatgaggacacacacaaggttcaccttctctgcctgctagcaaatggcttctatcgaaataacatctgcagccagccagatctgcatgctattggcctgtccatcatcccagcccgctttaccagagtgctgcctcgagatgtggacacctactacctctcaaacctggtgaagtggttcattggaacatttacagttaatgcagaactttcagccagtgaacaagataacctgcagactacattggaaaggagatttgctatttactctgctcgagatgatgaggaattggtccatatattcttactgattctccgggctctgcagctcttgacccggctggtattgtctctacagccaattcctctgaagtcagcaacagcaaagggaaagaaaccttccaaggaaagattgactgcggatccaggaggctcctcagaaacttccagccaagttctagaaaaccacaccaaaccaaagaccagcaaaggaaccaaacaagaggaaacctttgctaagggcacctgcaggccaagtgccaaagggaagaggaacaagggaggcagaaagaaacggagcaagccctcctccagcgaggaagatgagggcccaggagacaagcaggagaaggcaacccagcgacgtccgcatggccgggagcggcgggtggcctccagggtgtcttataaagaggagagtgggagtgatgaggctggcagcggctctgattttgagctctcgcagtggagaagcctctgatccctctgatgaggattccgaacctggccctccaaagcagaggaaagcccccggatcctcagaggacaaaggctgggtccaagagtgcctccaggacccatcgtgggagccatcgtaaggacccaagcttgccagcggcatcctcaagctcttcaagcagtaaaagaggcaagaaaatgtgcagcgatggtgagaaggcagaaaaaagaagcatagctggtatagaccagtggctagaggtgttctgtgagcaggaggaaaagtgggtatgtgtagactgtgtgcacggtgtggtgggccagcctctgacctgttacaagtacgccaccaagcccatgacctatgtggtgggcattgacagtgacggctgggtccgagatgtcacacagaggtacgacccagtctggatgacagtgacccgcaagtgccgggttgatgctgagtggtgggccgagaccttgagaccataccagagcccatttatggacagggagaagaaagaagacttggagtttcaggctaaacacatggaccagcctttgcccactgccattggcttatataagaaccaccctctgtatgccctgaagcggcatctcctgaaatatgaggccatctatcccgagacagctcgccatccttgggtattgtcgtggagaagcggtctactccagggattgtgtgcacactctgcattccagggacacgtggctgaagaaagcaagagtggtgaggcttggagaagtaccctacaagatggtgaaaggcttttctaaccgtgctcggaaagcccgacttgctgagccccagctgcgggaagaaaatgacctgggcctgtttggctactggcagacagaggagtatcagcccccagtggccgtggacgggaaggtgccccggaacgagtttgggaatgtgtacctcttcctgcccagcatgatgcctattggctgtgtccagctgaacctgcccaatctacaccgcgtggcccgcaagctggacatcgactgtgtccaggccatcactggctttgatttccatggcggctactcccatcccgtgactgatggatacatcgtctgcgaggaattcaaagacgtgctcctgactgcctgggaaaatgagcaggcagtcattgaaaggaaggagaaggagaaaaaggagaagcgggctctagggaactggaagttgctggccaaaggtctgctcatcagggagaggctgaagcgtcgctacgggcccaagagtgaggcagcagctccccacacagatgcaggaggtggactctcttctgatgaagaggaggggaccagctctcaagcagaagcggccaggatactggctgcctcctggcctcaaaaccgagaagatgaagaaaagcagaagctgaagggtgggcccaagaagaccaaaagggaaaagaaagcagcagcttcccacctgttcccatttgagcagctgtgagctgagcgcccactagaggggcacccaccagttgctgctgccccactacaggccccacacctgccctgggcatgcccagcccctggtggtgggggcttctctgctgagaaggcaaactgaggcagcatgcacggaggcggggtcaggggagacgaggccaagctgaggaggtgctgcaggtcccgtctggctccagcccttgtcagattcacccagggtgaagccttcaaagctttttgctaccaaagcccactcaccctttgagctacagaacactttgctaggagatactcttctgcctcctagacctgttctttccatctttagaaacatcagtttttgtatggaagccaccgggagatttctggatggtggtgcatccgtgaatgcgctgatcgtttcttccagttagagtcttcatctgtccgacaagttcactcgcctcggttgcggacctaggaccatttctctgcaggccacttaccttcccctgagtcaggcttactaatgctgccctcactgcctctttgcagtaggggagagagcagagaagtacaggtcatctgctgggatctagttttccaagtaacattttgtggtgacagaagcctaaaaaaagctaaaatcaggaaagaaaaggaaaaatacgaattgaaaattaaggaaatgttagtaaaatagatgagtgttaaactagattgtattcattactagataaaatgtataaagctctctgtactaaggagaaatgacttttataacattttgagaaaataataaagcatttatctaaag

SEQ ID NO: 3004 - protein, 453 aa, Homo sapiens; identical to SEQ ID NO: 2998

SEQ ID NO: 3005 - DNA, 925 bp, Homo sapiens
agagtgaggcagcagctccccacacagatgcaggaggtggactctcttctgatgaagaggaggggaccagctctcaagcagaagcggccaggatactggctgcctcctggcctcaaaaccgagaagatgaagaaaagcagaagctgaagggtgggcccaagaagaccaaaagggaaaagaaagcagcagcttcccacctgttcccatttgagcagctgtgagctgagcgcccactagaggggcacccaccagttgctgctgccccactacaggccccacacctgccctgggcatgcccagcccctggtggtgggggcttctctgctgagaaggcaaactgaggcagcatgcacggaggcggggtcaggggagacgaggccaagctgaggaggtgctgcaggtcccgtctggctccagcccttgtcagattcacccagggtgaagccttcaaagctttttgctaccaaagcccactcaccctttgagctacagaacactttgctaggagatactcttctgcctcctagacctgttctttccatttagagtcttcatctgtccgacaagttcactcgcctcggttgcggacctaggaccatttctctgcaggccacttaccttcccctgagtcaggcttactaatgctgccctcactgcctctttgcagtaggggagagagcagagaagtacaggtcatctgctgggatctagttttccaagtaacattttgtggtgacagaagcctaaaaaaagctaaaatcaggaaagaaaaggaaaaatacgaattgaaaattaaggaaatgttagtaaaatagatgagtgttaaactagattgtattcattactagataaaatgtataaagctctctgtactaaggagaaatgacttttataacattttgagaaaataataaagcatttatct

SEQ ID NO: 3006 - protein, 57 aa, Homo sapiens [sequence omitted]

SEQ ID NO: 3007 - DNA, 868 bp, Homo sapiens
cttctgaaagaaagagaggcatcagttatgttactaacaactagaggaatggagttgttaccagttgatagaaagaccatgggtgagataggtttggggtaaaagatcaagagttttggacctgtcgaatttaaacacacaagtgataatattgagtaggcagttggagttcagaacagggctctggggaggaggtacaaatttgggagtagttagcatagaggcggtatttaaaattcagggagtgaatgtgtgtagagaagagaagaagaccaaggactgagcactgggagactccaatggggagaaggggaggaacaagcaaaaagatggagaaaaagctaccaccagtgacctaggagaaccagggggctggcatcctgcagccacatgcacatggtcttcgattagatattacttcttctgaacaatcttccttgatgacccagctactttacatctctggatggaatcctcctctttgctctaatgagtctgtggctgtgtgttgaaatagcagagccttgagatgagatccttggattactgtatggaagagagccacctagtaaagacactcaactcacattgaagtttgtatgagtgagaaaatctctgttgtgaaaaaataggtccaaattggctggagcagagaatgtgcatagagataccctgaggatccagtctgtcatgacacatcagagactggtggcttcaggagcatagatggcagactttttcacagtttcgtattgtcatcgagcttccttaactcccccagaaactatctgccttcacagaacataaacagaactccatgaagaaaggagaaaggaagcaaaacagaagtttatcctatcaacgtttt

SEQ ID NO: 3008 - protein, 36 aa, Homo sapiens [sequence omitted]

SEQ ID NO: 3009 - DNA, 643 bp, Homo sapiens
tgtagagaagagaagaagaccaaggactgagcactgggagactccaatggggagaaggggaggaacaagcaaaaagatggagaaaaagctaccaccagtgacctaggagaaccagggggctggcatcctgcagccacatgcacatggaagatcactttgattgccatgtggagagtgaactgtgggaggaccccagtggaggcaggaagactaaaccagaagacagtcacagtagtccagataagagatgcatatgttatcaatcgatgggaccatctagttgcaggaaaacaagctcagggctcccactgattctacattatgccatgtgaagaagatgcttgcttcccctttgccttctgccatgattgtgagtttcgcgaggcctccacagccatgcttcctgtactgcagaactgtcttcgattagatattacttcttctgaacaatcttccttgatgacccagctactttacatctctggatggaatcctcctctttgctctaatggaagaagtgttcttctgacagacagtctggaacaaagtgtgcgtacacacatacaatgagtcaagagttggagtgcgaaaacatgagaccccaaacagtaagctaaaaatgtgatattggattcttggcaga

SEQ ID NO: 3010 - protein, 82 aa, Homo sapiens
MPCEEDACFPFAFCHDCEFREASTAMLPVLQNCLRLDITSSEQSSLMTQLLYISGWNPPLCSNGRSVLLTDSLEQSVRTHIQ

SEQ ID NO: 3011 - DNA, 789 bp, Homo sapiens
aaggactgagcactgggagactccaatggggagaaggggaggaacaagcaaaaagatggagaaaaagctaccaccagtgacctaggagaaccagggggctggcatcctgcagccacatgcacatggaagatcactttgattgccatgtggagagtgaactgtgggaggaccccagtggaggcaggaagactaaaccagaagacagtcacagtagtccagataagagatgcatatgttatcaatcgccatgtgaagaagatgcttgcttcccctttgccttctgccatgattgtgagtttcgcgaggcctccacagccatgcttcctgtactgcagaactgtcttcgattagatattacttcttctgaacaatcttccttgatgacccagctactttacatctctggatggaatcctcctctttgctctaatgagtctgtggctgtgtgttgaaatagcagagccttgagatgagatccttggattactgtatggaagagagccacctagtaaagacactcaactcacattgaagtttgtatgagtgagaaaatctctgttacttaaaataggagaaaaaaacctcacaaaacgacaaaaaagagagaaaagacaaagaagactgttgtaaaaataagaagctttgaagaatctgaagcagatgttatgctgggagctagtattctattactgaacctgtggagacagattgaattatctaatggataatttgaacttcctattcaaaaacaaattgcctgaaaaaggatacattcttcagagtatgcca

SEQ ID NO: 3012 - protein, 111 aa, Homo sapiens
MHMEDHFDCHVESELWEDPSGGRKTKPEDSHSSPDKRCICYQSPCEEDACFPFAFCHDCEFREASTAMLPVLQNCLRLDITSSEQSSLMTQLLYISGWNPPLCSNESVAVC

SEQ ID NO: 3013 - DNA, 2329 bp, Homo sapiens
ggactgagcactgggagactccaatggggagaaggggaggaacaagcaaaaagatggagaaaaagctaccaccagtgacctaggagaaccagggggctggcatcctgcagccacatgcacatggaagatcactttgattgccatgtggagagtgaactgtgggaggaccccagtggaggcaggaagactaaaccagaagacagtcacagtagtccagataagagatgcatatgttatcaatcgccatgtgaagaagatgcttgcttcccctttgccttctgccatgattgtgagtttcgcgaggcctccacagccatgcttcctgtactgcagaactgtcttcgattagatattacttcttctgaacaatcttccttgatgacccagctactttacatctctggatggaatcctcctctttgctctaatggcatggtgtgcagaagtcagctgtgaaaaggaggaatgaaagcaagtgaaggatgcccttcataaggaacaagcgatctctctaaaaccaatcctagagtatggcttcagattctgctcccatttctcaatgattatgagttttgtgccacatcttctccccctttatccctacaatatttgcatttcatgtttttattctcttactgcctgagcaatttgaaactctcatatttaggcaattcccagatctcgttcttaaagcattgtgattccctttcagcttttcagaggcacgtgtgctggggaaggcactgagtcctccctgtcaatccaatttgtgataaggatttccccaggtgcacccattccatagtccctgtgttgctctgagcctggttggcatccttttgggaagcatttgtattgctttttcatctcagaaaagatactctagtcacaaaccagtcatctgcctgttaagctgtatttagaacaaatcactccgaagcaaaacaacgatgacaacaacaaaagagccacacttatttctttctagacttttaacaaaatgtttgatgttgtggagatttccaaacaattaatgtgaaattgggtactgttgttcacatgatttatttaccatatatagagaattcagctggagtgctactgtcaatgatgctcccaatgaaatttcagcagagagttggaaaatcagcaaattgtttatttccaaagaggaattacattttcaaaggataaaagttaataggagtcatagtgctcaaaaaccacacgatataggaaaacctaccccactccaccaaagggcacatcttgctttgaacacttgatttcatattaacagttcatgagttattcaaagcaggggaatctcctgcaggttgggaaatatcctagtgcttttcatagccttccatgtcatggatcagggacacacacttgtgcacatgtgtgcacagacacaaaacagagagaatgcttaacaggagcacattttacaaaagtgagatcccaggcctggaaaatcccaaactcttataaattttacaaatccaaaatggaatattcaaaaagaactcaacctgtttctcttgagtaacttttcagactctcattacaggccccatgaggtcagtcagatttctgttctacaggatactgcaaaaagagaccagaaatttaaaaaggagtgatggtaccacacaaaatagtaaaaatgaaatagagaaggtgtgaagttagatccttgatttatgtgtggaaagctagtgccaagaatattgttatgggcctggctcctagaggcaagatttgttagcaaaaactgtctctaaatatttatgctcagctaaataattgctaaataattccggatcccagctggaaatctaggatcaggactagcctaaattagtagatctatgtgatagtatattggtattttatccagaaagtacttgctcaatgataggttcaacttcagcatataattcatatacttttataaaagccttttcatggcattacatagaaggcctttccttggaaatatttccataaaataaacaaagcacttaaatcagtccattcaatagcatttgttttaggattattaaagaaatacagagttttgacttccgcagtgtgctaacatggattattctttcatttgctgatccttgtatgtgcagtaggatgttgaaagtgggggtggtggcagcatatttctacatcaccttggactttacctttctgagaatcaacataggtttctaactttttttatggccctgactggtgcttcagtaaacccacgaataaaagcagtactccaatctgcagagactctagaagaaaatactttctatgaacc

SEQ ID NO: 3014 - protein, 113 aa, Homo sapiens
MHMEDHFDCHVESELWEDPSGGRKTKPEDSHSSPDKRCICYQSPCEEDACFPFAFCHDCEFREASTAMLPVLQNCLRLDITSSEQSSLMTQLLYISGWNPPLCSNGMVCRSQL

SEQ ID NO: 3015 - DNA, 2411 bp, Homo sapiens
gactgagcactgggagactccaatggggagaaggggaggaacaagcaaaaagatggagaaaaagctaccaccagtgacctaggagaaccagggggctggcatcctgcagccacatgcacatggaagatcactttgattgccatgtggagagtgaactgtgggaggaccccagtggaggcaggaagactaaaccagaagacagtcacagtagtccagataagagatgcatatgttatcaatcgccatgtgaagaagatgcttgcttcccctttgccttctgccatgattgtgagtttcgcgaggcctccacagccatgcttcctgtactgcagaactgtcttcgattagatattacttcttctgaacaatcttccttgatgacccagctactttacatctctggatggaatcctcctctttgctctaatggcatggtgtgcagaagtcagctgtgaaaaggaggaatgaaagcaagtgaaggatgcccttcataaggaacaagcgatctctctaaaaccaatcctagagtatggcttcagattctgctcccatttctcaatgattatgagttttgtgccacatcttctccccctttatccctacaatatttgcatttcatgtttttattctcttactgcctgagcaatttgaaactctcatatttaggcaattcccagatctcgttcttaaagcattgtgattccctttcagcttttcagaggcacgtgtgctggggaaggcactgagtcctccctgtcaatccaatttgtgataaggatttccccaggtgcacccattccatagtccctgtgttgctctgagcctggttggcatccttttgggaagcatttgtattgctttttcatctcagaaaagatactctagtcacaaaccagtcatctgcctgttaagctgtatttagaacaaatcactccgaagcaaaacaacgatgacaacaacaaaagagccacacttatttctttctagacttttaacaaaatgtttgatgttgtggagatttccaaacaattaatgtgaaattgggtactgttgttcacatgatttatttaccatatatagagaattcagctggagtgctactgtcaatgatgctcccaatgaaatttcagcagagagttggaaaatcagcaaattgtttatttccaaagaggaattacattttcaaaggataaaagttaataggagtcatagtgctcaaaaaccacacgatataggaaaacctaccccactccaccaaagggcacatcttgctttgaacacttgatttcatattaacagttcatgagttattcaaagcaggggaatctcctgcaggttgggaaatatcctagtgcttttcatagccttccatgtcatggatcagggacacacacttgtgcacatgtgtgcacagacacaaaacagagagaatgcttaacaggagcacattttacaaaagtgagatcccaggcctggaaaatcccaaactcttataaattttacaaatccaaaatggaatattcaaaaagaactcaacctgtttctcttgagtaacttttcagactctcattacaggccccatgaggtcagtcagatttctgttctacaggatactgcaaaaagagaccagaaatttaaaaaggagtgatggtaccacacaaaatagtaaaaatgaaatagagaaggtgtgaagttagatccttgatttatgtgtggaaagctagtgccaagaatattgttatgggcctggctcctagaggcaagatttgttagcaaaaactgtctctaaatatttatgctcagctaaataattgctaaataattccggatcccagctggaaatctaggatcaggactagcctaaattagtagatctatgtgatagtatattggtattttatccagaaagtacttgctcaatgataggttcaacttcagcatataattcatatacttttataaaagccttttcatggcattacatagaaggcctttccttggaaatatttccataaaataaacaaagcacttaaatcagtccattcaatagcatttgttttaggattattaaagaaatacagagttttgacttccgcagtgtgctaacatggattattctttcatttgctgatccttgtatgtgcagtaggatgttgaaagtgggggtggtggcagcatatttctacatcaccttggactttacctttctgagaatcaacataggtttctaactttttttatggccctgactggtgcttcagtaaacccacgaataaaagcagtactccaatctgcagagactctagaagaaaatactttctatgaaccaaaaaacaaagaggaagcttcatcatttaatttgactgctagagaaacatctacacatttctcacattcttctcatatcagaa

SEQ ID NO: 3016 - protein, 113 aa, Homo sapiens; identical to SEQ ID NO: 3014

SEQ ID NO: 3017 - DNA, 689 bp, Homo sapiens
atactatccagagctccaaactttgtaggaagccagaagcgtctcctttgttgaacagtgccaaaatagcagctctgaagatcactttgattgccatgtggagagtgaactgtgggaggaccccagtggaggcaggaagactaaaccagaagacagtcacagtagtccagataagagatgcatatgttatcaatcggtcttcgattagatattacttcttctgaacaatcttccttgatgacccagctactttacatctctggatggaatcctcctctttgctctaatggcatggtgtgcagaagtcagctgtgaaaaggaggaatgaaagcaagtgaaggatgcccttcataaggaacaagcgatctctctaaaaccaatcctagagtatggcttcagattctgctcccatttctcaatgattatgagttttgtgccacatcttctccccctttatccctacaatatttgcatttcatgtttttattctcttactgcctgagcaatttgaaactctcatatttaggcaattcccagatctcgttcttaaagcattgtgattccctttcagcttttcagaggcacgtgtgctggggaaggcactgagtcctccctgtcaatccaatttgtgataaggatttccccaggtgcacccattccatagtccctgtgttgctctgagcctggtt

SEQ ID NO: 3018 - protein, 45 aa, Homo sapiens
MHMLSIGLRLDITSSEQSSLMTQLLYISGWNPPLCSNGMVCRSQL

SEQ ID NO: 3019 - DNA, 458 bp, Homo sapiens
tcatggaaccccagtggagagctcattctcatgttcaggaggaagatactgcttacagccaaagaacagatttgtaaaagaaggcagaggagtcctttttggaggtagcagagcctagtggctgagaacatgacatctggaccaagactgctcagaatcctgattttatttggtgtgttattatgtccagttaacaaacacaagcaaaatctgacttctcagacagctatgggtggtcatgggagcttcccatcccatgtggaagacaatgcctggagcagagaaggcatcttgctctttgctttctccttatctcttttcttcctgcttgatcatatgtcatgcttggagatgcagcagtcatcttaccatcagtaagaagaaagctgcatgttaagaattgtggagctgtaagatggaagaagcttgaatcctagggccttccttgatttgctgca

SEQ ID NO: 3020 - protein, 82 aa, Homo sapiens
MTSGPRLLRILILFGVLLCPVNKHKQNLTSQTAMGGHGSFPSHVEDNAWSREGILLFAFSLSLFFLLDHMSCLEMQQSSYHQ

SEQ ID NO: 3021 - DNA, 1255 bp, Homo sapiens
agtctaacttccgcgcatctacgagggccgggactgccgctacctttctggaaggcgccggccggccagtcaccggagggatcccgccagaggcggctccgcgtctccagcagcggggcagggacccgggcgccccgccctcgccagcgcccgcccccgcccgcccccggcccgccctctgtatctggcccctgggcagctgcccggggaggcggccagcgagctggggccgcgcaatgtcgcacggagccgggctcgtccgcaccacgtgcagcagcggcagcgcgctcggacccggggccggcgcggcccagcccagcgcgagccccttggaggggctgctggacctcagctacccccgcacccacgcggccctgctgaaagtggcgcaaatggtcaccctgctgattgccttcatctgtgtgcggagctccctgtggaccaactacagcgcctacagctactttgaagtggtcaccatttgcgacttgataatgatcctcgccttttacctggtccacctcttccgcttctaccgcgtgctcacctgtatcagctggcccctgtcgatctttggtttcatggccaccttcctctgcatggcaagcatatggctgtcctataagatctcgtgtgtaacccagtccacagatgcagccgtctgatgaggccacaacccctaggcccctcaggagctttgcagagaggaggacgtgtactccaggcgaggcctctggacctgtgttcctgtgccaaagtcctgtcaggctggtgggcaccaggaaaggcctgcaccctcttcctgctctcccaggaagccagctccctgagctcctgagccagccggaaactcttcctccagccttccggggagaacatccctcccattctgggaaaggaaagcagcctccagggaaatgttttctgccttcctgcttctagaaccacctcaggtactgatgaaccccacttagcacagctgaaggggtttgtgaatactcccgcctaaatcccttctacttcactcctcaggggagtgaagtgccttaagaaacaaagccctgtcctaatttatctagcttgtcagtccggtcttagagataccctctttcctgaagtgaggcgtgcctgtagaaacactatgtggtcagcctgtccccaaggagatcttgtgtctcctctccatctctgcctttgttaccagtgtgcatgtgtttgtgtgttttttaataaaatattgactcggccagttgca

SEQ ID NO: 3022 - protein, 142 aa, Homo sapiens; identical to SEQ ID NO: 329

SEQ ID NO: 3023 - DNA, 1354 bp, Homo sapiens
agtctaacttccgcgcatctacgagggccgggactgccgctacctttctggaaggcgccggccggccagtcaccggagggatcccgccagaggcggctccgcgtctccagcagcggggcagggacccgggcgccccgccctcgccagcgcccgcccccgcccgcccccggcccgccctctgtatctggcccctgggcagctgcccggggaggcggccagcgagctggggccgcgcaatgtcgcacggagccgggctcgtccgcaccacgtgcagcagcggcagcgcgctcggacccggggccggcgcggcccagcccagcgcgagccccttggaggggctgctggacctcagctacccccgcacccacgcggccctgctgaaagtggcgcaaatggtcaccctgctgattgccttcatctgtgtgcggagctccctgtggaccaactacagcgcctacagctactttgaagtggtcaccatttgcgacttgataatgatcctcgccttttacctggtccacctcttccgcttctaccgcgtgctcacctgtatcagctggcccctgtcggaacttctgcactatttaatcggtaccctgctcctcctcatcgcctccattgtggcagcttccaagagttacaaccagagcggactggtagccggagcgatctttggtttcatggccaccttcctctgcatggcaagcatatggctgtcctataagatctcgtgtgtaacccagtccacagatgcagccgtctgatgaggccacaacccctaggcccctcaggagctttgcagagaggaggacgtgtactccaggcgaggcctctggacctgtgttcctgtgccaaagtcctgtcaggctggtgggcaccaggaaaggcctgcaccctcttcctgctctcccaggaagccagctccctgagctcctgagccagccggaaactcttcctccagccttccggggagaacatccctcccattctgggaaaggaaagcagcctccagggaaatgttttctgccttcctgcttctagaaccacctcaggtactgatgaaccccacttagcacagctgaaggggtttgtgaatactcccgcctaaatcccttctacttcactcctcaggggagtgaagtgccttaagaaacaaagccctgtcctaatttatctagcttgtcagtccggtcttagagataccctctttcctgaagtgaggcgtgcctgtagaaacactatgtggtcagcctgtccccaaggagatcttgtgtctcctctccatctctgcctttgttaccagtgtgcatgtgtttgtgtgttttttaataaaatattgactcggccagttgca

SEQ ID NO: 3024 - protein, 175 aa, Homo sapiens; identical to SEQ ID NO: 327

SEQ ID NO: 3025 - DNA, 904 bp, Homo sapiens
cgcgcatctacgagggccgggactgccgctacctttctggaaggcgccggccggccagtcaccggagggatcccgccagaggcggctccgcgtctccagcagcggggcagggacccgggcgccccgccctcgccagcgcccgcccccgcccgcccccggcccgccctctgtatctggcccctgggcagctgcccggggaggcggccagcgagctggggccgcgcaatgtcgcacggagccgggctcgtccgcaccacgtgcagcagcggcagcgcgctcggacccggggccggcgcggcccagcccagcgcgagccccttggaggggctgctggacctcagctacccccgcacccacgcggccctgctgaaagtggcgcaaatggtcaccctgctgattgccttcatctgtgtgcggagctccctgtggaccaactacagcgcctacagctactttgaagtggtcaccatttgcgacttgataatgatcctcgccttttacctggtccacctcttccgcttctaccgcgtgctcacctgtatcagctggcccctgtcggaacttctgcactatttaatcggtaccctgctcctcctcatcgcctccattgtggcagcttccaagagttacaaccagagcggactggtagccggagcggataatcaaagtccattggcttagccccagcttgcttgtaaatgtaaacccagaccaggcactgaagctgccaagagtgaagaccgagaggcctggctgccagccctgacctggcccaacctggaggactggggccagtggctgggcctcgcggggcttcctctctgcacctgatccaggatgaggtggttgggttagatgactctccaagctcctttctggccagagacatgaagggaacaagcac

SEQ ID NO: 3026 - protein, 151 aa, Homo sapiens
MSHGAGLVRTTCSSGSALGPGAGAAQPSASPLEGLLDLSYPRTHAALLKVAQMVTLLIAFICVRSSLWTNYSAYSYFEVVTICDLIMILAFYLVHLFRFYRVLTCISWPLSELLHYLIGTLLLLIASIVAASKSYNQSGLVAGADNQSPLA

SEQ ID NO: 3027 - DNA, 1162 bp, Homo sapiens
cgcgcatctacgagggccgggactgccgctacctttctggaaggcgccggccggccagtcaccggagggatcccgccagaggcggctccgcgtctccagcagcggggcagggacccgggcgccccgccctcgccagcgcccgcccccgcccgcccccggcccgccctctgtatctggcccctgggcagctgcccggggaggcggccagcgagctggggccgcgcaatgtcgcacggagccgggctcgtccgcaccacgtgcagcagcggcagcgcgctcggacccggggccggcgcggcccagcccagcgcgagccccttggaggggctgctggacctcagctacccccgcacccacgcggccctgctgaaagtggcgcaaatggtcaccctgctgattgccttcatctgtgtgcggagctccctgtggaccaactacagcgcctacagctactttgaagtggtcaccatttgcgacttgataatgatcctcgccttttacctggtccacctcttccgcttctaccgcgtgctcacctgtatcagctggcccctgtcgatgcagccgtctgatgaggccacaacccctaggcccctcaggagctttgcagagaggaggacgtgtactccaggcgaggcctctggacctgtgttcctgtgccaaagtcctgtcaggctggtgggcaccaggaaaggcctgcaccctcttcctgctctcccaggaagccagctccctgagctcctgagccagccggaaactcttcctccagccttccggggagaacatccctcccattctgggaaaggaaagcagcctccagggaaatgttttctgccttcctgcttctagaaccacctcaggtactgatgaaccccacttagcacagctgaaggggtttgtgaatactcccgcctaaatcccttctacttcactcctcaggggagtgaagtgccttaagaaacaaagccctgtcctaatttatctagcttgtcagtccggtcttagagataccctctttcctgaagtgaggcgtgcctgtagaaacactatgtggtcagcctgtccccaaggagatcttgtgtctcctctccatctctgcctttgttaccagtgtgcatgtgtttgtgtgttttttaataaaatattgactcggccagttgca

SEQ ID NO: 3028 - protein, 207 aa, Homo sapiens
MSHGAGLVRTTCSSGSALGPGAGAAQPSASPLEGLLDLSYPRTHAALLKVAQMVTLLIAFICVRSSLWTNYSAYSYFEVVTICDLIMILAFYLVHLFRFYRVLTCISWPLSMQPSDEATTPRPLRSFAERRTCTPGEASGPVFLCQSPVRLVGTRKGLHPLPALPGSQLPELLSQPETLPPAFRGEHPSHSGKGKQPPGKCFLPSCF

SEQ ID NO: 3029 - DNA, 2075 bp, Homo sapiens
aatagcattctgtagcgatataataaactgttcaattatgcagtgcagacagttggggaccgggatggtatataacgtgctaattgtgcagaacagacaatgagaggccgggacaggctctaataggctaattatgtgctgtagacaattggtacaaaaggagcccaggaaaagaaacccggggaagaagtggatgtgggctggtgggggcagctgtttatgtaaagcagcatctgggcttgaaaagaaaaccaaaccttgttgaaaatcctacccttagctgcccctgcgccattctcactggacaccagtggcggtgtagtgaagtggaggcctttgtgtgggtctgagaacacctaggcacccggtactgcagagtgcggactctggagccaggctccctgggctcccatcccatatctggcccttgctggctctgtggccttcggcaaaacagatgaccgcctgtacctctgtttctttagctgtgaaatggaggagcagggtgggtaatcctagcacccacccagcagagttgtgagggttaaaggaatcaatacacccacagggcctcacaccctggtagggatgtagtaaagtggtcagtaagttttcaccactgcagctgccggtgttgttcacaagcaaggaaaatggctgcaggcttcaaagcccagagattccagaagaagctactgcctcttcctcgaccatttgatgagcctcccacaggcactcttcgtctcccagcacccgaatctcatctacaagtgagggggctgggctaggtcagccttcctcacacttgagcgctggatgaccctgagaaagggaaagggtgctgccttgacttagttgagtctaatattgtttaatatgtacaaacgtaaacctagatgtaaaggcctcggcttctggctctaatacggctatgaagccagaatggaacagaaagtcattacaaatgaaatgcgaacaacgccactacaccacaaatcatgggaacgttcagatttttttaacccaaattaaaatttcatccttttcttctcttttggtccaggataatcaaagtccattggcttagccccagcttgcttgtaaatgtaaacccagaccaggcactgaagctgccaagagtgaagaccgagaggcctggctgccagccctgacctggcccaacctggaggactggggccagtggctgggcctcgcggggcttcctctctgcacctgatccaggatgaggtggttgggttagatgactctccaagctcctttctggccagagacatgaagggaacaagcacagagatgagaagcagacaggattgcccgagtaattagccctatggcctgtgaacttcctctcccctctctccactgcagatctttggtttcatggccaccttcctctgcatggcaagcatatggctgtcctataagatctcgtgtgtaacccagtccacagatgcagccgtctgatgaggccacaacccctaggcccctcaggagctttgcagagaggaggacgtgtactccaggcgaggcctctggacctgtgttcctgtgccaaagtcctgtcaggctggtgggcaccaggaaaggcctgcaccctcttcctgctctcccaggaagccagctccctgagctcctgagccagccggaaactcttcctccagccttccggggagaacatccctcccattctgggaaaggaaagcagcctccagggaaatgttttctgccttcctgcttctagaaccacctcaggtactgatgaaccccacttagcacagctgaaggggtttgtgaatactcccgcctaaatcccttctacttcactcctcaggggagtgaagtgccttaagaaacaaagccctgtcctaatttatctagcttgtcagtccggtcttagagataccctctttcctgaagtgaggcgtgcctgtagaaacactatgtggtcagcctgtccccaaggagatcttgtgtctcctctccatctctgcctttgttaccagtgtgcatgtgtttgtgtgttttttaataaaatattgactcggccagttgca

SEQ ID NO: 3030 - protein, 96 aa, Homo sapiens
MQPSDEATTPRPLRSFAERRTCTPGEASGPVFLCQSPVRLVGTRKGLHPLPALPGSQLPELLSQPETLPPAFRGEHPSHSGKGKQPPGKCFLPSCF

SEQ ID NO: 3031 - DNA, 7684 bp, Homo sapiens
cgcgctcggcgccctgctcgccgggcagaggggaaggcggcggccggctggggatgggcggcccggctgcgccgaggggcgccgggaggctccgcgcgctgctgctggcgctggtggtcgcggggatccccgcgggcgcctacaacctcgacccgcagcgccccgtgcacttccagggccccgctgactcgttcttcggctacgcagttctggagcatttccacgacaacacgcgctgggtccttgtgggcgcaccaaaggcagattccaaatacagcccttcagtgaagtctcctggggctgtgtttaagtgccgtgttcacaccaaccctgaccggagatgcaccgaactggacatggctcgagggaagaatcggggcacgtcctgcggaaagacctgccgggaagaccgcgatgatgagtggatgggggtgagcctggcccgacagcccaaggctgatggccgtgtgttggcctgtgctcatcgctggaagaacatctactatgaagccgaccacatcctaccccatggcttctgctacatcatcccctccaacctccaggccaaaggcaggacgctgatcccttgctatgaagagtataagaagaagtacggagaggaacacggctcctgccaggctgggatagcgggcttcttcaccgaggagctggtggtgatgggtgctccagggtcattttattgggctggaaccatcaaagtgctgaaccttacggacaacacctatttaaaactgaacgacgaagtgatcatgaacaggcggtacacctacctgggctacgcagtgaccgctggccacttctctcacccgtccaccattgatgtggtaggaggtgccccacaggacaaaggcatcggcaaggtttatattttcagagctgaccgaagatcaggcaccttaattaagatctttcaagcatcaggtaaaaagatgggctcttacttcggctcctccttgtgcgcagttgacctgaatggggacggcctctctgacctgctggtgggggcccccatgttttctgagatcagggatgagggacaggtcactgtctacatcaacagaggaaatggagccctcgaggagcagctggctctgactggggatggtgcctacaatgcgcactttggagagagcattgccagcctggacgatctggacaatgatgggttcccagatgtggccattggtgcacccaaggaggatgacttcgcaggggcggtctatatctatcatggtgatgccggtgggatagtccctcagtactcaatgaaactgtctgggcagaagataaatccagtgctccggatgtttggtcagtccatatcgggaggcattgatatggatggaaatggctatcctgatgtcactgttggagccttcatgtccgacagcgtggttcttctcagagcaaggcctgtcattacggtggatgtctccatcttcctcccgggctccatcaacatcacagcgcctcagtgtcacgacggacagcagcctgtgaactgcctgaacgtcaccacctgcttcagcttccatggcaaacacgttccaggagagattggcctgaattatgttctgatggctgacgtggccaaaaaggagaagggccagatgcccagggtctactttgtgctgctgggagagaccatgggtcaggtcacagagaagctgcagctgacttacatggaggagacgtgtcgtcactatgtggcccatgtgaagcggagggtgcaggacgtcatcagcccgatcgtgtttgaagcagcctacagcctcagtgagcatgtgactggagaggaggagagggaactgccgcctctgacaccagttctccgctggaaaaagggacaaaagattgcccaaaagaatcagactgtttttgaaaggaattgccgttcagaggactgtgccgcagacctgcagcttcagggtaaactgctgctctccagtatggatgagaaaaccctgtatctagctttgggggctgtgaagaacatctccctaaacatctctatctccaacctcggagatgatgcctatgatgccaacgtgtccttcaatgtttcccgggagctcttcttcatcaacatgtggcagaaggaggagatgggcatctcctgtgagctgctggaatcggacttcctcaaatgcagcgtgggatttcctttcatgaggtcaaagtcaaagtatgaattcagcgtgatctttgatacaagccacctgtctggggaagaggaagttctcagcttcattgttactgctcagagtggcaacacggagcgctctgaatccctgcatgacaacaccctcgtgctgatggtgccactgatgcacgaggtggacacgtccatcaccggaatcatgtctccaacctcctttgtatatggcgagtccgtggacgcagccaacttcattcagctggatgacctggagtgtcactttcagcccatcaatatcacccttcaggtctacaacactggcccaagcacccttccagggtcatctgtcagcatctctttccctaatcgactctcatctggtggtgcagagatgtttcatgtccaggaaatggtggtgggccaagagaagggaaactgctctttccagaaaaacccaactccctgcatcatccctcaagaacaagaaaatatcttccacacaatatttgcttttttcacaaagtctggaagaaaagtcttggactgtgaaaaaccaggaatttcttgcctaacagcacactgtaactttagtgctcttgctaaagaagaaagtcgtactatagacatttacatgctgctgaacacagaaatactgaaaaaggacagttcgtctgtcatccagttcatgtcccgcgccaaggtgaaggtggatcctgccctaagggtggtggaaatagctcatgggaacccagaagaggtgacggtggtcttcgaggccctgcacaatctggagccccgtggctacgtcgtggggtggatcatcgccatcagtttgttggtgggaatcctcatcttcctgctgctggccgtgctgctctggaagatgggcttctttcgccgaaggtacaaagaaattatcgaagctgagaagaaccggaaagagaatgaagacagttgggactgggtccagaaaaaccagtgagctgccacaccagtcacatgacctgatcactagcctgtcatccttggtctttgtatcttccatatttggaagaaaaaaatcttctccagatttttcggaggccccactgatgctgttctcttcttcattctatcaagcccaggtgccagcctgaggcagccacttcggccaggtcacacgaccggggccagcaccacttcctttaaagatgaactctgaactttggagagtgagctacagagccgagcaatatttatggatgcaacacgcatggtcaaccctcaggggaaaactgttacctaaagtatttttataaatataagccttttatactgattatgtcttttatatttgtatcgatgttttattatttctattaaatagttatataattcactcaagcactgatatctggcctaaaatcttggaagtacatgtccatgaatacaaattttaaaggatgaaaatcttaccgtactttggaacttgctgtttaaaaagacagatgaaataagttgaagaaacctcatgtaatgaatccaccaggctggcagtggtgcatataaactgtgggtgtggcaagaccccgaagacatttcacatctttatcgcctcgatcaagtgtggagtcacatgctaatgtgtgctaaagaactgtaagtgttttttcatatgtacttttcattggaagattcccaacaagaatttggatggaaaacctgatccctagcaagaagtctgctctgtatcacctttatatagcagacatgtcaccctgcttctacacagatgatggatgaaagcttggagcaatgccatgtggtcatctggtaaacctcagaatggcgtctcatcctggacatcctgcatcagagttcacacaccacaaggactaaatccttgtcccctaagcaaagaattgggtctgaatgctgtgagggattgcctttttgtggtaattttcattgagagatcttcatttcccctaccaccctggctgtcccagctagtggtgattgcagattccttcccagagaggacatttaaccgttttaaaaaaaatgtcttagattgggttcccaagaagcagtccctgaaacaaggatttgtgtgcaagtaacttattaaggaagtattcccaggggataccagtaagagagtgggggaagcaggacaaggaaggagacaaagccaggcaaatgtttgtcatttcagggagagctccatgaagtttagcctcagcctgatcaggggaactccggaggaaaagttaggcctcagaggtgtcccaacctgaatcaaggggctggctgcacccagaggagatgtaaacgttttattctcaattcctgctggcgtaatggctccagtagctcaggacagtcctctaaaggacaaccacagatgcatcctcagccaggggagacacagggaaatgatgcaaaagaaatgatgcaaaggatctgagcagaacactgcccctccccaccccctgaatgtgtgagtgctgagttacggccttcagtatccaagctctctgtttgacagtagatatattgtcagatgcactgtgctgcttagttttgagtgcagtgtgattttctgaaagggcaatgagatgatggatgtagcatgctcagcactgacctggcccatagtgatcactcaataactgttaacagctatggctgctattcctactgatggataaccatctaataagacagaaaacatggggctaagagcagggtctaacggagtcttaatggcttattacagcctgccaaagtgccagctacatacacatggcatccagtgcggatgaaacaatctataaaaccaagggtctttcttatagcaccttttttactggaagctaacacgttgggagtccgtgaacattgtcaaaaagacatcaaactcaacttctgggaagacagatttttaatacacatacttggctaatactcacaaacatatctaaagttttggcaaaattatgagggtgatgggtgggtactaacctggcatggagcaggtgtgtcttttggtttcttatgcagttgactctgctgcagggagattacagatgtaacctcatgcttctcttcctggtgaacatgggaatagaccaaaaaaatcaagggtcaatggcatgaactaagctgatcctggaaatcagggatgttgcatctaactgtgggatggaggcacagaggtagctacagggagcaggacgaggcaaagaaagcagctgtcactcagagttcgcttatgagttttatcaaaagcagcaagaaaagcagtcttgggtgggttttatcacttattaacagccatttatgaggcccctgctgtgtgtcaggcactgtgcaaggtgctggaggttccccagagaacacttcagggacattttgcctcagggtggcaaaatgcagtggcatgtggactttttgaatgggatgccatttgcagctttcctttgatggactcttgttcataatgccatgttttctttaatgaatcatttaggattcttaggtgatatttctggaacagcaccatcaacagctttggccacatgcacttagagcaactaacttgcctcctgccggggtgtaggtgcgttggtgacagtgtagaagggtgattcgcaggcccatgttctgcccaccagcaaagccccactggagaagggtagactcctgtgggcagtctcagagctgggacctatttgcttctgcttgattctgcgtgggtggacccacatgagcagctgtatacccaggaggtcactaagactttataaaggcaggttttaagaaaaccagccttggcatcaccaccagcagatactgaaagcctccccaggaacctgtctggggaaggatgatgcctctgctggtctgatcgtgctgagtagcaggtgggctacggggactggggagttaagcattttgtgcagtgatagagaagtcaagcatatcgttagcgctctctcaacttgggcagttcacaagctccttcccagctcagaagccctctctatgctctcaggggaagcagatggggtggatcagtacatctgtgttacccttccagaatattatttgaaaattctacagtatgttctactttctccccttcctgcttccatggtttcactgtggaatcctataagatattctcctgagcagtattatttcagtttccttcagcttttagttgaatcttcaatgtggttttaaccaactgttcagagaactgaaatggtttttaaatatgaaaaaggacctttgtaaaaatggagtaaaacagtgccccttttttaaaaaaagttttgcttatgcttaatttacataggactcaggagagtttggaacatcctccaagtgggccatagagctgtcacaaagaagaggccatgatgtttagaaacaaggggacactagcaggaggggcagggtccactggcttagtggcaactgacaggcatccattccgaataactcagcactgaggtttcctcaggcagttctttaggaaaactgtcagcatcatgggtactcagaggtatggtagaccttgtagaagatccactaggaagtcctccttcaccaaatcatgtagctactgcccttgagccaaaggcaatgaggtttaaaacaaaaacccaacagcactcctgggaacatcctgttttccatgcggaagcatagcagatccccagacgatccgtgtgctgtatgctacctgttgaaccctagcatggtggctttttaaaaggttatttatgacttttatttttgggtaaggcattatggccaggtgcatgcagttatgtctgggttacgtgtgaaacgtacatctggtgaactgtatacttggctcaaacttctcaaaatttagaggtgctggaaaggattgtcacttggagcctttagtagacaaaaggcagaaagtgagcatcatttcagaaatgctttagtatgcacacttttagctgatattttgatatatagaataataatatacacagtggagaatattcaaagagtggctgaagggagaatacagagccagtagggccaaaatgaaacttctaggatgtcttctgaattttcagcacatggggggaataagtgaacaaatttcccaacatcgtgcaatgctttatagcacaatgatctagatttcagactgtgttaaggttttttctttgttgatgttgttgttttaattctaatgtgcacggtgtgactggcagagtgagtttaaaagctttacgagtgattaattgcttggcaggcacccacgctatctgcatttccagaactttactgatgcatccatgtacatttccactgaggaattttggtgggtggggggaggttgtgctgcctcacaatgtcacgtgtattaaagtctaagcagtcacttctgattcacttgcactgtttgggaaatgtcaggtttacaaaaacatacatgtttggaataaaaaatggctgcaaacaattcag

SEQ ID NO: 3032 - protein, 1035 aa, Homo sapiens; identical to SEQ ID NO: 331

SEQ ID NO: 3033 - DNA, 7944 bp, Homo sapiens
cgcgctcggcgccctgctcgccgggcagaggggaaggcggcggccggctggggatgggcggcccggctgcgccgaggggcgccgggaggctccgcgcgctgctgctggcgctggtggtcgcggggatccccgcgggcgcctacaacctcgacccgcagcgccccgtgcacttccagggccccgctgactcgttcttcggctacgcagttctggagcatttccacgacaacacgcgctgggtccttgtgggcgcaccaaaggcagattccaaatacagcccttcagtgaagtctcctggggctgtgtttaagtgccgtgttcacaccaaccctgaccggagatgcaccgaactggacatggctcgagggaagaatcggggcacgtcctgcggaaagacctgccgggaagaccgcgatgatgagtggatgggggtgagcctggcccgacagcccaaggctgatggccgtgtgttggcctgtgctcatcgctggaagaacatctactatgaagccgaccacatcctaccccatggcttctgctacatcatcccctccaacctccaggccaaaggcaggacgctgatcccttgctatgaagagtataagaagaagtacggagaggaacacggctcctgccaggctgggatagcgggcttcttcaccgaggagctggtggtgatgggtgctccagggtcattttattgggctggaaccatcaaagtgctgaaccttacggacaacacctatttaaaactgaacgacgaagtgatcatgaacaggcggtacacctacctgggctacgcagtgaccgctggccacttctctcacccgtccaccattgatgtggtaggaggtgccccacaggacaaaggcatcggcaaggtttatattttcagagctgaccgaagatcaggcaccttaattaagatctttcaagcatcaggtaaaaagatgggctcttacttcggctcctccttgtgcgcagttgacctgaatggggacggcctctctgacctgctggtgggggcccccatgttttctgagatcagggatgagggacaggtcactgtctacatcaacagaggaaatggagccctcgaggagcagctggctctgactggggatggtgcctacaatgcgcactttggagagagcattgccagcctggacgatctggacaatgatgggttcccagatgtggccattggtgcacccaaggaggatgacttcgcaggggcggtctatatctatcatggtgatgccggtgggatagtccctcagtactcaatgaaactgtctgggcagaagataaatccagtgctccggatgtttggtcagtccatatcgggaggcattgatatggatggaaatggctatcctgatgtcactgttggagccttcatgtccgacagcgtggttcttctcagagcaaggcctgtcattacggtggatgtctccatcttcctcccgggctccatcaacatcacagcgcctcagtgtcacgacggacagcagcctgtgaactgcctgaacgtcaccacctgcttcagcttccatggcaaacacgttccaggagagattggcctgaattatgttctgatggctgacgtggccaaaaaggagaagggccagatgcccagggtctactttgtgctgctgggagagaccatgggtcaggtcacagagaagctgcagctgacttacatggaggagacgtgtcgtcactatgtggcccatgtgaagcggagggtgcaggacgtcatcagcccgatcgtgtttgaagcagcctacagcctcagtgagcatgtgactggagaggaggagagggaactgccgcctctgacaccagttctccgctggaaaaagggacaaaagattgcccaaaagaatcagactgtttttgaaaggaattgccgttcagaggactgtgccgcagacctgcagcttcagggtaaactgctgctctccagtatggatgagaaaaccctgtatctagctttgggggctgtgaagaacatctccctaaacatctctatctccaacctcggagatgatgcctatgatgccaacgtgtccttcaatgtttcccgggagctcttcttcatcaacatgtggcagaaggaggagatgggcatctcctgtgagctgctggaatcggacttcctcaaatgcagcgtgggatttcctttcatgaggtcaaagtcaaagtatgaattcagcgtgatctttgatacaagccacctgtctggggaagaggaagttctcagcttcattgttactgctcagagtggcaacacggagcgctctgaatccctgcatgacaacaccctcgtgctgatggtgccactgatgcacgaggtggacacgtccatcaccggaatcatgtctccaacctcctttgtatatggcgagtccgtggacgcagccaacttcattcagctggatgacctggagtgtcactttcagcccatcaatatcacccttcaggtctacaacactggcccaagcacccttccagggtcatctgtcagcatctctttccctaatcgactctcatctggtggtgcagagatgtttcatgtccaggaaatggtggtgggccaagagaagggaaactgctctttccagaaaaacccaactccctgcatcatccctcaagaacaagaaaatatcttccacacaatatttgcttttttcacaaagtctggaagaaaagtcttggactgtgaaaaaccaggaatttcttgcctaacagcacactgtaactttagtgctcttgctaaagaagaaagtcgtactatagacatttacatgctgctgaacacagaaatactgaaaaaggacagttcgtctgtcatccagttcatgtcccgcgccaaggtgaaggtggatcctgccctaagggtggtggaaatagctcatgggaacccagaagaggtgacggtggtcttcgaggccctgcacaatctggagccccgtggctacgtcgtggggtggatcatcgccatcagtttgttggtgggaatcctcatcttcctgctgctggccgtgctgctctggaagatgggcttctttcgccgaaggtacaaagaaattatcgaagctgagaagaaccggaaagagaatgaagacagttgggactgggtccagaaaaaccagtgagctgccacaccagtcacatgacctgatcactagcctgtcatccttggtctttgtatcttccatatttggaagaaaaaaatcttctccagatttttcggaggccccactgatgctgttctcttcttcattctatcaagcccaggtgccagcctgaggcagccacttcggccaggtcacacgaccggggccagcaccacttcctttaaagatgaactctgaactttggagagtgagctacagagccgagcaatatttatggatgcaacacgcatggtcaaccctcaggggaaaactgttacctaaagtatttttataaatataagccttttatactgattatgtcttttatatttgtatcgatgttttattatttctattaaatagttatataattcactcaagcactgatatctggcctaaaatcttggaagtacatgtccatgaatacaaattttaaaggatgaaaatcttaccgtactttggaacttgctgtttaaaaagacagatgaaataagttgaagaaacctcatgtaatgaatccaccaggctggcagtggtgcatataaactgtgggtgtggcaagaccccgaagacatttcacatctttatcgcctcgatcaagtgtggagtcacatgctaatgtgtgctaaagaactgtaagtgttttttcatatgtacttttcattggaagattcccaacaagaatttggatggaaaacctgatccctagcaagaagtctgctctgtatcacctttatatagcagacatgtcaccctgcttctacacagatgatggatgaaagcttggagcaatgccatgtggtcatctggtaaacctcagaatggcgtctcatcctggacatcctgcatcagagttcacacaccacaaggactaaatccttgtcccctaagcaaagaattgggtctgaatgctgtgagggattgcctttttgtggtaattttcattgagagatcttcatttcccctaccaccctggctgtcccagctagtggtgattgcagattccttcccagagaggacatttaaccgttttaaaaaaaatgtcttagattgggttcccaagaagcagtccctgaaacaaggatttgtgtgcaagtaacttattaaggaagtattcccaggggataccagtaagagagtgggggaagcaggacaaggaaggagacaaagccaggcaaatgtttgtcatttcagggagagctccatgaagtttagcctcagcctgatcaggggaactccggaggaaaagttaggcctcagaggtgtcccaacctgaatcaaggggctggctgcacccagaggagatgtaaacgttttattctcaattcctgctggcgtaatggctccagtagctcaggacagtcctctaaaggacaaccacagatgcatcctcagccaggggagacacagggaaatgatgcaaaagaaatgatgcaaaggatctgagcagaacactgcccctccccaccccctgaatgtgtgagtgctgagttacggccttcagtatccaagctctctgtttgacagtagatatattgtcagatgcactgtgctgcttagttttgagtgcagtgtgattttctgaaagggcaatgagatgatggatgtagcatgctcagcactgacctggcccatagtgatcactcaataactgttaacagctatggctgctattcctactgatggataaccatctaataagacagaaaacatggggctaagagcagggtctaacggagtcttaatggcttattacagcctgccaaagtgccagctacatacacatggcatccagtgcggatgaaacaatctataaaaccaagggtctttcttatagcaccttttttactggaagctaacacgttgggagtccgtgaacattgtcaaaaagacatcaaactcaacttctgggaagacagatttttaatacacatacttggctaatactcacaaacatatctaaagttttggcaaaattatgagggtgatgggtgggtactaacctggcatggagcaggtgtgtcttttggtttcttatgcagttgactctgctgcagggagattacagatgtaacctcatgcttctcttcctggtgaacatgggaatagaccaaaaaaatcaagggtcaatggcatgaactaagctgatcctggaaatcagggatgttgcatctaactgtgggatggaggcacagaggtagctacagggagcaggacgaggcaaagaaagcagctgtcactcagagttcgcttatgagttttatcaaaagcagcaagaaaagcagtcttgggtgggttttatcacttattaacagccatttatgaggcccctgctgtgtgtcaggcactgtgcaaggtgctggaggttccccagagaacacttcagggacattttgcctcagggtggcaaaatgcagtggcatgtggactttttgaatgggatgccatttgcagctttcctttgatggactcttgttcataatgccatgttttctttaatgaatcatttaggattcttaggtgatatttctggaacagcaccatcaacagctttggccacatgcacttagagcaactaacttgcctcctgccggggtgtaggtgcgttggtgacagtgtagaagggtgattcgcaggcccatgttctgcccaccagcaaagccccactggagaagggtagactcctgtgggcagtctcagagctgggacctatttgcttctgcttgattctgcgtgggtggacccacatgagcagctgtatacccaggaggtcactaagactttataaaggcaggttttaagaaaaccagccttggcatcaccaccagcagatactgaaagcctccccaggaacctgtctggggaaggatgatgcctctgctggtctgatcgtgctgagtagcaggtgggctacggggactggggagttaagcattttgtgcagtgatagagaagtcaagcatatcgttagcgctctctcaacttgggcagttcacaagctccttcccagctcagaagccctctctatgctctcaggggaagcagatggggtggatcagtacatctgtgttacccttccagaatattatttgaaaattctacagtatgttctactttctccccttcctgcttccatggtttcactgtggaatcctataagatattctcctgagcagtattatttcagtttccttcagcttttagttgaatcttcaatgtggttttaaccaactgttcagagaactgaaatggtttttaaatatgaaaaaggacctttgtaaaaatggagtaaaacagtgccccttttttaaaaaaagttttgcttatgcttaatttacataggactcaggagagtttggaacatcctccaagtgggccatagagctgtcacaaagaagaggccatgatgtttagaaacaaggggacactagcaggaggggcagggtccactggcttagtggcaactgacaggcatccattccgaataactcagcactgaggtttcctcaggcagttctttaggaaaactgtcagcatcatgggtactcagaggtatggtagaccttgtagaagatccactaggaagtcctccttcaccaaatcatgtagctactgcccttgagccaaaggcaatgaggtttaaaacaaaaacccaacagcactcctgggaacatcctgttttccatgcggaagcatagcagatccccagacgatccgtgtgctgtatgctacctgttgaaccctagcatggtggctttttaaaaggttatttatgacttttatttttgggtaaggcattatggccaggtgcatgcagttatgtctgggttacgtgtgaaacgtacatctggtgaactgtatacttggctcaaacttctcaaaatttagaggtgctggaaaggattgtcacttggagcctttagtagacaaaaggcagaaagtgagcatcatttcagaaatgctttagtatgcacacttttagctgatattttgatatatagaataataatatacacagtggagaatattcaaagagtggctgaagggagaatacagagccagtagggccaaaatgaaacttctaggatgtcttctgaattttcagcacatggggggaataagtgaacaaatttcccaacatcgtgcaatgctttatagcacaatgatctagatttcagactgtgttaaggttttttctttgttgatgttgttgttttaattctaatgtgcacggtgtgactggcagagtgagtttaaaagctttacgagtgattaattgcttggcaggcacccacgctatctgcatttccagaactttactgatgcatccatgtacatttccactgaggaattttggtgggtggggggaggttgtgctgcctcacaatgtcacgtgtattaaagtctaagcagtcacttctgattcacttgcactgtttgggaaatgtcaggtttacaaaaacatacatgtttggaataaaaaatggctgcaaacaattcagaagttcaatctgtaatttacttgctaataagaactttttaaagtgttgaagctagggtttcaatgtaatacaacatgagcattaaagagaacatcaaggtccatctaattcacatgaacaacccacctgatgtggctgaactgtctgcagtccttggcctccacacaagaggtaccacctcctctctgcatcaccctgactcccctggcccagggctacacctaggttcttgatcttgagataaatgtgcccaaattaaa

SEQ ID NO: 3034 - protein, 1035 aa, Homo sapiens; identical to SEQ ID NO: 331

SEQ ID NO: 3035 - DNA, 3524 bp, Homo sapiens
gcggcggccggctggggatgggcggcccggctgcgccgaggggcgccgggaggctccgcgcgctgctgctggcgctggtggtcgcggggatccccgcgggcgcctacaacctcgacccgcagcgccccgtgcacttccagggccccgctgactcgttcttcggctacgcagttctggagcatttccacgacaacacgcgctgggtccttgtgggcgcaccaaaggcagattccaaatacagcccttcagtgaagtctcctggggctgtgtttaagtgccgtgttcacaccaaccctgaccggagatgcaccgaactggacatggctcgagggaagaatcggggcacgtcctgcggaaagacctgccgggaagaccgcgatgatgagtggatgggggtgagcctggcccgacagcccaaggctgatggccgtgtgttggcctgtgctcatcgctggaagaacatctactatgaagccgaccacatcctaccccatggcttctgctacatcatcccctccaacctccaggccaaaggcaggacgctgatcccttgctatgaagagtataagaagaagtacggagaggaacacggctcctgccaggctgggatagcgggcttcttcaccgaggagctggtggtgatgggtgctccagggtcattttattgggctggaaccatcaaagtgctgaaccttacggacaacacctatttaaaactgaacgacgaagtgatcatgaacaggcggtacacctacctgggctacgcagtgaccgctggccacttctctcacccgtccaccattgatgtggtaggaggtgccccacaggacaaaggcatcggcaaggtttatattttcagagctgaccgaagatcaggcaccttaattaagatctttcaagcatcaggtaaaaagatgggctcttacttcggctcctccttgtgcgcagttgacctgaatggggacggcctctctgacctgctggtgggggcccccatgttttctgagatcagggatgagggacaggtcactgtctacatcaacagaggaaatggagccctcgaggagcagctggctctgactggggatggtgcctacaatgcgcactttggagagagcattgccagcctggacgatctggacaatgatgggttcccagatgtggccattggtgcacccaaggaggatgacttcgcaggggcggtctatatctatcatggtgatgccggtgggatagtccctcagtactcaatgaaactgtctgggcagaagataaatccagtgctccggatgtttggtcagtccatatcgggaggcattgatatggatggaaatggctatcctgatgtcactgttggagccttcatgtccgacagcgtggttcttctcagagcaaggcctgtcattacggtggatgtctccatcttcctcccgggctccatcaacatcacagcgcctcagtgtcacgacggacagcagcctgtgaactgcctgaacgtcaccacctgcttcagcttccatggcaaacacgttccaggagagattggcctgaattatgttctgatggctgacgtggccaaaaaggagaagggccagatgcccagggtctactttgtgctgctgggagagaccatgggtcaggtcacagagaagctgcagctgacttacatggaggagacgtgtcgtcactatgtggcccatgtgaagcggagggtgcaggacgtcatcagcccgatcgtgtttgaagcagcctacagcctcagtgagcatgtgactggagaggaggagagggaactgccgcctctgacaccagttctccgctggaaaaagggacaaaagattgcccaaaagaatcagactgtttttgaaaggaattgccgttcagaggactgtgccgcagacctgcagcttcagggtaaactgctgctctccagtatggatgagaaaaccctgtatctagctttgggggctgtgaagaacatctccctaaacatctctatctccaacctcggagatgatgcctatgatgccaacgtgtccttcaatgtttcccgggagctcttcttcatcaacatgtggcagaaggaggagatgggcatctcctgtgagctgctggaatcggacttcctcaaatgcagcgtgggatttcctttcatgaggtcaaagtcaaagtatgaattcagcgtgatctttgatacaagccacctgtctggggaagaggaagttctcagcttcattgttactgctcagagtggcaacacggagcgctctgaatccctgcatgacaacaccctcgtgctgatggtgccactgatgcacgaggtggacacgtccatcaccggaatcatgtctccaacctcctttgtatatggcgagtccgtggacgcagccaacttcattcagctggatgacctggagtgtcactttcagcccatcaatatcacccttcaggtctacaacactggcccaagcacccttccagggtcatctgtcagcatctctttccctaatcgactctcatctggtggtgcagagatgtttcatgtccaggaaatggtggtgggccaagagaagggaaactgctctttccagaaaaacccaactccctgcatcatccctcaagaacaagaaaatatcttccacacaatatttgcttttttcacaaagtctggaagaaaagtcttggactgtgaaaaaccaggaatttcttgcctaacagcacactgtaactttagtgctcttgctaaagaagaaagtcgtactatagacatttacatgctgctgaacacagaaatactgaaaaaggacagttcgtctgtcatccagttcatgtcccgcgccaaggtgaaggtggatcctgccctaagggtggtggaaatagctcatgggaacccagaagaggtgacggtggtcttcgaggccctgcacaatctggagccccgtggctacgtcgtggggtggatcatcgccatcagtttgttggtgggaatcctcatcttcctgctgctggccgtgctgctctggaagatgggcttctttcgccgaaggtacaaagaaattatcgaagctgagaagaaccggaaagagaatgaagacagttgggactgggtccagaaaaaccagtgagctgccacaccagtcacatgacctgatcactagcctgtcatccttggtctttgtatcttccatatttggaagaaaaaaatcttctccagatttttcggaggccccactgatgctgttctcttcttcattctatcaagcccaggtgccagcctgaggcagccacttcggccaggtcacacgaccggggccagcaccacttcctttaaagatgaactctgaactttggagagtgagctacagagccgagcaatatttatggatgcaacacgcatggtcaaccctcaggggaaaactgttacctaaagtatttttataaatataagccttttatactgattatgtcttttatatttgtatcgatgttttattatttctattaaatagttatataattcactc

SEQ ID NO: 3036 - protein, 1035 aa, Homo sapiens; identical to SEQ ID NO: 331

SEQ ID NO: 3037 - DNA, 724 bp, Homo sapiens
aaggagcaagtggacacagcctgcctcccataagctgtctggctcactcattttattcctggaaatcagaagtcaatcatttcctgagaaatgaggaaaaagatggaggtcacagagaccagtaagagcaaggagggagaggaaaaagctgaacatgaaactcgaggaagaaacagaatatgcagaggaataaaaaaaacccaactctctcaaccctggattgaatgctgtgcacttcctgaggcaatggatcacggaggagtttatctaagggacatgccaatcactcattccccagggctggattctctagcctgagtcctatttcaggtcagatgtgaagaaaactatttgcctgaataccaaactttaaactcactgtaaaaattaccttcagagaaacaactggaaggataagctgcataccctcagatttctttcttttgttccccagagggtgataagaacatttggtatattctgtgcaacccctgttcttcttttccttctttcaacactcataccctcttcattacatggtctgtgttacttgaacccttctaaataattttctgaactacatctttaattgcaagacacccccaaaactataagagtaggaaagagtagaaacaactaagatgaaataaacccatcaggtctttatctatttcctacccaattacgaaaagcaaaggagaaaaataaaataactctgagaagc

SEQ ID NO: 3038 - protein, 75 aa, Homo sapiens
MRKKMEVTETSKSKEGEEKAEHETRGRNRICRGIKKTQLSQPWIECCALPEAMDHGGVYLRDMPITHSPGLDSLA

SEQ ID NO: 3039 - DNA, 578 bp, Homo sapiens
tcgcctggtgggggagaggggagcggggccgacacaggactgcagttgacagcagataactgaaagctcggaaagcgaaaccgtggataagcaggggaactgtggcatcccatttaaaattgcttctgaagagaagcatgaggttacatctgtaatctccctgcagcagagtcaactgcataagaaaccaaaagacacacctgctccatgccaggtctgttctgaaaaattgagaagatgatctatcttcacttcaaaaagaaatctctaaggagcaagtggacacagcctgcctcccataagctgtctggctcactcattttattcctggaaatcaggtgagttttttagaatgactgtccaatagaaggaaaaaagtaagctagggaggtcagtagctactgctcattgcagcaggccaagggtggtttgctgacaatgtccatgacatgtagttagactctagtatcaaacagggagcttggccttctccatgcctaagtcagcaggtaggaaggttcaggtctacagcacacacacgatgtacccaagaagagtgattaatttacaaactgaca

SEQ ID NO: 3040 - protein, 34 aa, Homo sapiens
MIYLHFKKKSLRSKWTQPASHKLSGSLILFLEIR

SEQ ID NO: 3041 - DNA, 638 bp, Homo sapiens
gaaaaatcttcaagtaagttgtgttgtttcttccacaggacagttcgtctgtcatccagttcatgtcccgcgccaaggtgaaggtggatcctgccctaagggtggtggaaatagctcatgggaacccagaagaggtgacgatgggcttctttcgccgaaggtacaaagaaattatcgaagctgagaagaaccggaaagagaatgaagacagttgggactgggtccagaaaaaccagtgagctgccacaccagtcacatgacctgatcactagcctgtcatccttggtctttgtatcttccatatttggaagaaaaaaatcttctccagatttttcggaggccccactgatgctgttctcttcttcattctatcaagcccaggtgccagcctgaggcagccacttcggccaggtcacacgaccggggccagcaccacttcctttaaagatgaactctgaactttggagagtgagctacagagccgagcaatatttatggatgcaacacgcatggtcaaccctcaggggaaaactgttacctaaagtatttttataaatataagccttttatactgattatgtcttttatatttgtatcgatgttttattatttctattaaatagttatataattcactc

SEQ ID NO: 3042 - protein, 58 aa, Homo sapiens
MSRAKVKVDPALRVVEIAHGNPEEVTMGFFRRRYKEIIEAEKNRKENEDSWDWVQKNQ

SEQ ID NO: 3043 - DNA, 2674 bp, Homo sapiens
aggtttcaaggggcagaagcggaggcgagagccgggtcaaggacggggcagggggtggcgcagggcccgcggccggggctccgagaggagggctcggagtccggcgctgtcctcggggaaggggtcgccaggggccccgtcgccattttctgggcgccgagacaaagccccactaggggtgcgggaagggcagaaagggggcccctaggggcggtggccaggcgggcaaaaggccgagatgcgcgccgggcaagggagggaggcggcggcgacgggatcttaccgaaagattggaggttctggatagtggacatgcgatactagtgtgaggccggtgaggggataaaattcctgcggggcccgcccggatcaccttgtcaggaggctgtagtggcgagaaaacggaaataaataagaaaacgcttcgccctggggttgggattaggctggagtggcggcggcggaagccgggaggaggcaggaagaggcgaaggaggaggcggaggaagaggcgagggcgcgagagaagaggcggcgctgcggcttctcgcacaaaatggccgatggagactatttagccgcgcccgcggcccctcccacgtgaccgtcccgcgccgagcatcctgggacttgtagttttctggaggcagcagagcccggaaagcctgaggccgggggcggccgagaccgcaattcccgtcacggagtgcgtcctctagcgcggggcggaagacccgcgaagtgttcaagcggccgcagagcggcccagagttcgcaggtctggggctctcttcccagagagctcgtaggggaggacagtcaagggactcaagcgtctctcttgactccccttctctcgctgtgcagtggcggcgccgaggggtcgacgctcagggctaatctctatgagtcaccctcgaggccccgggtaatattgggtggatcacaagaactaatctttcatgatttggaaaccggaaggaaagaagcacttttgtagctgacttacctcaatgacatgaccagtgtctgagcctacaactgcgctatcttccctggatttttcttcaccttttccttactcatgagccaggtatcccggaagcctgaagggaaaggttcaagtccaggcttccattaaaaccccactaatagacttgttctgccatcaatcagccacagacctgtactgcaagatgcctactacacacccagtgctgagctgtggaaaatccagaacacacgtgaccacagacaatcatgaaggcgctgataatagcagcttctcaaagggaaaattgtgtccgggacccgctgggtacataacagatttctctttattctcagattcaggcttctttgcttggggcagctccccaggagtataagtatgaatgggggggaagatagagcatatacttcttccttcctgatattgttgacaaaagtatgctgtttacatattgaaaatcatgggatggtgtgaactcacagggagaggacaggagggagcctccttgatcaaatgtctaagataaaaatgaaggttgcagtaacaaagagccagctgataaccttgttcctcctgtaaggtgcctgcacccctgccaggcatatgatctgggtggttacactgttaagccaggagaggtgctcacccaagggtatgtgtcagtatccttgatggtgtttcccaaactacagccacacggttctctcccaactccttccctaaaaggtagattcaagccgggggaaggtggacatatcttgtgaagtgttgaatatggaaattcaaaacatatgttacattcagggaggggcttccattaggccctatttttatataaaaatctagaaataaataatattcttctatttgcttcaaaaaaacaaagaaatgcttaagttctctttacattgatgtcaaagcatagccatgagttatgctgtgcaggaggcaggtgtttggcaagacagatttttttctgacaaaacaaataaaatcctgagaggtatttgttttagtaaaccaaagggaaatcctatgagactctggcttgtgcctctaaatgtcttcctcagtgaaaacagcccatggtcatgcctgtgtcctgggtggactgagttcgttccagtgagctgatgagccaggcgggagattccccttgggaagggtcatggttgtttatttgaagctgctttcagccagtacttggccgaggagtgtggatgaatgaaacgcctctgttgtcctgctgctgaaacgggaacactattgcctgtcatcactgttgtgcccactgttttggcttatgatacaagagcccactgtcctacatctctaatgatacacagagcatctctggtctctaggaggtgggagggacactacttccagctttaaccatatgcatgacaaggagatccagtgaccatctggtggggaagcaggcattccatctccggagcttcccaaggaaacaggagacaatggagtgcaggaaatgctcagaaccaggaaacctgcaaccacttagttccagtggcttggggtagctaggattccgtttattcctttgtaaaatggggataatgcagggtgctctcatgtggagctaaggaaacaatatgtgaaagcccgttgcatataaaatttatataaagaaaaggt

SEQ ID NO: 3044 - protein, 68 aa, Homo sapiens [sequence omitted]

SEQ ID NO: 3045 - DNA, 1161 bp, Homo sapiens
aggtttcaaggggcagaagcggaggcgagagccgggtcaaggacggggcagggggtggcgcagggcccgcggccggggctccgagaggagggctcggagtccggcgctgtcctcggggaaggggtcgccaggggccccgtcgccattttctgggcgccgagacaaagccccactaggggtgcgggaagggcagaaagggggcccctaggggcggtggccaggcgggcaaaaggccgagatgcgcgccgggcaagggagggaggcggcggcgacgggatcttaccgaaagattggaggttctggatagtggacatgcgatactagtgtgaggccggtgaggggataaaattcctgcggggcccgcccggatcaccttgtcaggaggctgtagtggcgagaaaacggaaataaataagaaaacgcttcgccctggggttgggattaggctggagtggcggcggcggaagccgggaggaggcaggaagaggcgaaggaggaggcggaggaagaggcgagggcgcgagagaagaggcggcgctgcggcttctcgcacaaaatggccgatggagactatttagccgcgcccgcggcccctcccacgtgaccgtcccgcgccgagcatcctgggacttgtagttttctggaggcagcagagcccggaaagcctgaggccgggggcggccgagaccgcaattcccgtcacggagtgcgtcctctagcgcggggcggaagacccgcgaagtgttcaagcggccgcagagcggcccagagttcgcaggtctggggctctcttcccagagagctcgtaggggaggacagtcaagggactcaagcgtctctcttgactccccttctctcgctgtgcagtggcggcgccgaggggtcgacgctcagggctaatctctatgagtcaccctcgaggccccgggtaatattgggtggatcacaagaactaatctttcatgatttggaaaccggaaggaaagaagcacttttgtagctgacttacctcaatgacatgaccagtgtctgagcctacaactgcgctatcttccctggatttttcttcaccttttccttactcatgagccagcaacctgacatggttgatattttaatcccatctttagagacaagaaaactgtggctcagtgaagaaga

SEQ ID NO: 3046 - protein, 131 aa, Homo sapiens
PSRAEHPGTCSFLEAAEPGKPEAGGGRDRNSRHGVRPLARGGRPAKCSSGRRAAQSSQVWGSLPRELVGEDSQGTQASLLTPLLSLCSGGAEGSTLRANLYESPSRPRVILGGSQELIFHDLETGRKEALL

SEQ ID NO: 3047 - DNA, 1296 bp, Homo sapiens
aggtttcaaggggcagaagcggaggcgagagccgggtcaaggacggggcagggggtggcgcagggcccgcggccggggctccgagaggagggctcggagtccggcgctgtcctcggggaaggggtcgccaggggccccgtcgccattttctgggcgccgagacaaagccccactaggggtgcgggaagggcagaaagggggcccctaggggcggtggccaggcgggcaaaaggccgagatgcgcgccgggcaagggagggaggcggcggcgacgggatcttaccgaaagattggaggttctggatagtggacatgcgatactagtgtgaggccggtgaggggataaaattcctgcggggcccgcccggatcaccttgtcaggaggctgtagtggcgagaaaacggaaataaataagaaaacgcttcgccctggggttgggattaggctggagtggcggcggcggaagccgggaggaggcaggaagaggcgaaggaggaggcggaggaagaggcgagggcgcgagagaagaggcggcgctgcggcttctcgcacaaaatggccgatggagactatttagccgcgcccgcggcccctcccacgtgaccgtcccgcgccgagcatcctgggacttgtagttttctggaggcagcagagcccggaaagcctgaggccgggggcggccgagaccgcaattcccgtcacggagtgcgtcctctagcgcggggcggaagacccgcgaagtgttcaagcggccgcagagcggcccagagttcgcaggtctggggctctcttcccagagagctcgtaggggaggacagtcaagggactcaagcgtctctcttgactccccttctctcgctgtgcagtggcggcgccgaggggtcgacgctcagggctaatctctatgagtcaccctcgaggccccgggtaatattgggtggatcacaagaactaatctttcatgatttggaaaccggaaggaaagaagcacttttgtagctgacttacctcaatgacatgaccagtgtctgagcctacaactgcgctatcttccctggatttttcttcaccttttccttactcatgagccagacttgcagcttatgagccaacagaattgaagatgaatgccaaacctccaagtgagatggggcagaaagactgaaggagcttggactcagagagtactggattgggtgaaccactgggagtcatcacctgcctctgaatatcatgttatgtgaaaaaaagatcccctatctgttgaagccactgttggccaggttttctgttat

SEQ ID NO: 3048 - protein, 38 aa, Homo sapiens
MPNLQVRWGRKTEGAWTQRVLDWVNHWESSPASEYHVM

SEQ ID NO: 3049 - DNA, 1303 bp, Homo sapiens
aggtttcaaggggcagaagcggaggcgagagccgggtcaaggacggggcagggggtggcgcagggcccgcggccggggctccgagaggagggctcggagtccggcgctgtcctcggggaaggggtcgccaggggccccgtcgccattttctgggcgccgagacaaagccccactaggggtgcgggaagggcagaaagggggcccctaggggcggtggccaggcgggcaaaaggccgagatgcgcgccgggcaagggagggaggcggcggcgacgggatcttaccgaaagattggaggttctggatagtggacatgcgatactagtgtgaggccggtgaggggataaaattcctgcggggcccgcccggatcaccttgtcaggaggctgtagtggcgagaaaacggaaataaataagaaaacgcttcgccctggggttgggattaggctggagtggcggcggcggaagccgggaggaggcaggaagaggcgaaggaggaggcggaggaagaggcgagggcgcgagagaagaggcggcgctgcggcttctcgcacaaaatggccgatggagactatttagccgcgcccgcggcccctcccacgtgaccgtcccgcgccgagcatcctgggacttgtagttttctggaggcagcagagcccggaaagcctgaggccgggggcggccgagaccgcaattcccgtcacggagtgcgtcctctagcgcggggcggaagacccgcgaagtgttcaagcggccgcagagcggcccagagttcgcaggtctggggctctcttcccagagagctcgtaggggaggacagtcaagggactcaagcgtctctcttgactccccttctctcgctgtgcagtggcggcgccgaggggtcgacgctcagggctaatctctatgagtcaccctcgaggccccgggtaatattgggtggatcacaagaactaatctttcatgatttggaaaccggaaggaaagaagcacttttgtagctgacttacctcaatgacatgaccagtgtctgagcctacaactgcgctatcttccctggatttttcttcaccttttccttactcatgagccaggacccatgtgggcagagaggagagttctcacctggagttcagcatggtggacttgggctgcagccgtggccacctggtcctccagatccgccagatgggtctcatcagtgccactgtggatgcagcgggcggcatcttctagctcagtcagctgggtctccagtccatacacagtgcctgctgccaggtatacctgtagagacagtgcta

SEQ ID NO: 3050 - protein, 72 aa, Homo sapiens
MSQDPCGQRGEFSPGVQHGGLGLQPWPPGPPDPPDGSHQCHCGCSGRHLLAQSAGSPVHTQCLLPGIPVETV

SEQ ID NO: 3051 - DNA, 1310 bp, Homo sapiens
aggtttcaaggggcagaagcggaggcgagagccgggtcaaggacggggcagggggtggcgcagggcccgcggccggggctccgagaggagggctcggagtccggcgctgtcctcggggaaggggtcgccaggggccccgtcgccattttctgggcgccgagacaaagccccactaggggtgcgggaagggcagaaagggggcccctaggggcggtggccaggcgggcaaaaggccgagatgcgcgccgggcaagggagggaggcggcggcgacgggatcttaccgaaagattggaggttctggatagtggacatgcgatactagtgtgaggccggtgaggggataaaattcctgcggggcccgcccggatcaccttgtcaggaggctgtagtggcgagaaaacggaaataaataagaaaacgcttcgccctggggttgggattaggctggagtggcggcggcggaagccgggaggaggcaggaagaggcgaaggaggaggcggaggaagaggcgagggcgcgagagaagaggcggcgctgcggcttctcgcacaaaatggccgatggagactatttagccgcgcccgcggcccctcccacgtgaccgtcccgcgccgagcatcctgggacttgtagttttctggaggcagcagagcccggaaagcctgaggccgggggcggccgagaccgcaattcccgtcacggagtgcgtcctctagcgcggggcggaagacccgcgaagtgttcaagcggccgcagagcggcccagagttcgcaggtctggggctctcttcccagagagctcgtaggggaggacagtcaagggactcaagcgtctctcttgactccccttctctcgctgtgcagtggcggcgccgaggggtcgacgctcagggctaatctctatgagtcaccctcgaggccccgggtaatattgggtggatcacaagaactaatctttcatgatttggaaaccggaaggaaagaagcacttttgtagctgacttacctcaatgacatgaccagtgtctgagcctacaactgcgctatcttccctggatttttcttcaccttttccttactcatgagccagaactgcatgtccaaggagctatacatttgctagaaggggatgaccaattcagctctgagtttcctgggagccaaagccaagagctccatgtccacaagatcgaagaccaagtactcagaagaacagcttttcctgatactaggagttaagagaagctttctccaggaactctcatagagacaacttgcatgatgcagtggacagcacccttagcatg

SEQ ID NO: 3052 - protein, 45 aa, Homo sapiens
MTNSALSFLGAKAKSSMSTRSKTKYSEEQLFLILGVKRSFLQELS

SEQ ID NO: 3053 - DNA, 3194 bp, Homo sapiens
aggtttcaaggggcagaagcggaggcgagagccgggtcaaggacggggcagggggtggcgcagggcccgcggccggggctccgagaggagggctcggagtccggcgctgtcctcggggaaggggtcgccaggggccccgtcgccattttctgggcgccgagacaaagccccactaggggtgcgggaagggcagaaagggggcccctaggggcggtggccaggcgggcaaaaggccgagatgcgcgccgggcaagggagggaggcggcggcgacgggatcttaccgaaagattggaggttctggatagtggacatgcgatactagtgtgaggccggtgaggggataaaattcctgcggggcccgcccggatcaccttgtcaggaggctgtagtggcgagaaaacggaaataaataagaaaacgcttcgccctggggttgggattaggctggagtggcggcggcggaagccgggaggaggcaggaagaggcgaaggaggaggcggaggaagaggcgagggcgcgagagaagaggcggcgctgcggcttctcgcacaaaatggccgatggagactatttagccgcgcccgcggcccctcccacgtgaccgtcccgcgccgagcatcctgggacttgtagttttctggaggcagcagagcccggaaagcctgaggccgggggcggccgagaccgcaattcccgtcacggagtgcgtcctctagcgcggggcggaagacccgcgaagtgttcaagcggccgcagagcggcccagagttcgcaggtctggggctctcttcccagagagctcgtaggggaggacagtcaagggactcaagcgtctctcttgactccccttctctcgctgtgcagtggcggcgccgaggggtcgacgctcagggctaatctctatgagtcaccctcgaggccccgggtaatattgggtggatcacaagaactaatctttcatgatttggaaaccggaaggaaagaagcacttttgtagctgacttacctcaatgacatgaccagtgtctgagcctacaactgcgctatcttccctggatttttcttcaccttttccttactcatgagccaggacatgaacctggagcctgcccggatgcgaaaggagctgtaacactgaatccctctcaccctatgccagtgctggatggctgtcccatgtgatgggaagtggtggtggggccaggccagcccaggagccatcatgggccagagtggggcagcaggaccaaacaagctataacacaaataagctgaaacatgttcctggctggcctgccaagctgccagcagtgacatgttcccattcgccagactacaagacaagagagctgtgacccttctggggacccagacctcgggactccctgagtcagagctgtgacatgctgtaacacccccttggggctctgtggttgctggtgtctctgagtttttgggcaccactgcattccccctgtccagatgctgctgcctggcccagctacagcccctcacaaaactcacgcctgtgctggtgcctggagctgcccaccccactgcagcagctggcacacctggctgtgcatcatggctggaccctacacttgctcactcacacaccccttgccattctgtgcctggcttgtccacagtgggcatgggatctgggccagtagcgcaagctcagtacagcctgccaggccgagtgggtggagccagctcagcagtcaaaagtgaaactcaggcagaggcaccactggccacagaggttaccgaaagaatcgtgtgtcactactgttagcggtgcctaatttatacaggtctgcagcaacttcagttcttgccttctaagaagagagaattcaactgaggtgggtcataaggcagagtcagagactgaggcaagttttaagcaggaatgaaagtttattaaaaagttttaagtaggaatgagaggaagtaaagtacacttggaagagggccaagcaggtgatgtgagagagtcaagtgcccagtttgacctttgacttacagttttgtatgttccagcatcttctgtcccttctcacctgattcttcctttgaagtgggctgtctgcatgcacagtggcctgctagcacatgggagggaccacaggcacagtgagtttactggagttgtatgcatgctcaggtgaggcattcttcccttaccagttgagtgttcctagaggaaggtcatataccagttaaactctgccattttggctcttaacgcacatgcttgagaccactcacccaattcctgagatcttatcggaaagctgctgatcaccagtttcagttttttccatctattgggagactgcctttctctggtgccggctgcgacccattagtattttggagagacagttaactacctgactatcacctgatggttgcctaatgttagtaggggggcatctctcctaccctgctcatgtctgcctgactacctaatgtaacactactttaaattattattctggttgatttcttagccccaaagatgaatcatccctcctcctttcttatttcccaaaacattactaacacagggttattttgtgtagtactttttaaaaaattagagataacctaagaggccacagcactgcacaaaatggggatcaccttaaagttcagtgttaggcagcattgcccctggctatttccatcataagtaaacagccttctttctccagagccccctcctgctggcttgttgctggcccctcctcttcttcttgtttattgtacaacaaaaccgcacaggcaaagcttaaaatttgctggtactttaacttgcagagaaatttaactgcttccctcaacctcctgcccatatcagaatagaggcctttgtatgctagagtttccaataccaaataatggcaacaataataaatagtgacaacattttacattatatattactttaagttatagcaaagcaaattttgagtagggctctctccccaccagcaagattcttgggatcttatcgtttgtggggaggaatctggaaactgtattataatagacacccttttatctgatattattgaattgttagtagggtaactattaacaattaattgaaaagtcagttaatacaaagattcataaaatgatatgttttatattttattaaaatgtgtaacctgttc

SEQ ID NO: 3054 - protein, 84 aa, Homo sapiens
MLLPGPATAPHKTHACAGAWSCPPHCSSWHTWLCIMAGPYTCSLTHPLPFCAWLVHSGHGIWASSASSVQPARPSGWSQLSSQK

SEQ ID NO: 3055 - DNA, 1012 bp, Homo sapiens
atagtctccatcggccattttgtgcgagaagccgcagcgccgcctcttctctcgcgccctcgcctcttcctccgcctcctccttcgcctcttcctgcctcctcccggcttccgccgccgccactccagcctaatcccaaccccagggcgaagcgttttcttatttatttccgttttctcgccactacagcctcctgacaaggtgatccgggcgggccccgcaggaattttatcccctcaccggcctcacactagtatcgcatgtccactatccagaacctccaatctttcgacccctttgctgatgcaactaagggtgacgacttactcccggcagggactgaggattacattcatataagaatccagcaacggaacggcagaaagacactgactactgttcagggcattgcagatgattatgacaaaaagaaacttgtgaaagctttcaaaaagaaatttgcctgtaatggtactgtgattgaacatcctgaatacggagaggttattcagcttcaaggtgaccaaagaaaaaacatctgccagtttctcttggaggttggcattgtaaaggaggaacagcttaaggttcatggattctaaaatgaacctaaatacgtggagaatttcttgaatagttttgttctctaaacccggtttggctgccttgtgaaatgattccctgcagtaaacggacttttcatttatttaatcattcaaacttccattcacatctgcatgattacagaaaacatggggtatgtagactagtaacacataagaaaattgcagtaagatggtaacaaaacctcatattgtctttacatgtttccaatggaaaatgttttgagtgtttattgttcagtttattacgtttcacttgattaaatttttttgttgttgtattaaaccatgtacgttgcagcttaacaataaaaaaaaatctatgaatctttgtgagcaattatgctcccaaatctaagcaagtaaaatacacattttgtctttcttaa

SEQ ID NO: 3056 - protein, 113 aa, Homo sapiens; identical to SEQ ID NO: 333

SEQ ID NO: 3057 - DNA, 904 bp, Homo sapiens
agtctccatcggccattttgtgcgagaagccgcagcgccgcctcttctctcgcgccctcgcctcttcctccgcctcctccttcgcctcttcctgcctcctcccggcttccgccgccgccactccagcctaatcccaaccccagggcgaagcgttttcttatttatttccgttttctcgccactacagcctcctgacaaggtgatccgggcgggccccgcaggaattttatcccctcaccggcctcacactagtatcgcatgtccactatccagaacctccaatctttcgacccctttgctgatgcaactaagggtgacgacttactcccggcagggactgaggattacattcatataagaatccagcaacggaacggcagaaagacactgactactgttcagggcattgcagatgattatgacaaaaagaaacttgtgaaagctttcaaaaagaaatttgcctgtaatggtactgtgattgaacatcctgaatacggagaggttattcagcttcaaggtgaccaaagaaaaaacatctgccagtttctcttggaggttggcattgtaaaggaggaacagcttaaggttcatggattctaaaatgaacctaaatacgtggagaatttcttgaatagttttgttctctaaacccggtttggctgccttgtgaaatgattccctgcagtaaacggacttttcatttatttaatcattcaaacttccattcacatctgcatgattacagaaaacatggggtatgtagactagtaacacataagaaaattgcagtaagatggtaacaaaacctcatattgtctttacatgtttccaatggaaaatgttttgagtgtttattgttcagtttattacgtttcacttgattaaatttttttgttgttgtatt

SEQ ID NO: 3058 - protein, 113 aa, Homo sapiens; identical to SEQ ID NO: 333

SEQ ID NO: 3059 - DNA, 985 bp, Homo sapiens
agtctccatcggccattttgtgcgagaagccgcagcgccgcctcttctctcgcgccctcgcctcttcctccgcctcctccttcgcctcttcctgcctcctcccggcttccgccgccgccactccagcctaatcccaaccccagggcgaagcgttttcttatttatttccgttttctcgccactacagcctcctgacaaggtgatccgggcgggccccgcaggaattttatcccctcaccggcctcacactagtatcgcatgtccactatccagaacctccaatctttcgacccctttgctgatgcaactaagggtgacgacttactcccggcagggactgaggattacattcatataagaatccagcaacggaacggcagaaagacactgactactgttcagggcattgcagatgattatgacaaaaagaaacttgtgaaagctttcaaaaagaaatttgcctgtaatggtactgtgattgaacatcctgaatacggagaggttattcagcttcaaggtgaccaaagaaaaaacatctgccagtttctcttggaggttggcattgtaaaggaggaacagcttaaggttcatggattctaaaatgaacctaaatacgtggagaatttcttgaatagttttgttctctaaacccggtttggctgccttgtgaaatgattccctgcagtaaacggacttttcatttatttaatcattcaaacttccattcacatctgcatgattacagaaaacatggggtatgtagactagtaacacataagaaaattgcagtaagatggtaacaaaacctcatattgtctttacatgtttccaatggaaaatgttttgagtgtttattgttcagtttattacgtttcacttgattaaatttttttgttgttgtattaaaccatgtacgttgcagcttaacaataaaaaaaaatctatgaatctttgtgagcaattatgctcccaaatctaagcaagt

SEQ ID NO: 3060 - protein, 113 aa, Homo sapiens; identical to SEQ ID NO: 333

SEQ ID NO: 3061 - DNA, 1376 bp, Homo sapiens
atcggccattttgtgcgagaagccgcagcgccgcctcttctctcgcgccctcgcctcttcctccgcctcctccttcgcctcttcctgcctcctcccggcttccgccgccgccactccagcctaatcccaaccccagggcgaagcgttttcttatttatttccgttttctcgccactacagcctcctgacaaggtgatccgggcgggccccgcaggaattttatcccctcaccggcctcacactagtatcgcatgtccactatccagaacctccaatctttcgacccctttgctgatgcaactaagggtgacgacttactcccggcagggactgaggattacattcatataagaatccagcaacggaacggcagaaagacactgactactgttcagggcattgcagatgattatgacaaaaagaaacttgtgaaagctttcaaaaagaaatttgcctgtaatggtactgtgattgaacatcctgaatacggagaggttattcagcttcaaggtgaccaaagaaaaaacatctgccagtttctcttggaggtgagtgattgggtgctttatgtgtaaccttgagattgcttttaaaattgtatttaaaggcaacatgatttgttttctactaagtaaaaaatcatacgaatgaaggaaattaggtgaaataaagacatggtagttatttggaaagcaaagacctttatctggtttattttgtcattagagtattctgatcatttctttatatacacacacaggctatttcttggcatgtaaagtattcaaatacgtgttgaattgttggctatcagcagtgcatgccacagacaacagtgttgcagtaagctgttgatagtgattctttttaattactcttccatgttttcttaatgaatttttatatttctcagagttattttgctaaattagattttattttacaggttggcattgtaaaggaggaacagcttaaggttcatggattctaaaatgaacctaaatacgtggagaatttcttgaatagttttgttctctaaacccggtttggctgccttgtgaaatgattccctgcagtaaacggacttttcatttatttaatcattcaaacttccattcacatctgcatgattacagaaaacatggggtatgtagactagtaacacataagaaaattgcagtaagatggtaacaaaacctcatattgtctttacatgtttccaatggaaaatgttttgagtgtttattgttcagtttattacgtttcacttgattaaatttttttgttgttgtattaaaccatgtacgttgcagcttaacaataaaaaaaaatctatgaatctttgtgagcaattatgctcccaaatctaagcaagt

SEQ ID NO: 3062 - protein, 107 aa, Homo sapiens
MSTIQNLQSFDPFADATKGDDLLPAGTEDYIHIRIQQRNGRKTLTTVQGIADDYDKKKLVKAFKKKFACNGTVIEHPEYGEVIQLQGDQRKNICQFLLEVSDWVLYV

SEQ ID NO: 3063 - DNA, 700 bp, Homo sapiens
gttttctaaatctttttctcattagaggaccatattgaacgataacattatttatctataacagcgtttttctacaatggacatagctgttcaaatgtttctctttttgtgagagtatcttgggggttttattaatactccacccccatctccattcctaccggcaaaaacagcaaaggcactagaaccttcattgatgactgtctggattggtagtataatgtatttctggaaagtacttcttaaaaaatatttttctactttggattttttttttttttttatccattcgcagacccctttgctgatgcaactaagggtgacgacttactcccggcagggactgaggattacattcatataagaatccagcaacggaacggcagaaagacactgactactgttcagggcattgcagatgattatgacaaaaagaaacttgtgaaagctttcaaaaaggtaaagggattaggaagaaaggattagagttactgatgcacacctctgaactggattatgattcacacctttatatcggcgtggatgaaaataactagaccaagaaagttgttctcatttttgtaattaacatgtaaatatttagttattctcccagtgtggtctctcattttaaaagaagattcgcgttgttttaaaattgtatttaaaggcaacatgatttgttttctactaagtaaaa

SEQ ID NO: 3064 - protein, 55 aa, Homo sapiens
MTVWIGSIMYFWKVLLKKYFSTLDFFFFFIHSQTPLLMQLRVTTYSRQGLRITFI

SEQ ID NO: 3065 - DNA, 539 bp, Homo sapiens
gatgacgtcagttacaaatatggcgttttggacgggctcgatagtttgcttggcctctactcaaggaatgctgatggtatagcaagaaggtattctgagcattatatcaatggggaagttctagatcttttgcaaagcaggagttatacaatgcctcctcgtctctttcttgctctaaagattgggactgccccacaagttcaaagtccaatcaggtgctggaactcataggctgaagggaagagaatcaggaaaggtgctcttcatgaaatccagagggaagttttccttaagccttttaatcccacccactttggactcacacaggaagtgattactacagagcttgtctatgggtcccaggatgaggggtgctttctttcccatctaatgtaaattattttcttggcactagctcagctctcagcagatgttatctatttaggcagcacttgaatgtggctgttaatataaatttctgctttaccatttccacagcacccctcaacagggtgctactatacaatattacagatgaa

SEQ ID NO: 3066 - protein, 45 aa, Homo sapiens
ALYQWGSSRSFAKQELYNASSSLSCSKDWDCPTSSKSNQVLELIG

SEQ ID NO: 3067 - DNA, 2826 bp, Homo sapiens
atacccggcgccgcctcccggcgtctgagctgacacctccttagcgctggccgcgggccgcctctgcggcagcgctagtcgccttctccgaatcggctccgcacagctaggagaaaagatgttcactgtgctgacccgccaaccatgtgagcaagcaggcctcaaggccctctaccgaactccaaccatcattgccttggtggtcttgcttgtgagtattgtggtacttgtgagtatcactgtcatccagatccacaagcaagaggtcctccctccaggactgaagtatggtattgtgctggatgccgggtcttcaagaaccacagtctacgtgtatcaatggccagcagaaaaagagaataataccggagtggtcagtcaaaccttcaaatgtagtgtgaaaggctctggaatctccagctatggaaataacccccaagatgtccccagagcctttgaggagtgtatgcaaaaagtcaaggggcaggttccatcccacctccacggatccacccccattcacctgggagccacggctgggatgcgcttgctgaggttgcaaaatgaaacagcagctaatgaagtccttgaaagcatccaaagctacttcaagtcccagccctttgactttaggggtgctcaaatcatttctgggcaagaagaaggggtatatggatggattacagccaactatttaatgggaaatttcctggagaagaacctgtggcacatgtgggtgcacccgcatggagtggaaaccacgggtgccctggacttaggtggtgcctccacccaaatatccttcgtggcaggagagaagatggatctgaacaccagcgacatcatgcaggtgtccctgtatggctacgtatacacgctctacacacacagcttccagtgctatggccggaatgaggctgagaagaagtttctggcaatgctcctgcagaattctcctaccaaaaaccatctcaccaatccctgttaccctcgggattatagcatcagcttcaccatgggccatgtatttgatagcctgtgcactgtggaccagaggccagaaagttataaccccaatgatgtcatcacttttgaaggaactggggacccatctctgtgtaaggagaaggtggcttccatatttgacttcaaagcttgccatgatcaagaaacctgttcttttgatggggtttatcagccaaagattaaagggccatttgtggcttttgcaggattctactacacagccagtgctttaaatctttcaggtagcttttccctggacaccttcaactccagcacctggaatttctgctcacagaattggagtcagctcccactgctgctccccaaatttgatgaggtatatgcccgctcttactgcttctcagccaactacatctaccacttgtttgtgaacggttacaaattcacagaggagacttggccccaaatacactttgaaaaagaagtggggaatagcagcatagcctggtctcttggctacatgctcagcctgaccaaccagatcccagctgaaagccctctgatccgtctgcccatagaaccacctgtctttgtgggcaccctcgctttcttcacagcggcagccttgctgtgtctggcatttcttgcatacctgtgttcagcaaccagaagaaagaggcactccgagcatgcctttgaccatgcagtggattctgactgagccttcaaagcagctcctggagtccaatggctgcttagagtcagcctgggtggcaccaggcaatgcaggtgaagtggctgccttcaggaaatacaactaactaaaatcaaacacctaggtcacgtgcctctcaaatactgatttctgccacagcacctcttgaggcatcccttggctattctgtgcatattgttcttcagagacctcactacccacatgctgatctattggggaacagagaagagacaggccacgaaggtcaggctctttatattaagttccccagaggaagagtaagttgagaaggtatcagtttaatgttgaagaattgacctcagggctcagtttccatttccctccctcagtattcttcctggcaagatacccattaagcatttcgccaatcagaatctcattttatagtttttcccattggtctttaactaagactttcttgtagcaatctcgtaagcagtgaaccccctcagatcagtagaatatagtatctgggggagaagacttacttccttcagggcagcagccacagccaggcttctgtcatacaggtagatcccgaagcacagagacataaaaaaggtctcccagaaaactatagaccattctccaagtggaattcccacttagggctctggtcactagattgcaacctgtgtgtttgtcatcatcctcatctcaccattgtattgctatgccctcccataaaaacacattgatccctagcaagattattgcattccagattttactgcctttgctaggcttttgcttagcaaagggctgactttccattgttatcatggtgtatatatttttgtcaccattcccacaagtatacttgatgttgtcatagaacgaacatcctactctatgatttactaaccaattactttcccagatcatagacctctctgcatagtagtcataggtcttgactttggggaaagaaaaggaagctgcaggaatatttatctccaaagtcgaatgagaaagaactccagcaaatccaatggctacaaactaaaaatcagcattatttcatattgctgtttcttagctgaatatggaataaagaactattattttattttgacttgcaa

SEQ ID NO: 3068 - protein, 529 aa, Homo sapiens; identical to SEQ ID NO: 335

SEQ ID NO: 3069 - DNA, 2036 bp, Homo sapiens
atcaagatggccgcctgggaccgctctcagccccttcggcctctacctgaagagccacgccccgtctgctacacccaactgattggttcctcaatcacagagaggaaaggcaacatgaggatgacgtcagttacaaatatggcgttttggacgggctcgatagtttgcttggcctctactcaaggaatgctgatggtatagcaagaaggtattctgagcattatatcaatggggaagttctagatcttttgcaaagcaggagagtcatcctagggcatccagaggccttcagggtggcctgaagtctcccaccgcaccacctttgggttaacctagcctgtcccacagaagatgatgaagttgggtctggaggcaagctgactcagatggattctcgattttatgatgctggactggagatgggtttcaccatgttgcccaagctagtctcgaactcgtggactcaagcaatccacctgcctcagcctcccaaagtgccttacaggcgtgagccaccgcacctggctgaactggtaaatctttgatagctatctgcaactcttggttacaaattttagctttgaagtcagaagtcaaagcaagactacacagtccttggagaaggtgtcagtcactaccctcaatttgtagcctcaaatatcacaaacccagcatgtccagaccttctcccttgcgtcttacactaacttctcctggcttcagccagagatggggggaaaggattttctgctcttctaactcatggttttggaataattgatttcttcccctttatgctcatttcttccctttgttgccagtcccttcacacttaccttcagtcctggagggaggacctcttgcttgtggatctggatgacagtgatactcacaagtaccacaatactcacaagcaagaccaccaaggcaatgatggttggagttcggtagagggccttgaggcctaaaatgagaagacccagaagacacttgagggggaggtaaaaaccaggcactggtattctttgtagaattgatggactggccccataatcaggtgcataaaccaccttctctggtgttagcgagacccacacttctaagatggagtagcaaataagctccccttctccccagttttggggaagcacaaacaatacctatttgcccttcctcacaaattgtgtactaaaacagtgttgcagggagggtatgcatggtctagttttctgatattttggttatccctgagatgaattacaataacatttgttttacttttttctttttcttttctttttttttttttttgagatggagtctcactctatcgcccaggttagagtgctgtgccgtgatcttggctcactgcagcttccaactcccaggttcaagcgattcttctgcctctgcctcctgaatagctgagattacaggtgcctgctaccacggcagccaatttttgtatttttaatagagacagggtttcaccatgttggccaggctggtctcgaactcctgggctcaagtgatctgcctgtctcggtctcccaaagtgctgggattacaggtgtgagccaccacgcccagctaacattagttttaatggagattcaaaaaatctatttttaaaaaattaaaccaggtgatagaatatttcacttaaaaataatctcatagaatatttcatttaaaaataatctcagttaaagaaaaagaaattaggctgggcagatggctgacccctgtaatcccagcactttgggaggccgaagtgggtggatcacttgaggtcaggagttcaagaccagcctggccaatatggtgaaaccatgtctctaccaagaaatacaaaaattagccaggtgtgatcatatgcgcctgtagtcccagctactcgggagactgaggtgggagaattgcttgaagccaggaggtggaggttgcaatgagttgagatcaaactactacacaccagcctgggtgacagaataagaccttgtctcaataaaataaaataaaaataaaaaaattag

SEQ ID NO: 3070 - protein, 64 aa, Homo sapiens
MAAWDRSQPLRPLPEEPRPVCYTQLIGSSITERKGNMRMTSVTNMAFWTGSIVCLASTQGMLMV

SEQ ID NO: 3071 - DNA, 863 bp, Homo sapiens
gtcagttacaaatatggcgttttggacgggctcgatagtttgcttggcctctactcaaggaatgctgatggtatagcaagaaggtattctgagcattatatcaatggggaagttctagatcttttgcaaagcaggagagtcatcctagggcatccagaggccttcagggtggcctgaagtctcccaccgcaccacctttgggttaacctagcctgtcccacagaagatgatgaagttgggtctggaggcaagctgactcagatggattctcgattttatgatgctggactggagatgggtttcaccatgttgcccaagctagtctcgaactcgtggactcaagcaatccacctgcctcagcctcccaaagtgccttacaggcgtgagccaccgcacctggctgaactgtcccttcacacttaccttcagtcctggagggaggacctcttgcttgtggatctggatgacagtgatactcacaagtaccacaatactcacaagcaagaccaccaaggcaatgatggttggagttcggtagagggccttgaggcctaaaatgagaagacccagaagacacttgagggggaggtaaaaaccaggcactggtattctttgtagaattgatggactggccccataatcaggtgcataaaccaccttctctggtgttagcgagacccacacttctaagatggagtagcaaataagctccccttctccccagttttggggaagcacaaacaatacctatttgcccttcctcacaaattgtgtactaaaacagtgttgcagggagggtatgcatggtctagttttctgatattttggttatccctgagatgaattacaataacatttgtttt

SEQ ID NO: 3072 - protein, 97 aa, Homo sapiens
MDSRFYDAGLEMGFTMLPKLVSNSWTQAIHLPQPPKVPYRREPPHLAELSLHTYLQSWREDLLLVDLDDSDTHKYHNTHKQDHQGNDGWSSVEGLEA

SEQ ID NO: 3073 - DNA, 1602 bp, Homo sapiens
ggcacgttgagagtgatgccaggaatcaagatggccgcctgggaccgctctcagccccttcggcctctacctgaagagccacgccccgtctgctacacccaactgattggttcctcaatcacagagaggaaaggcaacatgaggatgacgtcagttacaaatatggcgttttggacgggctcgatagtttgcttggcctctactcaaggaatgctgatggtatagcaagaaggtattctgagcattatatcaatggggaagttctagatcttttgcaaagcaggagcaagctgccctgttgtgagctctccggtggagagccccacatggcaagaaaatgagaagccccctgaacagacaagagctgaggcccaggatacaatatcctgaaaaaaactgaatcctgctgacagttgcccaagtgaagctggaagtggatctttctgcagtggatccttgagatgactgtagccctggctgacaacttgattgctgcctgtgaaggaccctgaaccagaggactcagcgaaattgtgcccagattcctgacctacagaggcagtgagataataaatgctgttgaggtcacaaagttttgaggtatttgttaatacagcaatggatacttaatacagcttcctacatggtctccctccttcgacctttacactacaatctgtcgtccacacagcagtcagagatccttttaaaacataagtcagatcatcatgacactcacctccctgctaagtgtcctgcaaggcctttcacggtctgatcccctatcctttctctttcctcatctcctatcactcttgcccttgcaaattttcttccagcactctggcctccttgctgttcttcagtatggcaagcaacctgctgcccggagcccacacactgactgtcccctctcctaggacactcttccctcaagggctcccatatcttgcctgctggctcctgcatcttcttcaagtctgctcaaatgtcaccttctcagtgaggcccatcctggctatcctctttcagttctgacagaaaataatttattgctttattacatcattattttgttgtcttccctccgtctgttcctactaaaatttaatctctgagaaagcagaaaacgttgtcttgttctttcctgtaacccaagtgccttgaacattgcctcattaattgcttgcgctcagtaatatgtgttgaataaatgggttaagtagtttattaattgtgaaactaaatcctgtctgaaaggtttggagcagcttgttgaaatagcaaatggagattctgtgttttaagttgtggctaaggtagaatcatccatgatgtatgtggagccagctcctgtgtcctggacttaaacatctgtatctgacgtgtgggtaattatattgctatcctacacctttgacccattcatctcggctcacctgtgatccaggctatgctactaaagttgggtgagagagtctgcaacacaaggaaaacatagagccatcatttagtaaatcaaacccataataatacattttgttgttaaatgtagccaatctctgagtattttttattaaagtatctctaatgtttaaaaac

SEQ ID NO: 3074 - protein, 69 aa, Homo sapiens
MPGIKMAAWDRSQPLRPLPEEPRPVCYTQLIGSSITERKGNMRMTSVTNMAFWTGSIVCLASTQGMLMV

SEQ ID NO: 3075 - DNA, 424 bp, Homo sapiens
gatgccaggaatcaagatggccgcctgggaccgctctcagccccttcggcctctacctgaagagccacgccccgtctgctacacccaactgattggttcctcaatcacagagaggaaaggcaacatgaggatgacgtcagttacaaatatggcgttttggacgggctcgatagtttgcttggcctctactcaagcaagctgccctgttgtgagctctccggtggagagccccacatggcaagaaaatgagaagccccctgaacagacaagagctgaggcccaggatacaatatcctgaaaaaaactgaatcctgctgacagttgcccaagtgaagctggaagtggatctttctgcagtggatccttgagatgactgtagccctggctgacaacttgattgctgcctgtgaaggaccctgaacca

SEQ ID NO: 3076 - protein, 98 aa, Homo sapiens
MPGIKMAAWDRSQPLRPLPEEPRPVCYTQLIGSSITERKGNMRMTSVTNMAFWTGSIVCLASTQASCPVVSSPVESPTWQENEKPPEQTRAEAQDTIS

SEQ ID NO: 3077 - DNA, 839 bp, Homo sapiens
acatgcgcagggttgggcgggtcttcttccttctcgcctaacgccgccaacatggtgttcaggcgcttcgtggaggttggccgggtggcctatgtctcctttggacctcatgccggaaaattggtcgcgattgtagatgttattgatcagaacagggctttggtcgatggaccttgcactcaagtgaggagacaggccatgcctttcaagtgcatgcagctcactgatttcatcctcaagtttccgcacagtgcccaccagaagtatgtccgacaagcctggcagaaggcagacatcaatacaaaatgggcagccacacgatgggccaagaagattgaagccagagaaaggaaagccaagatgacagattttgatcgttttaaagttatgaaggcaaagaaaatgaggaacagaataatcaagaatgaagttaagaagcttcaaaaggcagctctcctgaaagcttctcccaaaaaagcacctggtactaagggtactgctgctgctgctgctgctgctgctgctgctaaagttccagcaaaaaagatcaccgccgcgagtaaaaaggctccagcccagaaggttcctgcccagaaagccacaggccagaaagcagcgcctgctccaaaagctcagaagggtcaaaaagctccagcccagaaagcacctgctccaaaggcatctggcaagaaagcataagtggcaatcataaaaagtaataaaggttctttttgacctgttgacaaatgtatttaagcctttggatttaaagcctgttgaggctggagttaggaggcagattgatagtaggattataataaacattaaataatcagttc

SEQ ID NO: 3078 - protein, 215 aa, Homo sapiens [sequence omitted]

SEQ ID NO: 3079 - DNA, 771 bp, Homo sapiens
ctgagcactacaggcactgtgggacgtgtattaacacataatggattttgaagtactggtagttgaaaacatgccacttgaacaacctcgagtgaacatagccatgctgctactactgtgacataccaattaggggtgaagcttgaggatacttgtcaaagttcaaagcagtagaaaatacttggtaacttagatttttcactaggtactcttgtaattctgccttggatccctggacaccctggattttatttttaggatgtttggccacaaattgttactgtaaatttttttttaaaaaaaagcctaacagttaatattaattaccttgtttgttacgagaatgaatggctcggatgtgtgagccactgcgcctggtcaagaggtagtttttaaattcataaaatgggctgggctgggtgcagtggctcatacctgtaatcccagcacttcaggaggccaaggtggagggttgcttgagcccaggagttggagaccagcctgggcaacgtagcaagaccctgtctctacaaaaaatataaaaattagctgggtgtgctggtatgcacctgtagtcccagctacttgggaggctgaggcaggaggatggcttgagcctagaaggttgaggctacagtgagccatgatcatactattgcattccagcctgggtggcaagcaagatcctctctcaaaaaaaaaaagggactggattacagttttgattaaaatatgcttgaagttaataacctattctggcttactgaacac

SEQ ID NO: 3080 - protein, 41 aa, Homo sapiens
MIILLHSSLGGKQDPLSKKKRDWITVLIKICLKLITYSGLL

SEQ ID NO: 3081 - DNA, 1111 bp, Homo sapiens
aagaggtagtttttaaattcataaaatgggctggggactggattacagttttgattaaaatatgcttgaagttaataacctattctggcttactgaacacaaaaataagtaaaatacatagtgtaccaggtgttgtgtaacaggaagagtgcttttcaaggaacaaagaaagtgtctttgataatgagtgacttcaaagctgatttcttaatctgtggtcttggctcgttctagtgcccaccagaagtatgtccgacaagcctggcagaaggcagacatcaatacaaaatgggcagccacacgatgggccaagaagattgaagccagagaaagggtaataacttagggtcatttgaattctggtcctttctttttttggagggttcaagatagtgtgagagggataatttttatttgttgttttttttttaacagaaagccaagatgacagattttgatcgttttaaagttatgaaggcaaagaaaatggtaagatttaagatctgtatttttgtgtaacttagctttaaataataagggagcagtagccaaatcccatttcaggctgccagcttcttggaagctttctgtaaaaaaggagaatttatcttcatttgtatttcatgatgtccctatggaattgttacctttcttcagatgtagttgtagggaaacagactacttaatgccctttctaaaaccagcataaattggattttattgtatgtatacacaataagtgctttcttacattgataattttcagaggaacagaataatcaagaatgaagttaagaagcttcaaaaggcagctctcctgaaagcttctcccaaaaaagcacctggtactaagggtactgctgctgctgctgctgctgctgctgctgctaaagttccagcaaaaaagatcaccgccgcgagtaaaaaggctccagcccagaaggttcctgcccagaaagccacaggccagaaagcagcgcctgctccaaaagctcagaagggtcaaaaagctccagcccagaaagcacctgctccaaaggcatctggcaagaaagcataagtggcaatcataaaaagtaataaaggttctttttgacctgttgacaaatgt

SEQ ID NO: 3082 - protein, 45 aa, Homo sapiens
EVVFKFIKWAGDWITVLIKICLKLITYSGLLNTKISKIHSVPGVV

SEQ ID NO: 3083 - DNA, 1200 bp, Homo sapiens
aagaggtagtttttaaattcataaaatgggctggggactggattacagttttgattaaaatatgcttgaagttaataacctattctggcttactgaacacaaaaataagtaaaatacatagtgtaccaggtgttgtgtaacaggaagagtgcttttcaaggaacaaagaaagtgtctttgataatgagtgacttcaaagctgatttcttaatctgtggtcttggctcgttctagtgcccaccagaagtatgtccgacaagcctggcagaaggcagacatcaatacaaaatgggcagccacacgatgggccaagaagattgaagccagagaaagggtaataacttagggtcatttgaattctggtcctttctttttttggagggttcaagatagtgtgagagggataatttttatttgttgttttttttttaacagaaagccaagatgacagattttgatcgttttaaagttatgaaggcaaagaaaatggtaagatttaagatctgtatttttgtgtaacttagctttaaataataagggagcagtagccaaatcccatttcaggctgccagcttcttggaagctttctgtaaaaaaggagaatttatcttcatttgtatttcatgatgtccctatggaattgttacctttcttcagatgtagttgtagggaaacagactacttaatgccctttctaaaaccagcataaattggattttattgtatgtatacacaataagtgctttcttacattgataattttcagaggaacagaataatcaagaatgaagttaagaagcttcaaaaggcagctctcctgaaagcttctcccaaaaaagcacctggtactaagggtactgctgctgctgctgctgctgctgctgctgctaaagttccagcaaaaaagatcaccgccgcgagtaaaaaggctccagcccagaaggttcctgcccagaaagccacaggccagaaagcagcgcctgctccaaaagctcagaagggtcaaaaagctccagcccagaaagcacctgctccaaaggcatctggcaagaaagcataagtggcaatcataaaaagtaataaaggttctttttgacctgttgacaaatgtatttaagcctttggatttaaagcctgttgaggctggagttaggaggcagattgatagtaggattataataaacattaaataatcagttc

SEQ ID NO: 3084 - protein, 45 aa, Homo sapiens; identical to SEQ ID NO: 3082

SEQ ID NO: 3085 - DNA, 536 bp, Homo sapiens
agctgatttcttaatctgtggtcttggctcgttctagtgcccaccagaagtatgtccgacaagcctggcagaaggcagacatcaatacaaaatgggcagccacacgatgggccaagaagattgaagccagagaaaggaaagccaagatgacagattttgatcgttttaaagttatgaaggcaaagaaaatgaggaacagaataatcaagaatgaagttaagaagcttcaaaaggcagctctcctgaaagcttctcccaaaaaagcacctggtactaagggtactgctgctgctgctgctgctgctgctgctgctaaagttccagcaaaaaagatcaccgccgcgagtaaaaaggctccagcccagaaggttcctgcccagaaagccacaggccagaaagcagcgcctgctccaaaagctcagaagggtcaaaaagctccagcccagaaagcacctgctccaaaggcatctggcaagaaagcataagtggcaatcataaaaagtaataaaggttctttttgacctgttgacaaatgt

SEQ ID NO: 3086 - protein, 112 aa, Homo sapiens
MTDFDRFKVMKAKKMRNRIIKNEVKKLQKAALLKASPKKAPGTKGTAAAAAAAAAAKVPAKKITAASKKAPAQKVPAQKATGQKAAPAPKAQKGQKAPAQKAPAPKASGKKA

SEQ ID NO: 3087 - DNA, 354 bp, Homo sapiens
gccaagaagattgaagccagagaaaggaatgaagttaagaagcttcaaaaggcagctctcctgaaagcttctcccaaaaaagcacctggtactaagggtactgctgctgctgctgctgctgctgctgctgctaaagttccagcaaaaaagatcaccgccgcgagtaaaaaggctccagcccagaaggttcctgcccagaaagccacaggccagaaagcagcgcctgctccaaaagctcagaagggtcaaaaagctccagcccagaaagcacctgctccaaaggcatctggcaagaaagcataagtggcaatcataaaaagtaataaaggttctttttgacctgttgacaaatgt

SEQ ID NO: 3088 - protein, 100 aa, Homo sapiens
AKKIEARERNEVKKLQKAALLKASPKKAPGTKGTAAAAAAAAAAKVPAKKITAASKKAPAQKVPAQKATGQKAAPAPKAQKGQKAPAQKAPAPKASGKKA

SEQ ID NO: 3089 - DNA, 443 bp, Homo sapiens
gccaagaagattgaagccagagaaaggaatgaagttaagaagcttcaaaaggcagctctcctgaaagcttctcccaaaaaagcacctggtactaagggtactgctgctgctgctgctgctgctgctgctgctaaagttccagcaaaaaagatcaccgccgcgagtaaaaaggctccagcccagaaggttcctgcccagaaagccacaggccagaaagcagcgcctgctccaaaagctcagaagggtcaaaaagctccagcccagaaagcacctgctccaaaggcatctggcaagaaagcataagtggcaatcataaaaagtaataaaggttctttttgacctgttgacaaatgtatttaagcctttggatttaaagcctgttgaggctggagttaggaggcagattgatagtaggattataataaacattaaataatcagttc

SEQ ID NO: 3090 - protein, 100 aa, Homo sapiens; identical to SEQ ID NO: 3088

SEQ ID NO: 3091 - DNA, 400 bp, Homo sapiens
gaaagccaagatgacagattttgatcgttttaaagttatgaaggcaaagaaaatgaggaacagaataatcaagaatgaagttaagaagcttcaaaaggcagctctcctgaaagcttctcccaaaaaagcacctggtactaagggtactgctgctgctgctgctgctgctgctgctgctaaagttccagcaaaaaagatcaccgccgcgagtaaaaaggctccagcccagaaggttcctgcccagaaagccacaggccagaaagcagcgcctgctccaaaagctcagaagggtcaaaaagctccagcccagaaagcacctgctccaaaggcatctggcaagaaagcataagtggcaatcataaaaagtaataaaggttctttttgacctgttgacaaatgt

SEQ ID NO: 3092 - protein, 112 aa, Homo sapiens; identical to SEQ ID NO: 3086

SEQ ID NO: 3093 - DNA, 489 bp, Homo sapiens
gaaagccaagatgacagattttgatcgttttaaagttatgaaggcaaagaaaatgaggaacagaataatcaagaatgaagttaagaagcttcaaaaggcagctctcctgaaagcttctcccaaaaaagcacctggtactaagggtactgctgctgctgctgctgctgctgctgctgctaaagttccagcaaaaaagatcaccgccgcgagtaaaaaggctccagcccagaaggttcctgcccagaaagccacaggccagaaagcagcgcctgctccaaaagctcagaagggtcaaaaagctccagcccagaaagcacctgctccaaaggcatctggcaagaaagcataagtggcaatcataaaaagtaataaaggttctttttgacctgttgacaaatgtatttaagcctttggatttaaagcctgttgaggctggagttaggaggcagattgatagtaggattataataaacattaaataatcagttc

SEQ ID NO: 3094 - protein, 112 aa, Homo sapiens; identical to SEQ ID NO: 3086

SEQ ID NO: 3095 - DNA, 254 bp, Homo sapiens
aatcaagaatgaagttaagaagcttcaaaaggcagctctcctgaaagcttctcccaaaaaagcacctggtactaagggtactgctgctgctgctgctgctgctgctgctgctaaagttccagcaaaaaagatcaccgccgcgaggtcaaaaagctccagcccagaaagcacctgctccaaaggcatctggcaagaaagcataagtggcaatcataaaaagtaataaaggttctttttgacctgttgacaaatgt

SEQ ID NO: 3096 - protein, 73 aa, Homo sapiens
IKNEVKKLQKAALLKASPKKAPGTKGTAAAAAAAAAAKVPAKKITAARSKSSSPESTCSKGIWQESISGNHKK

SEQ ID NO: 3097 - DNA, 339 bp, Homo sapiens
aatcaagaatgaagttaagaagcttcaaaaggcagctctcctgaaagcttctcccaaaaaagcacctggtactaagggtactgctgctgctgctgctgctgctgctgctgctaaagttccagcaaaaaagatcaccgccgcgaggtcaaaaagctccagcccagaaagcacctgctccaaaggcatctggcaagaaagcataagtggcaatcataaaaagtaataaaggttctttttgacctgttgacaaatgtatttaagcctttggatttaaagcctgttgaggctggagttaggaggcagattgatagtaggattataataaacattaaataatca

SEQ ID NO: 3098 - protein, 73 aa, Homo sapiens; identical to SEQ ID NO: 3096

SEQ ID NO: 3099 - DNA, 769 bp, Homo sapiens
tttttttttttttttttttgagatggagtctcgttctgttgctcaggccggactgcagtggcgctatctcggctcactgtaagttccacctcccgggttcatgccattctccctgtctctactaaaaatcaaaaaaaaaaaaaaaaaaatggctgatttcagagtcatattcaggtttaaattctgtcattcagcccaaactcattactttatgttacttatgggaacctcatctaaaaagcaaggatcctgatacctgcctcatattgtggcaaggatcaaatgagtcaaataagatgcttgtgaaagtgaggacaggatctatcctcaacacctagtgcaattctttttacacattaggtacttagtaatttgggttgaattgtgttgaactaacctggcggtataggcaaaatttggaagtttggttttcagaaagtcttgacttcctcttatctctaagtaattggcatgtcctctaattcatattttcccccctcatctgttgggtgaaatactgtttatcctttagtactaaaattaaaagttacctcattcttctagctagctgatttttttttttaatctaggctaaatcatgaatacatttacatttaaataaaatattacagttgaaagtaaagggtcctttcattatctccacttccaattccagtaccctgtgtaaaggaaaacatatacatcttgcagacattttttaatgtgtttgtaatataggtacataaaaatatatgtgcttgttttaagc

SEQ ID NO: 3100 - protein, 50 aa, Homo sapiens [sequence omitted]

SEQ ID NO: 3101 - DNA, 568 bp, Homo sapiens
agctaatgcttccgtcttggccaccttgcgagcgctcgggttgagtttcccgggcttccctgactcggctacctgttctggaggtcaggctttgggcccttgcagaggtcgccgaggggcccgcgccgccgccagagcctgggcccagtccccagtcttcagagacgccctcgaccttcctgctccgaggagctggcctgatgtcctcgggtcgcgctccgcaggttcttactttttcaaacctagagggcagtgcatgaagccaggggtcatcagccatgctccagacagtgtggttccagggcttgggcaggaacctgttgtttcaggagccagtaacctttgaggatgtggctgtgtacttcacccagaatgaatgggccagcctgcaccctacgcagagggccctatacagggaggtgatgctggagaattatgcaaatgtgacttccttgtgtaagtcctccttcctctctgaaactcagcttctgcccttgggagctcctagattcctccttagcagaactaggatctctttaataccatcagaattgatgccctatgggct

SEQ ID NO: 3102 - protein, 95 aa, Homo sapiens
MLQTVWFQGLGRNLLFQEPVTFEDVAVYFTQNEWASLHPTQRALYREVMLENYANVTSLCKSSFLSETQLLPLGAPRFLLSRTRISLIPSELMPY

SEQ ID NO: 3103 - DNA, 2416 bp, Homo sapiens
agctaatgcttccgtcttggccaccttgcgagcgctcgggttgagtttcccgggcttccctgactcggctacctgttctggaggtcaggctttgggcccttgcagaggtcgccgaggggcccgcgccgccgccagagcctgggcccagtccccagtcttcagagacgccctcgaccttcctgctccgaggagctggcctgatgtcctcgggtcgcgctccgcaggttcttactttttcaaacctagagggcagtgcatgaagccaggggtcatcagccatgctccagacagtgtggttccagggcttgggcaggaacctgttgtttcaggagccagtaacctttgaggatgtggctgtgtacttcacccagaatgaatgggccagcctgcaccctacgcagagggccctatacagggaggtgatgctggagaattatgcaaatgtgacttccttgtcagcatttccattccccaaaccagatctgatattccagctggagcaaggagaagcagcatggggcccagatccctggacacttgctgggggagaggccctgagaggcatgtgcacaggctggagtgcaatggcgtgatcttcactcaccgcaacctctgccttccaggtggtaaaaccaagactgagaatgaggaaaaaactgcacagctaaacatttctaaagaatcagagtcccacagactgatagtggagggactgctgatggacgttccccagcaccctgacttcaaggacaggttagagaagtcacagctacatgatacagggaataaaacaaagataggggattgcacagatttgacagtccaggatcatgaatcttccaccactgaaagggaggagatagccaggaaattggaagaaagtagtgtcagcacacatctcattacaaagcagggttttgccaaagaacaggtgttttataaatgtggtgagtgtggcagttactacaacccacattcagactttcacctgcatcagagagttcacactaatgagaagccctacacatgcaaagaatgtgggaaaaccttcagatataactcaaaactgtcacggcatcagaaaatccacactggagagaaaccatactcatgtgaggaatgtggacaagccttcagtcaaaattcccaccttcttcagcatcagaagctccatggtggacagaggccctatgaatgtactgactgtggtaaaaccttcagttataattcaaaactgattcggcatcagagaatccatactggggagaagccctttaaatgtaaggaatgtgggaaagccttcagttgtagctatgactgcatcatccatgaacgaattcacaatggggagaagccctatgaatgtaaggagtgtgggaagagtttgagttctaattcagttctgattcagcatcagagaatccacactggggagaaaccttatgaatgtaaagagtgtggcaaggccttccaccgcagttcggtatttcttcagcaccagaggttccacactggggaacaactctacaaatgtaatgaatgttggaaaactttcagctgtagctcccgcttcatagtgcatcagagaatccacaatggggagaaaccctatgaatgccaggaatgtgggaagacattcagtcaaaagatcactctggttcagcatcagcgagttcacactggggagaaaccttatgagtgtaaggagtgcgggaaagccttcagatggaatgcaagtttcatccagcatcagaagtggcatactaggaagaaactcatcaatggaacagggctatccgcagttaagccctactgtccctgcgccatcctctctcctctgcctccccaacatacctgctctgccctagccccaccagggcctcccttatcttcttcacatgcagtggtacttcctccctctgtgcctttcttcctgctgcttccctcatctgaaaaggccaacccttcacctgtccaaatagcacatttttttcaggatctcgcttttcctgggaagtcatcccttcagagcccgaatcctttgtctcactccctgtaagccccgtcacgttctcaaaatcctttgcacctcaagttagggattccactggtctcctgattgtgtctattgatattcctctggtcttgtcttgtataagttgttactgttttcctaacttcattttaaattctcacgcttaaggaccatgtttgattagtttcttttatcccccggtaggaaatggcagtacttattctttatcgtgtccacatttgggctgtattatcagtctgcatctctcttctggggctactggagttggaagagtttgcagaacattttggggtttagggcatatggcattatgattatgatgagatggggcattataattagagactaggagaaatgcaa

SEQ ID NO: 3104 - protein, 560 aa, Homo sapiens; identical to SEQ ID NO: 341

SEQ ID NO: 3105 - DNA, 928 bp, Homo sapiens
gagacaggttcttgttctgtcatccaggctggattgcagtagtgcgatcatggatcactgcagattgcttgagccctgggggcatacaccaccacacccagctaatttttgtattttttgtagagacagagttttgccatgttgcccaggctggtctcaaaactcctggactcaaatgatcctcccacttcagcctcccaaagtgctgggattacaggcttgagccaccatgtccagcctctattccttttcatatctgttgaatttcagtacccactcatatatgtaggtacaaaaagtgacttggacttgtaccctttagggtagatgcctgagtatagtaatctctaaagctgtacatggatggaacttgttggcatcacactggtgagcaccagaggcaaagaagagaaacctgaccatgacttgctgtagtttctcagaagtgagtccattcctgatgagttactatgcaggcccttggatatgtcctcacacctactccagatttccctatgattaaatctgaattttattggtggcacttttaaattagttttataaagaactgttttgatgacaccaagaaatgttttcagtgtgcagattgctattgtttgaatatccccagcaaaattcttgttgaaacttaatccccattgtaacagtactgggtggggggtctttaagaggtgatcaggattagccaagttcatcagggtggagcctccatgatgggactggtggctttatgaggagaggaagagcaactggaactgggacacatgcttgctctgtcttgccttttgatgcctcctgccatgtcatgatgcagcaagtaagcccttaccagatgcctgcacctttatattggacttcttagccttcagaactgtgaactaaataaacctctattctgtataaatta

SEQ ID NO: 3106 - protein, 57 aa, Homo sapiens [sequence omitted]

SEQ ID NO: 3107 - DNA, 557 bp, Homo sapiens
gttaaaagttatacatggcatgggggttggtgcccatatgatgggactgatggctttataagaagaggaagggagacctgagctgacatgcatgctcttgccatcttgccatgtgatgctttccatcatgttatgacacagcaagaaggccagatacggcccctccacagttcccagccctcggaaccatgagctaaataaacttcttttctttataaattacccaatctgtgatattctgttatagtaacagaaaacagactgacactgatcttaccagacattatgatctcactggtttggcctactgcctagagactgacccttctcagaatcactgcttcagggcagtataacaacatgcaaaggtttatttatttatttattattttttgagacgaagtttcactcttgttgcccaggctggagtgcaatggcgcgatcttggctcaccacaacctttgcctcccaggttcaagtaattctcctgcctcagcctcccaaagtgctgggattacaggcatgagccaccgcgcccggccacaaaggttttttaa

SEQ ID NO: 3108 - protein, 30 aa, Homo sapiens
MARSWLTTTFASQVQVILLPQPPKVLGLQA

SEQ ID NO: 3109 - DNA, 2149 bp, Homo sapiens
tcctagagaggaggggcatggaaaacgcacttccggcggagggtctcaagctttccccggtgtcggcggcaggtggaatttccacgctttatctgcgcctgcgccgcgcgggattcgcggtccgagctgaagaggttcgcggtccggtttcacttctccgaaccctgaggcagtgtgtgaagctgggacgccagccatgttccagaccgcttggcgccaggaaccagtgacctttgaggatgtggctgtgtacttcacccagaatgaatgggccagcctggactctgtgcagagggccctgtacagggaagtgatgctggagaattatgcaaatgtggcttccctggcattcccattcaccacgcctgttctggtctcccagctggagcaaggggaactgccatggggcctcgatccctgggaacctatgggcagggaggctctcagaggtatctgtccaggggatgaggccagaactgagaaggaaggattaactccaaaggatcatgtgtccaaagaaacagagtccttcagactgatggtggggggcctgccagggaatgtttcccagcaccttgactttgggagcagcctagagcagccacaaggtcattggataattaagacaaagtcaaagaggagacatttcacagatacctcagccaggcaccatgaggcctatgaggtcaagaatggagagaagtttgagaaattaggaaaaaatattagcgtcagcacacaactcactacaaatcagacaaatcctagtggtcagatatcttatgaatgtggacaatgtggcagatatttcattcaaatggcagacttccaccgacatgagaaatgtcacactggtgaaaagtcttttgaatgcaaagaatgtggaaaatacttcagatataactcattacttattcggcatcagataattcacactggaaagaaaccatttaaatgtaaagaatgtggaaaaggtttaagttcagacacagccttgattcagcatcagagaatccacactggagaaaagccctatgaatgtaaggagtgcggcaaggccttcagtagcagctctgtcttcctccagcaccagaggttccacactggggagaagctctatgaatgtaacgaatgttggaaaactttcagttgcagctcaagtttcactgtccatcagcgaatgcacactggggagaaaccttatgaatgtaaagagtgtggaaaacgattaagctccaacacagccttgactcagcatcagcgaattcacactggggagaagccctttgaatgtaaggagtgtgggaaggcattcaatcagaaaataaccctgattcagcaccagcgagttcacactggcgagaaaccttatgagtgtaaagtgtgtggtaaaaccttcagctggtgtggaagattcattctgcatcagaaactacacactcagaagacacctgtccaagcatagggctatccatagttaggcccactgtgcctctccttttttctctttattttcatgctttttatcagtgtcctcgctgtccttcctggttagacacttggctttcatcatgaactcttctttaagttttttgaacctgtttccccaacatgaagtctctttatggttagagaagaccaaaaaacaaacaaacaaacttagaaacataaaaggaaatgtaagtttccagatttaaaggacatgctgggtgcccagcaggatggattcaagggaaacctacattaaggaaaattgctgtgaattatgaaaacaccaagtttgaataagaggatcatggagaaaaaatgagaccctaaaaagtttctagagagagaaaacaaaagatcagaaatgaaagcggggccaggcgcggtggctcgtgcctgtaatcccagcactttgggaggctgaggcgggtggatcatgaggtcaggagttcgagaccagcccgcccaatatggtgaaaccccgtctctcctgaaaaaaaaaaacacaaaaattagccaggcatggtggcgcatgcctgtaatcccagctactagagaggctgaggcaggagaatcacttgaatccctgaggcagaggttgcagtgagctgagatcgcaccactgcactccagcctgggcgacagagtgagactttgtctc

SEQ ID NO: 3110 - protein, 422 aa, Homo sapiens; identical to SEQ ID NO: 343

SEQ ID NO: 3111 - DNA, 2019 bp, Homo sapiens
agctttccccggtgtcggcggcaggtggaatttccacgctttatctgcgcctgcgccgcgcgggattcgcggtccgagctgaagaggttcgcggtccggtttcacttctccgaaccctgaggcagtgtgtgaagctgggacgccagccatgttccagaccgcttggcgccaggggatgaggccagaactgagaaggaaggattaactccaaaggatcatgtgtccaaagaaacagagtccttcagactgatggtggggggcctgccagggaatgtttcccagcaccttgactttgggagcagcctagagcagccacaaggtcattggataattaagacaaagtcaaagaggagacatttcacagatacctcagccaggcaccatgaggcctatgaggtcaagaatggagagaagtttgagaaattaggaaaaaatattagcgtcagcacacaactcactacaaatcagacaaatcctagtggtcagatatcttatgaatgtggacaatgtggcagatatttcattcaaatggcagacttccaccgacatgagaaatgtcacactggtgaaaagtcttttgaatgcaaagaatgtggaaaatacttcagatataactcattacttattcggcatcagataattcacactggaaagaaaccatttaaatgtaaagaatgtggaaaaggtttaagttcagacacagccttgattcagcatcagagaatccacactggagaaaagccctatgaatgtaaggagtgcggcaaggccttcagtagcagctctgtcttcctccagcaccagaggttccacactggggagaagctctatgaatgtaacgaatgttggaaaactttcagttgcagctcaagtttcactgtccatcagcgaatgcacactggggagaaaccttatgaatgtaaagagtgtggaaaacgattaagctccaacacagccttgactcagcatcagcgaattcacactggggagaagccctttgaatgtaaggagtgtgggaaggcattcaatcagaaaataaccctgattcagcaccagcgagttcacactggcgagaaaccttatgagtgtaaagtgtgtggtaaaaccttcagctggtgtggaagattcattctgcatcagaaactacacactcagaagacacctgtccaagcatagggctatccatagttaggcccactgtgcctctccttttttctctttattttcatgctttttatcagtgtcctcgctgtccttcctggttagacacttggctttcatcatgaactcttctttaagttttttgaacctgtttccccaacatgaagtctctttatggttagagaagaccaaaaaacaaacaaacaaacttagaaacataaaaggaaatgtaagtttccagatttaaaggacatgctgggtgcccagcaggatggattcaagggaaacctacattaaggaaaattgctgtgaattatgaaaacaccaagtttgaataagaggatcatggagaaaaaatgagaccctaaaaagtttctagagagagaaaacaaaagatcagaaatgaaagcggggccaggcgcggtggctcgtgcctgtaatcccagcactttgggaggctgaggcgggtggatcatgaggtcaggagttcgagaccagcccgcccaatatggtgaaaccccgtctctcctgaaaaaaaaaaacacaaaaattagccaggcatggtggcgcatgcctgtaatcccagctactagagaggctgaggcaggagaatcacttgaatccctgaggcagaggttgcagtgagctgagatcgcaccactgcactccagcctgggcgacagagtgagactttgtctcaaaaacagtaaaaaatgaaaatggcattagatttttcaagagcaaccttcaaagtcagatgacaatgtgtatgccttcagacttctcatggaaaatgttttcccctgcaattctatactccaaagtataagtatagaataaaggcatttcagacccttt

SEQ ID NO: 3112 - protein, 308 aa, Homo sapiens
MVGGLPGNVSQHLDFGSSLEQPQGHWIIKTKSKRRHFTDTSARHHEAYEVKNGEKFEKLGKNISVSTQLTTNQTNPSGQISYECGQCGRYFIQMADFHRHEKCHTGEKSFECKECGKYFRYNSLLIRHQIIHTGKKPFKCKECGKGLSSDTALIQHQRIHTGEKPYECKECGKAFSSSSVFLQHQRFHTGEKLYECNECWKTFSCSSSFTVHQRMHTGEKPYECKECGKRLSSNTALTQHQRIHTGEKPFECKECGKAFNQKITLIQHQRVHTGEKPYECKVCGKTFSWCGRFILHQKLHTQKTPVQA

SEQ ID NO: 3113 - DNA, 421 bp, Homo sapiens
gcggtccgagctgaagaggttcgcggtccggtttcacttctccgaaccctgaggcagtgtgtgaagctgggacgccagccatgttccagaccgcttggcgccagagacaatcttactctgtctcccaggctgagtgcagtggtgcaatcacagctcactgcagcctccacctcccaggcctaagtgatcctcccaaggagttgagactaagttgagactacaggaaccagtgacctttgaggatgtggctgtgtacttcacccagaatgaatgggccagcctggactctgtgcagagggccctgtacagggaagtgatgctggagaattatgcaaatgtggcttccctggcattcccattcaccacgcctgttctggtctcccagctggagcaaggggaactgccatggggcctcgatccc

SEQ ID NO: 3114 - protein, 49 aa, Homo sapiens
MGQPGLCAEGPVQGSDAGELCKCGFPGIPIHHACSGLPAGARGTAMGPR

SEQ ID NO: 3115 - DNA, 2010 bp, Homo sapiens
gtccgagctgaagaggttcgcggtccgggtaactgattggttttcctggggcttgttctgcctggttttgcaacccctttgctttttgggtttcacttctccgaaccctgaggcagtgtgtgaagctgggacgccagccatgttccagaccgcttggcgccaggggatgaggccagaactgagaaggaaggattaactccaaaggatcatgtgtccaaagaaacagagtccttcagactgatggtggggggcctgccagggaatgtttcccagcaccttgactttgggagcagcctagagcagccacaaggtcattggataattaagacaaagtcaaagaggagacatttcacagatacctcagccaggcaccatgaggcctatgaggtcaagaatggagagaagtttgagaaattaggaaaaaatattagcgtcagcacacaactcactacaaatcagacaaatcctagtggtcagatatcttatgaatgtggacaatgtggcagatatttcattcaaatggcagacttccaccgacatgagaaatgtcacactggtgaaaagtcttttgaatgcaaagaatgtggaaaatacttcagatataactcattacttattcggcatcagataattcacactggaaagaaaccatttaaatgtaaagaatgtggaaaaggtttaagttcagacacagccttgattcagcatcagagaatccacactggagaaaagccctatgaatgtaaggagtgcggcaaggccttcagtagcagctctgtcttcctccagcaccagaggttccacactggggagaagctctatgaatgtaacgaatgttggaaaactttcagttgcagctcaagtttcactgtccatcagcgaatgcacactggggagaaaccttatgaatgtaaagagtgtggaaaacgattaagctccaacacagccttgactcagcatcagcgaattcacactggggagaagccctttgaatgtaaggagtgtgggaaggcattcaatcagaaaataaccctgattcagcaccagcgagttcacactggcgagaaaccttatgagtgtaaagtgtgtggtaaaaccttcagctggtgtggaagattcattctgcatcagaaactacacactcagaagacacctgtccaagcatagggctatccatagttaggcccactgtgcctctccttttttctctttattttcatgctttttatcagtgtcctcgctgtccttcctggttagacacttggctttcatcatgaactcttctttaagttttttgaacctgtttccccaacatgaagtctctttatggttagagaagaccaaaaaacaaacaaacaaacttagaaacataaaaggaaatgtaagtttccagatttaaaggacatgctgggtgcccagcaggatggattcaagggaaacctacattaaggaaaattgctgtgaattatgaaaacaccaagtttgaataagaggatcatggagaaaaaatgagaccctaaaaagtttctagagagagaaaacaaaagatcagaaatgaaagcggggccaggcgcggtggctcgtgcctgtaatcccagcactttgggaggctgaggcgggtggatcatgaggtcaggagttcgagaccagcccgcccaatatggtgaaaccccgtctctcctgaaaaaaaaaaacacaaaaattagccaggcatggtggcgcatgcctgtaatcccagctactagagaggctgaggcaggagaatcacttgaatccctgaggcagaggttgcagtgagctgagatcgcaccactgcactccagcctgggcgacagagtgagactttgtctcaaaaacagtaaaaaatgaaaatggcattagatttttcaagagcaaccttcaaagtcagatgacaatgtgtatgccttcagacttctcatggaaaatgttttcccctgcaattctatactccaaagtataagtatagaataaaggcatttcagacccttt

SEQ ID NO: 3116 - protein, 308 aa, Homo sapiens; identical to SEQ ID NO: 3112

SEQ ID NO: 3117 - DNA, 1302 bp, Homo sapiens
gaaaggcggggcgggtctggccacggggcgaccgagatggcggcctccgggggcctagagggaccctgggcgtgcactcgcccttccggctcggcctttagttagtgaccagctcctcggcgttctgcagagcgtgggtttcagcgagttctacgtgccagctcttgaggatcttgcttgtccaaacccagaagacagtgcatgaagccaggggacatccgccatgctccaaacaacttggcctcaggagtcagtgacctttgaggatgtggctgtttacttcacccagaatcaatgggccagcctcgaccctgcgcagagggccctgtacggggaggtgatgctggagaattatgcaaatgtggcttctctggtagcgtttccattccccaaacctgctctgatctcccacctggagagaggggaagcaccatggggcccagatccctgggacaccgagattctgagaggcatcagtcaaggtggtgagtcctggatcaaaaatgaagggctagttataaagcaggaagcctctgaagaaacagagttgcacagaatgccagtaggaggacttctcaggaacgtttctcagcactttgattttaaaaggaaggcactgaagcagactttcaatctaaatccaaatctgatacttcgaggtggaatgaagttctatgaatgtaaagaatgtgggaaaatcttccgatataactcaaagcttattcggcatcagatgagtcatactggggaaaagccctttaagtgtaaggagtgtggcaaagctttcaagtccagctatgattgtattgtacatgagaaaaaccacattggagaagggccctatgaatgtaaggagtgtggcaaaggtttgagttccaacacagccttgactcaacatcagaggatccacactggagagaaaccctatgaatgtaaagagtgtggaaaggctttccgtaggagtgcggcatacctgcagcatcagagattacacacgggagagaaactctataaatgtaaggaatgttggaaagctttcggttgtaggtcactttttattgtccatcagagaattcatactggggagaaaccttatcaatgtaaggagtgtggcaaagccttcacccagaaaatagcctccattcagcatcagagagttcacactggggagaagccttatgaatgtaaggtgtgtgggaaagccttcaaatggtatggaagttttgttcagcatcagaaattgcaccctgtggagaagaagccagtcaaggtccttgggccatccctggtcagtccccagtg

SEQ ID NO: 3118 - protein, 358 aa, Homo sapiens
MLQTTWPQESVTFEDVAVYFTQNQWASLDPAQRALYGEVMLENYANVASLVAFPFPKPALISHLERGEAPWGPDPWDTEILRGISQGGESWIKNEGLVIKQEASEETELHRMPVGGLLRNVSQHFDFKRKALKQTFNLNPNLILRGGMKFYECKECGKIFRYNSKLIRHQMSHTGEKPFKCKECGKAFKSSYDCIVHEKNHIGEGPYECKECGKGLSSNTALTQHQRIHTGEKPYECKECGKAFRRSAAYLQHQRLHTGEKLYKCKECWKAFGCRSLFIVHQRIHTGEKPYQCKECGKAFTQKIASIQHQRVHTGEKPYECKVCGKAFKWYGSFVQHQKLHPVEKKPVKVLGPSLVSP

SEQ ID NO: 3119 - DNA, 1672 bp, Homo sapiens
gaaaggcggggcgggtctggccacggggcgaccgagatggcggcctccgggggcctagagggaccctgggcgtgcactcgcccttccggctcggcctttagttagtgaccagctcctcggcgttctgcagagcgtgggtttcagcgagttctacgtgccagctcttgaggatcttgcttgtccaaacccagaagacagtgcatgaagccaggggacatccgccatgctccaaacaacttggcctcaggagtcagtgacctttgaggatgtggctgtttacttcacccagaatcaatgggccagcctcgaccctgcgcagagggccctgtacggggaggtgatgctggagaattatgcaaatgtggcttctctggtagcgtttccattccccaaacctgctctgatctcccacctggagagaggggaagcaccatggggcccagatccctgggacaccgagattctgagaggcatcagtcaaggtggtgagtcctggatcaaaaatgaagggctagttataaagcaggaagcctctgaagaaacagagttgcacagaatgccagtaggaggacttctcaggaacgtttctcagcactttgattttaaaaggaaggcactgaagcagactttcaatctaaatccaaatctgatacttcgaggtggaatgaagttctatgaatgtaaagaatgtgggaaaatcttccgatataactcaaagcttattcggcatcagatgagtcatactggggaaaagccctttaagtgtaaggagtgtggcaaagctttcaagtccagctatgattgtattgtacatgagaaaaaccacattggagaagggccctatgaatgtaaggagtgtggcaaaggtttgagttccaacacagccttgactcaacatcagaggatccacactggagagaaaccctatgaatgtaaagagtgtggaaaggctttccgtaggagtgcggcatacctgcagcatcagagattacacacgggagagaaactctataaatgtaaggaatgttggaaagctttcggttgtaggtcactttttattgtccatcagagaattcatactggggagaaaccttatcaatgtaaggagtgtggcaaagccttcacccagaaaatagcctccattcagcatcagagagttcacactggggagaagccttatgaatgtaaggtgtgtgggaaagccttcaaatggtatggaagttttgttcagcatcagaaattgcaccctgtggagaagaagccagtcaaggtccttgggccatccccagttattctcaccccttcttctcactcctcatgagctttatcttggcagtcttacggctcttatgcctagcaaatctccagcctaattttatatatccaacctaatttgagtttcatttgtatttttttcatcaccttacatgtgttaacagctgtttcaacataaactccattataatctatatacaagacctgtggctactggtagagaattggaataagcttccaacaatggactgtagagattaatggagattgtttagtgggcccatggctaggtggggtattaatacagttgaagttatgttgcccttggcacagatctttgagaatctcatacatctgtgaaaaagataatgtgaaataaacagtaaaaaaaaaaagt

SEQ ID NO: 3120 - protein, 365 aa, Homo sapiens
MLQTTWPQESVTFEDVAVYFTQNQWASLDPAQRALYGEVMLENYANVASLVAFPFPKPALISHLERGEAPWGPDPWDTEILRGISQGGESWIKNEGLVIKQEASEETELHRMPVGGLLRNVSQHFDFKRKALKQTFNLNPNLILRGGMKFYECKECGKIFRYNSKLIRHQMSHTGEKPFKCKECGKAFKSSYDCIVHEKNHIGEGPYECKECGKGLSSNTALTQHQRIHTGEKPYECKECGKAFRRSAAYLQHQRLHTGEKLYKCKECWKAFGCRSLFIVHQRIHTGEKPYQCKECGKAFTQKIASIQHQRVHTGEKPYECKVCGKAFKWYGSFVQHQKLHPVEKKPVKVLGPSPVILTPSSHSS

SEQ ID NO: 3121 - DNA, 1391 bp, Homo sapiens
ccacggggcgaccgagatggcggcctccgggggcctagagggaccctgggcgtgcactcgcccttccggctcggcctttagttagtgaccagctcctcggcgttctgcagagcgtgggtttcagcgagttctacgtgccaggtccgcccggtgccggcttcctcgctgcccctggcggctcgtcagcccccactacccctgaacttggtcccaatggcggcccgcccctccttcacccggaccgtgggcatctgggcctcgccgaagccgtcaaggtggctgctcgggcttctagagcccgtgtccagccctttgccaccgaggcctgatcctcttttctgccctaaagaacttgccctgacagcctctggctcccgctcttgaggatcttgcttgtccaaacccagaagacagtgcatgaagccaggggacatccgccatgctccaaacaacttggcctcagtagcgtttccattccccaaacctgctctgatctcccacctggagagaggggaagcaccatggggcccagatccctgggacaccgagattctgagaggcatcagtcaaggtggtgagtcctggatcaaaaatgaagggctagttataaagcaggaagcctctgaagaaacagagttgcacagaatgccagtaggaggacttctcaggaacgtttctcagcactttgattttaaaaggaaggcactgaagcagactttcaatctaaatccaaatctgatacttcgaggtggaatgaagttctatgaatgtaaagaatgtgggaaaatcttccgatataactcaaagcttattcggcatcagatgagtcatactggggaaaagccctttaagtgtaaggagtgtggcaaagctttcaagtccagctatgattgtattgtacatgagaaaaaccacattggagaagggccctatgaatgtaaggagtgtggcaaaggtttgagttccaacacagccttgactcaacatcagaggatccacactggagagaaaccctatgaatgtaaagagtgtggaaaggctttccgtaggagtgcggcatacctgcagcatcagagattacacacgggagagaaactctataaatgtaaggaatgttggaaagctttcggttgtaggtcactttttattgtccatcagagaattcatactggggagaaaccttatcaatgtaaggagtgtggcaaagccttcacccagaaaatagcctccattcagcatcagagagttcacactggggagaagccttatgaatgtaaggtgtgtgggaaagccttcaaatggtatggaagttttgttcagcatcagaaattgcaccctgtggagaagaagccagtcaaggtccttgggccatccctggtcagtccccagtg

SEQ ID NO: 3122 - protein, 323 aa, Homo sapiens
MKPGDIRHAPNNLASVAFPFPKPALISHLERGEAPWGPDPWDTEILRGISQGGESWIKNEGLVIKQEASEETELHRMPVGGLLRNVSQHFDFKRKALKQTFNLNPNLILRGGMKFYECKECGKIFRYNSKLIRHQMSHTGEKPFKCKECGKAFKSSYDCIVHEKNHIGEGPYECKECGKGLSSNTALTQHQRIHTGEKPYECKECGKAFRRSAAYLQHQRLHTGEKLYKCKECWKAFGCRSLFIVHQRIHTGEKPYQCKECGKAFTQKIASIQHQRVHTGEKPYECKVCGKAFKWYGSFVQHQKLHPVEKKPVKVLGPSLVSP

SEQ ID NO: 3123 - DNA, 2116 bp, Homo sapiens
ccacggggcgaccgagatggcggcctccgggggcctagagggaccctgggcgtgcactcgcccttccggctcggcctttagttagtgaccagctcctcggcgttctgcagagcgtgggtttcagcgagttctacgtgccaggtccgcccggtgccggcttcctcgctgcccctggcggctcgtcagcccccactacccctgaacttggtcccaatggcggcccgcccctccttcacccggaccgtgggcatctgggcctcgccgaagccgtcaaggtggctgctcgggcttctagagcccgtgtccagccctttgccaccgaggcctgatcctcttttctgccctaaagaacttgccctgacagcctctggctcccgctcttgaggatcttgcttgtccaaacccagaagacagtgcatgaagccaggggacatccgccatgctccaaacaacttggcctcaggagtcagtgacctttgaggatgtggctgtttacttcacccagaatcaatgggccagcctcgaccctgcgcagagggccctgtacggggaggtgatgctggagaattatgcaaatgtggcttctctggtagcgtttccattccccaaacctgctctgatctcccacctggagagaggggaagcaccatggggcccagatccctgggacaccgagattctgagaggcatcagtcaaggtggtgagtcctggatcaaaaatgaagggctagttataaagcaggaagcctctgaagaaacagagttgcacagaatgccagtaggaggacttctcaggaacgtttctcagcactttgattttaaaaggaaggcactgaagcagactttcaatctaaatccaaatctgatacttcgaggtggatcagttgaggtcaggagtttgagaccagcctgaccaacatggagaaaccctatctctactaaaaatacaaaaattagctggatgtggtggtgtgtgcctgtaatcccagctacttgggaggctgaggcaggagaattgcttgaatccagaggcagaggttgcagtgagctgaggttgcaccactgtgcttcagcctgggtaacagagtgagactgtctcaaaaaaaaaaaaaatttagttccaaatattactgctcgttgataatgtgtctggtcacccaagagttctgatggagatgtacaaagagattaatgtttttatgtctgctaaacaacatccattctgcaggatccattactccatgggtcaaggagtaattttgactttcaagtattatttaaggaatacattttgtaaggctgtggctgccatagtggttgttctgtacaaagtaacttgaaaaccttctggaaaggattcatcattctagatgccattaaggacatttgtgattcatgggagaaggtcaaaatatcaacattaacaggagttcagaagacattgacctcaaccctgatggatgatcttgaggggttcaagacttcagtggacgaagtaactgcagatgtggtggaaatagcaagataactagacttagaagtggaacctgcatatgtgactgaattgctgcaatctcatgataaaacgtgaacaaatgaggagttgcttctaatataagagccacaaaagtggtttcttgagatggaaactactcctggtgaagatcctgtgaccattgttgaaatgacaacaaaggacttagaatattacataaacttagttgataaaacagcagcagagtttgagaggattgacttcaattttgaagaatgttccactgtgggtaaaaggctatccaacagcaacacatgctacagataaatctttcggaaaggaagagtcagttgatgttgcagccttccttgttgtctcatttaaagaaatctctagagccacactaaccttcagcaaccaccacaccgatcattcagcagccatcaacagtgaggcaagactgtcttccagcaacaaagactcactgaagacttagattatcgttaacatcttttagcaataaaatatttttaaattaaagtatgtacattgtcagatataatgctattgcaaacttaatagactataatatagattaaacataacttttataggtactgg

SEQ ID NO: 3124 - protein, 157 aa, Homo sapiens
MLQTTWPQESVTFEDVAVYFTQNQWASLDPAQRALYGEVMLENYANVASLVAFPFPKPALISHLERGEAPWGPDPWDTEILRGISQGGESWIKNEGLVIKQEASEETELHRMPVGGLLRNVSQHFDFKRKALKQTFNLNPNLILRGGSVEVRSLRPA

SEQ ID NO: 3125 - DNA, 8221 bp, Homo sapiens
ccacggggcgaccgagatggcggcctccgggggcctagagggaccctgggcgtgcactcgcccttccggctcggcctttagttagtgaccagctcctcggcgttctgcagagcgtgggtttcagcgagttctacgtgccaggtccgcccggtgccggcttcctcgctgcccctggcggctcgtcagcccccactacccctgaacttggtcccaatggcggcccgcccctccttcacccggaccgtgggcatctgggcctcgccgaagccgtcaaggtggctgctcgggcttctagagcccgtgtccagccctttgccaccgaggcctgatcctcttttctgccctaaagaacttgccctgacagcctctggctcccgctcttgaggatcttgcttgtccaaacccagaagacagtgcatgaagccaggggacatccgccatgctccaaacaacttggcctcaggagtcagtgacctttgaggatgtggctgtttacttcacccagaatcaatgggccagcctcgaccctgcgcagagggccctgtacggggaggtgatgctggagaattatgcaaatgtggcttctctggtagcgtttccattccccaaacctgctctgatctcccacctggagagaggggaagcaccatggggcccagatccctgggacaccgagattctgagaggcatcagtcaaggtggtgagtcctggatcaaaaatgaagggctagttataaagcaggaagcctctgaagaaacagagttgcacagaatgccagtaggaggacttctcaggaacgtttctcagcactttgattttaaaaggaaggcactgaagcagactttcaatctaaatccaaatctgatacttcgaggtggaatgaagttctatgaatgtaaagaatgtgggaaaatcttccgatataactcaaagcttattcggcatcagatgagtcatactggggaaaagccctttaagtgtaaggagtgtggcaaagctttcaagtccagctatgattgtattgtacatgagaaaaaccacattggagaagggccctatgaatgtaaggagtgtggcaaaggtttgagttccaacacagccttgactcaacatcagaggatccacactggagagaaaccctatgaatgtaaagagtgtggaaaggctttccgtaggagtgcggcatacctgcagcatcagagattacacacgggagagaaactctataaatgtaaggaatgttggaaagctttcggttgtaggtcactttttattgtccatcagagaattcatactggggagaaaccttatcaatgtaaggagtgtggcaaagccttcacccagaaaatagcctccattcagcatcagagagttcacactggggagaagccttatgaatgtaaggtgtgtgggaaagccttcaaatggtatggaagttttgttcagcatcagaaattgcaccctgtggagaagaagccagtcaaggtccttgggccatccctggtcagtccccagtgctcctctccagccatacctcctgttcttctccagggatcctgttctgcttcagccgtagctgtgccttcactgacctttccacatgctgtgctcattcctacctctgggaattttttcatgctgctgcctacatctggaataccttcttcatctgcccaaatagtgcgtgtcttccagggtcttactcccactgtgaaaccttccccagttattctcaccccttcttctcactcctcatgagctttatcttggcagtcttacggctcttatgcctagcaaatctccagcctaattttatatatttttttgagaaagggtcttgctctgtcacccaggctagagtgcggtggtgtgatcttggctcactgcaacctccccctcctgggttcaagcgattctcctccttcagactctcgaatagctgggattacaggcacgcctcaccacgcccagctaatttctgtatttttagaagagatggggtttcgccatcttggccaggctggtctcaaacacctgacctcaagtgatccgcctgccttggccccccaaagtgctgggattacaggagtgagccactgtgcccagcctccaacctaatttgagtttcatttgtatttttttcatcaccttacatgtgttaacagctgtttcaacataaactccattataatctatatacatttaaagaccgtgtttacataatctcttctgggtagaaaatggaaatacttaacctttgcattggtccctttcaggcttgaacaacagtggctgtatctgcatcgtggggttgctggtggtagaacactttggtgttaggaaagtttggaaaagaggatatccctgtattaggccattatgattagagataagcagcctgggagaaacatacaagacctgtggctactggtagagaattggaataagcttccaacaatggactgtagagattaatggagattgtttagtgggcccatggctaggtggggtattaatacagttgaagttatgttgcccttggcacagatctttgagaatctcatacatctgtgaaaaagataatgtgaaataaacagtaaaaaaaaaaagtatgttgatggcagtgagagtaatcatgtctttaaacgtgaagtttttttttctttagttttgctcttgatagctagatgtttcttttaacttttatttcgtaagtaaatatacacaaaggcattcatctttgttgaatctgttgtgcagatttttcttgatgagcattctgtttttttttctttgtgagcactggcttctatattttatttcatatttatgaattataaatatgaatttaattactaaagaaataaaaataatggtgtaaagccaactcgaggggaatctgaataagcttccaaaatttttttttttaagaaataaagggagctgtgtagtgggtcagtggctaggtaggttagtgaagtggaatttggggttgctcttggaagtggccttgatgaggatcctttacaactattcagaggactgtgtgaagtagttactggaaaaagaacttgaattatgcatttattggcattaatgtaaacagtaagtcctaagctttgatggaagggtccatacattttttttttttttttgctgatgttgctatctagatgtttctctatagcaattaatagcaaaacctttacattcttggtttttaaactttaccatgtgtctgaattacatagtgtgcttgtaaaaagaagagttttctctcttgcacaaattctgattttggctatctgtggtgatggccagatctttagcatggaccatactttgagagatatgcttcaaacagaaaatgcccacccctcctcctttacccagcataaactctatggttaattcttaaaataatgccttacagtctccattaactcccttgcccttctcttgctttgtcatgctcgcttggcaaaacctcatctctgactaaatgcagttctttgccttctctgttcctgcaccaaaaatgatcaggagaaagcatattaccaggctgaactgtcactttaaattcatgaccagtaacttcatggaggcccttaacgtttcctgatggtcatactacaatttttggagtccacttaactcccctgctttcctaggccactactttatactttctctcttctgtaacttccaaagcatccctctcagttctcatgctcagctgatggttatgtttctgccttcggcgagagaacagcaagctccagaaagtggctgcgccttcagccccgtgctagaatgagaacatatggagccaacttgagttcggaagggctgtggccacctcgtttcgcccatctacttttcaccttgccgtatctgattcttcaccaccgtattctcagtcacttccactaaacagtgccagtgttttaaggttctgtcacactcagtaacccacttctggttcctcattccgtgtcagtgatcagcagtagactgaagaatctaccttagatttgctccatactattaattagcttacaaaatgtctaagaggagctaagctgggatgccacataggcagaagccaggaaaaatgaccaaccacagaaccaagtggttccagtggaaactcagcagctgctggtgcctgctactggactgccaccccccattgaagagactggaccaccaggaaggtcgtttcacattctgtagtaaaaatacccctacaatcattttggtagggtcttctgtcttcagccagggtgtacctgctcggtgggagttggttatatatgtatgtccaagttgcaggggcttctgggaaatacaggttttggattctgcctgggaagagagtcatagtatgaagaagtctgaaaatggggaagggattttcagaatatgttgagcagctgtaaaatatcagatacccattataggcattgaaggttacctaaatgacagaaggatgcactatattcatgggtaggaaagattagtttcatcaagatttcaatttttatcaattcataaattaaaaacaatataaaaattccagaggggtgtgtgtatagagaggcaaaggacacagagtagctaacctagttttgaagaacaagatggggggttttatgctaccagatattatatacaatgatcatcaaacacagaacaaagcaaaaaacaaactccccaaacccaagttgaaacaaaaaaaacccccagactgtaatagtattattattattttttaagatggaatcttgctctgttgctcaggctggagtgcagtggtgcaatcttggctcactgcaacctacacctcccgggttcaagtgattctcttgcctcagcctcctgagtagtgtgtgccaccacgcccagctaattttttaatttttagtagagacagggtttcaccatgttggccaggctggtcttgaactcctggcagcctcaagtgatccacccacctcggtctcccaaagtgttgggattacaggcgtgagccactgcacctggcctgtaacatgatttgctgaaatttttaaaaatcttaaataatgtactgtttagaaatatacatattttatacaaaattataaagaaagcatagagaggtaagcattagtggcacagctgagaaaatataaaaggtagttctgtctctatcctgtctcctttattctgctactgctctcattctgtctcatcccaggaatccagtcccaagtgctgcctgccaatcgtccagcaccctccacctttgccacctatttcttgttgtaaaacagatgtttgtttctaaaatataatgaattaatgattatcaaagtacaggcatacctcattttattgcagtttgttttattgtgtcttgcggatattgcattttttacaaactgaaggtttgtggcaggcctgtgttgagcaagactatcagtgccattttttttcaacagcatgtgctcatttcatttttctgtgtcttacacagaaacttaaaatatttcaaacttttcattatatgtgttttggtgattagtgacttttatgtttctattgtaattgttttggggtgccacagactgcatccatctaagacagtgagcttagttgatgtgtgtgtgtgtgttctgattactccactaactgatggttccccatctctctccctctcctcagacctcactattctctcagacacaacagtattgaaattagaccaattgataaccttacaaacacctttaagtgtttaagtgaaaaagtcacatgcctctcactttaaatcaaaagctagaaatgattaagcttagtgaggaaggctaatgtcaacagctgagataggccaaaagctagactgcttctgccaaacagtcaagttgtgaatgcaaaagaaaagttcttgaaggaaatgaaaagtacttctccagggaacacatgaacgataataaagtggccaggtgcagtggctgacacctagaatcccagcacttcggggagccaaagcgggaggatcccctgaagccaggagtccgagaccagcttgggccacaaagtgagacccctgtctctacaaaaaattaaaaatttagctgggtgtggttgtgcatgcctgtagtccgatctacttgggaggctgaagtgagaggatccctttagccagggagttcgagactgcagtgagctatgattgtgccactgcactctagcctgtgtgacagaatgaaaccaaaaaaagtgaaacagcattattactgatatggagaaagttttaggggtctggatcaaaccaaccacaaattcccttaagccaaaacctaatccagagcaaggccataactgccattgtatgaaggctgagagaagtgaggaagctgcaggaaagtttgaagctagcagaggttggttcatgaggtttaagaagtcatcttatcataaaagtgcaaggtgaagcagcaagtgctggtgtagaagctgtagcaatttatccagatctagctaagttaattgatgaagttgctacaccacgagattttcagtgtattccaaacagccttcttttggaagaagaaaccatctaggactttcatggagaagagaagttaatccctggcttaaaagcatcaaaggacagctcgtctctcttgttaggggttcatgcagctggtaactttaagttgaagccaatgctcatttaccattcagaaaatcctagggcccataagaattatgctaaatccactctgcctgtgctctagaaatggaagatcaaagcctggatgacagcacatctgtttacagcatggattactgaatattttaagcccactgttgagacctactaaatattaggaaaaaagaattctgtcaggtgtggtggctcacacttgtaatcccaacactttgggaggccaaggcaggtggatcagttgaggtcaggagtttgagaccagcctgaccaacatggagaaaccctatctctactaaaaatacaaaaattagctggatgtggtggtgtgtgcctgtaatcccagctacttgggaggctgaggcaggagaattgcttgaatccagaggcagaggttgcagtgagctgaggttgcaccactgtgcttcagcctgggtaacagagtgagactgtctcaaaaaaaaaaaaaatttagttccaaatattactgctcgttgataatgtgtctggtcacccaagagttctgatggagatgtacaaagagattaatgtttttatgtctgctaaacaacatccattctgcaggatccattactccatgggtcaaggagtaattttgactttcaagtattatttaaggaatacattttgtaaggctgtggctgccatagtggttgttctgtacaaagtaacttgaaaaccttctggaaaggattcatcattctagatgccattaaggacatttgtgattcatgggagaaggtcaaaatatcaacattaacaggagttcagaagacattgacctcaaccctgatggatgatcttgaggggttcaagacttcagtggacgaagtaactgcagatgtggtggaaatagcaagataactagacttagaagtggaacctgcatatgtgactgaattgctgcaatctcatgataaaacgtgaacaaatgaggagttgcttctaatataagagccacaaaagtggtttcttgagatggaaactactcctggtgaagatcctgtgaccattgttgaaatgacaacaaaggacttagaatattacataaacttagttgataaaacagcagcagagtttgagaggattgacttcaattttgaagaatgttccactgtgggtaaaaggctatccaacagcaacacatgctacagataaatctttcggaaaggaagagtcagttgatgttgcagccttccttgttgtctcatttaaagaaatctctagagccacactaaccttcagcaaccaccacaccgatcattcagcagccatcaacagtgaggcaagactgtcttccagcaacaaagactcactgaagacttagattatcgttaacatcttttagcaataaaatatttttaaattaaagtatgtacattgtcagatataatgctattgcaaacttaatagactataatatagattaaacataacttttataggtactggaaaataaaaataattgtgtgactccc

SEQ ID NO: 3126 - protein, 439 aa, Homo sapiens; identical to SEQ ID NO: 345

SEQ ID NO: 3127 - DNA, 1003 bp, Homo sapiens
ccacggggcgaccgagatggcggcctccgggggcctagagggaccctgggcgtgcactcgcccttccggctcggcctttagttagtgaccagctcctcggcgttctgcagagcgtgggtttcagcgagttctacgtgccaggtccgcccggtgccggcttcctcgctgcccctggcggctcgtcagcccccactacccctgaacttggtcccaatggcggcccgcccctccttcacccggaccgtgggcatctgggcctcgccgaagccgtcaaggtggctgctcgggcttctagagcccgtgtccagccctttgccaccgaggcctgatcctcttttctgccctaaagaacttgccctgacagcctctggctcccgctcttgaggatcttgcttgtccaaacccagaagacagtgcatgaagccaggggacatccgccatgctccaaacaacttggcctcaggagtcagtgacctttgaggatgtggctgtttacttcacccagaatcaatgggccagcctcgaccctgcgcagagggccctgtacggggaggtgatgctggagaattatgcaaatgtggcttctctggtagcgtttccattccccaaacctgctctgatctcccacctggagagaggggaagcaccatggggcccagatccctgggacaccgagattctgagaggcatcagtcaagttctgggttttcagccccctgaactacgcatgttaagaaacatttataaggagttatgtgtatttattatgcttaaagattcaactagcctgccttaaggtacgtaatatctctcaaccccaaataccctttcttctctttgtttaaaatgcatctttattcatatacccaatttttctttttattggtattagattttgactacaagagattggtctcattcccaggttaccatgaatatgcctgcatatcatcttttttgttcattaaaaacattttttccccattttagttttctattccaa

SEQ ID NO: 3128 - protein, 118 aa, Homo sapiens
MLQTTWPQESVTFEDVAVYFTQNQWASLDPAQRALYGEVMLENYANVASLVAFPFPKPALISHLERGEAPWGPDPWDTEILRGISQVLGFQPPELRMLRNIYKELCVFIMLKDSTSLP

SEQ ID NO: 3129 - DNA, 1128 bp, Homo sapiens
agagcgtgggtttcagcgagttctacgtgccagctcttgaggatcttgcttgtccaaacccagaagacagtgcatgaagccaggggacatccgccatgctccaaacaacttggcctcagatgttttggggattctagtagcccttgggtttgatgacttcagaggagagttttgcaatcagcagcctccagaaatactggtagcgtttccattccccaaacctgctctgatctcccacctggagagaggggaagcaccatggggcccagatccctgggacaccgagattctgagaggcatcagtcaaggtggtgagtcctggatcaaaaatgaagggctagttataaagcaggaagcctctgaagaaacagagttgcacagaatgccagtaggaggacttctcaggaacgtttctcagcactttgattttaaaaggaaggcactgaagcagactttcaatctaaatccaaatctgatacttcgaggtggaatgaagttctatgaatgtaaagaatgtgggaaaatcttccgatataactcaaagcttattcggcatcagatgagtcatactggggaaaagccctttaagtgtaaggagtgtggcaaagctttcaagtccagctatgattgtattgtacatgagaaaaaccacattggagaagggccctatgaatgtaaggagtgtggcaaaggtttgagttccaacacagccttgactcaacatcagaggatccacactggagagaaaccctatgaatgtaaagagtgtggaaaggctttccgtaggagtgcggcatacctgcagcatcagagattacacacgggagagaaactctataaatgtaaggaatgttggaaagctttcggttgtaggtcactttttattgtccatcagagaattcatactggggagaaaccttatcaatgtaaggagtgtggcaaagccttcacccagaaaatagcctccattcagcatcagagagttcacactggggagaagccttatgaatgtaaggtgtgtgggaaagccttcaaatggtatggaagttttgttcagcatcagaaattgcaccctgtggagaagaagccagtcaaggtccttgggccatccctggtcagtccccagtg

SEQ ID NO: 3130 - protein, 350 aa, Homo sapiens
MKPGDIRHAPNNLASDVLGILVALGFDDFRGEFCNQQPPEILVAFPFPKPALISHLERGEAPWGPDPWDTEILRGISQGGESWIKNEGLVIKQEASEETELHRMPVGGLLRNVSQHFDFKRKALKQTFNLNPNLILRGGMKFYECKECGKIFRYNSKLIRHQMSHTGEKPFKCKECGKAFKSSYDCIVHEKNHIGEGPYECKECGKGLSSNTALTQHQRIHTGEKPYECKECGKAFRRSAAYLQHQRLHTGEKLYKCKECWKAFGCRSLFIVHQRIHTGEKPYQCKECGKAFTQKIASIQHQRVHTGEKPYECKVCGKAFKWYGSFVQHQKLHPVEKKPVKVLGPSLVSP

SEQ ID NO: 3131 - DNA, 1186 bp, Homo sapiens
ctcttctcctgaggttctttcttttgggtccacgtcatcgtccctctcttgaggatcttgcttgtccaaacccagaagacagtgcatgaagccaggggacatccgccatgctccaaacaacttggcctcaggagtcagtgacctttgaggatgtggctgtttacttcacccagaatcaatgggccagcctcgaccctgcgcagagggccctgtacggggaggtgatgctggagaattatgcaaatgtggcttctctggtagcgtttccattccccaaacctgctctgatctcccacctggagagaggggaagcaccatggggcccagatccctgggacaccgagattctgagaggcatcagtcaaggtggtgagtcctggatcaaaaatgaagggctagttataaagcaggaagcctctgaagaaacagagttgcacagaatgccagtaggaggacttctcaggaacgtttctcagcactttgattttaaaaggaaggcactgaagcagactttcaatctaaatccaaatctgatacttcgaggtggaatgaagttctatgaatgtaaagaatgtgggaaaatcttccgatataactcaaagcttattcggcatcagatgagtcatactggggaaaagccctttaagtgtaaggagtgtggcaaagctttcaagtccagctatgattgtattgtacatgagaaaaaccacattggagaagggccctatgaatgtaaggagtgtggcaaaggtttgagttccaacacagccttgactcaacatcagaggatccacactggagagaaaccctatgaatgtaaagagtgtggaaaggctttccgtaggagtgcggcatacctgcagcatcagagattacacacgggagagaaactctataaatgtaaggaatgttggaaagctttcggttgtaggtcactttttattgtccatcagagaattcatactggggagaaaccttatcaatgtaaggagtgtggcaaagccttcacccagaaaatagcctccattcagcatcagagagttcacactggggagaagccttatgaatgtaaggtgtgtgggaaagccttcaaatggtatggaagttttgttcagcatcagaaattgcaccctgtggagaagaagccagtcaaggtccttgggccatccctggtcagtccccagtg

SEQ ID NO: 3132 - protein, 358 aa, Homo sapiens; identical to SEQ ID NO: 3118

SEQ ID NO: 3133 - DNA, 5102 bp, Homo sapiens
cattccacaccctccgggatctccagtgtgaaaatgtctggccctgggtaggaggctgcagatagtccctgggccggggctcgcgctggccggctgcagcgcgcagggtgccaagccctcccctacgaagtctgttttgtctcaggctgggctgagtcacatagaatagatagatagttgatttagcacatgtcctccagatcatattatccgcctacaaatatagcctgttagcgcacaggcacgggaggcttcttccggctcggccgtgctgctcagcgggtgtaaacagcctctgcggtgtaaacagcctctgcggtgtaaacagccgcggcgggcaggccaggactgtcagtgcccgcccctcggggcaggtaatttcatgctcccaaaatgggacataaagtggttgtcttcgacatttctgtcatcagagccttgtgggaaactcgtgtcaagaagcacaaagcttggcagaagaaggaggtggaaaggcttgagaagagcgccttggagaagataaaggaggagtggaactttgtggccgaatgcaggaggaagggcatcccccaggctgtatactgcaagaatggcttcatagacaccagcgtgcggcttctggacaagattgaaaggaacactctcacaaggcagagttcacttcccaaggacagaggcaaacggagcagtgcgtttgtgtttgaactttctggggagcactggacggagctcccagattcattgaaggagcagacacacctgagagaatggtacataagcaataccttgattcaaatcattcctacatatattcagttatttcaagcgatgagaattctggatctgccaaaaaaccaaatctcacatcttccagcagaaatcggttgtttgaagaacctgaaagaactcaatgtgggtttcaactatctgaagagcattcctccagaattgggagattgtgaaaatctagagagactggattgttctggaaatctagaattaatggagctgccctttgaattaagtaatttgaagcaagttacatttgtagatatctcagcaaacaagttttccagtgtcccaatctgtgtcctgcggatgtcgaatttgcagtggttggatatcagcagcaataacctgaccgacctgccgcaagatatagacaggctagaggagctgcagagctttctcttgtataaaaacaagttgacctaccttccctattccatgctgaacctgaagaagctcactctgttagtcgtcagtggggaccatttggtggagctcccaactgccctttgtgactcatccacacctttaaaatttgtaagccttatggacaatcctattgataatgcccaatgtgaagatggcaatgaaataatggaaagtgaacgggatcgccaacattttgataaagaagttatgaaagcctatattgaagaccttaaagaaagagaatctgttcccagctataccaccaaagtgtcttttagccttcaactttgatatccatcagaagactgcaaatctcactattctctggagctatatataaatctttgttatgatcatgtcatataggaagaatggcttgtgcttaaggacaaagtctagaaaccactatcatagttgctaaaaaaaatggttttcaaatgtcaaatacatgagtatctccctccatggactggagaattgaaaaattggtttgtatattgatatttccaggttcatttgcatatacttttttccaaataatgcacatttaatatgttttaaaatgtcttatttttaagaattataactaaaagaccaaatactgaagttaagtgcattgttttcaggaatcaaaagataaaggggccgggtgtggtggctcacacctgtaatcccagcactttgggaggccgaagtgggtggatcacctgaggtccggagttcgaggctggtttggccagcatggcgaaaccccatctctactaaaaatacaaaaaattagctgggcatggtggcagttgcctgtaatcctagctactcaggaggctgaggcaggagaatcgcttgaacctgggaggtggagttgcagtgagccgagatcatgcgactgcactccagcctgggtgacagagccagactctgtctcaaaaaaaaaaaaaaagaaaagaaaaagataaagggattgtgaaaagagcatttatattggactaatcagatgagagtgttttgttattttgaaagagtttcttttactgagaataatcttccttgagtttatataaactgctatttccatatgttttaagttatattttggcaagtgtagactcccaggagagacttgtaggtacaatctaggccttgaagaaacaaaggctggaatatctgcccatgctttgggcatgagatgctcagatggtgcgtgggtagatctagttgaggaagtgtgggcctggctgttcatgggaagtcttcagtggccttcatggatggccatccagtcctgagtggtcaccctgggggtcctgggacacacctcagtaaagagcaaaggcaacgccctcagggtcccttcctccaagatggccatgtagggtaatggagatgaccagtccacactgataaggagttcctagcaaggcttccttgtgggtaccacaggacaactctgcccatagcaaagatgcttcagtccagagggagcccatgggctgtttgaatttgggagaggtgggattcattacaagactttgggctcttatgtcacatcacatgatttggagaaattagacacaatctcttatttttataccactgtcttgggctaaaataaacaggttgtggctgatggtgttgaagataaataagcttaaacaaataactttggccgggcacggtggctcacacctataatcccagcactatgggaggctgaggcaagcaggttgtttgagcccaggaatttgagaacaggattttgagaacagcttggacatcatgacgaaaccccatctccacaaaaaaattcaaaaaattagccaggtgtggtggcatgtgcctgtggtcccagctactcaggaggctgaggtgggaaaatcacttgagcccaggaggtcgaggctgcagtgtgctgtgattgtgacactgccctccagcctgggtgacagagtgagaccctgtctcaaaagcaaaacaaacagcaataacaatattattattgttataactaaaaaaaaaaaaacaaaaacaagcagcttttgtgactaagaaggaaaatatgcatatagtggcatatttttatatgaatcatctcctctgtggtcttgcccagtaccatccagtggagctttctgcagtgacggaaatgttctgtatttgcgttgtccaacgtggtaaaccagacacatgtgattcttgagcacttgaacaatgactgatgtgattgaagaacccatctttcaattcaattaaatttaaatagccacatttaactccagccttgggtttgacctgatggaaaattcccatgagagagtgctccaaaccgttccaaggtggggccagttgcgattctaaaggaagaagcactaaatggcagggtgatcagtccaaagcatttatgaggggagcttacatacagcatgggctgcagcgtccttgtgatgggcagtgagacaagggatgttctacctgggcatgtccccagcgagggggttgggggatggagttcacatgaagatgtaaggaatttgggtgggggctgggctggcttctacatgtttagcaacacggctgatctttcagtgtttccagcaacaacctaagcaccgttatcagtgcctaggaatgttcaaggcccaggctggggttcagacctgcagaggaaaacatcagctggctgggtcaaggcaccatgtgttacttggtcaggacagagacaaaaatgaggaaaactaggggaccccacacacatgtggctaccatactcctgaacaggtctagctagttatttgtttttttggaagttaatctggggtagaaatgtatggtgatttttattttctctgtctgaagaaccagccatttttaaaaaggttattattgacatcccaatattttgtcttggtgggcttactcataagtccaaacattttattctcaacaggtgtaaaacaggcagagcattctaaaaccacatggtagtgctttggtggaggactgcttccacttagaaacaaactctgagaagtaggctaagagaagacaagagggccgggcgcggtgactcacgcctataatcccagcactttgggaggccgagatgggtgaatcatgaggtcaggagttcgagaccagcctaaacaacatagtgaaaccctgtctctattaaaaatgcaaaaaattagccgggcgtggtgggcacccgtaatcccagctactcaggaggctgaggcaggagaattgcttgaacccaggaagcagaggttgcagtaagctgagatcccaccattgcactccagcctgggcaacagagtgagactccatctcaaaaaaaaaaaaaaaaaaaaaaaaagagagagagatgaaaagagtaggaaaatgagaaatcaccttcgttgaatcttaaatagttacatttttttctttttaacactaaaaatacaattcaaatttattagctctactacttgaatgattttggaattttatgtcatgctaaggtatgtgttacatatggccaagtggaaaatatatctgaagaggggctttcatacaaatagactgttcataatttatgtaaattttattttaataaaatcagttttttgtttaaaaaccttgtttcactgtcacatatgaaaaaaatactgcattgatatataattatttcatgttacataataacccaaaacaaataattacttgaatatgtttgtagagatactatttaatttattcatataaatgtgcagaaagattccaaaggagaatatatatcttgtgaaaatatggagatttgaaaatttgacatgatgcaaatagactgatacataatttggaaaggttatttacatggcagaatacatgtatgaatattaaagtaa

SEQ ID NO: 3134 - protein, 371 aa, Homo sapiens; identical to SEQ ID NO: 349

SEQ ID NO: 3135 - DNA, 1822 bp, Homo sapiens
cattccacaccctccgggatctccagtgtgaaaatgtctggccctgggtaggaggctgcagatagtccctgggccggggctcgcgctggccggctgcagcgcgcagggtgccaagccctcccctacgaagtctgttttgtctcaggctgggctgagtcacatagaatagatagatagttgatttagcacatgtcctccagatcatattatccgcctacaaatatagcctgttagcgcacaggcacgggaggcttcttccggctcggccgtgctgctcagcgggtgtaaacagcctctgcggtgtaaacagcctctgcggtgtaaacagccgcggcgggcaggccaggactgtcagtgcccgcccctcggggcaggtaatttcatgctcccaaaatgggacataaagtggttgtcttcgacatttctgtcatcagagccttgtgggaaactcgtgtcaagaagcacaaagcttggcagaagaaggaggtggaaaggcttgagaagagcgccttggagaagataaaggaggagtggaactttgtggccgaatgcaggaggaagggcatcccccaggctgtatactgcaagaatggcttcatagacaccagcgtgcggcttctggacaagattgaaaggaacactctcacaaggcagagttcacttcccaaggacagaggcaaacggagcagtgcgtttgtgtttgaactttctggggagcactggacggagctcccagattcattgaaggagcagacacacctgagagaatggtacataagcaataccttgattcaaatcattcctacatatattcagttatttcaagcgatgagaattctggatctgccaaaaaaccaaatctcacatcttccagcagaaatcggttgtttgaagaacctgaaagaactcaatgtgggtttcaactatctgaagagcattcctccagaattgggagattgtgaaaatctagagagactggattgttctggaaatctagaattaatggagctgccctttgaattaagtaatttgaagcaagttacatttgtagatatctcagcaaacaagttttccagtgtcccaatctgtgtcctgcggatgtcgaatttgcagtggttggatatcagcagcaataacctgaccgacctgccgcaagatatagacaggctagaggagctgcagagctttctcttgtataaaaacaagttgacctaccttccctattccatgctgaacctgaagaagctcactctgttagtcgtcagtggggaccatttggtggagctcccaactgccctttgtgactcatccacacctttaaaatttgtaagccttatggacaatcctattgataatgcccaatgtgaagatggcaatgaaataatggaaagtgaacgggatcgccaacattttgataaagaagttatgaaagcctatattgaagaccttaaagaaagagaatctgttcccagctataccaccaaagtgtcttttagccttcaactttgatatccatcagaagactgcaaatctcactattctctggagctatatataaatctttgttatgatcatgtcatataggaagaatggcttgtgcttaaggacaaagtctagaaaccactatcatagttgctaaaaaaaatggttttcaaatgtcaaatacatgagtatctccctccatggactggagaattgaaaaattggtttgtatattgatatttccaggttcatttgcatatacttttttccaaataatgcacatttaatatgttttaaaatgtcttatttttaagaattataactaaaagaccaaatactg

SEQ ID NO: 3136 - protein, 371 aa, Homo sapiens; identical to SEQ ID NO: 349

SEQ ID NO: 3137 - DNA, 369 bp, Homo sapiens
gcgcgcagggtgccaagccctcccctacgaagtctgttttgtctcaggctgggctgagtcacatagaatagatagatagttgatttagcacatgtcctccagatcatattatccgcctacaaatatagcctgttagcgcacaggcacgggaggcttcttccggctcggccgtgctgctcagcgggtgtaaacagcctctgcggtgtaaacagcctctgcggtgtaaacagccgcggcgggcaggccaggactgtcagtgcccgcccctcggggcaggtaagcgctgggcccttgtgggaaactcgtgtcaagaagcacaaagcttggcagaagaaggaggtggaaaggcttgagaagagcgccttggag

SEQ ID NO: 3138 - protein, 97 aa, Homo sapiens
IVDLAHVLQIILSAYKYSLLAHRHGRLLPARPCCSAGVNSLCGVNSLCGVNSRGGQARTVSARPSGQVSAGPLWETRVKKHKAWQKKEVERLEKSAL

SEQ ID NO: 3139 - DNA, 623 bp, Homo sapiens
cggactcagcctgcctacacccagggctgagggagcacatccaaggaagggccaacttggaaggggttcagcccatcagatagcagctcaggagtatctaacctgcaaagatcttaattaaggctttggctttcgacttaaaagtctccataaaggaacgctacgcatcatcctgaaaataaagatcaaagtccacagccagtggtgaagaaacattaataagagaatcagtcagcctagtttttttgaggaaatctgtgcacagatcccaagtctacacataaaccaaaaagccaaagtaaagttaactgtatttgagcagtgtgggcagcccagccagccacagtaactgaagctggaagaattactccctacacacagggctcgtgttctctagatcaaccagacacatcacagactctgttgttgaggttctttcatttcctcaggccagttagcccttggctagtagccagagctgtacattaactgcccctacatttttaaaatcattgcttatgaatttctatgtattaacttagagaaatgtaattctagttcccatcttagaggaatggtctcttcttaatgtctttgtgttctaaatatttgatcatgtcaac

SEQ ID NO: 3140 - protein, 39 aa, Homo sapiens
GLSLPTPRAEGAHPRKGQLGRGSAHQIAAQEYLTCKDLN

SEQ ID NO: 3141 - DNA, 480 bp, Homo sapiens
tgatgagacagaaggagaacggtggcatctctcactgtaaaggaaagaacactggggccacaaagtgtcatcagccatgttcctctccagtccaaggactcccagacacttagtgttccagctcctgagtgaaaatgttaaccatcagcacactctcaaagatcactcactctaggaagtcagctgccatgtcatgatgatgctcaagcagccttgtggaaaagcttcacaaggagaggaactgaggcctcctgtcaacagccatgagagggggctgtcttaaaagcagatcctccatccccagtcaagccttcagatgacggcagcccctgtggacatcttgaccacaacttcatgagaccctaagccagaaacactcagctaaactgccctggatttctgactctcagaaactgtgagataataaatgtgtgttattctaaactaacagtctagaataaactgttatgcagcaataaa

SEQ ID NO: 3142 - protein, 32 aa, Homo sapiens
MFLSSPRTPRHLVFQLLSENVNHQHTLKDHSL

SEQ ID NO: 3143 - DNA, 2024 bp, Homo sapiens
ggagaatccccggaaaggctgagtctccagctcaaggtcaaaacgtccaaggccgaaagccctccagtttcccctggacgccttgctcctgcttctgctacgaccttctggggaaaacgaatttctcattttcttcttaaattgccattttcgctttaggagatgaatgttttcctttggctgttttggcaatgactctgaattaaagcgatgctaacgcctcttttccccctaattgttaaaagctatggactgcaggaagatggcccgcttctcttacagtgtgatttggatcatggccatttctaaagtctttgaactgggattagttgccgggctgggccatcaggaatttgctcgtccatctcggggatacctggccttcagagatgacagcatttggccccaggaggagcctgcaattcggcctcggtcttcccagcgtgtgccgcccatggggatacagcacagtaaggagctaaacagaacctgctgcctgaatgggggaacctgcatgctggggtccttttgtgcctgccctccctccttctacggacggaactgtgagcacgatgtgcgcaaagagaactgtgggtctgtgccccatgacacctggctgcccaagaagtgttccctgtgtaaatgctggcacggtcagctccgctgctttcctcaggcatttctacccggctgtgatggccttgtgatggatgagcacctcgtggcttccaggactccagaactaccaccgtctgcacgtactaccacttttatgctagttggcatctgcctttctatacaaagctactattaatcgacattgacctatttccagaaatacaattttagatatcatgcaaatttcatgaccagtaaaggctgctgctacaatgtcctaactgaaagatgatcatttgtagttgccttaaaataatgaatacatttccaaaatggtctctaacatttccttacagaactacttcttacttctttgccctgccctctcccaaaaaactacttcttttttcaaaagaaagtcagccatatctccattgtgcctaagtccagtgtttctttttttttttttttttgagacggagtctcactctgtcacccaggctggactgcaatgacgcgatcttggttcactgcaacctccgcatccggggttcaagccattctcctgcctcagcctcccaagtaactgggattacaggcatgtgtcaccatgcccagctaatttttttgtatttttagtagagatgggggtttcaccatattggccagtctggtctcgaactcctgaccttgtgatccactcgcctcagcctctcgaagtgctgagattacacacgtgagcaactgtgcaaggcctggtgtttcttgatacatgtaattctaccaaggtcttcttaatatgttcttttaaatgattgaattatatgttcagattattggagactaattctaatgtggaccttagaatacagttttgagtagagttgatcaaaatcaattaaaatagtctctttaaaaggaaagaaaacatctttaaggggaggaaccagagtgctgaaggaatggaagtccatctgcgtgtgtgcagggagactgggtaggaaagaggaagcaaatagaagagagaggttgaaaaacaaaatgggttacttgattggtgattaggtggtggtagagaagcaagtaaaaaggctaaatggaagggcaagtttccatcatctatagaaagctatataagacaagaactcccctttttttcccaaaggcattataaaaagaatgaagcctccttagaaaaaaaattatacctcaatgtccccaacaagattgcttaataaattgtgtttcctccaagctattcaattcttttaactgttgtagaagacaaaatgttcacaatatatttagttgtaaaccaagtgatcaaactacatattgtaaagcccatttttaaaatacattgtatatatgtgtatgcacagtaaaaatggaaactatattgacct

SEQ ID NO: 3144 - protein, 188 aa, Homo sapiens; identical to SEQ ID NO: 351

SEQ ID NO: 3145 - DNA, 734 bp, Homo sapiens
gaaaggctgagtctccagctcaaggtcaaaacgtccaaggccgaaagccctccagtttcccctggacgccttgctcctgcttctgctacgaccttctggggaaaacgaatttctcattttcttcttaaattgccattttcgctttaggagatgaatgttttcctttggctgttttggcaatgactctgaattaaagcgatgctaacgcctcttttccccctaattgttaaaagctatggactgcaggaagatggcccgcttctcttacagtgtgatttggatcatggccatttctaaagtctttgaactgggattagttgccgggctgggccatcaggaatttgctcgtccatctcggggatacctggccttcagagatgacagcatttggccccaggaggagcctgcaattcggcctcggtcttcccagcgtgtgccgcccatggggatacagcacagtaagaactgcctgacttcgatgcttctgccctggcccttcatgtgtctcctgagtatctttccaacactctttcacctaaaagggcacctggttctggaactgtgcaggtgctggactgcttttggttttggaagtgagacaaggattgtgtattttacttccctagagtgcagttttcctcccctgagtccacttcacactggggaacccagaaccaccactggcctatgcatgaaaatgacttctctgctcaaaggcacagagacttactctg

SEQ ID NO: 3146 - protein, 165 aa, Homo sapiens
MDCRKMARFSYSVIWIMAISKVFELGLVAGLGHQEFARPSRGYLAFRDDSIWPQEEPAIRPRSSQRVPPMGIQHSKNCLTSMLLPWPFMCLLSIFPTLFHLKGHLVLELCRCWTAFGFGSETRIVYFTSLECSFPPLSPLHTGEPRTTTGLCMKMTSLLKGTETY

SEQ ID NO: 3147 - DNA, 1773 bp, Homo sapiens
gaaaggctgagtctccagctcaaggtcaaaacgtccaaggccgaaagccctccagtttcccctggacgccttgctcctgcttctgctacgaccttctggggaaaacgaatttctcattttcttcttaaattgccattttcgctttaggagatgaatgttttcctttggctgttttggcaatgactctgaattaaagcgatgctaacgcctcttttccccctaattgttaaaagctatggactgcaggaagatggcccgcttctcttacagtgtgatttggatcatggccatttctaaagtctttgaactgggattagttgccgggctgggccatcaggaatttgctcgtccatctcggggatacctggccttcagagatgacagcatttggccccaggaggagcctgcaattcggcctcggtcttcccagcgtgtgccgcccatggggatacagcacagtaaggagctaaacagaacctgctgcctgaatgggggaacctgcatgctggggtccttttgtgcctgccctccctccttctacggacggaactgtgagcacgatgtgcgcaaagagaactgtgggtctgtgccccatgacacctggctgcccaagaagtgttccctgtgtaaatgctggcacggtcagctccgctgctttcctcaggcatttctacccggctgtgatggccttgtgatggatgagcacctcgtggcttccaggactccagaactaccaccgtctgcacgtactaccacttttatgctagttggcatctgcctttctatacaaagctactattaatcgacattgacctatttccagaaatacaattttagatatcatgcaaatttcatgaccagtaaaggctgctgctacaatgtcctaactgaaagatgatcatttgtagttgccttaaaataatgaatacatttccaaaatggtctctaacatttccttacagaactacttcttacttctttgccctgccctctcccaaaaaactacttcttttttcaaaagaaagtcagccatatctccattgtgcctaagtccagtgtttctttttttttttttttttgagacggagtctcactctgtcacccaggctggactgcaatgacgcgatcttggttcactgcaacctccgcatccggggttcaagccattctcctgcctcagcctcccaagtaactgggattacaggcatgtgtcaccatgcccagctaatttttttgtatttttagtagagatgggggtttcaccatattggccagtctggtctcgaactcctgaccttgtgatccactcgcctcagcctctcgaagtgctgagattacacacgtgagcaactgtgcaaggcctggtgtttcttgatacatgtaattctaccaaggtcttcttaatatgttcttttaaatgattgaattatatgttcagattattggagactaattctaatgtggaccttagaatacagttttgagtagagttgatcaaaatcaattaaaatagtctctttaaaaggaaagaaaacatctttaaggggaggaaccagagtgctgaaggaatggaagtccatctgcgtgtgtgcagggagactgggtaggaaagaggaagcaaatagaagagagaggttgaaaaacaaaatgggttacttgattggtgattaggtggtggtagagaagcaagtaaaaaggctaaatggaagggcaagtttccatcatctatagaaagctatataagacaagaactcccctttttttcccaaaggc

SEQ ID NO: 3148 - protein, 188 aa, Homo sapiens; identical to SEQ ID NO: 351

SEQ ID NO: 3149 - DNA, 2485 bp, Homo sapiens
ccgggcgctcgggctccgcccccggtacctctgtaggcgatcctgctctcgccgtggctttcgggtgctaggagacagttgccggcgttgggttgtgcgagacgctaactgtaccctccgggtttaacgctgtgaggcagcgcgcggaggaactggggataagcgccccggagcccccaaacagagcgcggccgctgggggacagcgcgcggcgccgggtcggggcggggcggcttttctgtcggaggacgcgaaccggcacgctgcgcctttaaggagtccagctgggctgggcgccggagctgggagcggcgcgggtaggagcccggcggcaggtcccagcccggggctagagaccgagggccggggtccgggcccggcggcgggacccaggcggttgaggctggtcagaatctcattttcagcttctgccagagccagtagcagttgggaaagaaggctgtgctctttgaagagagtcagccagcctgaaagagcaggatggatcttgatgtggttaacatgtttgtgattgcgggcggcacgctggccatcccaatcctggcatttgtggcttcatttcttctgtggccttcagcactgataagaatctattattggtactggcggaggacattgggcatgcaagtccgctatgttcaccatgaagactatcagttctgttattccttccggggcaggcctgggcacaaaccctccatcctcatgctccacggattctctgcccacaaggatatgtggctcagtgtggtcaagttccttccaaagaacctgcacttggtctgcgtggacatgccaggacatgagggcaccacccgctcctccctggatgacctgtccatagatgggcaagttaagaggatacaccagtttgtagaatgcctgaagctgaacaaaaaacctttccacctggtaggcacctccatgggtggccaggtggctggggtgtatgctgcttactacccatcggatgtctccagcctgtgtctcgtgtgtcctgctggcctgcagtactcaactgacaatcaatttgtacaacggctcaaagaactgcagggctctgccgccgtggagaagattcccttgatcccgtctaccccagaagagatgagtgaaatgcttcagctctgctcctatgtccgcttcaaggtgccccagcagatcctgcaaggccttgtcgatgtccgcatccctcataacaacttctaccgaaagttgtttttggaaatcgtcagtgagaagtccagatactctctccatcagaacatggacaagatcaaggttccgacgcagatcatctgggggaaacaagaccaggtgctggatgtgtctggggcagacatgttggccaagtcaattgccaactgccaggtggagcttctggaaaactgtgggcactcagtagtgatggaaagacccaggaagacagccaagctcataatcgactttttagcttctgtgcacaacacagacaacaacaagaagctggactgaggccccgactgcagcctgcattctgcacacagcatctgctcccatcccccaagtctgacgcagccaccactctcagggatcctgccccaaatgcggtcggagcgccagtgaccctgaggaagcccgtcccttatccctggtatccacggttccccagagctttggggaccacgcgaaaacctccaagatatttttcacaaaatagaaactcatatggaacaaaataagaaaccccagccatgaaatctaccatgaagtcttcaagttcatgtcactgagaagcttgtgcaaagcagccaccttggaccataattaaatcaaggacattttctttgagacattccttatagttggagactcaagatatttttgttgcatcaggtgtattcccttgcatgggcagtggcttttataggagcattagtcctcattcgctgaaccctgttgtttaggtctaatttaagttttacatagagacccatgtatgactgcagcccattggctgcaagaccagggaggaaagtggcaagctgtagaaaatgtttacacgcatggaggggcattgctctagccctcagagcgtccggagcagcagggtacatgggtgggaggttcattcagcacccaccagtcaggtatgttctgagtgaacccacagcagtcgcagaatgagcacctggcagggtgggtttcctaggaataatttattatttttaaaaataggcctaataaagcaataatgttctagacatctgtctaagtaatcagactcaggttccacacacaagcaacaactcgtgggcctcttttctatttcaatgtgctactaagaacccttggatgtaacatactagttagttaatgaattctgtgaattctgtgaagagtaatgtgattgaaaataagtctaaacagctgtaaaagtgaccacaatgacatgaaataaatttaataagtctagatcagcaac

SEQ ID NO: 3150 - protein, 337 aa, Homo sapiens
MDLDVVNMFVIAGGTLAIPILAFVASFLLWPSALIRIYYWYWRRTLGMQVRYVHHEDYQFCYSFRGRPGHKPSILMLHGFSAHKDMWLSVVKFLPKNLHLVCVDMPGHEGTTRSSLDDLSIDGQVKRIHQFVECLKLNKKPFHLVGTSMGGQVAGVYAAYYPSDVSSLCLVCPAGLQYSTDNQFVQRLKELQGSAAVEKIPLIPSTPEEMSEMLQLCSYVRFKVPQQILQGLVDVRIPHNNFYRKLFLEIVSEKSRYSLHQNMDKIKVPTQIIWGKQDQVLDVSGADMLAKSIANCQVELLENCGHSVVMERPRKTAKLIIDFLASVHNTDNNKKLD

SEQ ID NO: 3151 - DNA, 3154 bp, Homo sapiens
ccgggcgctcgggctccgcccccggtacctctgtaggcgatcctgctctcgccgtggctttcgggtgctaggagacagttgccggcgttgggttgtgcgagacgctaactgtaccctccgggtttaacgctgtgaggcagcgcgcggaggaactggggataagcgccccggagcccccaaacagagcgcggccgctgggggacagcgcgcggcgccgggtcggggcggggcggcttttctgtcggaggacgcgaaccggcacgctgcgcctttaaggagtccagctgggctgggcgccggagctgggagcggcgcgggtaggagcccggcggcaggtcccagcccggggctagagaccgagggccggggtccgggcccggcggcgggacccaggcggttgaggctggtcagaatctcattttcagcttctgccagagccagtagcagttgggaaagaaggctgtgctctttgaagagagtcagccagcctgaaagagcaggatggatcttgatgtggttaacatgtttgtgattgcgggcggcacgctggccatcccaatcctggcatttgtggcttcatttcttctgtggccttcagcactgataagaatctattattggtactggcggaggacattgggcatgcaagtccgctatgttcaccatgaagactatcagttctgttattccttccggggcaggcctgggcacaaaccctccatcctcatgctccacggattctctgcccacaaggatatgtggctcagtgtggtcaagttccttccaaagaacctgcacttggtctgcgtggacatgccaggacatgagggcaccacccgctcctccctggatgacctgtccatagatgggcaagttaagaggatacaccagtttgtagaatgcctgaagctgaacaaaaaacctttccacctggtaggcacctccatgggtggccaggtggctggggtgtatgctgcttactacccatcggatgtctccagcctgtgtctcgtgtgtcctgctggcctgcagtactcaactgacaatcaatttgtacaacggctcaaagaactgcagggctctgccgccgtggagaagattcccttgatcccgtctaccccagaagagatgagtgaaatgcttcagctctgctcctatgtccgcttcaaggtgccccagcagatcctgcaaggccttgtcgatgtccgcatccctcataacaacttctaccgaaagttgtttttggaaatcgtcagtgagaagtccagatactctctccatcagaacatggacaagatcaaggttccgacgcagatcatctgggggaaacaagaccaggtgctggatgtgtctggggcagacatgttggccaagtcaattgccaactgccaggtggagcttctggaaaactgtgggcactcagtagtgatggaaagacccaggaagacagccaagctcataatcgactttttagcttctgtgcacaacacagacaacaacaagaagctggactgaggccccgactgcagcctgcattctgcacacagcatctgctcccatcccccaagtctgacgcagccaccactctcagggatcctgccccaaatgcggtcggagcgccagtgaccctgaggaagcccgtcccttatccctggtatccacggttccccagagctttggggaccacgcgaaaacctccaagatatttttcacaaaatagaaactcatatggaacaaaataagaaaccccagccatgaaatctaccatgaagtcttcaagttcatgtcactgagaagcttgtgcaaagcagccaccttggaccataattaaatcaaggacattttctttgagacattccttatagttggagactcaagatatttttgttgcatcaggtgtattcccttgcatgggcagtggcttttataggagcattagtcctcattcgctgaaccctgttgtttaggtctaatttaagttttacatagagacccatgtatgactgcagcccattggctgcaagaccagggaggaaagtggcaagctgtagaaaatgtttacacgcatggaggggcattgctctagccctcagagcgtccggagcagcagggtacatgggtgggaggttcattcagcacccaccagtcaggtatgttctgagtgaacccacagcagtcgcagaatgagcacctggcagggtgggtttcctaggaataatttattatttttaaaaataggcctaataaagcaataatgttctagacatctgtctaagtaatcagactcaggttccacacacaagcaacaactcgtgggcctcttttctatttcaatgtgctactaagaacccttggatgtaacatactagttagttaatgaattctgtgaattctgtgaagagtaatgtgattgaaaataagtctaaacagctgtaaaagtgaccacaatgacatgaaataaatttaataagtctagatcagcaacatgcaggtggtttctatttctgaactcctaattaggtgcaatgttggcagattttctgttaactttaaaatgtgttttttaaaataaggcttgtttaacaggctttggaagtctttgcatggatgatttattaggtttaaggaatcatgtttgcaatttttatccagttgaaattgtatatcaaaggccaggtgcagtggctcatgcctgtaatcccagcacttgagaaggccgaggtgggtcgattgcttgaggccaggagttcaagaccaacctggccaacatggcaaaatcttatctctactaaaaatgcaaaaattatctgggcgtggtgggacacacctgtaatcccagctacctgggagcctgaggcatgagaatcgcttgaacccgggaggcggaggttacagtgagccgagattgtgccattgcactccagcctgggcaataagcgcaaaaatccatctcaaaataatataataataattcactggaaattgtatatcaaaaaaggcaagagtcatcaaaatattctttttgactctttctgtaggatttaggagccctaaactccccaggagcttcactctttccaattttttttttacagaaaatctacagccaagtcattctgggaataaagtgagataaactttacagtttaaatct

SEQ ID NO: 3152 - protein, 337 aa, Homo sapiens; identical to SEQ ID NO: 3150

SEQ ID NO: 3153 - DNA, 2394 bp, Homo sapiens
acctctgtaggcgatcctgctctcgccgtggctttcgggtgctaggagacagttgccggcgttgggttgtgcgagacgctaactgtaccctccgggtttaacgctgtgaggcagcgcgcggaggaactggggataagcgccccggagcccccaaacagagcgcggccgctgggggacagcgcgcggcgccgggtcggggcggggcggcttttctgtcggaggacgcgaaccggcacgctgcgcctttaaggagtccagctgggctgggcgccggagctgggagcggcgcgggtaggagcccggcggcaggtcccagcccggggctagagaccgagggccggggtccgggcccggcggcgggacccaggcggttgaggctggtcaggagtcagccagcctgaaagagcaggatggatcttgatgtggttaacatgtttgtgattgcgggcggcacgctggccatcccaatcctggcatttgtggcttcatttcttctgtggccttcagcactgataagaatctattattggtactggcggaggacattgggcatgcaagtccgctatgttcaccatgaagactatcagttctgttattccttccggggcaggcctgggcacaaaccctccatcctcatgctccacggattctctgcccacaaggatatgtggctcagtgtggtcaagttccttccaaagaacctgcacttggtctgcgtggacatgccaggacatgagggcaccacccgctcctccctggatgacctgtccatagatgggcaagttaagaggatacaccagtttgtagaatgcctgaagctgaacaaaaaacctttccacctggtaggcacctccatgggtggccaggtggctggggtgtatgctgcttactacccatcggatgtctccagcctgtgtctcgtgtgtcctgctggcctgcagtactcaactgacaatcaatttgtacaacggctcaaagaactgcagggctctgccgccgtggagaagattcccttgatcccgtctaccccagaagagatgagtgaaatgcttcagctctgctcctatgtccgcttcaaggtgccccagcagatcctgcaaggccttgtcgatgtccgcatccctcataacaacttctaccgaaagttgtttttggaaatcgtcagtgagaagtccagatactctctccatcagaacatggacaagatcaaggttccgacgcagatcatctgggggaaacaagaccaggtgctggatgtgtctggggcagacatgttggccaagtcaattgccaactgccaggtggagcttctggaaaactgtgggcactcagtagtgatggaaagacccaggaagacagccaagctcataatcgactttttagcttctgtgcacaacacagacaacaacaagaagctggactgaggccccgactgcagcctgcattctgcacacagcatctgctcccatcccccaagtctgacgcagccaccactctcagggatcctgccccaaatgcggtcggagcgccagtgaccctgaggaagcccgtcccttatccctggtatccacggttccccagagctttggggaccacgcgaaaacctccaagatatttttcacaaaatagaaactcatatggaacaaaataagaaaccccagccatgaaatctaccatgaagtcttcaagttcatgtcactgagaagcttgtgcaaagcagccaccttggaccataattaaatcaaggacattttctttgagacattccttatagttggagactcaagatatttttgttgcatcaggtgtattcccttgcatgggcagtggcttttataggagcattagtcctcattcgctgaaccctgttgtttaggtctaatttaagttttacatagagacccatgtatgactgcagcccattggctgcaagaccagggaggaaagtggcaagctgtagaaaatgtttacacgcatggaggggcattgctctagccctcagagcgtccggagcagcagggtacatgggtgggaggttcattcagcacccaccagtcaggtatgttctgagtgaacccacagcagtcgcagaatgagcacctggcagggtgggtttcctaggaataatttattatttttaaaaataggcctaataaagcaataatgttctagacatctgtctaagtaatcagactcaggttccacacacaagcaacaactcgtgggcctcttttctatttcaatgtgctactaagaacccttggatgtaacatactagttagttaatgaattctgtgaattctgtgaagagtaatgtgattgaaaataagtctaaacagctgtaaaagtgaccacaatgacatgaaataaatttaataagtctagatcagcaac

SEQ ID NO: 3154 - protein, 337 aa, Homo sapiens; identical to SEQ ID NO: 3150

SEQ ID NO: 3155 - DNA, 3063 bp, Homo sapiens
acctctgtaggcgatcctgctctcgccgtggctttcgggtgctaggagacagttgccggcgttgggttgtgcgagacgctaactgtaccctccgggtttaacgctgtgaggcagcgcgcggaggaactggggataagcgccccggagcccccaaacagagcgcggccgctgggggacagcgcgcggcgccgggtcggggcggggcggcttttctgtcggaggacgcgaaccggcacgctgcgcctttaaggagtccagctgggctgggcgccggagctgggagcggcgcgggtaggagcccggcggcaggtcccagcccggggctagagaccgagggccggggtccgggcccggcggcgggacccaggcggttgaggctggtcaggagtcagccagcctgaaagagcaggatggatcttgatgtggttaacatgtttgtgattgcgggcggcacgctggccatcccaatcctggcatttgtggcttcatttcttctgtggccttcagcactgataagaatctattattggtactggcggaggacattgggcatgcaagtccgctatgttcaccatgaagactatcagttctgttattccttccggggcaggcctgggcacaaaccctccatcctcatgctccacggattctctgcccacaaggatatgtggctcagtgtggtcaagttccttccaaagaacctgcacttggtctgcgtggacatgccaggacatgagggcaccacccgctcctccctggatgacctgtccatagatgggcaagttaagaggatacaccagtttgtagaatgcctgaagctgaacaaaaaacctttccacctggtaggcacctccatgggtggccaggtggctggggtgtatgctgcttactacccatcggatgtctccagcctgtgtctcgtgtgtcctgctggcctgcagtactcaactgacaatcaatttgtacaacggctcaaagaactgcagggctctgccgccgtggagaagattcccttgatcccgtctaccccagaagagatgagtgaaatgcttcagctctgctcctatgtccgcttcaaggtgccccagcagatcctgcaaggccttgtcgatgtccgcatccctcataacaacttctaccgaaagttgtttttggaaatcgtcagtgagaagtccagatactctctccatcagaacatggacaagatcaaggttccgacgcagatcatctgggggaaacaagaccaggtgctggatgtgtctggggcagacatgttggccaagtcaattgccaactgccaggtggagcttctggaaaactgtgggcactcagtagtgatggaaagacccaggaagacagccaagctcataatcgactttttagcttctgtgcacaacacagacaacaacaagaagctggactgaggccccgactgcagcctgcattctgcacacagcatctgctcccatcccccaagtctgacgcagccaccactctcagggatcctgccccaaatgcggtcggagcgccagtgaccctgaggaagcccgtcccttatccctggtatccacggttccccagagctttggggaccacgcgaaaacctccaagatatttttcacaaaatagaaactcatatggaacaaaataagaaaccccagccatgaaatctaccatgaagtcttcaagttcatgtcactgagaagcttgtgcaaagcagccaccttggaccataattaaatcaaggacattttctttgagacattccttatagttggagactcaagatatttttgttgcatcaggtgtattcccttgcatgggcagtggcttttataggagcattagtcctcattcgctgaaccctgttgtttaggtctaatttaagttttacatagagacccatgtatgactgcagcccattggctgcaagaccagggaggaaagtggcaagctgtagaaaatgtttacacgcatggaggggcattgctctagccctcagagcgtccggagcagcagggtacatgggtgggaggttcattcagcacccaccagtcaggtatgttctgagtgaacccacagcagtcgcagaatgagcacctggcagggtgggtttcctaggaataatttattatttttaaaaataggcctaataaagcaataatgttctagacatctgtctaagtaatcagactcaggttccacacacaagcaacaactcgtgggcctcttttctatttcaatgtgctactaagaacccttggatgtaacatactagttagttaatgaattctgtgaattctgtgaagagtaatgtgattgaaaataagtctaaacagctgtaaaagtgaccacaatgacatgaaataaatttaataagtctagatcagcaacatgcaggtggtttctatttctgaactcctaattaggtgcaatgttggcagattttctgttaactttaaaatgtgttttttaaaataaggcttgtttaacaggctttggaagtctttgcatggatgatttattaggtttaaggaatcatgtttgcaatttttatccagttgaaattgtatatcaaaggccaggtgcagtggctcatgcctgtaatcccagcacttgagaaggccgaggtgggtcgattgcttgaggccaggagttcaagaccaacctggccaacatggcaaaatcttatctctactaaaaatgcaaaaattatctgggcgtggtgggacacacctgtaatcccagctacctgggagcctgaggcatgagaatcgcttgaacccgggaggcggaggttacagtgagccgagattgtgccattgcactccagcctgggcaataagcgcaaaaatccatctcaaaataatataataataattcactggaaattgtatatcaaaaaaggcaagagtcatcaaaatattctttttgactctttctgtaggatttaggagccctaaactccccaggagcttcactctttccaattttttttttacagaaaatctacagccaagtcattctgggaataaagtgagataaactttacagtttaaatct

SEQ ID NO: 3156 - protein, 337 aa, Homo sapiens; identical to SEQ ID NO: 3150

SEQ ID NO: 3157 - DNA, 1404 bp, Homo sapiens
ggcttttatttcttaaatctctgacactttgaatgtctctttgggcccctgaagagaggaagtggtggcctggatctggtgactatcccttgattctgcggtggtgccacaggcacagtccagcacatactcactttgttttccttttctgacaagtgtttttggaaatcgtcagtgagaagtccagatactctctccatcagaacatggacaagatcaaggttccgacgcagatcatctgggggaaacaagaccaggtgctggatgtgtctggggcagacatgttggccaagtcaattgccaactgccaggtggagcttctggaaaactgtgggcactcagtagtgatggaaagacccaggaagacagccaagctcataatcgactttttagcttctgtgcacaacacagacaacaacaagaagctggactgaggccccgactgcagcctgcattctgcacacagcatctgctcccatcccccaagtctgacgcagccaccactctcagggatcctgccccaaatgcggtcggagcgccagtgaccctgaggaagcccgtcccttatccctggtatccacggttccccagagctttggggaccacgcgaaaacctccaagatatttttcacaaaatagaaactcatatggaacaaaataagaaaccccagccatgaaatctaccatgaagtcttcaagttcatgtcactgagaagcttgtgcaaagcagccaccttggaccataattaaatcaaggacattttctttgagacattccttatagttggagactcaagatatttttgttgcatcaggtgtattcccttgcatgggcagtggcttttataggagcattagtcctcattcgctgaaccctgttgtttaggtctaatttaagttttacatagagacccatgtatgactgcagcccattggctgcaagaccagggaggaaagtggcaagctgtagaaaatgtttacacgcatggaggggcattgctctagccctcagagcgtccggagcagcagggtacatgggtgggaggttcattcagcacccaccagtcaggtatgttctgagtgaacccacagcagtcgcagaatgagcacctggcagggtgggtttcctaggaataatttattatttttaaaaataggcctaataaagcaataatgttctagacatctgtctaagtaatcagactcaggttccacacacaagcaacaactcgtgggcctcttttctatttcaatgtgctactaagaacccttggatgtaacatactagttagttaatgaattctgtgaattctgtgaagagtaatgtgattgaaaataagtctaaacagctgtaaaagtgaccacaatgacatgaaataaatttaataagtctagatcagcaac

SEQ ID NO: 3158 - protein, 75 aa, Homo sapiens
MDKIKVPTQIIWGKQDQVLDVSGADMLAKSIANCQVELLENCGHSVVMERPRKTAKLIIDFLASVHNTDNNKKLD

SEQ ID NO: 3159 - DNA, 2073 bp, Homo sapiens
ggcttttatttcttaaatctctgacactttgaatgtctctttgggcccctgaagagaggaagtggtggcctggatctggtgactatcccttgattctgcggtggtgccacaggcacagtccagcacatactcactttgttttccttttctgacaagtgtttttggaaatcgtcagtgagaagtccagatactctctccatcagaacatggacaagatcaaggttccgacgcagatcatctgggggaaacaagaccaggtgctggatgtgtctggggcagacatgttggccaagtcaattgccaactgccaggtggagcttctggaaaactgtgggcactcagtagtgatggaaagacccaggaagacagccaagctcataatcgactttttagcttctgtgcacaacacagacaacaacaagaagctggactgaggccccgactgcagcctgcattctgcacacagcatctgctcccatcccccaagtctgacgcagccaccactctcagggatcctgccccaaatgcggtcggagcgccagtgaccctgaggaagcccgtcccttatccctggtatccacggttccccagagctttggggaccacgcgaaaacctccaagatatttttcacaaaatagaaactcatatggaacaaaataagaaaccccagccatgaaatctaccatgaagtcttcaagttcatgtcactgagaagcttgtgcaaagcagccaccttggaccataattaaatcaaggacattttctttgagacattccttatagttggagactcaagatatttttgttgcatcaggtgtattcccttgcatgggcagtggcttttataggagcattagtcctcattcgctgaaccctgttgtttaggtctaatttaagttttacatagagacccatgtatgactgcagcccattggctgcaagaccagggaggaaagtggcaagctgtagaaaatgtttacacgcatggaggggcattgctctagccctcagagcgtccggagcagcagggtacatgggtgggaggttcattcagcacccaccagtcaggtatgttctgagtgaacccacagcagtcgcagaatgagcacctggcagggtgggtttcctaggaataatttattatttttaaaaataggcctaataaagcaataatgttctagacatctgtctaagtaatcagactcaggttccacacacaagcaacaactcgtgggcctcttttctatttcaatgtgctactaagaacccttggatgtaacatactagttagttaatgaattctgtgaattctgtgaagagtaatgtgattgaaaataagtctaaacagctgtaaaagtgaccacaatgacatgaaataaatttaataagtctagatcagcaacatgcaggtggtttctatttctgaactcctaattaggtgcaatgttggcagattttctgttaactttaaaatgtgttttttaaaataaggcttgtttaacaggctttggaagtctttgcatggatgatttattaggtttaaggaatcatgtttgcaatttttatccagttgaaattgtatatcaaaggccaggtgcagtggctcatgcctgtaatcccagcacttgagaaggccgaggtgggtcgattgcttgaggccaggagttcaagaccaacctggccaacatggcaaaatcttatctctactaaaaatgcaaaaattatctgggcgtggtgggacacacctgtaatcccagctacctgggagcctgaggcatgagaatcgcttgaacccgggaggcggaggttacagtgagccgagattgtgccattgcactccagcctgggcaataagcgcaaaaatccatctcaaaataatataataataattcactggaaattgtatatcaaaaaaggcaagagtcatcaaaatattctttttgactctttctgtaggatttaggagccctaaactccccaggagcttcactctttccaattttttttttacagaaaatctacagccaagtcattctgggaataaagtgagataaactttacagtttaaatct

SEQ ID NO: 3160 - protein, 75 aa, Homo sapiens; identical to SEQ ID NO: 3158

SEQ ID NO: 3161 - DNA, 2359 bp, Homo sapiens
tttcatgctgttttcacctattgactgcatctgcgtttcttctgagtgtttccacagtagctgggtgttattcctgctcagtgggttgccgtggcagccttagctgtgagtgagtgacaaggcagaggtttccatttccttggctggaattagctgttaagctccccattagctgttccttttcctggtccagggatgccctgcaggactcttttccttgactgaggcatcgtcttaccttaactccccagtgggcagaaaatcttggttttaataatttgagttggtgagaatagagcaaagacacagaaggtgcttgagtttgttggggcttttgcttttgccgttaaggatggggaggaggggccctcttgtctaggatgaattgaaggtaaaggcagctaagagaaggggagtgaatgcggatccacttctgagggaggatgttggggaaaaagatggaggtggattggcatagtagctgggaacccagaggaaaaggagaggaaatgagttgtttgaaaaggatcagccctggaaaagttctggctttcatgttggaaaagcattccccatatctgcagaggttagagccaagaaacacacagctctggggatccccagaggaccttcaaagagacctccagctgggtgcggtggctcaggcctgtaatcctagcactttgggaggctgaggcaggtggatcacctgaggtcaggagttcgagaccagcctggccaacgtggtgaaaccccatctctactagaaatacaaaaattagctgggcatggtggcgggcacctataatcccagctactggggaggctgaggcagaagatcacttgaacctgggaggcggaggttgcagtgagttgagatcacgccacttcattccagcctgggcgaaagagtgaaactccttttcaacaaataaagagatacccccagcttgtgataattagccttcccctcttgcatccttcctacagcttgggctgccctaaccagccacagggccagcctgatcaagtcactcaccttaacacagcctgtggttccccatggtccgtgtggctgtaggagcagcgccctcctctctgccccttctccccaccatgccacccccactgcccatgtgcttggtgtctcagccgccgtgctccttggtggcccctgcactcgccatgatctcccaccctgtgccattcccacatccgtgaatgctcctcccctgtcccctttctgctctcccgggactcaggaacgaggtcttccctcgaccctgctcatcccctgtgctctctgacttccccaccataccataacctcctcaagggcaaggaacgtttgttttctacctcagtattgctgacatcagcccaactcctggcacagagttgcagaataaaacaggaggcatcatggttacttccattcagacagccacaagccccaacaccaaagggacttggtcctaaaattcacatcctcctgccccactgacccctgccaggccttggtggaagttctgtccacagagtgcacacgtgggtgtctgaatctttgtgtatcatccagctccctttcttgcccagcaggtgctggatgtgtctggggcagacatgttggccaagtcaattgccaactgccaggtggagcttctggaaaactgtgggcactcagtagtgatggaaagacccaggaagacagccaagctcataatcgactttttagcttctgtgcacaacacagacaacaacaagaagctggactgaggccccgactgcagcctgcattctgcacacacattagtcctcattcgctgaaccctgttgtttaggtctaatttaagttttacatagagacccatgtatgactgcagcccattggctgcaagaccagggaggaaagtggcaagctgtagaaaatgtttacacgcatggaggggcattgctctagccctcagagcgtccggagcagcagggtacatgggtgggaggttcattcagcacccaccagtcaggtatgttctgagtgaacccacagcagtcgcagaatgagcacctggcagggtgggtttcctaggaataatttattatttttaaaaataggcctaataaagcaataatgttctagacatctgtctaagtaatcagactcaggttccacacacaagcaacaactcgtgggcctcttttctatttcaatgtgctactaagaacccttggatgtaacatactagttagttaatgaattctgtgaattctgtgaagagtaatgtgattgaaaataagtctaaacagctgtaaaagtgaccacaatgacatgaaataaatttaataagtctagatcagcaac

SEQ ID NO: 3162 - protein, 83 aa, Homo sapiens
MLGKKMEVDWHSSWEPRGKGEEMSCLKRISPGKVLAFMLEKHSPYLQRLEPRNTQLWGSPEDLQRDLQLGAVAQACNPSTLGG

SEQ ID NO: 3163 - DNA, 3028 bp, Homo sapiens
tttcatgctgttttcacctattgactgcatctgcgtttcttctgagtgtttccacagtagctgggtgttattcctgctcagtgggttgccgtggcagccttagctgtgagtgagtgacaaggcagaggtttccatttccttggctggaattagctgttaagctccccattagctgttccttttcctggtccagggatgccctgcaggactcttttccttgactgaggcatcgtcttaccttaactccccagtgggcagaaaatcttggttttaataatttgagttggtgagaatagagcaaagacacagaaggtgcttgagtttgttggggcttttgcttttgccgttaaggatggggaggaggggccctcttgtctaggatgaattgaaggtaaaggcagctaagagaaggggagtgaatgcggatccacttctgagggaggatgttggggaaaaagatggaggtggattggcatagtagctgggaacccagaggaaaaggagaggaaatgagttgtttgaaaaggatcagccctggaaaagttctggctttcatgttggaaaagcattccccatatctgcagaggttagagccaagaaacacacagctctggggatccccagaggaccttcaaagagacctccagctgggtgcggtggctcaggcctgtaatcctagcactttgggaggctgaggcaggtggatcacctgaggtcaggagttcgagaccagcctggccaacgtggtgaaaccccatctctactagaaatacaaaaattagctgggcatggtggcgggcacctataatcccagctactggggaggctgaggcagaagatcacttgaacctgggaggcggaggttgcagtgagttgagatcacgccacttcattccagcctgggcgaaagagtgaaactccttttcaacaaataaagagatacccccagcttgtgataattagccttcccctcttgcatccttcctacagcttgggctgccctaaccagccacagggccagcctgatcaagtcactcaccttaacacagcctgtggttccccatggtccgtgtggctgtaggagcagcgccctcctctctgccccttctccccaccatgccacccccactgcccatgtgcttggtgtctcagccgccgtgctccttggtggcccctgcactcgccatgatctcccaccctgtgccattcccacatccgtgaatgctcctcccctgtcccctttctgctctcccgggactcaggaacgaggtcttccctcgaccctgctcatcccctgtgctctctgacttccccaccataccataacctcctcaagggcaaggaacgtttgttttctacctcagtattgctgacatcagcccaactcctggcacagagttgcagaataaaacaggaggcatcatggttacttccattcagacagccacaagccccaacaccaaagggacttggtcctaaaattcacatcctcctgccccactgacccctgccaggccttggtggaagttctgtccacagagtgcacacgtgggtgtctgaatctttgtgtatcatccagctccctttcttgcccagcaggtgctggatgtgtctggggcagacatgttggccaagtcaattgccaactgccaggtggagcttctggaaaactgtgggcactcagtagtgatggaaagacccaggaagacagccaagctcataatcgactttttagcttctgtgcacaacacagacaacaacaagaagctggactgaggccccgactgcagcctgcattctgcacacacattagtcctcattcgctgaaccctgttgtttaggtctaatttaagttttacatagagacccatgtatgactgcagcccattggctgcaagaccagggaggaaagtggcaagctgtagaaaatgtttacacgcatggaggggcattgctctagccctcagagcgtccggagcagcagggtacatgggtgggaggttcattcagcacccaccagtcaggtatgttctgagtgaacccacagcagtcgcagaatgagcacctggcagggtgggtttcctaggaataatttattatttttaaaaataggcctaataaagcaataatgttctagacatctgtctaagtaatcagactcaggttccacacacaagcaacaactcgtgggcctcttttctatttcaatgtgctactaagaacccttggatgtaacatactagttagttaatgaattctgtgaattctgtgaagagtaatgtgattgaaaataagtctaaacagctgtaaaagtgaccacaatgacatgaaataaatttaataagtctagatcagcaacatgcaggtggtttctatttctgaactcctaattaggtgcaatgttggcagattttctgttaactttaaaatgtgttttttaaaataaggcttgtttaacaggctttggaagtctttgcatggatgatttattaggtttaaggaatcatgtttgcaatttttatccagttgaaattgtatatcaaaggccaggtgcagtggctcatgcctgtaatcccagcacttgagaaggccgaggtgggtcgattgcttgaggccaggagttcaagaccaacctggccaacatggcaaaatcttatctctactaaaaatgcaaaaattatctgggcgtggtgggacacacctgtaatcccagctacctgggagcctgaggcatgagaatcgcttgaacccgggaggcggaggttacagtgagccgagattgtgccattgcactccagcctgggcaataagcgcaaaaatccatctcaaaataatataataataattcactggaaattgtatatcaaaaaaggcaagagtcatcaaaatattctttttgactctttctgtaggatttaggagccctaaactccccaggagcttcactctttccaattttttttttacagaaaatctacagccaagtcattctgggaataaagtgagataaactttacagtttaaatct

SEQ ID NO: 3164 - protein, 83 aa, Homo sapiens; identical to SEQ ID NO: 3162

SEQ ID NO: 3165 - DNA, 386 bp, Homo sapiens
tacatgggtgggaggttcattcagcacccaccagtcagaaaatctacagccaagtcattctgggaataaagtgagataaactttacagtttaaatctgaattcaggactgtgtttgaatatttcagtttaccagagaagaatggaacttagagcttaaaaacaagaagaagatatgaaaatatgacatcaagctgggctgcagctaaagcagtgcctcagagggaaattcataggcttcaatacgtatattagaagggaagaggctaggtggagtagctcacacctgtagtttcaacaccttgggaggccaaggcgggaggactgcttgagcccaggagtttgagaccagcctgggcaacatggcaagaccccatctcttatataa

SEQ ID NO: 3166 - protein, 35 aa, Homo sapiens
LTPVVSTPWEAKAGGLLEPRSLRPAWATWQDPISY

SEQ ID NO: 3167 - DNA, 1158 bp, Homo sapiens
atccgcctgggcgtcacgcttcgtggggcgggacgaggagaagccaaacgtaaagacaccaggagtttctcgggcccagctgtggctgctgccggggagccccaagccttggcgggtccttgcggcgaataggagtctggtcaggcgtcaggctagtccgacgaagagtgggtgtgatcagcactggaaaagatgcctgcccctgctgccacatatgaaagagtagtttacaaaaacccttccgagtaccactacatgaaagtctgcctagaatttcaagattgtggagttggactgaatgctgcacagttcaaacagctgcttatttcggctgtgaaggacctgtttggggaggttgatgccgccttacctttggacatcctaacctatgaagagaagaccttgtcagccatcttgagaatatgtagcagtggtcttgtcaaattgtggagctctttgaccctgttaggatcctataaaggcaaaaaatgtgctttccgggtgattcaggtttctccatttcttcttgcattatctggtaatagtagggaactagtattggattgaatgaatagtcttccattttggaaacgttcatccactctcatatttattttttggtgcctgcatgtttgaagactgaagcaggctaaaagctcttgatgaaatttgagggtgctgaagatgttcccactaatttccagccatcacctttggtggggtgggcttcggaggacagtctgtctgaacctgccagtgctgaccctgcagcactttcagcatatgcacatcaaagttggagaccgcgctgaacttaggagggccttcacacagactgatgtggctaccttctcagaattaacaggggatgtcaatcctttgcatttgaatgaagactttgcaaaacacaccaagtttggaaatacaattgtacatggagttttgatcaacggacttatctcagctctcctaggaactaaaatgccagggccaggctgtgtatttctttcccaggaaattagctttccagcccctttatatattggagaagttgttttagcttctgcagaagtgaaaaagctgaagcggttcattgctattattgcagtgtcatgttctgtaatagaaagtaaaaagactgttatggaaggctgggtt

SEQ ID NO: 3168 - protein, 124 aa, Homo sapiens; identical to SEQ ID NO: 355

SEQ ID NO: 3169 - DNA, 1566 bp, Homo sapiens
atccgcctgggcgtcacgcttcgtggggcgggacgaggagaagccaaacgtaaagacaccaggagtttctcgggcccagctgtggctgctgccggggagccccaagccttggcgggtccttgcggcgaataggagtctggtcaggcgtcaggctagtccgacgaagagtgggtgtgatcagcactggaaaagatgcctgcccctgctgccacatatgaaagagtagtttacaaaaacccttccgagtaccactacatgaaagtctgcctagaatttcaagattgtggagttggactgaatgctgcacagttcaaacagctgcttatttcggctgtgaaggacctgtttggggaggttgatgccgccttacctttggacatcctaacctatgaagagaagaccttgtcagccatcttgagaatatgtagcagtggtcttgtcaaattgtggagctctttgaccctgttaggatcctataaaggcaaaaaatgtgctttccgggtgattcaggtttctccatttcttcttgcattatctggtaatagtagggaactagtattggattgaatgaatagtcttccattttggaaacgttcatccactctcatatttattttttggtgcctgcatgtttgaagactgaagcaggctaaaagctcttgatgaaatttgagggtgctgaagatgttcccactaatttccagccatcacctttggtggggtgggcttcggaggacagtctgtctgaacctgccagtgctgaccctgcagcactttcagcatatgcacatcaaagttggagaccgcgctgaacttaggagggccttcacacagactgatgtggctaccttctcagaattaacaggggatgtcaatcctttgcatttgaatgaagactttgcaaaacacaccaagtttggaaatacaattgtacatggagttttgatcaacggacttatctcagctctcctaggaactaaaatgccagggccaggctgtgtatttctttcccaggaaattagctttccagcccctttatatattggagaagttgttttagcttctgcagaagtgaaaaagctgaagcggttcattgctattattgcagtgtcatgttctgtaatagaaagtaaaaagactgttatggaaggctgggttaaagttatggttccagaagcttccaaatcctgaaatagatgttttaaagatgcaacctcaaacaccaatgctgttgttaaagagcctatggggaattgctgctctttaccaaagaatggttgataggcccagaagcccatcttagttaggggaagggagcaggaagagggttgttcaaatgcccactttccagtttggccttatgcttcatgcagacttgagtgtatgcaggatttcattatctgcctgggttttttgtttgttttttgttttttaattcaagaagtaggctgggcccggtggctcatgcctgtaatcctggcactttgggaggctgcggcaggcggatcacttgaggtcaggagtccaagaccagcctggccaacatggtgaaaccccatctctacc

SEQ ID NO: 3170 - protein, 124 aa, Homo sapiens; identical to SEQ ID NO: 355

SEQ ID NO: 3171 - DNA, 2743 bp, Homo sapiens
atccgcctgggcgtcacgcttcgtggggcgggacgaggagaagccaaacgtaaagacaccaggagtttctcgggcccagctgtggctgctgccggggagccccaagccttggcgggtccttgcggcgaataggagtctggtcaggcgtcaggctagtccgacgaagagtgggtgtgatcagcactggaaaagatgcctgcccctgctgccacatatgaaagagtagtttacaaaaacccttccgagtaccactacatgaaagtctgcctagaatttcaagattgtggagttggactgaatgctgcacagttcaaacagctgcttatttcggctgtgaaggacctgtttggggaggttgatgccgccttacctttggacatcctaacctatgaagagaagaccttgtcagccatcttgagaatatgtagcagtggtcttgtcaaattgtggagctctttgaccctgttaggatcctataaaggcaaaaaatgtgctttccgggtgattcaggtttctccatttcttcttgcattatctggtaatagtagggaactagtattggattgaatgaatagtcttccattttggaaacgttcatccactctcatatttattttttggtgcctgcatgtttgaagactgaagcaggctaaaagctcttgatgaaatttgagggtgctgaagatgttcccactaatttccagccatcacctttggtggggtgggcttcggaggacagtctgtctgaacctgccagtgctgaccctgcagcactttcagcatatgcacatcaaagttggagaccgcgctgaacttaggagggccttcacacagactgatgtggctaccttctcagaattaacaggggatgtcaatcctttgcatttgaatgaagactttgcaaaacacaccaagtttggaaatacaattgtacatggagttttgatcaacggacttatctcagctctcctaggaactaaaatgccagggccaggctgtgtatttctttcccaggaaattagctttccagcccctttatatattggagaagttgttttagcttctgcagaagtgaaaaagctgaagcggttcattgctattattgcagtgtcatgttctgtaatagaaagtaaaaagactgttatggaaggctgggttaaagttatggttccagaagcttccaaatcctgaaatagatgttttaaagatgcaacctcaaacaccaatgctgttgttaaagagcctatggggaattgctgctctttaccaaagaatggttgataggcccagaagcccatcttagttaggggaagggagcaggaagagggttgttcaaatgcccactttccagtttggccttatgcttcatgcagacttgagtgtatgcaggatttcattatctgcctgggttttttgtttgttttttgttttttaattcaagaagtaggctgggcccggtggctcatgcctgtaatcctggcactttgggaggctgcggcaggcggatcacttgaggtcaggagtccaagaccagcctggccaacatggtgaaaccccatctctaccaaaaaaaaaaaaaaaaaaaaagtgcaactagctgtgcttggtgacttggccctgtagtcccagttgcttgggaggctgaggtgggagaattgcttgggcctgagagctggaggttatggtgagaaactgagattgcaccactgcactgtagcctgagtgacagagcgagaccctgtctcaagaaagaagtattgggaaggttatttaaagactctacttttaaatcaggcgtggcagctcacgcctgtaatcccagcattttgggaggctgaggcaggcgaatcacttgaggtcaggagttcaagaccagcctggccaacatgtgaaaccccatctctactaaaaatacaaaaactaaccgggcatggtggcgggcacctgtaatcccagctacttgggaggctgaggcaggagaatctcttgaacctgggaggttgcagtgagctgaaatcacaccactgcacttcagcctgggtgacagagcaaaactccacctcaaaaaaaaaaaaaagattctacttttagaaattcagacctagatagatttgcatttggataacaaatccctacctatagccatgtggaagcagcttgtcactgtattttaactgtgtaacaattattgaaggcgaaaatagaagttgggtcatctttgaacacctaccttttatcaatgaatatttttagactgttcttcagtatctgagtcagagtttattgtaatttgttatttacaccaaggtggcatcttagtctaccttcagtgagacttgcgtttcaggggaggggcgtatgtgcatcctcggtctcagttatgtaaacggtctgatctgtaaaatagtggtagcacatgccatgtgggatagttggtggagatgatagatggagttaagcacagggcccagcctgtcagcagtagctactattattgttgcccatttcccctgcaactgaggtgagaggttttcctgagtttgaagctgactggcccacagttaaacgtaacagaccagtttttcagggtgtcagccaacctctattagtgttcttaagtacagtttctgttataaaagttcagattattccttgaaaatttggatctacctcccattattatgagtaatacatgcttatagtaaaaaaaaaaaaattgtaagaaataaatattaagaagatt

SEQ ID NO: 3172 - protein, 124 aa, Homo sapiens; identical to SEQ ID NO: 355

SEQ ID NO: 3173 - DNA, 3263 bp, Homo sapiens
atccgcctgggcgtcacgcttcgtggggcgggacgaggagaagccaaacgtaaagacaccaggagtttctcgggcccagctgtggctgctgccggggagccccaagccttggcgggtccttgcggcgaataggagtctggtcaggcgtcaggctagtccgacgaagagtgggtgtgatcagcactggaaaagatgcctgcccctgctgccacatatgaaagagtagtttacaaaaacccttccgagtaccactacatgaaagtctgcctagaatttcaagattgtggagttggactgaatgctgcacagttcaaacagctgcttatttcggctgtgaaggacctgtttggggaggttgatgccgccttacctttggacatcctaacctatgaagagaagaccttgtcagccatcttgagaatatgtagcagtggtcttgtcaaattgtggagctctttgaccctgttaggatcctataaaggcaaaaaatgtgctttccgggtgattcaggtttctccatttcttcttgcattatctggtaatagtagggaactagtattggattgaatgaatagtcttccattttggaaacgttcatccactctcatatttattttttggtgcctgcatgtttgaagactgaagcaggctaaaagctcttgatgaaatttgagggtgctgaagatgttcccactaatttccagccatcacctttggtggggtgggcttcggaggacagtctgtctgaacctgccagtgctgaccctgcagcactttcagcatatgcacatcaaagttggagaccgcgctgaacttaggagggccttcacacagactgatgtggctaccttctcagaattaacaggggatgtcaatcctttgcatttgaatgaagactttgcaaaacacaccaagtttggaaatacaattgtacatggagttttgatcaacggacttatctcagctctcctaggaactaaaatgccagggccaggctgtgtatttctttcccaggaaattagctttccagcccctttatatattggagaagttgttttagcttctgcagaagtgaaaaagctgaagcggttcattgctattattgcagtgtcatgttctgtaatagaaagtaaaaagactgttatggaaggctgggttaaagttatggttccagaagcttccaaatcctgaaatagatgttttaaagatgcaacctcaaacaccaatgctgttgttaaagagcctatggggaattgctgctctttaccaaagaatggttgataggcccagaagcccatcttagttaggggaagggagcaggaagagggttgttcaaatgcccactttccagtttggccttatgcttcatgcagacttgagtgtatgcaggatttcattatctgcctgggttttttgtttgttttttgttttttaattcaagaagtaggctgggcccggtggctcatgcctgtaatcctggcactttgggaggctgcggcaggcggatcacttgaggtcaggagtccaagaccagcctggccaacatggtgaaaccccatctctaccaaaaaaaaaaaaaaaaaaaaagtgcaactagctgtgcttggtgacttggccctgtagtcccagttgcttgggaggctgaggtgggagaattgcttgggcctgagagctggaggttatggtgagaaactgagattgcaccactgcactgtagcctgagtgacagagcgagaccctgtctcaagaaagaagtattgggaaggttatttaaagactctacttttaaatcaggcgtggcagctcacgcctgtaatcccagcattttgggaggctgaggcaggcgaatcacttgaggtcaggagttcaagaccagcctggccaacatgtgaaaccccatctctactaaaaatacaaaaactaaccgggcatggtggcgggcacctgtaatcccagctacttgggaggctgaggcaggagaatctcttgaacctgggaggttgcagtgagctgaaatcacaccactgcacttcagcctgggtgacagagcaaaactccacctcaaaaaaaaaaaaaagattctacttttagaaattcagacctagatagatttgcatttggataacaaatccctacctatagccatgtggaagcagcttgtcactgtattttaactgtgtaacaattattgaaggcgaaaatagaagttgggtcatctttgaacacctaccttttatcaatgaatatttttagactgttcttcagtatctgagtcagagtttattgtaatttgttatttacaccaaggtggcatcttagtctaccttcagtgagacttgcgtttcaggggaggggcgtatgtgcatcctcggtctcagttatgtaaacggtctgatctgtaaaatagtggtagcacatgccatgtgggatagttggtggagatgatagatggagttaagcacagggcccagcctgtcagcagtagctactattattgttgcccatttcccctgcaactgaggtgagaggttttcctgagtttgaagctgactggcccacagttaaacgtaacagaccagtttttcagggtgtcagccaacctctattagtgttcttaagtacagtttctgttataaaagttcagattattccttgaaaatttggatctacctcccattattatgagtaatacatgcttatagtaaaaaaaaaaaaattgtaagaaataaatattaagaagattatggaggccaaattcttaagactttgggggctggggtcagggaggttatattgaaggggagatgtgcctaacatgttactactaaatggccatcccaacacagccaacacttttgtttcccatttttttttgtttcccgttttttaataaaattgagatataattcacataccataaaattcaccttttaaaagtgtacagtttagtggttttcagaatatccacaaagttgtacaaccatcaccaaatcaattttttatagcatttttcatcacccccaaaagaacctcccattagcagtcaatccatttctctcctccagtctttgggaatcaccagtctactttctgtctctatgggtttccctgttctggacatttcataaaagttcatacaatgtatgatcctttggaactggcttctttgatatagcatgttttcagggttcatccatgttacagcatgtatcagtacatcattttattttatggctgaataatattccattgtatttacccat

SEQ ID NO: 3174 - protein, 124 aa, Homo sapiens; identical to SEQ ID NO: 355

SEQ ID NO: 3175 - DNA, 1045 bp, Homo sapiens
acgcttcgtggggcgggacgaggagaagccaaacgtaaagacaccaggagtttctcgggcccagctgtggctgctgccggggagccccaagccttggcgggtccttgcggcgaataggagtctggtcaggcgtcaggctagtccgacgaagagtggagaatttcaagattgtggagttggactgaatgctgcacagttcaaacagctgcttatttcggctgtgaaggacctgtttggggaggttgatgccgccttacctttggacatcctaacctatgaagagaagaccttgtcagccatcttgagaatatgtagcagtggtcttgtcaaattgtggagctctttgaccctgttaggatcctataaaggcaaaaaatgtgctttccgggtgattcaggtttctccatttcttcttgcattatctggtaatagtagggaactagtattggattgaatgaatagtcttccattttggaaacgttcatccactctcatatttattttttggtgcctgcatgtttgaagactgaagcaggctaaaagctcttgatgaaatttgagggtgctgaagatgttcccactaatttccagccatcacctttggtggggtgggcttcggaggacagtctgtctgaacctgccagtgctgaccctgcagcactttcagcatatgcacatcaaagttggagaccgcgctgaacttaggagggccttcacacagactgatgtggctaccttctcagaattaacaggggatgtcaatcctttgcatttgaatgaagactttgcaaaacacaccaagtttggaaatacaattgtacatggagttttgatcaacggacttatctcagctctcctaggaactaaaatgccagggccaggctgtgtatttctttcccaggaaattagctttccagcccctttatatattggagaagttgttttagcttctgcagaagtgaaaaagctgaagcggttcattgctattattgcagtgtcatgttctgtaatagaaagtaaaaagactgttatggaaggctgggtt

SEQ ID NO: 3176 - protein, 157 aa, Homo sapiens
MFPLISSHHLWWGGLRRTVCLNLPVLTLQHFQHMHIKVGDRAELRRAFTQTDVATFSELTGDVNPLHLNEDFAKHTKFGNTIVHGVLINGLISALLGTKMPGPGCVFLSQEISFPAPLYIGEVVLASAEVKKLKRFIAIIAVSCSVIESKKTVMEGW

SEQ ID NO: 3177 - DNA, 1377 bp, Homo sapiens
acgcttcgtggggcgggacgaggagaagccaaacgtaaagacaccaggagtttctcgggcccagctgtggctgctgccggggagccccaagccttggcgggtccttgcggcgaataggagtctggtcaggcgtcaggctagtccgacgaagagtgggtaggtggaagccttccaaagagcggcggttgtctgggagccgtctcagttggccgcgacccgggcgcatgcgcggggcgggcggtgcgccttgggtagcttgtcctctccgaccccgggcgctgagggcctctgtacggcgccgcgtagggtctcggccgcagaacgtggccgagaggcccgggcgagacttcgggaccgtgtcctgagcgctctccatgcgcccggcgcgaggtgtgatcagcactggaaaagatgcctgcccctgctgccacatatgaaagagtagtttacaaaaacccttccgagtaccactacatgaaagtctgcctagaatttcaagattgtggagttggactgaatgctgcacagttcaaacagctgcttatttcggctgtgaaggacctgtttggggaggttgatgccgccttacctttggacatcctaacctatgaagagaagaccttgtcagccatcttgagaatatgtagcagtggtcttgtcaaattgtggagctctttgaccctgttaggatcctataaaggcaaaaaatgtgctttccgggtgattcaggtttctccatttcttcttgcattatctggtaatagtagggaactagtattggattgaatgaatagtcttccattttggaaacgttcatccactctcatatttattttttggtgcctgcatgtttgaagactgaagcaggctaaaagctcttgatgaaatttgagggtgctgaagatgttcccactaatttccagccatcacctttggtggggtgggcttcggaggacagtctgtctgaacctgccagtgctgaccctgcagcactttcagcatatgcacatcaaagttggagaccgcgctgaacttaggagggccttcacacagactgatgtggctaccttctcagaattaacaggggatgtcaatcctttgcatttgaatgaagactttgcaaaacacaccaagtttggaaatacaattgtacatggagttttgatcaacggacttatctcagctctcctaggaactaaaatgccagggccaggctgtgtatttctttcccaggaaattagctttccagcccctttatatattggagaagttgttttagcttctgcagaagtgaaaaagctgaagcggttcattgctattattgcagtgtcatgttctgtaatagaaagtaaaaagactgttatggaaggctgggtt

SEQ ID NO: 3178 - protein, 124 aa, Homo sapiens; identical to SEQ ID NO: 355

SEQ ID NO: 3179 - DNA, 960 bp, Homo sapiens
acgcttcgtggggcgggacgaggagaagccaaacgtaaagacaccaggagtttctcgggcccagctgtggctgctgccggggagccccaagccttggcgggtccttgcggcgaataggagtctggtcaggcgtcaggctagtccgacgaagagtgggttgatgccgccttacctttggacatcctaacctatgaagagaagaccttgtcagccatcttgagaatatgtagcagtggtcttgtcaaattgtggagctctttgaccctgttaggatcctataaaggcaaaaaatgtgctttccgggtgattcaggtttctccatttcttcttgcattatctggtaatagtagggaactagtattggattgaatgaatagtcttccattttggaaacgttcatccactctcatatttattttttggtgcctgcatgtttgaagactgaagcaggctaaaagctcttgatgaaatttgagggtgctgaagatgttcccactaatttccagccatcacctttggtggggtgggcttcggaggacagtctgtctgaacctgccagtgctgaccctgcagcactttcagcatatgcacatcaaagttggagaccgcgctgaacttaggagggccttcacacagactgatgtggctaccttctcagaattaacaggggatgtcaatcctttgcatttgaatgaagactttgcaaaacacaccaagtttggaaatacaattgtacatggagttttgatcaacggacttatctcagctctcctaggaactaaaatgccagggccaggctgtgtatttctttcccaggaaattagctttccagcccctttatatattggagaagttgttttagcttctgcagaagtgaaaaagctgaagcggttcattgctattattgcagtgtcatgttctgtaatagaaagtaaaaagactgttatggaaggctgggtt

SEQ ID NO: 3180 - protein, 157 aa, Homo sapiens; identical to SEQ ID NO: 3176

SEQ ID NO: 3181 - DNA, 2630 bp, Homo sapiens
acgcttcgtggggcgggacgaggagaagccaaacgtaaagacaccaggagtttctcgggcccagctgtggctgctgccggggagccccaagccttggcgggtccttgcggcgaataggagtctggtcaggcgtcaggctagtccgacgaagagtggagaatttcaagattgtggagttggactgaatgctgcacagttcaaacagctgcttatttcggctgtgaaggacctgtttggggaggttgatgccgccttacctttggacatcctaacctatgaagagaagaccttgtcagccatcttgagaatatgtagcagtggtcttgtcaaattgtggagctctttgaccctgttaggatcctataaaggcaaaaaatgtgctttccgggtgattcaggtttctccatttcttcttgcattatctggtaatagtagggaactagtattggattgaatgaatagtcttccattttggaaacgttcatccactctcatatttattttttggtgcctgcatgtttgaagactgaagcaggctaaaagctcttgatgaaatttgagggtgctgaagatgttcccactaatttccagccatcacctttggtggggtgggcttcggaggacagtctgtctgaacctgccagtgctgaccctgcagcactttcagcatatgcacatcaaagttggagaccgcgctgaacttaggagggccttcacacagactgatgtggctaccttctcagaattaacaggggatgtcaatcctttgcatttgaatgaagactttgcaaaacacaccaagtttggaaatacaattgtacatggagttttgatcaacggacttatctcagctctcctaggaactaaaatgccagggccaggctgtgtatttctttcccaggaaattagctttccagcccctttatatattggagaagttgttttagcttctgcagaagtgaaaaagctgaagcggttcattgctattattgcagtgtcatgttctgtaatagaaagtaaaaagactgttatggaaggctgggttaaagttatggttccagaagcttccaaatcctgaaatagatgttttaaagatgcaacctcaaacaccaatgctgttgttaaagagcctatggggaattgctgctctttaccaaagaatggttgataggcccagaagcccatcttagttaggggaagggagcaggaagagggttgttcaaatgcccactttccagtttggccttatgcttcatgcagacttgagtgtatgcaggatttcattatctgcctgggttttttgtttgttttttgttttttaattcaagaagtaggctgggcccggtggctcatgcctgtaatcctggcactttgggaggctgcggcaggcggatcacttgaggtcaggagtccaagaccagcctggccaacatggtgaaaccccatctctaccaaaaaaaaaaaaaaaaaaaaagtgcaactagctgtgcttggtgacttggccctgtagtcccagttgcttgggaggctgaggtgggagaattgcttgggcctgagagctggaggttatggtgagaaactgagattgcaccactgcactgtagcctgagtgacagagcgagaccctgtctcaagaaagaagtattgggaaggttatttaaagactctacttttaaatcaggcgtggcagctcacgcctgtaatcccagcattttgggaggctgaggcaggcgaatcacttgaggtcaggagttcaagaccagcctggccaacatgtgaaaccccatctctactaaaaatacaaaaactaaccgggcatggtggcgggcacctgtaatcccagctacttgggaggctgaggcaggagaatctcttgaacctgggaggttgcagtgagctgaaatcacaccactgcacttcagcctgggtgacagagcaaaactccacctcaaaaaaaaaaaaaagattctacttttagaaattcagacctagatagatttgcatttggataacaaatccctacctatagccatgtggaagcagcttgtcactgtattttaactgtgtaacaattattgaaggcgaaaatagaagttgggtcatctttgaacacctaccttttatcaatgaatatttttagactgttcttcagtatctgagtcagagtttattgtaatttgttatttacaccaaggtggcatcttagtctaccttcagtgagacttgcgtttcaggggaggggcgtatgtgcatcctcggtctcagttatgtaaacggtctgatctgtaaaatagtggtagcacatgccatgtgggatagttggtggagatgatagatggagttaagcacagggcccagcctgtcagcagtagctactattattgttgcccatttcccctgcaactgaggtgagaggttttcctgagtttgaagctgactggcccacagttaaacgtaacagaccagtttttcagggtgtcagccaacctctattagtgttcttaagtacagtttctgttataaaagttcagattattccttgaaaatttggatctacctcccattattatgagtaatacatgcttatagtaaaaaaaaaaaaattgtaagaaataaatattaagaagatt

SEQ ID NO: 3182 - protein, 168 aa, Homo sapiens [sequence omitted]

SEQ ID NO: 3183 - DNA, 2962 bp, Homo sapiens
acgcttcgtggggcgggacgaggagaagccaaacgtaaagacaccaggagtttctcgggcccagctgtggctgctgccggggagccccaagccttggcgggtccttgcggcgaataggagtctggtcaggcgtcaggctagtccgacgaagagtgggtaggtggaagccttccaaagagcggcggttgtctgggagccgtctcagttggccgcgacccgggcgcatgcgcggggcgggcggtgcgccttgggtagcttgtcctctccgaccccgggcgctgagggcctctgtacggcgccgcgtagggtctcggccgcagaacgtggccgagaggcccgggcgagacttcgggaccgtgtcctgagcgctctccatgcgcccggcgcgaggtgtgatcagcactggaaaagatgcctgcccctgctgccacatatgaaagagtagtttacaaaaacccttccgagtaccactacatgaaagtctgcctagaatttcaagattgtggagttggactgaatgctgcacagttcaaacagctgcttatttcggctgtgaaggacctgtttggggaggttgatgccgccttacctttggacatcctaacctatgaagagaagaccttgtcagccatcttgagaatatgtagcagtggtcttgtcaaattgtggagctctttgaccctgttaggatcctataaaggcaaaaaatgtgctttccgggtgattcaggtttctccatttcttcttgcattatctggtaatagtagggaactagtattggattgaatgaatagtcttccattttggaaacgttcatccactctcatatttattttttggtgcctgcatgtttgaagactgaagcaggctaaaagctcttgatgaaatttgagggtgctgaagatgttcccactaatttccagccatcacctttggtggggtgggcttcggaggacagtctgtctgaacctgccagtgctgaccctgcagcactttcagcatatgcacatcaaagttggagaccgcgctgaacttaggagggccttcacacagactgatgtggctaccttctcagaattaacaggggatgtcaatcctttgcatttgaatgaagactttgcaaaacacaccaagtttggaaatacaattgtacatggagttttgatcaacggacttatctcagctctcctaggaactaaaatgccagggccaggctgtgtatttctttcccaggaaattagctttccagcccctttatatattggagaagttgttttagcttctgcagaagtgaaaaagctgaagcggttcattgctattattgcagtgtcatgttctgtaatagaaagtaaaaagactgttatggaaggctgggttaaagttatggttccagaagcttccaaatcctgaaatagatgttttaaagatgcaacctcaaacaccaatgctgttgttaaagagcctatggggaattgctgctctttaccaaagaatggttgataggcccagaagcccatcttagttaggggaagggagcaggaagagggttgttcaaatgcccactttccagtttggccttatgcttcatgcagacttgagtgtatgcaggatttcattatctgcctgggttttttgtttgttttttgttttttaattcaagaagtaggctgggcccggtggctcatgcctgtaatcctggcactttgggaggctgcggcaggcggatcacttgaggtcaggagtccaagaccagcctggccaacatggtgaaaccccatctctaccaaaaaaaaaaaaaaaaaaaaagtgcaactagctgtgcttggtgacttggccctgtagtcccagttgcttgggaggctgaggtgggagaattgcttgggcctgagagctggaggttatggtgagaaactgagattgcaccactgcactgtagcctgagtgacagagcgagaccctgtctcaagaaagaagtattgggaaggttatttaaagactctacttttaaatcaggcgtggcagctcacgcctgtaatcccagcattttgggaggctgaggcaggcgaatcacttgaggtcaggagttcaagaccagcctggccaacatgtgaaaccccatctctactaaaaatacaaaaactaaccgggcatggtggcgggcacctgtaatcccagctacttgggaggctgaggcaggagaatctcttgaacctgggaggttgcagtgagctgaaatcacaccactgcacttcagcctgggtgacagagcaaaactccacctcaaaaaaaaaaaaaagattctacttttagaaattcagacctagatagatttgcatttggataacaaatccctacctatagccatgtggaagcagcttgtcactgtattttaactgtgtaacaattattgaaggcgaaaatagaagttgggtcatctttgaacacctaccttttatcaatgaatatttttagactgttcttcagtatctgagtcagagtttattgtaatttgttatttacaccaaggtggcatcttagtctaccttcagtgagacttgcgtttcaggggaggggcgtatgtgcatcctcggtctcagttatgtaaacggtctgatctgtaaaatagtggtagcacatgccatgtgggatagttggtggagatgatagatggagttaagcacagggcccagcctgtcagcagtagctactattattgttgcccatttcccctgcaactgaggtgagaggttttcctgagtttgaagctgactggcccacagttaaacgtaacagaccagtttttcagggtgtcagccaacctctattagtgttcttaagtacagtttctgttataaaagttcagattattccttgaaaatttggatctacctcccattattatgagtaatacatgcttatagtaaaaaaaaaaaaattgtaagaaataaatattaagaagatt

SEQ ID NO: 3184 - protein, 124 aa, Homo sapiens; identical to SEQ ID NO: 355

SEQ ID NO: 3185 - DNA, 2545 bp, Homo sapiens
acgcttcgtggggcgggacgaggagaagccaaacgtaaagacaccaggagtttctcgggcccagctgtggctgctgccggggagccccaagccttggcgggtccttgcggcgaataggagtctggtcaggcgtcaggctagtccgacgaagagtgggttgatgccgccttacctttggacatcctaacctatgaagagaagaccttgtcagccatcttgagaatatgtagcagtggtcttgtcaaattgtggagctctttgaccctgttaggatcctataaaggcaaaaaatgtgctttccgggtgattcaggtttctccatttcttcttgcattatctggtaatagtagggaactagtattggattgaatgaatagtcttccattttggaaacgttcatccactctcatatttattttttggtgcctgcatgtttgaagactgaagcaggctaaaagctcttgatgaaatttgagggtgctgaagatgttcccactaatttccagccatcacctttggtggggtgggcttcggaggacagtctgtctgaacctgccagtgctgaccctgcagcactttcagcatatgcacatcaaagttggagaccgcgctgaacttaggagggccttcacacagactgatgtggctaccttctcagaattaacaggggatgtcaatcctttgcatttgaatgaagactttgcaaaacacaccaagtttggaaatacaattgtacatggagttttgatcaacggacttatctcagctctcctaggaactaaaatgccagggccaggctgtgtatttctttcccaggaaattagctttccagcccctttatatattggagaagttgttttagcttctgcagaagtgaaaaagctgaagcggttcattgctattattgcagtgtcatgttctgtaatagaaagtaaaaagactgttatggaaggctgggttaaagttatggttccagaagcttccaaatcctgaaatagatgttttaaagatgcaacctcaaacaccaatgctgttgttaaagagcctatggggaattgctgctctttaccaaagaatggttgataggcccagaagcccatcttagttaggggaagggagcaggaagagggttgttcaaatgcccactttccagtttggccttatgcttcatgcagacttgagtgtatgcaggatttcattatctgcctgggttttttgtttgttttttgttttttaattcaagaagtaggctgggcccggtggctcatgcctgtaatcctggcactttgggaggctgcggcaggcggatcacttgaggtcaggagtccaagaccagcctggccaacatggtgaaaccccatctctaccaaaaaaaaaaaaaaaaaaaaagtgcaactagctgtgcttggtgacttggccctgtagtcccagttgcttgggaggctgaggtgggagaattgcttgggcctgagagctggaggttatggtgagaaactgagattgcaccactgcactgtagcctgagtgacagagcgagaccctgtctcaagaaagaagtattgggaaggttatttaaagactctacttttaaatcaggcgtggcagctcacgcctgtaatcccagcattttgggaggctgaggcaggcgaatcacttgaggtcaggagttcaagaccagcctggccaacatgtgaaaccccatctctactaaaaatacaaaaactaaccgggcatggtggcgggcacctgtaatcccagctacttgggaggctgaggcaggagaatctcttgaacctgggaggttgcagtgagctgaaatcacaccactgcacttcagcctgggtgacagagcaaaactccacctcaaaaaaaaaaaaaagattctacttttagaaattcagacctagatagatttgcatttggataacaaatccctacctatagccatgtggaagcagcttgtcactgtattttaactgtgtaacaattattgaaggcgaaaatagaagttgggtcatctttgaacacctaccttttatcaatgaatatttttagactgttcttcagtatctgagtcagagtttattgtaatttgttatttacaccaaggtggcatcttagtctaccttcagtgagacttgcgtttcaggggaggggcgtatgtgcatcctcggtctcagttatgtaaacggtctgatctgtaaaatagtggtagcacatgccatgtgggatagttggtggagatgatagatggagttaagcacagggcccagcctgtcagcagtagctactattattgttgcccatttcccctgcaactgaggtgagaggttttcctgagtttgaagctgactggcccacagttaaacgtaacagaccagtttttcagggtgtcagccaacctctattagtgttcttaagtacagtttctgttataaaagttcagattattccttgaaaatttggatctacctcccattattatgagtaatacatgcttatagtaaaaaaaaaaaaattgtaagaaataaatattaagaagatt

SEQ ID NO: 3186 - protein, 168 aa, Homo sapiens [sequence omitted]

SEQ ID NO: 3187 - DNA, 3065 bp, Homo sapiens
acgcttcgtggggcgggacgaggagaagccaaacgtaaagacaccaggagtttctcgggcccagctgtggctgctgccggggagccccaagccttggcgggtccttgcggcgaataggagtctggtcaggcgtcaggctagtccgacgaagagtgggttgatgccgccttacctttggacatcctaacctatgaagagaagaccttgtcagccatcttgagaatatgtagcagtggtcttgtcaaattgtggagctctttgaccctgttaggatcctataaaggcaaaaaatgtgctttccgggtgattcaggtttctccatttcttcttgcattatctggtaatagtagggaactagtattggattgaatgaatagtcttccattttggaaacgttcatccactctcatatttattttttggtgcctgcatgtttgaagactgaagcaggctaaaagctcttgatgaaatttgagggtgctgaagatgttcccactaatttccagccatcacctttggtggggtgggcttcggaggacagtctgtctgaacctgccagtgctgaccctgcagcactttcagcatatgcacatcaaagttggagaccgcgctgaacttaggagggccttcacacagactgatgtggctaccttctcagaattaacaggggatgtcaatcctttgcatttgaatgaagactttgcaaaacacaccaagtttggaaatacaattgtacatggagttttgatcaacggacttatctcagctctcctaggaactaaaatgccagggccaggctgtgtatttctttcccaggaaattagctttccagcccctttatatattggagaagttgttttagcttctgcagaagtgaaaaagctgaagcggttcattgctattattgcagtgtcatgttctgtaatagaaagtaaaaagactgttatggaaggctgggttaaagttatggttccagaagcttccaaatcctgaaatagatgttttaaagatgcaacctcaaacaccaatgctgttgttaaagagcctatggggaattgctgctctttaccaaagaatggttgataggcccagaagcccatcttagttaggggaagggagcaggaagagggttgttcaaatgcccactttccagtttggccttatgcttcatgcagacttgagtgtatgcaggatttcattatctgcctgggttttttgtttgttttttgttttttaattcaagaagtaggctgggcccggtggctcatgcctgtaatcctggcactttgggaggctgcggcaggcggatcacttgaggtcaggagtccaagaccagcctggccaacatggtgaaaccccatctctaccaaaaaaaaaaaaaaaaaaaaagtgcaactagctgtgcttggtgacttggccctgtagtcccagttgcttgggaggctgaggtgggagaattgcttgggcctgagagctggaggttatggtgagaaactgagattgcaccactgcactgtagcctgagtgacagagcgagaccctgtctcaagaaagaagtattgggaaggttatttaaagactctacttttaaatcaggcgtggcagctcacgcctgtaatcccagcattttgggaggctgaggcaggcgaatcacttgaggtcaggagttcaagaccagcctggccaacatgtgaaaccccatctctactaaaaatacaaaaactaaccgggcatggtggcgggcacctgtaatcccagctacttgggaggctgaggcaggagaatctcttgaacctgggaggttgcagtgagctgaaatcacaccactgcacttcagcctgggtgacagagcaaaactccacctcaaaaaaaaaaaaaagattctacttttagaaattcagacctagatagatttgcatttggataacaaatccctacctatagccatgtggaagcagcttgtcactgtattttaactgtgtaacaattattgaaggcgaaaatagaagttgggtcatctttgaacacctaccttttatcaatgaatatttttagactgttcttcagtatctgagtcagagtttattgtaatttgttatttacaccaaggtggcatcttagtctaccttcagtgagacttgcgtttcaggggaggggcgtatgtgcatcctcggtctcagttatgtaaacggtctgatctgtaaaatagtggtagcacatgccatgtgggatagttggtggagatgatagatggagttaagcacagggcccagcctgtcagcagtagctactattattgttgcccatttcccctgcaactgaggtgagaggttttcctgagtttgaagctgactggcccacagttaaacgtaacagaccagtttttcagggtgtcagccaacctctattagtgttcttaagtacagtttctgttataaaagttcagattattccttgaaaatttggatctacctcccattattatgagtaatacatgcttatagtaaaaaaaaaaaaattgtaagaaataaatattaagaagattatggaggccaaattcttaagactttgggggctggggtcagggaggttatattgaaggggagatgtgcctaacatgttactactaaatggccatcccaacacagccaacacttttgtttcccatttttttttgtttcccgttttttaataaaattgagatataattcacataccataaaattcaccttttaaaagtgtacagtttagtggttttcagaatatccacaaagttgtacaaccatcaccaaatcaattttttatagcatttttcatcacccccaaaagaacctcccattagcagtcaatccatttctctcctccagtctttgggaatcaccagtctactttctgtctctatgggtttccctgttctggacatttcataaaagttcatacaatgtatgatcctttggaactggcttctttgatatagcatgttttcagggttcatccatgttacagcatgtatcagtacatcattttattttatggctgaataatattccattgtatttacccat

SEQ ID NO: 3188 - protein, 168 aa, Homo sapiens [sequence omitted]

SEQ ID NO: 3189 - DNA, 3482 bp, Homo sapiens
acgcttcgtggggcgggacgaggagaagccaaacgtaaagacaccaggagtttctcgggcccagctgtggctgctgccggggagccccaagccttggcgggtccttgcggcgaataggagtctggtcaggcgtcaggctagtccgacgaagagtgggtaggtggaagccttccaaagagcggcggttgtctgggagccgtctcagttggccgcgacccgggcgcatgcgcggggcgggcggtgcgccttgggtagcttgtcctctccgaccccgggcgctgagggcctctgtacggcgccgcgtagggtctcggccgcagaacgtggccgagaggcccgggcgagacttcgggaccgtgtcctgagcgctctccatgcgcccggcgcgaggtgtgatcagcactggaaaagatgcctgcccctgctgccacatatgaaagagtagtttacaaaaacccttccgagtaccactacatgaaagtctgcctagaatttcaagattgtggagttggactgaatgctgcacagttcaaacagctgcttatttcggctgtgaaggacctgtttggggaggttgatgccgccttacctttggacatcctaacctatgaagagaagaccttgtcagccatcttgagaatatgtagcagtggtcttgtcaaattgtggagctctttgaccctgttaggatcctataaaggcaaaaaatgtgctttccgggtgattcaggtttctccatttcttcttgcattatctggtaatagtagggaactagtattggattgaatgaatagtcttccattttggaaacgttcatccactctcatatttattttttggtgcctgcatgtttgaagactgaagcaggctaaaagctcttgatgaaatttgagggtgctgaagatgttcccactaatttccagccatcacctttggtggggtgggcttcggaggacagtctgtctgaacctgccagtgctgaccctgcagcactttcagcatatgcacatcaaagttggagaccgcgctgaacttaggagggccttcacacagactgatgtggctaccttctcagaattaacaggggatgtcaatcctttgcatttgaatgaagactttgcaaaacacaccaagtttggaaatacaattgtacatggagttttgatcaacggacttatctcagctctcctaggaactaaaatgccagggccaggctgtgtatttctttcccaggaaattagctttccagcccctttatatattggagaagttgttttagcttctgcagaagtgaaaaagctgaagcggttcattgctattattgcagtgtcatgttctgtaatagaaagtaaaaagactgttatggaaggctgggttaaagttatggttccagaagcttccaaatcctgaaatagatgttttaaagatgcaacctcaaacaccaatgctgttgttaaagagcctatggggaattgctgctctttaccaaagaatggttgataggcccagaagcccatcttagttaggggaagggagcaggaagagggttgttcaaatgcccactttccagtttggccttatgcttcatgcagacttgagtgtatgcaggatttcattatctgcctgggttttttgtttgttttttgttttttaattcaagaagtaggctgggcccggtggctcatgcctgtaatcctggcactttgggaggctgcggcaggcggatcacttgaggtcaggagtccaagaccagcctggccaacatggtgaaaccccatctctaccaaaaaaaaaaaaaaaaaaaaagtgcaactagctgtgcttggtgacttggccctgtagtcccagttgcttgggaggctgaggtgggagaattgcttgggcctgagagctggaggttatggtgagaaactgagattgcaccactgcactgtagcctgagtgacagagcgagaccctgtctcaagaaagaagtattgggaaggttatttaaagactctacttttaaatcaggcgtggcagctcacgcctgtaatcccagcattttgggaggctgaggcaggcgaatcacttgaggtcaggagttcaagaccagcctggccaacatgtgaaaccccatctctactaaaaatacaaaaactaaccgggcatggtggcgggcacctgtaatcccagctacttgggaggctgaggcaggagaatctcttgaacctgggaggttgcagtgagctgaaatcacaccactgcacttcagcctgggtgacagagcaaaactccacctcaaaaaaaaaaaaaagattctacttttagaaattcagacctagatagatttgcatttggataacaaatccctacctatagccatgtggaagcagcttgtcactgtattttaactgtgtaacaattattgaaggcgaaaatagaagttgggtcatctttgaacacctaccttttatcaatgaatatttttagactgttcttcagtatctgagtcagagtttattgtaatttgttatttacaccaaggtggcatcttagtctaccttcagtgagacttgcgtttcaggggaggggcgtatgtgcatcctcggtctcagttatgtaaacggtctgatctgtaaaatagtggtagcacatgccatgtgggatagttggtggagatgatagatggagttaagcacagggcccagcctgtcagcagtagctactattattgttgcccatttcccctgcaactgaggtgagaggttttcctgagtttgaagctgactggcccacagttaaacgtaacagaccagtttttcagggtgtcagccaacctctattagtgttcttaagtacagtttctgttataaaagttcagattattccttgaaaatttggatctacctcccattattatgagtaatacatgcttatagtaaaaaaaaaaaaattgtaagaaataaatattaagaagattatggaggccaaattcttaagactttgggggctggggtcagggaggttatattgaaggggagatgtgcctaacatgttactactaaatggccatcccaacacagccaacacttttgtttcccatttttttttgtttcccgttttttaataaaattgagatataattcacataccataaaattcaccttttaaaagtgtacagtttagtggttttcagaatatccacaaagttgtacaaccatcaccaaatcaattttttatagcatttttcatcacccccaaaagaacctcccattagcagtcaatccatttctctcctccagtctttgggaatcaccagtctactttctgtctctatgggtttccctgttctggacatttcataaaagttcatacaatgtatgatcctttggaactggcttctttgatatagcatgttttcagggttcatccatgttacagcatgtatcagtacatcattttattttatggctgaataatattccattgtatttacccat

SEQ ID NO: 3190 - protein, 124 aa, Homo sapiens; identical to SEQ ID NO: 355

SEQ ID NO: 3191 - DNA, 3150 bp, Homo sapiens
acgcttcgtggggcgggacgaggagaagccaaacgtaaagacaccaggagtttctcgggcccagctgtggctgctgccggggagccccaagccttggcgggtccttgcggcgaataggagtctggtcaggcgtcaggctagtccgacgaagagtggagaatttcaagattgtggagttggactgaatgctgcacagttcaaacagctgcttatttcggctgtgaaggacctgtttggggaggttgatgccgccttacctttggacatcctaacctatgaagagaagaccttgtcagccatcttgagaatatgtagcagtggtcttgtcaaattgtggagctctttgaccctgttaggatcctataaaggcaaaaaatgtgctttccgggtgattcaggtttctccatttcttcttgcattatctggtaatagtagggaactagtattggattgaatgaatagtcttccattttggaaacgttcatccactctcatatttattttttggtgcctgcatgtttgaagactgaagcaggctaaaagctcttgatgaaatttgagggtgctgaagatgttcccactaatttccagccatcacctttggtggggtgggcttcggaggacagtctgtctgaacctgccagtgctgaccctgcagcactttcagcatatgcacatcaaagttggagaccgcgctgaacttaggagggccttcacacagactgatgtggctaccttctcagaattaacaggggatgtcaatcctttgcatttgaatgaagactttgcaaaacacaccaagtttggaaatacaattgtacatggagttttgatcaacggacttatctcagctctcctaggaactaaaatgccagggccaggctgtgtatttctttcccaggaaattagctttccagcccctttatatattggagaagttgttttagcttctgcagaagtgaaaaagctgaagcggttcattgctattattgcagtgtcatgttctgtaatagaaagtaaaaagactgttatggaaggctgggttaaagttatggttccagaagcttccaaatcctgaaatagatgttttaaagatgcaacctcaaacaccaatgctgttgttaaagagcctatggggaattgctgctctttaccaaagaatggttgataggcccagaagcccatcttagttaggggaagggagcaggaagagggttgttcaaatgcccactttccagtttggccttatgcttcatgcagacttgagtgtatgcaggatttcattatctgcctgggttttttgtttgttttttgttttttaattcaagaagtaggctgggcccggtggctcatgcctgtaatcctggcactttgggaggctgcggcaggcggatcacttgaggtcaggagtccaagaccagcctggccaacatggtgaaaccccatctctaccaaaaaaaaaaaaaaaaaaaaagtgcaactagctgtgcttggtgacttggccctgtagtcccagttgcttgggaggctgaggtgggagaattgcttgggcctgagagctggaggttatggtgagaaactgagattgcaccactgcactgtagcctgagtgacagagcgagaccctgtctcaagaaagaagtattgggaaggttatttaaagactctacttttaaatcaggcgtggcagctcacgcctgtaatcccagcattttgggaggctgaggcaggcgaatcacttgaggtcaggagttcaagaccagcctggccaacatgtgaaaccccatctctactaaaaatacaaaaactaaccgggcatggtggcgggcacctgtaatcccagctacttgggaggctgaggcaggagaatctcttgaacctgggaggttgcagtgagctgaaatcacaccactgcacttcagcctgggtgacagagcaaaactccacctcaaaaaaaaaaaaaagattctacttttagaaattcagacctagatagatttgcatttggataacaaatccctacctatagccatgtggaagcagcttgtcactgtattttaactgtgtaacaattattgaaggcgaaaatagaagttgggtcatctttgaacacctaccttttatcaatgaatatttttagactgttcttcagtatctgagtcagagtttattgtaatttgttatttacaccaaggtggcatcttagtctaccttcagtgagacttgcgtttcaggggaggggcgtatgtgcatcctcggtctcagttatgtaaacggtctgatctgtaaaatagtggtagcacatgccatgtgggatagttggtggagatgatagatggagttaagcacagggcccagcctgtcagcagtagctactattattgttgcccatttcccctgcaactgaggtgagaggttttcctgagtttgaagctgactggcccacagttaaacgtaacagaccagtttttcagggtgtcagccaacctctattagtgttcttaagtacagtttctgttataaaagttcagattattccttgaaaatttggatctacctcccattattatgagtaatacatgcttatagtaaaaaaaaaaaaattgtaagaaataaatattaagaagattatggaggccaaattcttaagactttgggggctggggtcagggaggttatattgaaggggagatgtgcctaacatgttactactaaatggccatcccaacacagccaacacttttgtttcccatttttttttgtttcccgttttttaataaaattgagatataattcacataccataaaattcaccttttaaaagtgtacagtttagtggttttcagaatatccacaaagttgtacaaccatcaccaaatcaattttttatagcatttttcatcacccccaaaagaacctcccattagcagtcaatccatttctctcctccagtctttgggaatcaccagtctactttctgtctctatgggtttccctgttctggacatttcataaaagttcatacaatgtatgatcctttggaactggcttctttgatatagcatgttttcagggttcatccatgttacagcatgtatcagtacatcattttattttatggctgaataatattccattgtatttacccat

SEQ ID NO: 3192 - protein, 168 aa, Homo sapiens [sequence omitted]

SEQ ID NO: 3193 - DNA, 2719 bp, Homo sapiens
gggcgggacgaggagaagccaaacgtaaagacaccaggagtttctcgggcccagctgtggctgctgccggggagccccaagccttggcgggtccttgcggcgaataggagtctggtcaggcgtcaggctagtccgacgaagagtggagaatttcaagattgtggagttggactgaatgctgcacagttcaaacagctgcttatttcggctgtgaaggacctgtttggggaggctggagtgcaatggcacgatcttggctcaccgcaccctccgcctcccaggttcaagcgattctcctgcctcagcctcgcaacattattccatatgcaggttgatgccgccttacctttggacatcctaacctatgaagagaagaccttgtcagccatcttgagaatatgtagcagtggtcttgtcaaattgtggagctctttgaccctgttaggatcctataaaggcaaaaaatgtgctttccgggtgattcaggtttctccatttcttcttgcattatctggtaatagtagggaactagtattggattgaatgaatagtcttccattttggaaacgttcatccactctcatatttattttttggtgcctgcatgtttgaagactgaagcaggctaaaagctcttgatgaaatttgagggtgctgaagatgttcccactaatttccagccatcacctttggtggggtgggcttcggaggacagtctgtctgaacctgccagtgctgaccctgcagcactttcagcatatgcacatcaaagttggagaccgcgctgaacttaggagggccttcacacagactgatgtggctaccttctcagaattaacaggggatgtcaatcctttgcatttgaatgaagactttgcaaaacacaccaagtttggaaatacaattgtacatggagttttgatcaacggacttatctcagctctcctaggaactaaaatgccagggccaggctgtgtatttctttcccaggaaattagctttccagcccctttatatattggagaagttgttttagcttctgcagaagtgaaaaagctgaagcggttcattgctattattgcagtgtcatgttctgtaatagaaagtaaaaagactgttatggaaggctgggttaaagttatggttccagaagcttccaaatcctgaaatagatgttttaaagatgcaacctcaaacaccaatgctgttgttaaagagcctatggggaattgctgctctttaccaaagaatggttgataggcccagaagcccatcttagttaggggaagggagcaggaagagggttgttcaaatgcccactttccagtttggccttatgcttcatgcagacttgagtgtatgcaggatttcattatctgcctgggttttttgtttgttttttgttttttaattcaagaagtaggctgggcccggtggctcatgcctgtaatcctggcactttgggaggctgcggcaggcggatcacttgaggtcaggagtccaagaccagcctggccaacatggtgaaaccccatctctaccaaaaaaaaaaaaaaaaaaaaagtgcaactagctgtgcttggtgacttggccctgtagtcccagttgcttgggaggctgaggtgggagaattgcttgggcctgagagctggaggttatggtgagaaactgagattgcaccactgcactgtagcctgagtgacagagcgagaccctgtctcaagaaagaagtattgggaaggttatttaaagactctacttttaaatcaggcgtggcagctcacgcctgtaatcccagcattttgggaggctgaggcaggcgaatcacttgaggtcaggagttcaagaccagcctggccaacatgtgaaaccccatctctactaaaaatacaaaaactaaccgggcatggtggcgggcacctgtaatcccagctacttgggaggctgaggcaggagaatctcttgaacctgggaggttgcagtgagctgaaatcacaccactgcacttcagcctgggtgacagagcaaaactccacctcaaaaaaaaaaaaaagattctacttttagaaattcagacctagatagatttgcatttggataacaaatccctacctatagccatgtggaagcagcttgtcactgtattttaactgtgtaacaattattgaaggcgaaaatagaagttgggtcatctttgaacacctaccttttatcaatgaatatttttagactgttcttcagtatctgagtcagagtttattgtaatttgttatttacaccaaggtggcatcttagtctaccttcagtgagacttgcgtttcaggggaggggcgtatgtgcatcctcggtctcagttatgtaaacggtctgatctgtaaaatagtggtagcacatgccatgtgggatagttggtggagatgatagatggagttaagcacagggcccagcctgtcagcagtagctactattattgttgcccatttcccctgcaactgaggtgagaggttttcctgagtttgaagctgactggcccacagttaaacgtaacagaccagtttttcagggtgtcagccaacctctattagtgttcttaagtacagtttctgttataaaagttcagattattccttgaaaatttggatctacctcccattattatgagtaatacatgcttatagtaaaaaaaaaaaaattgtaagaaataaatattaagaagatt

SEQ ID NO: 3194 - protein, 72 aa, Homo sapiens
MQVDAALPLDILTYEEKTLSAILRICSSGLVKLWSSLTLLGSYKGKKCAFRVIQVSPFLLALSGNSRELVLD

SEQ ID NO: 3195 - DNA, 3239 bp, Homo sapiens
gggcgggacgaggagaagccaaacgtaaagacaccaggagtttctcgggcccagctgtggctgctgccggggagccccaagccttggcgggtccttgcggcgaataggagtctggtcaggcgtcaggctagtccgacgaagagtggagaatttcaagattgtggagttggactgaatgctgcacagttcaaacagctgcttatttcggctgtgaaggacctgtttggggaggctggagtgcaatggcacgatcttggctcaccgcaccctccgcctcccaggttcaagcgattctcctgcctcagcctcgcaacattattccatatgcaggttgatgccgccttacctttggacatcctaacctatgaagagaagaccttgtcagccatcttgagaatatgtagcagtggtcttgtcaaattgtggagctctttgaccctgttaggatcctataaaggcaaaaaatgtgctttccgggtgattcaggtttctccatttcttcttgcattatctggtaatagtagggaactagtattggattgaatgaatagtcttccattttggaaacgttcatccactctcatatttattttttggtgcctgcatgtttgaagactgaagcaggctaaaagctcttgatgaaatttgagggtgctgaagatgttcccactaatttccagccatcacctttggtggggtgggcttcggaggacagtctgtctgaacctgccagtgctgaccctgcagcactttcagcatatgcacatcaaagttggagaccgcgctgaacttaggagggccttcacacagactgatgtggctaccttctcagaattaacaggggatgtcaatcctttgcatttgaatgaagactttgcaaaacacaccaagtttggaaatacaattgtacatggagttttgatcaacggacttatctcagctctcctaggaactaaaatgccagggccaggctgtgtatttctttcccaggaaattagctttccagcccctttatatattggagaagttgttttagcttctgcagaagtgaaaaagctgaagcggttcattgctattattgcagtgtcatgttctgtaatagaaagtaaaaagactgttatggaaggctgggttaaagttatggttccagaagcttccaaatcctgaaatagatgttttaaagatgcaacctcaaacaccaatgctgttgttaaagagcctatggggaattgctgctctttaccaaagaatggttgataggcccagaagcccatcttagttaggggaagggagcaggaagagggttgttcaaatgcccactttccagtttggccttatgcttcatgcagacttgagtgtatgcaggatttcattatctgcctgggttttttgtttgttttttgttttttaattcaagaagtaggctgggcccggtggctcatgcctgtaatcctggcactttgggaggctgcggcaggcggatcacttgaggtcaggagtccaagaccagcctggccaacatggtgaaaccccatctctaccaaaaaaaaaaaaaaaaaaaaagtgcaactagctgtgcttggtgacttggccctgtagtcccagttgcttgggaggctgaggtgggagaattgcttgggcctgagagctggaggttatggtgagaaactgagattgcaccactgcactgtagcctgagtgacagagcgagaccctgtctcaagaaagaagtattgggaaggttatttaaagactctacttttaaatcaggcgtggcagctcacgcctgtaatcccagcattttgggaggctgaggcaggcgaatcacttgaggtcaggagttcaagaccagcctggccaacatgtgaaaccccatctctactaaaaatacaaaaactaaccgggcatggtggcgggcacctgtaatcccagctacttgggaggctgaggcaggagaatctcttgaacctgggaggttgcagtgagctgaaatcacaccactgcacttcagcctgggtgacagagcaaaactccacctcaaaaaaaaaaaaaagattctacttttagaaattcagacctagatagatttgcatttggataacaaatccctacctatagccatgtggaagcagcttgtcactgtattttaactgtgtaacaattattgaaggcgaaaatagaagttgggtcatctttgaacacctaccttttatcaatgaatatttttagactgttcttcagtatctgagtcagagtttattgtaatttgttatttacaccaaggtggcatcttagtctaccttcagtgagacttgcgtttcaggggaggggcgtatgtgcatcctcggtctcagttatgtaaacggtctgatctgtaaaatagtggtagcacatgccatgtgggatagttggtggagatgatagatggagttaagcacagggcccagcctgtcagcagtagctactattattgttgcccatttcccctgcaactgaggtgagaggttttcctgagtttgaagctgactggcccacagttaaacgtaacagaccagtttttcagggtgtcagccaacctctattagtgttcttaagtacagtttctgttataaaagttcagattattccttgaaaatttggatctacctcccattattatgagtaatacatgcttatagtaaaaaaaaaaaaattgtaagaaataaatattaagaagattatggaggccaaattcttaagactttgggggctggggtcagggaggttatattgaaggggagatgtgcctaacatgttactactaaatggccatcccaacacagccaacacttttgtttcccatttttttttgtttcccgttttttaataaaattgagatataattcacataccataaaattcaccttttaaaagtgtacagtttagtggttttcagaatatccacaaagttgtacaaccatcaccaaatcaattttttatagcatttttcatcacccccaaaagaacctcccattagcagtcaatccatttctctcctccagtctttgggaatcaccagtctactttctgtctctatgggtttccctgttctggacatttcataaaagttcatacaatgtatgatcctttggaactggcttctttgatatagcatgttttcagggttcatccatgttacagcatgtatcagtacatcattttattttatggctgaataatattccattgtatttacccat

SEQ ID NO: 3196 - protein, 72 aa, Homo sapiens; identical to SEQ ID NO: 3194

SEQ ID NO: 3197 - DNA, 1242 bp, Homo sapiens
aagacaccaggagtttctcgggcccagctgtggctgctgccggggagccccaagccttggcgggtccttgcggcgaataggagtctggtcaggcgtcaggctagtccgacgaagagtgggtaggtggaagccttccaaagagcggcggttgtctgggagccgtctcagttggccgcgacccgggcgcatgcgcggggcgggcggtgcgccttgggtagcttgtcctctccgaccccgggcgctgagggcctctgtacggcgccgcgtagggtctcggccgcagaacgtggccgagaggcccgggcgagacttcgggaccgtgtcctgagcgctctccatgcgcccggcgcgagagaatttcaagattgtggagttggactgaatgctgcacagttcaaacagctgcttatttcggctgtgaaggacctgtttggggaggttgatgccgccttacctttggacatcctaacctatgaagagaagaccttgtcagccatcttgagaatatgtagcagtggtcttgtcaaattgtggagctctttgaccctgttaggatcctataaaggcaaaaaatgtgctttccgggtgattcaggtttctccatttcttcttgcattatctggtaatagtagggaactagtattggattgaatgaatagtcttccattttggaaacgttcatccactctcatatttattttttggtgcctgcatgtttgaagactgaagcaggctaaaagctcttgatgaaatttgagggtgctgaagatgttcccactaatttccagccatcacctttggtggggtgggcttcggaggacagtctgtctgaacctgccagtgctgaccctgcagcactttcagcatatgcacatcaaagttggagaccgcgctgaacttaggagggccttcacacagactgatgtggctaccttctcagaattaacaggggatgtcaatcctttgcatttgaatgaagactttgcaaaacacaccaagtttggaaatacaattgtacatggagttttgatcaacggacttatctcagctctcctaggaactaaaatgccagggccaggctgtgtatttctttcccaggaaattagctttccagcccctttatatattggagaagttgttttagcttctgcagaagtgaaaaagctgaagcggttcattgctattattgcagtgtcatgttctgtaatagaaagtaaaaagactgttatggaaggctgggtt

SEQ ID NO: 3198 - protein, 157 aa, Homo sapiens; identical to SEQ ID NO: 3176

SEQ ID NO: 3199 - DNA, 2827 bp, Homo sapiens
aagacaccaggagtttctcgggcccagctgtggctgctgccggggagccccaagccttggcgggtccttgcggcgaataggagtctggtcaggcgtcaggctagtccgacgaagagtgggtaggtggaagccttccaaagagcggcggttgtctgggagccgtctcagttggccgcgacccgggcgcatgcgcggggcgggcggtgcgccttgggtagcttgtcctctccgaccccgggcgctgagggcctctgtacggcgccgcgtagggtctcggccgcagaacgtggccgagaggcccgggcgagacttcgggaccgtgtcctgagcgctctccatgcgcccggcgcgagagaatttcaagattgtggagttggactgaatgctgcacagttcaaacagctgcttatttcggctgtgaaggacctgtttggggaggttgatgccgccttacctttggacatcctaacctatgaagagaagaccttgtcagccatcttgagaatatgtagcagtggtcttgtcaaattgtggagctctttgaccctgttaggatcctataaaggcaaaaaatgtgctttccgggtgattcaggtttctccatttcttcttgcattatctggtaatagtagggaactagtattggattgaatgaatagtcttccattttggaaacgttcatccactctcatatttattttttggtgcctgcatgtttgaagactgaagcaggctaaaagctcttgatgaaatttgagggtgctgaagatgttcccactaatttccagccatcacctttggtggggtgggcttcggaggacagtctgtctgaacctgccagtgctgaccctgcagcactttcagcatatgcacatcaaagttggagaccgcgctgaacttaggagggccttcacacagactgatgtggctaccttctcagaattaacaggggatgtcaatcctttgcatttgaatgaagactttgcaaaacacaccaagtttggaaatacaattgtacatggagttttgatcaacggacttatctcagctctcctaggaactaaaatgccagggccaggctgtgtatttctttcccaggaaattagctttccagcccctttatatattggagaagttgttttagcttctgcagaagtgaaaaagctgaagcggttcattgctattattgcagtgtcatgttctgtaatagaaagtaaaaagactgttatggaaggctgggttaaagttatggttccagaagcttccaaatcctgaaatagatgttttaaagatgcaacctcaaacaccaatgctgttgttaaagagcctatggggaattgctgctctttaccaaagaatggttgataggcccagaagcccatcttagttaggggaagggagcaggaagagggttgttcaaatgcccactttccagtttggccttatgcttcatgcagacttgagtgtatgcaggatttcattatctgcctgggttttttgtttgttttttgttttttaattcaagaagtaggctgggcccggtggctcatgcctgtaatcctggcactttgggaggctgcggcaggcggatcacttgaggtcaggagtccaagaccagcctggccaacatggtgaaaccccatctctaccaaaaaaaaaaaaaaaaaaaaagtgcaactagctgtgcttggtgacttggccctgtagtcccagttgcttgggaggctgaggtgggagaattgcttgggcctgagagctggaggttatggtgagaaactgagattgcaccactgcactgtagcctgagtgacagagcgagaccctgtctcaagaaagaagtattgggaaggttatttaaagactctacttttaaatcaggcgtggcagctcacgcctgtaatcccagcattttgggaggctgaggcaggcgaatcacttgaggtcaggagttcaagaccagcctggccaacatgtgaaaccccatctctactaaaaatacaaaaactaaccgggcatggtggcgggcacctgtaatcccagctacttgggaggctgaggcaggagaatctcttgaacctgggaggttgcagtgagctgaaatcacaccactgcacttcagcctgggtgacagagcaaaactccacctcaaaaaaaaaaaaaagattctacttttagaaattcagacctagatagatttgcatttggataacaaatccctacctatagccatgtggaagcagcttgtcactgtattttaactgtgtaacaattattgaaggcgaaaatagaagttgggtcatctttgaacacctaccttttatcaatgaatatttttagactgttcttcagtatctgagtcagagtttattgtaatttgttatttacaccaaggtggcatcttagtctaccttcagtgagacttgcgtttcaggggaggggcgtatgtgcatcctcggtctcagttatgtaaacggtctgatctgtaaaatagtggtagcacatgccatgtgggatagttggtggagatgatagatggagttaagcacagggcccagcctgtcagcagtagctactattattgttgcccatttcccctgcaactgaggtgagaggttttcctgagtttgaagctgactggcccacagttaaacgtaacagaccagtttttcagggtgtcagccaacctctattagtgttcttaagtacagtttctgttataaaagttcagattattccttgaaaatttggatctacctcccattattatgagtaatacatgcttatagtaaaaaaaaaaaaattgtaagaaataaatattaagaagatt

SEQ ID NO: 3200 - protein, 168 aa, Homo sapiens [sequence omitted]

SEQ ID NO: 3201 - DNA, 3347 bp, Homo sapiens
aagacaccaggagtttctcgggcccagctgtggctgctgccggggagccccaagccttggcgggtccttgcggcgaataggagtctggtcaggcgtcaggctagtccgacgaagagtgggtaggtggaagccttccaaagagcggcggttgtctgggagccgtctcagttggccgcgacccgggcgcatgcgcggggcgggcggtgcgccttgggtagcttgtcctctccgaccccgggcgctgagggcctctgtacggcgccgcgtagggtctcggccgcagaacgtggccgagaggcccgggcgagacttcgggaccgtgtcctgagcgctctccatgcgcccggcgcgagagaatttcaagattgtggagttggactgaatgctgcacagttcaaacagctgcttatttcggctgtgaaggacctgtttggggaggttgatgccgccttacctttggacatcctaacctatgaagagaagaccttgtcagccatcttgagaatatgtagcagtggtcttgtcaaattgtggagctctttgaccctgttaggatcctataaaggcaaaaaatgtgctttccgggtgattcaggtttctccatttcttcttgcattatctggtaatagtagggaactagtattggattgaatgaatagtcttccattttggaaacgttcatccactctcatatttattttttggtgcctgcatgtttgaagactgaagcaggctaaaagctcttgatgaaatttgagggtgctgaagatgttcccactaatttccagccatcacctttggtggggtgggcttcggaggacagtctgtctgaacctgccagtgctgaccctgcagcactttcagcatatgcacatcaaagttggagaccgcgctgaacttaggagggccttcacacagactgatgtggctaccttctcagaattaacaggggatgtcaatcctttgcatttgaatgaagactttgcaaaacacaccaagtttggaaatacaattgtacatggagttttgatcaacggacttatctcagctctcctaggaactaaaatgccagggccaggctgtgtatttctttcccaggaaattagctttccagcccctttatatattggagaagttgttttagcttctgcagaagtgaaaaagctgaagcggttcattgctattattgcagtgtcatgttctgtaatagaaagtaaaaagactgttatggaaggctgggttaaagttatggttccagaagcttccaaatcctgaaatagatgttttaaagatgcaacctcaaacaccaatgctgttgttaaagagcctatggggaattgctgctctttaccaaagaatggttgataggcccagaagcccatcttagttaggggaagggagcaggaagagggttgttcaaatgcccactttccagtttggccttatgcttcatgcagacttgagtgtatgcaggatttcattatctgcctgggttttttgtttgttttttgttttttaattcaagaagtaggctgggcccggtggctcatgcctgtaatcctggcactttgggaggctgcggcaggcggatcacttgaggtcaggagtccaagaccagcctggccaacatggtgaaaccccatctctaccaaaaaaaaaaaaaaaaaaaaagtgcaactagctgtgcttggtgacttggccctgtagtcccagttgcttgggaggctgaggtgggagaattgcttgggcctgagagctggaggttatggtgagaaactgagattgcaccactgcactgtagcctgagtgacagagcgagaccctgtctcaagaaagaagtattgggaaggttatttaaagactctacttttaaatcaggcgtggcagctcacgcctgtaatcccagcattttgggaggctgaggcaggcgaatcacttgaggtcaggagttcaagaccagcctggccaacatgtgaaaccccatctctactaaaaatacaaaaactaaccgggcatggtggcgggcacctgtaatcccagctacttgggaggctgaggcaggagaatctcttgaacctgggaggttgcagtgagctgaaatcacaccactgcacttcagcctgggtgacagagcaaaactccacctcaaaaaaaaaaaaaagattctacttttagaaattcagacctagatagatttgcatttggataacaaatccctacctatagccatgtggaagcagcttgtcactgtattttaactgtgtaacaattattgaaggcgaaaatagaagttgggtcatctttgaacacctaccttttatcaatgaatatttttagactgttcttcagtatctgagtcagagtttattgtaatttgttatttacaccaaggtggcatcttagtctaccttcagtgagacttgcgtttcaggggaggggcgtatgtgcatcctcggtctcagttatgtaaacggtctgatctgtaaaatagtggtagcacatgccatgtgggatagttggtggagatgatagatggagttaagcacagggcccagcctgtcagcagtagctactattattgttgcccatttcccctgcaactgaggtgagaggttttcctgagtttgaagctgactggcccacagttaaacgtaacagaccagtttttcagggtgtcagccaacctctattagtgttcttaagtacagtttctgttataaaagttcagattattccttgaaaatttggatctacctcccattattatgagtaatacatgcttatagtaaaaaaaaaaaaattgtaagaaataaatattaagaagattatggaggccaaattcttaagactttgggggctggggtcagggaggttatattgaaggggagatgtgcctaacatgttactactaaatggccatcccaacacagccaacacttttgtttcccatttttttttgtttcccgttttttaataaaattgagatataattcacataccataaaattcaccttttaaaagtgtacagtttagtggttttcagaatatccacaaagttgtacaaccatcaccaaatcaattttttatagcatttttcatcacccccaaaagaacctcccattagcagtcaatccatttctctcctccagtctttgggaatcaccagtctactttctgtctctatgggtttccctgttctggacatttcataaaagttcatacaatgtatgatcctttggaactggcttctttgatatagcatgttttcagggttcatccatgttacagcatgtatcagtacatcattttattttatggctgaataatattccattgtatttacccat

SEQ ID NO: 3202 - protein, 168 aa, Homo sapiens [sequence omitted]

SEQ ID NO: 3203 - DNA, 1090 bp, Homo sapiens
taccagtctgtacaaaataatttcccaggtatcctctcctttaatgtcagaacagcctgcagagggcagtgctgtcatttgtaagtctttttttttttttttaattgcaaaaaatacgtgacataaaatttatcgtaagtagcattgagtacattcacaacgctgtgcagccatcaccactgtccatctcgtgaatgttgtagaatttcaagattgtggagttggactgaatgctgcacagttcaaacagctgcttatttcggctgtgaaggacctgtttggggaggttgatgccgccttacctttggacatcctaacctatgaagagaagaccttgtcagccatcttgagaatatgtagcagtggtcttgtcaaattgtggagctctttgaccctgttaggatcctataaaggcaaaaaatgtgctttccgggtgattcaggtttctccatttcttcttgcattatctggtaatagtagggaactagtattggattgaatgaatagtcttccattttggaaacgttcatccactctcatatttattttttggtgcctgcatgtttgaagactgaagcaggctaaaagctcttgatgaaatttgagggtgctgaagatgttcccactaatttccagccatcacctttggtggggtgggcttcggaggacagtctgtctgaacctgccagtgctgaccctgcagcactttcagcatatgcacatcaaagttggagaccgcgctgaacttaggagggccttcacacagactgatgtggctaccttctcagaattaacaggggatgtcaatcctttgcatttgaatgaagactttgcaaaacacaccaagtttggaaatacaattgtacatggagttttgatcaacggacttatctcagctctcctaggaactaaaatgccagggccaggctgtgtatttctttcccaggaaattagctttccagcccctttatatattggagaagttgttttagcttctgcagaagtgaaaaagctgaagcggttcattgctattattgcagtgtcatgttctgtaatagaaagtaaaaagactgttatggaaggctgggtt

SEQ ID NO: 3204 - protein, 157 aa, Homo sapiens; identical to SEQ ID NO: 3176

SEQ ID NO: 3205 - DNA, 2675 bp, Homo sapiens
taccagtctgtacaaaataatttcccaggtatcctctcctttaatgtcagaacagcctgcagagggcagtgctgtcatttgtaagtctttttttttttttttaattgcaaaaaatacgtgacataaaatttatcgtaagtagcattgagtacattcacaacgctgtgcagccatcaccactgtccatctcgtgaatgttgtagaatttcaagattgtggagttggactgaatgctgcacagttcaaacagctgcttatttcggctgtgaaggacctgtttggggaggttgatgccgccttacctttggacatcctaacctatgaagagaagaccttgtcagccatcttgagaatatgtagcagtggtcttgtcaaattgtggagctctttgaccctgttaggatcctataaaggcaaaaaatgtgctttccgggtgattcaggtttctccatttcttcttgcattatctggtaatagtagggaactagtattggattgaatgaatagtcttccattttggaaacgttcatccactctcatatttattttttggtgcctgcatgtttgaagactgaagcaggctaaaagctcttgatgaaatttgagggtgctgaagatgttcccactaatttccagccatcacctttggtggggtgggcttcggaggacagtctgtctgaacctgccagtgctgaccctgcagcactttcagcatatgcacatcaaagttggagaccgcgctgaacttaggagggccttcacacagactgatgtggctaccttctcagaattaacaggggatgtcaatcctttgcatttgaatgaagactttgcaaaacacaccaagtttggaaatacaattgtacatggagttttgatcaacggacttatctcagctctcctaggaactaaaatgccagggccaggctgtgtatttctttcccaggaaattagctttccagcccctttatatattggagaagttgttttagcttctgcagaagtgaaaaagctgaagcggttcattgctattattgcagtgtcatgttctgtaatagaaagtaaaaagactgttatggaaggctgggttaaagttatggttccagaagcttccaaatcctgaaatagatgttttaaagatgcaacctcaaacaccaatgctgttgttaaagagcctatggggaattgctgctctttaccaaagaatggttgataggcccagaagcccatcttagttaggggaagggagcaggaagagggttgttcaaatgcccactttccagtttggccttatgcttcatgcagacttgagtgtatgcaggatttcattatctgcctgggttttttgtttgttttttgttttttaattcaagaagtaggctgggcccggtggctcatgcctgtaatcctggcactttgggaggctgcggcaggcggatcacttgaggtcaggagtccaagaccagcctggccaacatggtgaaaccccatctctaccaaaaaaaaaaaaaaaaaaaaagtgcaactagctgtgcttggtgacttggccctgtagtcccagttgcttgggaggctgaggtgggagaattgcttgggcctgagagctggaggttatggtgagaaactgagattgcaccactgcactgtagcctgagtgacagagcgagaccctgtctcaagaaagaagtattgggaaggttatttaaagactctacttttaaatcaggcgtggcagctcacgcctgtaatcccagcattttgggaggctgaggcaggcgaatcacttgaggtcaggagttcaagaccagcctggccaacatgtgaaaccccatctctactaaaaatacaaaaactaaccgggcatggtggcgggcacctgtaatcccagctacttgggaggctgaggcaggagaatctcttgaacctgggaggttgcagtgagctgaaatcacaccactgcacttcagcctgggtgacagagcaaaactccacctcaaaaaaaaaaaaaagattctacttttagaaattcagacctagatagatttgcatttggataacaaatccctacctatagccatgtggaagcagcttgtcactgtattttaactgtgtaacaattattgaaggcgaaaatagaagttgggtcatctttgaacacctaccttttatcaatgaatatttttagactgttcttcagtatctgagtcagagtttattgtaatttgttatttacaccaaggtggcatcttagtctaccttcagtgagacttgcgtttcaggggaggggcgtatgtgcatcctcggtctcagttatgtaaacggtctgatctgtaaaatagtggtagcacatgccatgtgggatagttggtggagatgatagatggagttaagcacagggcccagcctgtcagcagtagctactattattgttgcccatttcccctgcaactgaggtgagaggttttcctgagtttgaagctgactggcccacagttaaacgtaacagaccagtttttcagggtgtcagccaacctctattagtgttcttaagtacagtttctgttataaaagttcagattattccttgaaaatttggatctacctcccattattatgagtaatacatgcttatagtaaaaaaaaaaaaattgtaagaaataaatattaagaagatt

SEQ ID NO: 3206 - protein, 168 aa, Homo sapiens [sequence omitted]

SEQ ID NO: 3207 - DNA, 3195 bp, Homo sapiens
taccagtctgtacaaaataatttcccaggtatcctctcctttaatgtcagaacagcctgcagagggcagtgctgtcatttgtaagtctttttttttttttttaattgcaaaaaatacgtgacataaaatttatcgtaagtagcattgagtacattcacaacgctgtgcagccatcaccactgtccatctcgtgaatgttgtagaatttcaagattgtggagttggactgaatgctgcacagttcaaacagctgcttatttcggctgtgaaggacctgtttggggaggttgatgccgccttacctttggacatcctaacctatgaagagaagaccttgtcagccatcttgagaatatgtagcagtggtcttgtcaaattgtggagctctttgaccctgttaggatcctataaaggcaaaaaatgtgctttccgggtgattcaggtttctccatttcttcttgcattatctggtaatagtagggaactagtattggattgaatgaatagtcttccattttggaaacgttcatccactctcatatttattttttggtgcctgcatgtttgaagactgaagcaggctaaaagctcttgatgaaatttgagggtgctgaagatgttcccactaatttccagccatcacctttggtggggtgggcttcggaggacagtctgtctgaacctgccagtgctgaccctgcagcactttcagcatatgcacatcaaagttggagaccgcgctgaacttaggagggccttcacacagactgatgtggctaccttctcagaattaacaggggatgtcaatcctttgcatttgaatgaagactttgcaaaacacaccaagtttggaaatacaattgtacatggagttttgatcaacggacttatctcagctctcctaggaactaaaatgccagggccaggctgtgtatttctttcccaggaaattagctttccagcccctttatatattggagaagttgttttagcttctgcagaagtgaaaaagctgaagcggttcattgctattattgcagtgtcatgttctgtaatagaaagtaaaaagactgttatggaaggctgggttaaagttatggttccagaagcttccaaatcctgaaatagatgttttaaagatgcaacctcaaacaccaatgctgttgttaaagagcctatggggaattgctgctctttaccaaagaatggttgataggcccagaagcccatcttagttaggggaagggagcaggaagagggttgttcaaatgcccactttccagtttggccttatgcttcatgcagacttgagtgtatgcaggatttcattatctgcctgggttttttgtttgttttttgttttttaattcaagaagtaggctgggcccggtggctcatgcctgtaatcctggcactttgggaggctgcggcaggcggatcacttgaggtcaggagtccaagaccagcctggccaacatggtgaaaccccatctctaccaaaaaaaaaaaaaaaaaaaaagtgcaactagctgtgcttggtgacttggccctgtagtcccagttgcttgggaggctgaggtgggagaattgcttgggcctgagagctggaggttatggtgagaaactgagattgcaccactgcactgtagcctgagtgacagagcgagaccctgtctcaagaaagaagtattgggaaggttatttaaagactctacttttaaatcaggcgtggcagctcacgcctgtaatcccagcattttgggaggctgaggcaggcgaatcacttgaggtcaggagttcaagaccagcctggccaacatgtgaaaccccatctctactaaaaatacaaaaactaaccgggcatggtggcgggcacctgtaatcccagctacttgggaggctgaggcaggagaatctcttgaacctgggaggttgcagtgagctgaaatcacaccactgcacttcagcctgggtgacagagcaaaactccacctcaaaaaaaaaaaaaagattctacttttagaaattcagacctagatagatttgcatttggataacaaatccctacctatagccatgtggaagcagcttgtcactgtattttaactgtgtaacaattattgaaggcgaaaatagaagttgggtcatctttgaacacctaccttttatcaatgaatatttttagactgttcttcagtatctgagtcagagtttattgtaatttgttatttacaccaaggtggcatcttagtctaccttcagtgagacttgcgtttcaggggaggggcgtatgtgcatcctcggtctcagttatgtaaacggtctgatctgtaaaatagtggtagcacatgccatgtgggatagttggtggagatgatagatggagttaagcacagggcccagcctgtcagcagtagctactattattgttgcccatttcccctgcaactgaggtgagaggttttcctgagtttgaagctgactggcccacagttaaacgtaacagaccagtttttcagggtgtcagccaacctctattagtgttcttaagtacagtttctgttataaaagttcagattattccttgaaaatttggatctacctcccattattatgagtaatacatgcttatagtaaaaaaaaaaaaattgtaagaaataaatattaagaagattatggaggccaaattcttaagactttgggggctggggtcagggaggttatattgaaggggagatgtgcctaacatgttactactaaatggccatcccaacacagccaacacttttgtttcccatttttttttgtttcccgttttttaataaaattgagatataattcacataccataaaattcaccttttaaaagtgtacagtttagtggttttcagaatatccacaaagttgtacaaccatcaccaaatcaattttttatagcatttttcatcacccccaaaagaacctcccattagcagtcaatccatttctctcctccagtctttgggaatcaccagtctactttctgtctctatgggtttccctgttctggacatttcataaaagttcatacaatgtatgatcctttggaactggcttctttgatatagcatgttttcagggttcatccatgttacagcatgtatcagtacatcattttattttatggctgaataatattccattgtatttacccat

SEQ ID NO: 3208 - protein, 168 aa, Homo sapiens [sequence omitted]

SEQ ID NO: 3209 - DNA, 1242 bp, Homo sapiens
gctggatgtggtggcacgtgcctatactcccagctactcaggagtctgaggcaggaggatcacctgagcctcgagagccagaggtggaggctgcagtgaactctgattgtaccactgcacttcagcctaggtgacagggtgagaccctgccttaaaacaaacaaacaaaaaaaacccaaataggccaaattctcatcaaaactctgaaaaatagcatgtgcattggtcatttctagccctcttgacttactgtaggtgtgatcagcactggaaaagatgcctgcccctgctgccacatatgaaagagtagtttacaaaaacccttccgagtaccactacatgaaagtctgcctagaatttcaagattgtggagttggactgaatgctgcacagttcaaacagctgcttatttcggctgtgaaggacctgtttggggaggttgatgccgccttacctttggacatcctaacctatgaagagaagaccttgtcagccatcttgagaatatgtagcagtggtcttgtcaaattgtggagctctttgaccctgttaggatcctataaaggcaaaaaatgtgctttccgggtgattcaggtttctccatttcttcttgcattatctggtaatagtagggaactagtattggattgaatgaatagtcttccattttggaaacgttcatccactctcatatttattttttggtgcctgcatgtttgaagactgaagcaggctaaaagctcttgatgaaatttgagggtgctgaagatgttcccactaatttccagccatcacctttggtggggtgggcttcggaggacagtctgtctgaacctgccagtgctgaccctgcagcactttcagcatatgcacatcaaagttggagaccgcgctgaacttaggagggccttcacacagactgatgtggctaccttctcagaattaacaggggatgtcaatcctttgcatttgaatgaagactttgcaaaacacaccaagtttggaaatacaattgtacatggagttttgatcaacggacttatctcagctctcctaggaactaaaatgccagggccaggctgtgtatttctttcccaggaaattagctttccagcccctttatatattggagaagttgttttagcttctgcagaagtgaaaaagctgaagcggttcattgctattattgcagtgtcatgttctgtaatagaaagtaaaaagactgttatggaaggctgggtt

SEQ ID NO: 3210 - protein, 124 aa, Homo sapiens; identical to SEQ ID NO: 355

SEQ ID NO: 3211 - DNA, 2827 bp, Homo sapiens
gctggatgtggtggcacgtgcctatactcccagctactcaggagtctgaggcaggaggatcacctgagcctcgagagccagaggtggaggctgcagtgaactctgattgtaccactgcacttcagcctaggtgacagggtgagaccctgccttaaaacaaacaaacaaaaaaaacccaaataggccaaattctcatcaaaactctgaaaaatagcatgtgcattggtcatttctagccctcttgacttactgtaggtgtgatcagcactggaaaagatgcctgcccctgctgccacatatgaaagagtagtttacaaaaacccttccgagtaccactacatgaaagtctgcctagaatttcaagattgtggagttggactgaatgctgcacagttcaaacagctgcttatttcggctgtgaaggacctgtttggggaggttgatgccgccttacctttggacatcctaacctatgaagagaagaccttgtcagccatcttgagaatatgtagcagtggtcttgtcaaattgtggagctctttgaccctgttaggatcctataaaggcaaaaaatgtgctttccgggtgattcaggtttctccatttcttcttgcattatctggtaatagtagggaactagtattggattgaatgaatagtcttccattttggaaacgttcatccactctcatatttattttttggtgcctgcatgtttgaagactgaagcaggctaaaagctcttgatgaaatttgagggtgctgaagatgttcccactaatttccagccatcacctttggtggggtgggcttcggaggacagtctgtctgaacctgccagtgctgaccctgcagcactttcagcatatgcacatcaaagttggagaccgcgctgaacttaggagggccttcacacagactgatgtggctaccttctcagaattaacaggggatgtcaatcctttgcatttgaatgaagactttgcaaaacacaccaagtttggaaatacaattgtacatggagttttgatcaacggacttatctcagctctcctaggaactaaaatgccagggccaggctgtgtatttctttcccaggaaattagctttccagcccctttatatattggagaagttgttttagcttctgcagaagtgaaaaagctgaagcggttcattgctattattgcagtgtcatgttctgtaatagaaagtaaaaagactgttatggaaggctgggttaaagttatggttccagaagcttccaaatcctgaaatagatgttttaaagatgcaacctcaaacaccaatgctgttgttaaagagcctatggggaattgctgctctttaccaaagaatggttgataggcccagaagcccatcttagttaggggaagggagcaggaagagggttgttcaaatgcccactttccagtttggccttatgcttcatgcagacttgagtgtatgcaggatttcattatctgcctgggttttttgtttgttttttgttttttaattcaagaagtaggctgggcccggtggctcatgcctgtaatcctggcactttgggaggctgcggcaggcggatcacttgaggtcaggagtccaagaccagcctggccaacatggtgaaaccccatctctaccaaaaaaaaaaaaaaaaaaaaagtgcaactagctgtgcttggtgacttggccctgtagtcccagttgcttgggaggctgaggtgggagaattgcttgggcctgagagctggaggttatggtgagaaactgagattgcaccactgcactgtagcctgagtgacagagcgagaccctgtctcaagaaagaagtattgggaaggttatttaaagactctacttttaaatcaggcgtggcagctcacgcctgtaatcccagcattttgggaggctgaggcaggcgaatcacttgaggtcaggagttcaagaccagcctggccaacatgtgaaaccccatctctactaaaaatacaaaaactaaccgggcatggtggcgggcacctgtaatcccagctacttgggaggctgaggcaggagaatctcttgaacctgggaggttgcagtgagctgaaatcacaccactgcacttcagcctgggtgacagagcaaaactccacctcaaaaaaaaaaaaaagattctacttttagaaattcagacctagatagatttgcatttggataacaaatccctacctatagccatgtggaagcagcttgtcactgtattttaactgtgtaacaattattgaaggcgaaaatagaagttgggtcatctttgaacacctaccttttatcaatgaatatttttagactgttcttcagtatctgagtcagagtttattgtaatttgttatttacaccaaggtggcatcttagtctaccttcagtgagacttgcgtttcaggggaggggcgtatgtgcatcctcggtctcagttatgtaaacggtctgatctgtaaaatagtggtagcacatgccatgtgggatagttggtggagatgatagatggagttaagcacagggcccagcctgtcagcagtagctactattattgttgcccatttcccctgcaactgaggtgagaggttttcctgagtttgaagctgactggcccacagttaaacgtaacagaccagtttttcagggtgtcagccaacctctattagtgttcttaagtacagtttctgttataaaagttcagattattccttgaaaatttggatctacctcccattattatgagtaatacatgcttatagtaaaaaaaaaaaaattgtaagaaataaatattaagaagatt

SEQ ID NO: 3212 - protein, 124 aa, Homo sapiens; identical to SEQ ID NO: 355

SEQ ID NO: 3213 - DNA, 3347 bp, Homo sapiens
gctggatgtggtggcacgtgcctatactcccagctactcaggagtctgaggcaggaggatcacctgagcctcgagagccagaggtggaggctgcagtgaactctgattgtaccactgcacttcagcctaggtgacagggtgagaccctgccttaaaacaaacaaacaaaaaaaacccaaataggccaaattctcatcaaaactctgaaaaatagcatgtgcattggtcatttctagccctcttgacttactgtaggtgtgatcagcactggaaaagatgcctgcccctgctgccacatatgaaagagtagtttacaaaaacccttccgagtaccactacatgaaagtctgcctagaatttcaagattgtggagttggactgaatgctgcacagttcaaacagctgcttatttcggctgtgaaggacctgtttggggaggttgatgccgccttacctttggacatcctaacctatgaagagaagaccttgtcagccatcttgagaatatgtagcagtggtcttgtcaaattgtggagctctttgaccctgttaggatcctataaaggcaaaaaatgtgctttccgggtgattcaggtttctccatttcttcttgcattatctggtaatagtagggaactagtattggattgaatgaatagtcttccattttggaaacgttcatccactctcatatttattttttggtgcctgcatgtttgaagactgaagcaggctaaaagctcttgatgaaatttgagggtgctgaagatgttcccactaatttccagccatcacctttggtggggtgggcttcggaggacagtctgtctgaacctgccagtgctgaccctgcagcactttcagcatatgcacatcaaagttggagaccgcgctgaacttaggagggccttcacacagactgatgtggctaccttctcagaattaacaggggatgtcaatcctttgcatttgaatgaagactttgcaaaacacaccaagtttggaaatacaattgtacatggagttttgatcaacggacttatctcagctctcctaggaactaaaatgccagggccaggctgtgtatttctttcccaggaaattagctttccagcccctttatatattggagaagttgttttagcttctgcagaagtgaaaaagctgaagcggttcattgctattattgcagtgtcatgttctgtaatagaaagtaaaaagactgttatggaaggctgggttaaagttatggttccagaagcttccaaatcctgaaatagatgttttaaagatgcaacctcaaacaccaatgctgttgttaaagagcctatggggaattgctgctctttaccaaagaatggttgataggcccagaagcccatcttagttaggggaagggagcaggaagagggttgttcaaatgcccactttccagtttggccttatgcttcatgcagacttgagtgtatgcaggatttcattatctgcctgggttttttgtttgttttttgttttttaattcaagaagtaggctgggcccggtggctcatgcctgtaatcctggcactttgggaggctgcggcaggcggatcacttgaggtcaggagtccaagaccagcctggccaacatggtgaaaccccatctctaccaaaaaaaaaaaaaaaaaaaaagtgcaactagctgtgcttggtgacttggccctgtagtcccagttgcttgggaggctgaggtgggagaattgcttgggcctgagagctggaggttatggtgagaaactgagattgcaccactgcactgtagcctgagtgacagagcgagaccctgtctcaagaaagaagtattgggaaggttatttaaagactctacttttaaatcaggcgtggcagctcacgcctgtaatcccagcattttgggaggctgaggcaggcgaatcacttgaggtcaggagttcaagaccagcctggccaacatgtgaaaccccatctctactaaaaatacaaaaactaaccgggcatggtggcgggcacctgtaatcccagctacttgggaggctgaggcaggagaatctcttgaacctgggaggttgcagtgagctgaaatcacaccactgcacttcagcctgggtgacagagcaaaactccacctcaaaaaaaaaaaaaagattctacttttagaaattcagacctagatagatttgcatttggataacaaatccctacctatagccatgtggaagcagcttgtcactgtattttaactgtgtaacaattattgaaggcgaaaatagaagttgggtcatctttgaacacctaccttttatcaatgaatatttttagactgttcttcagtatctgagtcagagtttattgtaatttgttatttacaccaaggtggcatcttagtctaccttcagtgagacttgcgtttcaggggaggggcgtatgtgcatcctcggtctcagttatgtaaacggtctgatctgtaaaatagtggtagcacatgccatgtgggatagttggtggagatgatagatggagttaagcacagggcccagcctgtcagcagtagctactattattgttgcccatttcccctgcaactgaggtgagaggttttcctgagtttgaagctgactggcccacagttaaacgtaacagaccagtttttcagggtgtcagccaacctctattagtgttcttaagtacagtttctgttataaaagttcagattattccttgaaaatttggatctacctcccattattatgagtaatacatgcttatagtaaaaaaaaaaaaattgtaagaaataaatattaagaagattatggaggccaaattcttaagactttgggggctggggtcagggaggttatattgaaggggagatgtgcctaacatgttactactaaatggccatcccaacacagccaacacttttgtttcccatttttttttgtttcccgttttttaataaaattgagatataattcacataccataaaattcaccttttaaaagtgtacagtttagtggttttcagaatatccacaaagttgtacaaccatcaccaaatcaattttttatagcatttttcatcacccccaaaagaacctcccattagcagtcaatccatttctctcctccagtctttgggaatcaccagtctactttctgtctctatgggtttccctgttctggacatttcataaaagttcatacaatgtatgatcctttggaactggcttctttgatatagcatgttttcagggttcatccatgttacagcatgtatcagtacatcattttattttatggctgaataatattccattgtatttacccat

SEQ ID NO: 3214 - protein, 124 aa, Homo sapiens; identical to SEQ ID NO: 355

SEQ ID NO: 3215 - DNA, 957 bp, Homo sapiens
ctagctgtgcttggtgacttggccctgtagtcccagttgcttgggaggctgaggcaggcgaatcacttgaggtcaggagttcaagaccagcctggccaacatgtgaaaccccatctctactaaaaatacaaaaactaaccgggcatggtggcgggcacctgtaatcccagctacttgggaggctgaggcaggagaatctcttgaacctgggaggttgcagtgagctgaaatcacaccactgcacttcagcctgggtgacagagcaaaactccacctcaaaaaaaaaaaaaagattctacttttagaaattcagacctagatagatttgcatttggataacaaatccctacctatagccatgtggaagcagcttgtcactgtattttaactgtgtaacaattattgaaggcgaaaatagaagttgggtcatctttgaacacctaccttttatcaatgaatatttttagactgttcttcagtatctgagtcagagtttattgtaatttgttatttacaccaaggtggcatcttagtctaccttcagtgagacttgcgtttcaggggaggggcgtatgtgcatcctcggtctcagttatgtaaacggtctgatctgtaaaatagtggtagcacatgccatgtgggatagttggtggagatgatagatggagttaagcacagggcccagcctgtcagcagtagctactattattgttgcccatttcccctgcaactgaggtgagaggttttcctgagtttgaagctgactggcccacagttaaacgtaacagaccagtttttcagggtgtcagccaacctctattagtgttcttaagtacagtttctgttataaaagttcagattattccttgaaaatttggatctacctcccattattatgagtaatacatgcttatagtaaaaaaaaaaaaattgtaagaaataaatattaagaagatt

SEQ ID NO: 3216 - protein, 48 aa, Homo sapiens
LGPVVPVAWEAEAGESLEVRSSRPAWPTCETPSLLKIQKLTGHGGGHL

SEQ ID NO: 3217 - DNA, 1477 bp, Homo sapiens
ctagctgtgcttggtgacttggccctgtagtcccagttgcttgggaggctgaggcaggcgaatcacttgaggtcaggagttcaagaccagcctggccaacatgtgaaaccccatctctactaaaaatacaaaaactaaccgggcatggtggcgggcacctgtaatcccagctacttgggaggctgaggcaggagaatctcttgaacctgggaggttgcagtgagctgaaatcacaccactgcacttcagcctgggtgacagagcaaaactccacctcaaaaaaaaaaaaaagattctacttttagaaattcagacctagatagatttgcatttggataacaaatccctacctatagccatgtggaagcagcttgtcactgtattttaactgtgtaacaattattgaaggcgaaaatagaagttgggtcatctttgaacacctaccttttatcaatgaatatttttagactgttcttcagtatctgagtcagagtttattgtaatttgttatttacaccaaggtggcatcttagtctaccttcagtgagacttgcgtttcaggggaggggcgtatgtgcatcctcggtctcagttatgtaaacggtctgatctgtaaaatagtggtagcacatgccatgtgggatagttggtggagatgatagatggagttaagcacagggcccagcctgtcagcagtagctactattattgttgcccatttcccctgcaactgaggtgagaggttttcctgagtttgaagctgactggcccacagttaaacgtaacagaccagtttttcagggtgtcagccaacctctattagtgttcttaagtacagtttctgttataaaagttcagattattccttgaaaatttggatctacctcccattattatgagtaatacatgcttatagtaaaaaaaaaaaaattgtaagaaataaatattaagaagattatggaggccaaattcttaagactttgggggctggggtcagggaggttatattgaaggggagatgtgcctaacatgttactactaaatggccatcccaacacagccaacacttttgtttcccatttttttttgtttcccgttttttaataaaattgagatataattcacataccataaaattcaccttttaaaagtgtacagtttagtggttttcagaatatccacaaagttgtacaaccatcaccaaatcaattttttatagcatttttcatcacccccaaaagaacctcccattagcagtcaatccatttctctcctccagtctttgggaatcaccagtctactttctgtctctatgggtttccctgttctggacatttcataaaagttcatacaatgtatgatcctttggaactggcttctttgatatagcatgttttcagggttcatccatgttacagcatgtatcagtacatcattttattttatggctgaataatattccattgtatttacccat

SEQ ID NO: 3218 - protein, 48 aa, Homo sapiens; identical to SEQ ID NO: 3216

SEQ ID NO: 3219 - DNA, 2641 bp, Homo sapiens
ggcgcgtgttgacagcggcggcggtggaaccgggcgggcggcgggagtcggcgcctcgggttcctacctcgcgtccctaggcggcggcggccgggcgtcccgggatggccttcatggagaagccgccagccggcaaggtgctgctggacgacacggtgccgctgacagcagccatcgaggcgagccagagcctgcagtcccacacgagattgccttgcaacaggtttccatgttcttccgatcagaaccaaagtgggaggtggtggaacctttgaaagacataggttggagaataaggaagaaatatttcttgatgaagattaaaaatcagccaaaggaacggctagtgttaagctgggctgaccttggcccagacaagtatttgtcagataaagattttcagtgtctaatcaaacttctgccttcttgtttgcacccttacatctatcgggttacctttgccacagctaatgaatcctcagcgttgctaattaggatgtttaacgaaaagggaacattgaaggatctgatctacaaggcaaaaccaaaagacccatttctaaagaagtactgcaaccctaagaagattcagggcctggaactccagcaaataaaaacatatggacggcaaatattagaggtactgaagtttcttcatgacaagggattcccttatgggcatcttcacgcctccaatgtgatgctcgatggggacacttgccggctgctggaccttgagaattccttattgggcctgccttccttctaccgatcttatttttcacaattcaggaaaatcaatacattggaaagtgtggatgtccactgctttggccacttactgtatgaaatgacttatggacgaccgccagactcggtgcctgtggactccttccctcctgccccgtccatggctgtggtggccgtgttggagtctacgctgtcttgtgaagcctgtaaaaatggcatgcctaccatctcccggctcttacagatgccattattcagcgatgttttactaaccacttctgaaaaaccacagtttaagatccctacaaagttaaaagaggcattgagaattgccaaagaatgtatagagaagagactaattgaggaacagaaacagattcaccagcatcgaagactgacaagagctcagtcccaccatggatctgaggaggaaagaaaaaaaagaaagattttagctcgaaagaagtcaaaacgatctgctcttgaaaatagtgaagagcattcagcgaagtacagcaactccaataattcagcaggatctggggccagctcacctctcacgtccccgtcatcgccaactccaccctctacatcagggatatctgcattacctccacctcctccacctccaccaccaccagcagctcccttgcctcctgcgagcaccgaggcacctgcccagctctcgtctcaggctgtgaatggcatgagccgaggggccttgctcagctccatccagaatttccaaaaaggaactttgaggaaagccaaaacctgtgatcacagtgctccgaagatcggctgaagcttcctgtttacacttggagggaaaagttcttttttattcctactcacccctaccccccaaactaccctcttcctgggaaagtaattgctgagccagtacagccacaaacagtactattttgcagatgctcatgtaagcagcttttcgagagaaataattctttaagcagaataaagttaggctggcattgctcccttaagatcttgctcctttattaaccctgtaaaggagtcttgtttatcctctaatggccaggcttttgggacagcagcatattgaaatattttcaccaactaaaggaaatagacagaaaaacaatgacaatattcaatcacagcagtaaatggcctttgtgttgcaatcccttctaccccatcagacagctcctagaaacattcctcttacagttcatttctctaaagcattttctgattcttagataactccaatttttgctacctttatcttagacattaacactatagcccaaagcatagttactttgctaaatcagaaagcaactgagttctttgttttctcctcaaatagaatggggaacgttcacaacattctcttaagttctaacaggaataccattgtggttatagaactcagggctgctaaagcaactactctagacccatagttctttttagttagatgtattgaaacagacaaaaatattaacatcagaaaaagctcttgccaattagaggatcttcttaatcctcagcaattaagtttggggtttgaggggggcaggtcattgttacaacagaagtaaatttggcatctatagaaatcaattatgatttttgaaagatttatctaaatatatcaatatagcatctctttaatgttagtcatttattagaaagatcctttatcctgatttgcttaaacctttcaataaattgcactttaaaggattataaataatccatttaaaaattcaagtacacacatcagtgttggttactatgcagagaatgtcattgtgtatagtttcatgtaatctgttatgtcagctgtattttttattaaaatcatgtcaagaaaacgtgttgtctgtagcttgacaag

SEQ ID NO: 3220 - protein, 441 aa, Homo sapiens
MFFRSEPKWEVVEPLKDIGWRIRKKYFLMKIKNQPKERLVLSWADLGPDKYLSDKDFQCLIKLLPSCLHPYIYRVTFATANESSALLIRMFNEKGTLKDLIYKAKPKDPFLKKYCNPKKIQGLELQQIKTYGRQILEVLKFLHDKGFPYGHLHASNVMLDGDTCRLLDLENSLLGLPSFYRSYFSQFRKINTLESVDVHCFGHLLYEMTYGRPPDSVPVDSFPPAPSMAVVAVLESTLSCEACKNGMPTISRLLQMPLFSDVLLTTSEKPQFKIPTKLKEALRIAKECIEKRLIEEQKQIHQHRRLTRAQSHHGSEEERKKRKILARKKSKRSALENSEEHSAKYSNSNNSAGSGASSPLTSPSSPTPPSTSGISALPPPPPPPPPPAAPLPPASTEAPAQLSSQAVNGMSRGALLSSIQNFQKGTLRKAKTCDHSAPKIG

SEQ ID NO: 3221 - DNA, 1466 bp, Homo sapiens
gtgttgacagcggcggcggtggaaccgggcgggcggcgggagtcggcgcctcgggttcctacctcgcgtccctaggcggcggcggccgggcgtcccgggatggccttcatggagaagccgccagccggcaaggtgctgctggacgacacggtgccgctgacagcagccatcgaggcgagccagagcctgcagtcccacacggaatatattattcgagtgcaaagaggaatttctgtggaaaacagctggcagattgttagaagatacagtgactttgatttgcttaacaacagcttacagattgcaggcctaagtctacctcttcctcccaaaaaattgattggtaacatggatcgtgaattcatagctgaaaggcagaaaggtcttcagaactatctcaacgtgatcacaacaaatcatatcttgtctaattgtgagctggttaagaagtttttagatccaaacaactattccgcaaactatactgagattgccttgcaacaggtttccatgttcttccgatcagaaccaaagtgggaggtggtggaacctttgaaagacataggttggagaataaggaagaaatatttcttgatgaagattaaaaatcagccaaaggaacggctagtgttaagctgggctgaccttggcccagacaagtatttgtcagataaagattttcagtgtctaatcaaacttctgccttcttgtttgcacccttacatctatcgggttacctttgccacagctaatgaatcctcagcgttgctaattaggatgtttaacgaaaagggaacattgaaggatctgatctacaaggcaaaaccaaaagacccatttctaaagaagtactgcaaccctaagaagattcagggcctggaactccagcaaataaaaacatatggacggcaaatattagaggtactgaagtttcttcatgacaagggattcccttatgggcatcttcacgcctccaatgtgatgctcgatggggacacttgccggctgctggaccttgagaattccttattgggcctgccttccttctaccgatcttatttttcacaattcaggaaaatcaatacattggaaagtgtggatgtccactgctttggccacttactgtatgaaatgacttatggacgaccgccagactcggtgcctgtggactccttccctcctgccccgtccatggctgtggtggccgtgttggagtctacgctgtcttgtgaagcctgtaaaaatggcatgcctaccatctcccggctcttacagatgccattattcagcgatgttttactaaccacttctgaaaaaccacagtttaagatccctacaaagttaaaagaggcattgagaattgccaaagaatgtatagagaagagactaattgaggaacagaaacagattcaccagcatcgaagactgacaagagctcagtcccaccatggatctgaggaggaaag

SEQ ID NO: 3222 - protein, 454 aa, Homo sapiens
MAFMEKPPAGKVLLDDTVPLTAAIEASQSLQSHTEYIIRVQRGISVENSWQIVRRYSDFDLLNNSLQIAGLSLPLPPKKLIGNMDREFIAERQKGLQNYLNVITTNHILSNCELVKKFLDPNNYSANYTEIALQQVSMFFRSEPKWEVVEPLKDIGWRIRKKYFLMKIKNQPKERLVLSWADLGPDKYLSDKDFQCLIKLLPSCLHPYIYRVTFATANESSALLIRMFNEKGTLKDLIYKAKPKDPFLKKYCNPKKIQGLELQQIKTYGRQILEVLKFLHDKGFPYGHLHASNVMLDGDTCRLLDLENSLLGLPSFYRSYFSQFRKINTLESVDVHCFGHLLYEMTYGRPPDSVPVDSFPPAPSMAVVAVLESTLSCEACKNGMPTISRLLQMPLFSDVLLTTSEKPQFKIPTKLKEALRIAKECIEKRLIEEQKQIHQHRRLTRAQSHHGSEE

SEQ ID NO: 3223 - DNA, 7138 bp, Homo sapiens
gtgttgacagcggcggcggtggaaccgggcgggcggcgggagtcggcgcctcgggttcctacctcgcgtccctaggcggcggcggccgggcgtcccgggatggccttcatggagaagccgccagccggcaaggtgctgctggacgacacggtgccgctgacagcagccatcgaggcgagccagagcctgcagtcccacacggaatatattattcgagtgcaaagaggaatttctgtggaaaacagctggcagattgttagaagatacagtgactttgatttgcttaacaacagcttacagattgcaggcctaagtctacctcttcctcccaaaaaattgattggtaacatggatcgtgaattcatagctgaaaggcagaaaggtcttcagaactatctcaacgtgatcacaacaaatcatatcttgtctaattgtgagctggttaagaagtttttagatccaaacaactattccgcaaactatactgagattgccttgcaacaggtttccatgttcttccgatcagaaccaaagtgggaggtggtggaacctttgaaagacataggttggagaataaggaagaaatatttcttgatgaagattaaaaatcagccaaaggaacggctagtgttaagctgggctgaccttggcccagacaagtatttgtcagataaagattttcagtgtctaatcaaacttctgccttcttgtttgcacccttacatctatcgggttacctttgccacagctaatgaatcctcagcgttgctaattaggatgtttaacgaaaagggaacattgaaggatctgatctacaaggcaaaaccaaaagacccatttctaaagaagtactgcaaccctaagaagattcagggcctggaactccagcaaataaaaacatatggacggcaaatattagaggtactgaagtttcttcatgacaagggattcccttatgggcatcttcacgcctccaatgtgatgctcgatggggacacttgccggctgctggaccttgagaattccttattgggcctgccttccttctaccgatcttatttttcacaattcaggaaaatcaatacattggaaagtgtggatgtccactgctttggccacttactgtatgaaatgacttatggacgaccgccagactcggtgcctgtggactccttccctcctgccccgtccatggctgtggtggccgtgttggagtctacgctgtcttgtgaagcctgtaaaaatggcatgcctaccatctcccggctcttacagatgccattattcagcgatgttttactaaccacttctgaaaaaccacagtttaagatccctacaaagttaaaagaggcattgagaattgccaaagaatgtatagagaagagactaattgaggaacagaaacagattcaccagcatcgaagactgacaagagctcagtcccaccatggatctgaggaggaaagaaaaaaaagaaagattttagctcgaaagaagtcaaaacgatctgctcttgaaaatagtgaagagcattcagcgaagtacagcaactccaataattcagcaggatctggggccagctcacctctcacgtccccgtcatcgccaactccaccctctacatcagtagagcatgcaccattttgaacgtgaattttcggtaaagtaaactatgctgatttctcagactttaaagatgctctgtttctgtgtgtgaaataggacccaaagtgtctcgattgctgaagtgatgaacaagtgggaaagcagatttgagactatttccttatctgaatatttaaatgaaatacagcatctttaaaaagcacccagtgacttcatctatattcatttcattttcatcatgaccttcaaaatcttcattttcactctgatttcagttttaaaatacagctctaaaacctgcaaatcaactgcatggcattttggtatattttaattttggaaaccataactctcaaagtcccgttgctgcaaaaatgttgattcctagttactctgatgaagaggaaagagtgttaggcacttgagctcttagttacagggagacaacttactggcttttataactgacggtagggaaaaacagttcttttgtaagcatcctttataattctcgagctgtgacaggagtacagcctcctcacctgcctgaagccaaaggagaaggtggttctcccgagagctgggggcttgcctgcttcggttctctcctgagggtggctggtaagtctggtgttaccctagtgtggtctcatggccacttggcctcccttcctgtatgtgaccacaaaggagctcagaattagagagactgtagattacccactgctggctgctaacatgggcctaagagtcggtggggaagggagccaggcgcagtggctcacatctataatctcagcactttgggaggctgaggcgggcggatcacaaggatcaggagttcaagaccaacctggccaacatggtgaaaccccatctgtactaaaaatacaaaaattaggtgggcatggtaccacgcgcctgtaatcccagctactcgggaggctgaggcagagaatcacttgaacccgggaggcggagcttgcagtgagccgagatcgcgccactgcactccagcctgggcaacagagcgagactccatctcagaaaaaaaggaactggagggagggaccctcagacatcctgtccacaaggctgtcaagggggtttctggcctggcattcctccctagatctgacctacgctctccctgcagcattctctgccctctgacagggcctctgctggactgccaggttcccgtgtggtttggtggagaagattttggggtgggtagagtaagtagttggctctcagggattttgtctaagagaaagtgagatgggagaaatcgggactgacctggtcgtaactgaaggtaagctgtttgcagcatcccccttcctgggtgcaaattcaggtatcataagtctaacatggaatcggtctgctctcatatgtggcctggagataagggtattggaggtctcttggcaggaaggcctcattcacatctgaggggtggagagcgcgcaggcagcaggcagttgttcccaggtttgtcacaggccaaatggtaactttcatttggcccttgttgcccctgccccctcttcctccattgttagccatgtgttgtagctgaagccccaacggacctttcaggaagcttgtggaccatggaaagggccaaaaggaaaagccaaaaacaatcaatggggcagactgagtgagaccgagtcccaggtctgtgttcctgcctcctccagtttccaccttctgacccctagacctcctctcccctccagagtgttccaaactggcaagctgggtctggccttccttgccctggttgtacataagagccaccatggttgttgtaggcccagtgaggaaaagtggacttgctgggacatcaagccccaccggactgctccagcctgctgaggccacatcagggagatcctgctgcctgtcctttcgttccatctgctttactggagccctggagccctttggacagtgtatttattgacaccacctacattttcaaagagactcatttaaagtgacagtggaaaatccatgtccatttacttggacagtggaaaatccatgtactgaaccccaccctcaactcccaaactctgcggtggtgcatttgcacttctaattttgagggcctggtaatgacgccaaaaccaagggttggttctctgtgaggccaagcagttttgttctgtgccaagatggcagcccctacccctcagcccagccctgaggcccgtctccagccccccaaaatccttgcctggagggctagtcagtctctagatggccagtgctgagcctttagtagaactcccaagtaccgccgcagccgagagcctgtccttaactgcacagtgattcttctgccgggggtcaaagcacaaacctgggaggcagaaaccctggagctccttctgttacactacgtggccctgaatatcaagtccagattccactgcccttttctggctattgggtgggagggtgctggggaagggcactggcacctacttacccccaagtgggcagagctcactccttcgggcccacttggtgttgcagtcaagagactcagttccaaaaaccttcagcagaggtctcccctcctcctggtatttcactggttgctctccagaagtcctcttcagaggaatgctcatcacacatgcttattctccgttttcccacttcaacagttacttcaggtttaaagtcctttttatctctgtaacctggtgacataaagccaggaacattttcccacaatccaccttagcataaaacataacaatttcattcatcagttgttattgtgtagaaccaatgaacatgttggtcatttgtctgtatttagtctttatttgtattgctatctttgagcattccaagattgcagagcatgagcgtgtgtatttgtgtgattctttaatttcagctgccttaggtttgagtaaaagatgtaaagaaaggtaagtgattttctattgtaagactttaacccatacctgtcacacttggtgaaaaggatgtacttacctgagtattgtgttggtgattctgagccagtcgtccatacaaacttaagtagggtagctttacctgttacttatcacaactcagtagcagtgtaggggaaaccacctggcagaatgtctccctggagtagccctgggagggacagagacagcatctgacagagtctcagagagctgcaaggtcacaggagacgaggcaactaactgtggcacaggaacattctttaaggcaaggctttttctgaactcgggtgtttattctgtcctgagagaaccattcattgattctaaaatataaaattcgagttgcaaatgtccatgtgcctggaagctgagggaagttttagacacctgcccagtttccctctccttgcccactgcggtacagcacgacattctagtttctcctgatgcttcgtcaaagacatttagtgcagttatgtcctgttccttggttgggccacaatggagagaacagtacttgagaaggatttctctgtaagaataccatggcagagagacccctctgccccctgctttgcattgctaacagttattagcattttatatttctttaatgcaacctaataggaaattattattcgagacagactcctctgggaaatgcataacccaggaggcactgattccttgctgagaatcctgagtggtctgtcattttacataagatcacatccttcaaacattgtgtatgttggagcagcgaaagaactgttcaccccttatgaataactgacattcaggaagcccaactccatcatgcagatgtctatctttaattgctagctcagaagcagacagagcttcctgggacctggctaaagtaactgatagatggaactcttctttggggactattactttgcaaatggggtcagagcctcatctatgcagagaatgtcaccatatgtggtttcatgtaatctgtaattatttgttccaacagcctttaacatgactattgtttgagaaacatggcaacttttaattcccctttgatgcttctagctttctttagtattttaagaactcatacagtactaggtatgttggtccctctgagaaaaacatgtggactctcaccagtccgttgtgctcaggactgagcagcagcgtgtgtgcagggcagctgtggaggtgaatactgattgtcccccttttcctccacagggatatctgcattacctccacctcctccacctccaccaccaccagcagctcccttgcctcctgcgagcaccgaggcacctgcccagctctcgtctcaggctgtgaatggcatgagccgaggggccttgctcagctccatccagaatttccaaaaaggaactttgaggaaagccaaaacctgtgatcacagtgctccgaagatcggctgaagcttcctgtttacacttggagggaaaagttcttttttattcctactcacccctaccccccaaactaccctcttcctgggaaagtaattgctgagccagtacagccacaaacagtactattttgcagatgctcatgtaagcagcttttcgagagaaataattctttaagcagaataaagttaggctggcattgctcccttaagatcttgctcctttattaaccctgtaaaggagtcttgtttatcctctaatggccaggcttttgggacagcagcatattgaaatattttcaccaactaaaggaaatagacagaaaaacaatgacaatattcaatcacagcagtaaatggcctttgtgttgcaatcccttctaccccatcagacagctcctagaaacattcctcttacagttcatttctctaaagcattttctgattcttagataactccaatttttgctacctttatcttagacattaacactatagcccaaagcatagttactttgctaaatcagaaagcaactgagttctttgttttctcctcaaatagaatggggaacgttcacaacattctcttaagttctaacaggaataccattgtggttatagaactcagggctgctaaagcaactactctagacccatagttctttttagttagatgtattgaaacagacaaaaatattaacatcagaaaaagctcttgccaattagaggatcttcttaatcctcagcaattaagtttggggtttgaggggggcaggtcattgttacaacagaagtaaatttggcatctatagaaatcaattatgatttttgaaagatttatctaaatatatcaatatagcatctctttaatgttagtcatttattagaaagatcctttatcctgatttgcttaaacctttcaataaattgcactttaaaggattataaataatccatttaaaaattcaagtacacacatcagtgttggttactatgcagagaatgtcattgtgtatagtttcatgtaatctgttatgtcagctgtattttttattaaaatcatgtcaagaaaacgtgttgtctgtagcttgacaag

SEQ ID NO: 3224 - protein, 515 aa, Homo sapiens
MAFMEKPPAGKVLLDDTVPLTAAIEASQSLQSHTEYIIRVQRGISVENSWQIVRRYSDFDLLNNSLQIAGLSLPLPPKKLIGNMDREFIAERQKGLQNYLNVITTNHILSNCELVKKFLDPNNYSANYTEIALQQVSMFFRSEPKWEVVEPLKDIGWRIRKKYFLMKIKNQPKERLVLSWADLGPDKYLSDKDFQCLIKLLPSCLHPYIYRVTFATANESSALLIRMFNEKGTLKDLIYKAKPKDPFLKKYCNPKKIQGLELQQIKTYGRQILEVLKFLHDKGFPYGHLHASNVMLDGDTCRLLDLENSLLGLPSFYRSYFSQFRKINTLESVDVHCFGHLLYEMTYGRPPDSVPVDSFPPAPSMAVVAVLESTLSCEACKNGMPTISRLLQMPLFSDVLLTTSEKPQFKIPTKLKEALRIAKECIEKRLIEEQKQIHQHRRLTRAQSHHGSEEERKKRKILARKKSKRSALENSEEHSAKYSNSNNSAGSGASSPLTSPSSPTPPSTSVEHAPF

SEQ ID NO: 3225 - DNA, 2955 bp, Homo sapiens
gtgttgacagcggcggcggtggaaccgggcgggcggcgggagtcggcgcctcgggttcctacctcgcgtccctaggcggcggcggccgggcgtcccgggatggccttcatggagaagccgccagccggcaaggtgctgctggacgacacggtgccgctgacagcagccatcgaggcgagccagagcctgcagtcccacacggaatatattattcgagtgcaaagaggaatttctgtggaaaacagctggcagattgttagaagatacagtgactttgatttgcttaacaacagcttacagattgcaggcctaagtctacctcttcctcccaaaaaattgattggtaacatggatcgtgaattcatagctgaaaggcagaaaggtcttcagaactatctcaacgtgatcacaacaaatcatatcttgtctaattgtgagctggttaagaagtttttagatccaaacaactattccgcaaactatactgagattgccttgcaacaggtttccatgttcttccgatcagaaccaaagtgggaggtggtggaacctttgaaagacataggttggagaataaggaagaaatatttcttgatgaagattaaaaatcagccaaaggaacggctagtgttaagctgggctgaccttggcccagacaagtatttgtcagataaagattttcagtgtctaatcaaacttctgccttcttgtttgcacccttacatctatcgggttacctttgccacagctaatgaatcctcagcgttgctaattaggatgtttaacgaaaagggaacattgaaggatctgatctacaaggcaaaaccaaaagacccatttctaaagaagtactgcaaccctaagaagattcagggcctggaactccagcaaataaaaacatatggacggcaaatattagaggtactgaagtttcttcatgacaagggattcccttatgggcatcttcacgcctccaatgtgatgctcgatggggacacttgccggctgctggaccttgagaattccttattgggcctgccttccttctaccgatcttatttttcacaattcaggaaaatcaatacattggaaagtgtggatgtccactgctttggccacttactgtatgaaatgacttatggacgaccgccagactcggtgcctgtggactccttccctcctgccccgtccatggctgtggtggccgtgttggagtctacgctgtcttgtgaagcctgtaaaaatggcatgcctaccatctcccggctcttacagatgccattattcagcgatgttttactaaccacttctgaaaaaccacagtttaagatccctacaaagttaaaagaggcattgagaattgccaaagaatgtatagagaagagactaattgaggaacagaaacagattcaccagcatcgaagactgacaagagctcagtcccaccatggatctgaggaggaaagaaaaaaaagaaagattttagctcgaaagaagtcaaaacgatctgctcttgaaaatagtgaagagcattcagcgaagtacagcaactccaataattcagcaggatctggggccagctcacctctcacgtccccgtcatcgccaactccaccctctacatcagtagagcatgcaccattttgaacgtgaattttcgggatatctgcattacctccacctcctccacctccaccaccaccagcagctcccttgcctcctgcgagcaccgaggcacctgcccagctctcgtctcaggctgtgaatggcatgagccgaggggccttgctcagctccatccagaatttccaaaaaggaactttgaggaaagccaaaacctgtgatcacagtgctccgaagatcggctgaagcttcctgtttacacttggagggaaaagttcttttttattcctactcacccctaccccccaaactaccctcttcctgggaaagtaattgctgagccagtacagccacaaacagtactattttgcagatgctcatgtaagcagcttttcgagagaaataattctttaagcagaataaagttaggctggcattgctcccttaagatcttgctcctttattaaccctgtaaaggagtcttgtttatcctctaatggccaggcttttgggacagcagcatattgaaatattttcaccaactaaaggaaatagacagaaaaacaatgacaatattcaatcacagcagtaaatggcctttgtgttgcaatcccttctaccccatcagacagctcctagaaacattcctcttacagttcatttctctaaagcattttctgattcttagataactccaatttttgctacctttatcttagacattaacactatagcccaaagcatagttactttgctaaatcagaaagcaactgagttctttgttttctcctcaaatagaatggggaacgttcacaacattctcttaagttctaacaggaataccattgtggttatagaactcagggctgctaaagcaactactctagacccatagttctttttagttagatgtattgaaacagacaaaaatattaacatcagaaaaagctcttgccaattagaggatcttcttaatcctcagcaattaagtttggggtttgaggggggcaggtcattgttacaacagaagtaaatttggcatctatagaaatcaattatgatttttgaaagatttatctaaatatatcaatatagcatctctttaatgttagtcatttattagaaagatcctttatcctgatttgcttaaacctttcaataaattgcactttaaaggattataaataatccatttaaaaattcaagtacacacatcagtgttggttactatgcagagaatgtcattgtgtatagtttcatgtaatctgttatgtcagctgtattttttattaaaatcatgtcaagaaaacgtgttgtctgtagcttgacaag

SEQ ID NO: 3226 - protein, 515 aa, Homo sapiens; identical to SEQ ID NO: 3224

SEQ ID NO: 3227 - DNA, 2922 bp, Homo sapiens
gtgttgacagcggcggcggtggaaccgggcgggcggcgggagtcggcgcctcgggttcctacctcgcgtccctaggcggcggcggccgggcgtcccgggatggccttcatggagaagccgccagccggcaaggtgctgctggacgacacggtgccgctgacagcagccatcgaggcgagccagagcctgcagtcccacacggaatatattattcgagtgcaaagaggaatttctgtggaaaacagctggcagattgttagaagatacagtgactttgatttgcttaacaacagcttacagattgcaggcctaagtctacctcttcctcccaaaaaattgattggtaacatggatcgtgaattcatagctgaaaggcagaaaggtcttcagaactatctcaacgtgatcacaacaaatcatatcttgtctaattgtgagctggttaagaagtttttagatccaaacaactattccgcaaactatactgagattgccttgcaacaggtttccatgttcttccgatcagaaccaaagtgggaggtggtggaacctttgaaagacataggttggagaataaggaagaaatatttcttgatgaagattaaaaatcagccaaaggaacggctagtgttaagctgggctgaccttggcccagacaagtatttgtcagataaagattttcagtgtctaatcaaacttctgccttcttgtttgcacccttacatctatcgggttacctttgccacagctaatgaatcctcagcgttgctaattaggatgtttaacgaaaagggaacattgaaggatctgatctacaaggcaaaaccaaaagacccatttctaaagaagtactgcaaccctaagaagattcagggcctggaactccagcaaataaaaacatatggacggcaaatattagaggtactgaagtttcttcatgacaagggattcccttatgggcatcttcacgcctccaatgtgatgctcgatggggacacttgccggctgctggaccttgagaattccttattgggcctgccttccttctaccgatcttatttttcacaattcaggaaaatcaatacattggaaagtgtggatgtccactgctttggccacttactgtatgaaatgacttatggacgaccgccagactcggtgcctgtggactccttccctcctgccccgtccatggctgtggtggccgtgttggagtctacgctgtcttgtgaagcctgtaaaaatggcatgcctaccatctcccggctcttacagatgccattattcagcgatgttttactaaccacttctgaaaaaccacagtttaagatccctacaaagttaaaagaggcattgagaattgccaaagaatgtatagagaagagactaattgaggaacagaaacagattcaccagcatcgaagactgacaagagctcagtcccaccatggatctgaggaggaaagaaaaaaaagaaagattttagctcgaaagaagtcaaaacgatctgctcttgaaaatagtgaagagcattcagcgaagtacagcaactccaataattcagcaggatctggggccagctcacctctcacgtccccgtcatcgccaactccaccctctacatcagggatatctgcattacctccacctcctccacctccaccaccaccagcagctcccttgcctcctgcgagcaccgaggcacctgcccagctctcgtctcaggctgtgaatggcatgagccgaggggccttgctcagctccatccagaatttccaaaaaggaactttgaggaaagccaaaacctgtgatcacagtgctccgaagatcggctgaagcttcctgtttacacttggagggaaaagttcttttttattcctactcacccctaccccccaaactaccctcttcctgggaaagtaattgctgagccagtacagccacaaacagtactattttgcagatgctcatgtaagcagcttttcgagagaaataattctttaagcagaataaagttaggctggcattgctcccttaagatcttgctcctttattaaccctgtaaaggagtcttgtttatcctctaatggccaggcttttgggacagcagcatattgaaatattttcaccaactaaaggaaatagacagaaaaacaatgacaatattcaatcacagcagtaaatggcctttgtgttgcaatcccttctaccccatcagacagctcctagaaacattcctcttacagttcatttctctaaagcattttctgattcttagataactccaatttttgctacctttatcttagacattaacactatagcccaaagcatagttactttgctaaatcagaaagcaactgagttctttgttttctcctcaaatagaatggggaacgttcacaacattctcttaagttctaacaggaataccattgtggttatagaactcagggctgctaaagcaactactctagacccatagttctttttagttagatgtattgaaacagacaaaaatattaacatcagaaaaagctcttgccaattagaggatcttcttaatcctcagcaattaagtttggggtttgaggggggcaggtcattgttacaacagaagtaaatttggcatctatagaaatcaattatgatttttgaaagatttatctaaatatatcaatatagcatctctttaatgttagtcatttattagaaagatcctttatcctgatttgcttaaacctttcaataaattgcactttaaaggattataaataatccatttaaaaattcaagtacacacatcagtgttggttactatgcagagaatgtcattgtgtatagtttcatgtaatctgttatgtcagctgtattttttattaaaatcatgtcaagaaaacgtgttgtctgtagcttgacaag

SEQ ID NO: 3228 - protein, 578 aa, Homo sapiens; identical to SEQ ID NO: 357

SEQ ID NO: 3229 - DNA, 7074 bp, Homo sapiens
cggcggtggaaccgggcgggcggcgggagtcggcgcctcgggttcctacctcgcgtccctaggcggcggcggccgggcgtcccgggatggccttcatggagaagccgccagccggcaaggtgctgctggacgacacggtgccgctgacagcagccatcgaggcgagccagagcctgcagtcccacacgattgttagaagatacagtgactttgatttgcttaacaacagcttacagattgcaggcctaagtctacctcttcctcccaaaaaattgattggtaacatggatcgtgaattcatagctgaaaggcagaaaggtcttcagaactatctcaacgtgatcacaacaaatcatatcttgtctaattgtgagctggttaagaagtttttagatccaaacaactattccgcaaactatactgagattgccttgcaacaggtttccatgttcttccgatcagaaccaaagtgggaggtggtggaacctttgaaagacataggttggagaataaggaagaaatatttcttgatgaagattaaaaatcagccaaaggaacggctagtgttaagctgggctgaccttggcccagacaagtatttgtcagataaagattttcagtgtctaatcaaacttctgccttcttgtttgcacccttacatctatcgggttacctttgccacagctaatgaatcctcagcgttgctaattaggatgtttaacgaaaagggaacattgaaggatctgatctacaaggcaaaaccaaaagacccatttctaaagaagtactgcaaccctaagaagattcagggcctggaactccagcaaataaaaacatatggacggcaaatattagaggtactgaagtttcttcatgacaagggattcccttatgggcatcttcacgcctccaatgtgatgctcgatggggacacttgccggctgctggaccttgagaattccttattgggcctgccttccttctaccgatcttatttttcacaattcaggaaaatcaatacattggaaagtgtggatgtccactgctttggccacttactgtatgaaatgacttatggacgaccgccagactcggtgcctgtggactccttccctcctgccccgtccatggctgtggtggccgtgttggagtctacgctgtcttgtgaagcctgtaaaaatggcatgcctaccatctcccggctcttacagatgccattattcagcgatgttttactaaccacttctgaaaaaccacagtttaagatccctacaaagttaaaagaggcattgagaattgccaaagaatgtatagagaagagactaattgaggaacagaaacagattcaccagcatcgaagactgacaagagctcagtcccaccatggatctgaggaggaaagaaaaaaaagaaagattttagctcgaaagaagtcaaaacgatctgctcttgaaaatagtgaagagcattcagcgaagtacagcaactccaataattcagcaggatctggggccagctcacctctcacgtccccgtcatcgccaactccaccctctacatcagtagagcatgcaccattttgaacgtgaattttcggtaaagtaaactatgctgatttctcagactttaaagatgctctgtttctgtgtgtgaaataggacccaaagtgtctcgattgctgaagtgatgaacaagtgggaaagcagatttgagactatttccttatctgaatatttaaatgaaatacagcatctttaaaaagcacccagtgacttcatctatattcatttcattttcatcatgaccttcaaaatcttcattttcactctgatttcagttttaaaatacagctctaaaacctgcaaatcaactgcatggcattttggtatattttaattttggaaaccataactctcaaagtcccgttgctgcaaaaatgttgattcctagttactctgatgaagaggaaagagtgttaggcacttgagctcttagttacagggagacaacttactggcttttataactgacggtagggaaaaacagttcttttgtaagcatcctttataattctcgagctgtgacaggagtacagcctcctcacctgcctgaagccaaaggagaaggtggttctcccgagagctgggggcttgcctgcttcggttctctcctgagggtggctggtaagtctggtgttaccctagtgtggtctcatggccacttggcctcccttcctgtatgtgaccacaaaggagctcagaattagagagactgtagattacccactgctggctgctaacatgggcctaagagtcggtggggaagggagccaggcgcagtggctcacatctataatctcagcactttgggaggctgaggcgggcggatcacaaggatcaggagttcaagaccaacctggccaacatggtgaaaccccatctgtactaaaaatacaaaaattaggtgggcatggtaccacgcgcctgtaatcccagctactcgggaggctgaggcagagaatcacttgaacccgggaggcggagcttgcagtgagccgagatcgcgccactgcactccagcctgggcaacagagcgagactccatctcagaaaaaaaggaactggagggagggaccctcagacatcctgtccacaaggctgtcaagggggtttctggcctggcattcctccctagatctgacctacgctctccctgcagcattctctgccctctgacagggcctctgctggactgccaggttcccgtgtggtttggtggagaagattttggggtgggtagagtaagtagttggctctcagggattttgtctaagagaaagtgagatgggagaaatcgggactgacctggtcgtaactgaaggtaagctgtttgcagcatcccccttcctgggtgcaaattcaggtatcataagtctaacatggaatcggtctgctctcatatgtggcctggagataagggtattggaggtctcttggcaggaaggcctcattcacatctgaggggtggagagcgcgcaggcagcaggcagttgttcccaggtttgtcacaggccaaatggtaactttcatttggcccttgttgcccctgccccctcttcctccattgttagccatgtgttgtagctgaagccccaacggacctttcaggaagcttgtggaccatggaaagggccaaaaggaaaagccaaaaacaatcaatggggcagactgagtgagaccgagtcccaggtctgtgttcctgcctcctccagtttccaccttctgacccctagacctcctctcccctccagagtgttccaaactggcaagctgggtctggccttccttgccctggttgtacataagagccaccatggttgttgtaggcccagtgaggaaaagtggacttgctgggacatcaagccccaccggactgctccagcctgctgaggccacatcagggagatcctgctgcctgtcctttcgttccatctgctttactggagccctggagccctttggacagtgtatttattgacaccacctacattttcaaagagactcatttaaagtgacagtggaaaatccatgtccatttacttggacagtggaaaatccatgtactgaaccccaccctcaactcccaaactctgcggtggtgcatttgcacttctaattttgagggcctggtaatgacgccaaaaccaagggttggttctctgtgaggccaagcagttttgttctgtgccaagatggcagcccctacccctcagcccagccctgaggcccgtctccagccccccaaaatccttgcctggagggctagtcagtctctagatggccagtgctgagcctttagtagaactcccaagtaccgccgcagccgagagcctgtccttaactgcacagtgattcttctgccgggggtcaaagcacaaacctgggaggcagaaaccctggagctccttctgttacactacgtggccctgaatatcaagtccagattccactgcccttttctggctattgggtgggagggtgctggggaagggcactggcacctacttacccccaagtgggcagagctcactccttcgggcccacttggtgttgcagtcaagagactcagttccaaaaaccttcagcagaggtctcccctcctcctggtatttcactggttgctctccagaagtcctcttcagaggaatgctcatcacacatgcttattctccgttttcccacttcaacagttacttcaggtttaaagtcctttttatctctgtaacctggtgacataaagccaggaacattttcccacaatccaccttagcataaaacataacaatttcattcatcagttgttattgtgtagaaccaatgaacatgttggtcatttgtctgtatttagtctttatttgtattgctatctttgagcattccaagattgcagagcatgagcgtgtgtatttgtgtgattctttaatttcagctgccttaggtttgagtaaaagatgtaaagaaaggtaagtgattttctattgtaagactttaacccatacctgtcacacttggtgaaaaggatgtacttacctgagtattgtgttggtgattctgagccagtcgtccatacaaacttaagtagggtagctttacctgttacttatcacaactcagtagcagtgtaggggaaaccacctggcagaatgtctccctggagtagccctgggagggacagagacagcatctgacagagtctcagagagctgcaaggtcacaggagacgaggcaactaactgtggcacaggaacattctttaaggcaaggctttttctgaactcgggtgtttattctgtcctgagagaaccattcattgattctaaaatataaaattcgagttgcaaatgtccatgtgcctggaagctgagggaagttttagacacctgcccagtttccctctccttgcccactgcggtacagcacgacattctagtttctcctgatgcttcgtcaaagacatttagtgcagttatgtcctgttccttggttgggccacaatggagagaacagtacttgagaaggatttctctgtaagaataccatggcagagagacccctctgccccctgctttgcattgctaacagttattagcattttatatttctttaatgcaacctaataggaaattattattcgagacagactcctctgggaaatgcataacccaggaggcactgattccttgctgagaatcctgagtggtctgtcattttacataagatcacatccttcaaacattgtgtatgttggagcagcgaaagaactgttcaccccttatgaataactgacattcaggaagcccaactccatcatgcagatgtctatctttaattgctagctcagaagcagacagagcttcctgggacctggctaaagtaactgatagatggaactcttctttggggactattactttgcaaatggggtcagagcctcatctatgcagagaatgtcaccatatgtggtttcatgtaatctgtaattatttgttccaacagcctttaacatgactattgtttgagaaacatggcaacttttaattcccctttgatgcttctagctttctttagtattttaagaactcatacagtactaggtatgttggtccctctgagaaaaacatgtggactctcaccagtccgttgtgctcaggactgagcagcagcgtgtgtgcagggcagctgtggaggtgaatactgattgtcccccttttcctccacagggatatctgcattacctccacctcctccacctccaccaccaccagcagctcccttgcctcctgcgagcaccgaggcacctgcccagctctcgtctcaggctgtgaatggcatgagccgaggggccttgctcagctccatccagaatttccaaaaaggaactttgaggaaagccaaaacctgtgatcacagtgctccgaagatcggctgaagcttcctgtttacacttggagggaaaagttcttttttattcctactcacccctaccccccaaactaccctcttcctgggaaagtaattgctgagccagtacagccacaaacagtactattttgcagatgctcatgtaagcagcttttcgagagaaataattctttaagcagaataaagttaggctggcattgctcccttaagatcttgctcctttattaaccctgtaaaggagtcttgtttatcctctaatggccaggcttttgggacagcagcatattgaaatattttcaccaactaaaggaaatagacagaaaaacaatgacaatattcaatcacagcagtaaatggcctttgtgttgcaatcccttctaccccatcagacagctcctagaaacattcctcttacagttcatttctctaaagcattttctgattcttagataactccaatttttgctacctttatcttagacattaacactatagcccaaagcatagttactttgctaaatcagaaagcaactgagttctttgttttctcctcaaatagaatggggaacgttcacaacattctcttaagttctaacaggaataccattgtggttatagaactcagggctgctaaagcaactactctagacccatagttctttttagttagatgtattgaaacagacaaaaatattaacatcagaaaaagctcttgccaattagaggatcttcttaatcctcagcaattaagtttggggtttgaggggggcaggtcattgttacaacagaagtaaatttggcatctatagaaatcaattatgatttttgaaagatttatctaaatatatcaatatagcatctctttaatgttagtcatttattagaaagatcctttatcctgatttgcttaaacctttcaataaattgcactttaaaggattataaataatccatttaaaaattcaagtacacacatcagtgttggttactatgcagagaatgtcattgtgtatagtttcatgtaatctgttatgtcagctgtattttttattaaaatcatgtcaagaaaacgtgttgtctgtagcttgacaag

SEQ ID NO: 3230 - protein, 498 aa, Homo sapiens
MAFMEKPPAGKVLLDDTVPLTAAIEASQSLQSHTIVRRYSDFDLLNNSLQIAGLSLPLPPKKLIGNMDREFIAERQKGLQNYLNVITTNHILSNCELVKKFLDPNNYSANYTEIALQQVSMFFRSEPKWEVVEPLKDIGWRIRKKYFLMKIKNQPKERLVLSWADLGPDKYLSDKDFQCLIKLLPSCLHPYIYRVTFATANESSALLIRMFNEKGTLKDLIYKAKPKDPFLKKYCNPKKIQGLELQQIKTYGRQILEVLKFLHDKGFPYGHLHASNVMLDGDTCRLLDLENSLLGLPSFYRSYFSQFRKINTLESVDVHCFGHLLYEMTYGRPPDSVPVDSFPPAPSMAVVAVLESTLSCEACKNGMPTISRLLQMPLFSDVLLTTSEKPQFKIPTKLKEALRIAKECIEKRLIEEQKQIHQHRRLTRAQSHHGSEEERKKRKILARKKSKRSALENSEEHSAKYSNSNNSAGSGASSPLTSPSSPTPPSTSVEHAPF

SEQ ID NO: 3231 - DNA, 2886 bp, Homo sapiens
tggaaccgggcgggcggcgggagtcggcgcctcgggttcctacctcgcgtccctaggcggcggcggccgggcgtcccgggatggccttcatggagaagccgccagccggcaaggtgctgctggacgacacggtgccgctgacagcagccatcgaggcgagccagagcctgcagtcccacacgattgttagaagatacagtgactttgatttgcttaacaacagcttacagattgcaggcctaagtctacctcttcctcccaaaaaattgattggtaacatggatcgtgaattcatagctgaaaggcagaaaggtcttcagaactatctcaacgtgatcacaacaaatcatatcttgtctaattgtgagctggttaagaagtttttagatccaaacaactattccgcaaactatactgagattgccttgcaacaggtttccatgttcttccgatcagaaccaaagtgggaggtggtggaacctttgaaagacataggttggagaataaggaagaaatatttcttgatgaagattaaaaatcagccaaaggaacggctagtgttaagctgggctgaccttggcccagacaagtatttgtcagataaagattttcagtgtctaatcaaacttctgccttcttgtttgcacccttacatctatcgggttacctttgccacagctaatgaatcctcagcgttgctaattaggatgtttaacgaaaagggaacattgaaggatctgatctacaaggcaaaaccaaaagacccatttctaaagaagtactgcaaccctaagaagattcagggcctggaactccagcaaataaaaacatatggacggcaaatattagaggtactgaagtttcttcatgacaagggattcccttatgggcatcttcacgcctccaatgtgatgctcgatggggacacttgccggctgctggaccttgagaattccttattgggcctgccttccttctaccgatcttatttttcacaattcaggaaaatcaatacattggaaagtgtggatgtccactgctttggccacttactgtatgaaatgacttatggacgaccgccagactcggtgcctgtggactccttccctcctgccccgtccatggctgtggtggccgtgttggagtctacgctgtcttgtgaagcctgtaaaaatggcatgcctaccatctcccggctcttacagatgccattattcagcgatgttttactaaccacttctgaaaaaccacagtttaagatccctacaaagttaaaagaggcattgagaattgccaaagaatgtatagagaagagactaattgaggaacagaaacagattcaccagcatcgaagactgacaagagctcagtcccaccatggatctgaggaggaaagaaaaaaaagaaagattttagctcgaaagaagtcaaaacgatctgctcttgaaaatagtgaagagcattcagcgaagtacagcaactccaataattcagcaggatctggggccagctcacctctcacgtccccgtcatcgccaactccaccctctacatcagctgccttaggtttgagtaaaagatgtaaagaaagggatatctgcattacctccacctcctccacctccaccaccaccagcagctcccttgcctcctgcgagcaccgaggcacctgcccagctctcgtctcaggctgtgaatggcatgagccgaggggccttgctcagctccatccagaatttccaaaaaggaactttgaggaaagccaaaacctgtgatcacagtgctccgaagatcggctgaagcttcctgtttacacttggagggaaaagttcttttttattcctactcacccctaccccccaaactaccctcttcctgggaaagtaattgctgagccagtacagccacaaacagtactattttgcagatgctcatgtaagcagcttttcgagagaaataattctttaagcagaataaagttaggctggcattgctcccttaagatcttgctcctttattaaccctgtaaaggagtcttgtttatcctctaatggccaggcttttgggacagcagcatattgaaatattttcaccaactaaaggaaatagacagaaaaacaatgacaatattcaatcacagcagtaaatggcctttgtgttgcaatcccttctaccccatcagacagctcctagaaacattcctcttacagttcatttctctaaagcattttctgattcttagataactccaatttttgctacctttatcttagacattaacactatagcccaaagcatagttactttgctaaatcagaaagcaactgagttctttgttttctcctcaaatagaatggggaacgttcacaacattctcttaagttctaacaggaataccattgtggttatagaactcagggctgctaaagcaactactctagacccatagttctttttagttagatgtattgaaacagacaaaaatattaacatcagaaaaagctcttgccaattagaggatcttcttaatcctcagcaattaagtttggggtttgaggggggcaggtcattgttacaacagaagtaaatttggcatctatagaaatcaattatgatttttgaaagatttatctaaatatatcaatatagcatctctttaatgttagtcatttattagaaagatcctttatcctgatttgcttaaacctttcaataaattgcactttaaaggattataaataatccatttaaaaattcaagtacacacatcagtgttggttactatgcagagaatgtcattgtgtatagtttcatgtaatctgttatgtcagctgtattttttattaaaatcatgtcaagaaaacgtgttgtctgtagcttgacaag

SEQ ID NO: 3232 - protein, 564 aa, Homo sapiens
MAFMEKPPAGKVLLDDTVPLTAAIEASQSLQSHTIVRRYSDFDLLNNSLQIAGLSLPLPPKKLIGNMDREFIAERQKGLQNYLNVITTNHILSNCELVKKFLDPNNYSANYTEIALQQVSMFFRSEPKWEVVEPLKDIGWRIRKKYFLMKIKNQPKERLVLSWADLGPDKYLSDKDFQCLIKLLPSCLHPYIYRVTFATANESSALLIRMFNEKGTLKDLIYKAKPKDPFLKKYCNPKKIQGLELQQIKTYGRQILEVLKFLHDKGFPYGHLHASNVMLDGDTCRLLDLENSLLGLPSFYRSYFSQFRKINTLESVDVHCFGHLLYEMTYGRPPDSVPVDSFPPAPSMAVVAVLESTLSCEACKNGMPTISRLLQMPLFSDVLLTTSEKPQFKIPTKLKEALRIAKECIEKRLIEEQKQIHQHRRLTRAQSHHGSEEERKKRKILARKKSKRSALENSEEHSAKYSNSNNSAGSGASSPLTSPSSPTPPSTSAALGLSKRCKERDICITSTSSTSTTTSSSLASCEHRGTCPALVSGCEWHEPRGLAQLHPEFPKRNFEESQNL

SEQ ID NO: 3233 - DNA, 3007 bp, Homo sapiens
ggaaccgggcgggcggcgggagtcggcgcctcgggttcctacctcgcgtccctaggcggcggcggccgggcgtcccgggatggccttcatggagaagccgccagccggcaaggtgctgctggacgacacggtgccgctgacagcagccatcgaggcgagccagagcctgcagtcccacacgattgttagaagatacagtgactttgatttgcttaacaacagcttacagaacccctggaaggttccagcattggcagtaccaggtgctgcccccagagtggggtgaaggtcaaggagttgcaagtctgtttaagaagcagtcagatccccaaatctcccatgtccgtacaacttatgcctgccctcctccctctagcaaaaaaccattgcaggcctaagtctacctcttcctcccaaaaaattgattggtaacatggatcgtgaattcatagctgaaaggcagaaaggtcttcagaactatctcaacgtgatcacaacaaatcatatcttgtctaattgtgagctggttaagaagtttttagatccaaacaactattccgcaaactatactgagattgccttgcaacaggtttccatgttcttccgatcagaaccaaagtgggaggtggtggaacctttgaaagacataggttggagaataaggaagaaatatttcttgatgaagattaaaaatcagccaaaggaacggctagtgttaagctgggctgaccttggcccagacaagtatttgtcagataaagattttcagtgtctaatcaaacttctgccttcttgtttgcacccttacatctatcgggttacctttgccacagctaatgaatcctcagcgttgctaattaggatgtttaacgaaaagggaacattgaaggatctgatctacaaggcaaaaccaaaagacccatttctaaagaagtactgcaaccctaagaagattcagggcctggaactccagcaaataaaaacatatggacggcaaatattagaggtactgaagtttcttcatgacaagggattcccttatgggcatcttcacgcctccaatgtgatgctcgatggggacacttgccggctgctggaccttgagaattccttattgggcctgccttccttctaccgatcttatttttcacaattcaggaaaatcaatacattggaaagtgtggatgtccactgctttggccacttactgtatgaaatgacttatggacgaccgccagactcggtgcctgtggactccttccctcctgccccgtccatggctgtggtggccgtgttggagtctacgctgtcttgtgaagcctgtaaaaatggcatgcctaccatctcccggctcttacagatgccattattcagcgatgttttactaaccacttctgaaaaaccacagtttaagatccctacaaagttaaaagaggcattgagaattgccaaagaatgtatagagaagagactaattgaggaacagaaacagattcaccagcatcgaagactgacaagagctcagtcccaccatggatctgaggaggaaagaaaaaaaagaaagattttagctcgaaagaagtcaaaacgatctgctcttgaaaatagtgaagagcattcagcgaagtacagcaactccaataattcagcaggatctggggccagctcacctctcacgtccccgtcatcgccaactccaccctctacatcagggatatctgcattacctccacctcctccacctccaccaccaccagcagctcccttgcctcctgcgagcaccgaggcacctgcccagctctcgtctcaggctgtgaatggcatgagccgaggggccttgctcagctccatccagaatttccaaaaaggaactttgaggaaagccaaaacctgtgatcacagtgctccgaagatcggctgaagcttcctgtttacacttggagggaaaagttcttttttattcctactcacccctaccccccaaactaccctcttcctgggaaagtaattgctgagccagtacagccacaaacagtactattttgcagatgctcatgtaagcagcttttcgagagaaataattctttaagcagaataaagttaggctggcattgctcccttaagatcttgctcctttattaaccctgtaaaggagtcttgtttatcctctaatggccaggcttttgggacagcagcatattgaaatattttcaccaactaaaggaaatagacagaaaaacaatgacaatattcaatcacagcagtaaatggcctttgtgttgcaatcccttctaccccatcagacagctcctagaaacattcctcttacagttcatttctctaaagcattttctgattcttagataactccaatttttgctacctttatcttagacattaacactatagcccaaagcatagttactttgctaaatcagaaagcaactgagttctttgttttctcctcaaatagaatggggaacgttcacaacattctcttaagttctaacaggaataccattgtggttatagaactcagggctgctaaagcaactactctagacccatagttctttttagttagatgtattgaaacagacaaaaatattaacatcagaaaaagctcttgccaattagaggatcttcttaatcctcagcaattaagtttggggtttgaggggggcaggtcattgttacaacagaagtaaatttggcatctatagaaatcaattatgatttttgaaagatttatctaaatatatcaatatagcatctctttaatgttagtcatttattagaaagatcctttatcctgatttgcttaaacctttcaataaattgcactttaaaggattataaataatccatttaaaaattcaagtacacacatcagtgttggttactatgcagagaatgtcattgtgtatagtttcatgtaatctgttatgtcagctgtattttttattaaaatcatgtcaagaaaacgtgttgtctgtagcttgacaag

SEQ ID NO: 3234 - protein, 495 aa, Homo sapiens
MDREFIAERQKGLQNYLNVITTNHILSNCELVKKFLDPNNYSANYTEIALQQVSMFFRSEPKWEVVEPLKDIGWRIRKKYFLMKIKNQPKERLVLSWADLGPDKYLSDKDFQCLIKLLPSCLHPYIYRVTFATANESSALLIRMFNEKGTLKDLIYKAKPKDPFLKKYCNPKKIQGLELQQIKTYGRQILEVLKFLHDKGFPYGHLHASNVMLDGDTCRLLDLENSLLGLPSFYRSYFSQFRKINTLESVDVHCFGHLLYEMTYGRPPDSVPVDSFPPAPSMAVVAVLESTLSCEACKNGMPTISRLLQMPLFSDVLLTTSEKPQFKIPTKLKEALRIAKECIEKRLIEEQKQIHQHRRLTRAQSHHGSEEERKKRKILARKKSKRSALENSEEHSAKYSNSNNSAGSGASSPLTSPSSPTPPSTSGISALPPPPPPPPPPAAPLPPASTEAPAQLSSQAVNGMSRGALLSSIQNFQKGTLRKAKTCDHSAPKIG

SEQ ID NO: 3235 - DNA, 2576 bp, Homo sapiens
ggaaccgggcgggcggcgggagtcggcgcctcgggttcctacctcgcgtccctaggcggcggcggccgggcgtcccgggatggccttcatggagaagccgccagccggcaaggtgctgctggacgacacggtgccgctgacagcagccatcgaggcgagccagagcctgcagtcccacacgattgcaggcctaagtctacctcttcctcccaaaaaattgattggtaacatggatcgtgaattcatagctgaaaggcagaaaggtcttcagaactatctcaacgtgatcacaacaaatcatatcttgtctaattgtgagctggttaagaagtttttagatccaaacaactattccgcaaactatactgcacccttacatctatcgggttacctttgccacagctaatgaatcctcagcgttgctaattaggatgtttaacgaaaagggaacattgaaggatctgatctacaaggcaaaaccaaaagacccatttctaaagaagtactgcaaccctaagaagattcagggcctggaactccagcaaataaaaacatatggacggcaaatattagaggtactgaagtttcttcatgacaagggattcccttatgggcatcttcacgcctccaatgtgatgctcgatggggacacttgccggctgctggaccttgagaattccttattgggcctgccttccttctaccgatcttatttttcacaattcaggaaaatcaatacattggaaagtgtggatgtccactgctttggccacttactgtatgaaatgacttatggacgaccgccagactcggtgcctgtggactccttccctcctgccccgtccatggctgtggtggccgtgttggagtctacgctgtcttgtgaagcctgtaaaaatggcatgcctaccatctcccggctcttacagatgccattattcagcgatgttttactaaccacttctgaaaaaccacagtttaagatccctacaaagttaaaagaggcattgagaattgccaaagaatgtatagagaagagactaattgaggaacagaaacagattcaccagcatcgaagactgacaagagctcagtcccaccatggatctgaggaggaaagaaaaaaaagaaagattttagctcgaaagaagtcaaaacgatctgctcttgaaaatagtgaagagcattcagcgaagtacagcaactccaataattcagcaggatctggggccagctcacctctcacgtccccgtcatcgccaactccaccctctacatcagggatatctgcattacctccacctcctccacctccaccaccaccagcagctcccttgcctcctgcgagcaccgaggcacctgcccagctctcgtctcaggctgtgaatggcatgagccgaggggccttgctcagctccatccagaatttccaaaaaggaactttgaggaaagccaaaacctgtgatcacagtgctccgaagatcggctgaagcttcctgtttacacttggagggaaaagttcttttttattcctactcacccctaccccccaaactaccctcttcctgggaaagtaattgctgagccagtacagccacaaacagtactattttgcagatgctcatgtaagcagcttttcgagagaaataattctttaagcagaataaagttaggctggcattgctcccttaagatcttgctcctttattaaccctgtaaaggagtcttgtttatcctctaatggccaggcttttgggacagcagcatattgaaatattttcaccaactaaaggaaatagacagaaaaacaatgacaatattcaatcacagcagtaaatggcctttgtgttgcaatcccttctaccccatcagacagctcctagaaacattcctcttacagttcatttctctaaagcattttctgattcttagataactccaatttttgctacctttatcttagacattaacactatagcccaaagcatagttactttgctaaatcagaaagcaactgagttctttgttttctcctcaaatagaatggggaacgttcacaacattctcttaagttctaacaggaataccattgtggttatagaactcagggctgctaaagcaactactctagacccatagttctttttagttagatgtattgaaacagacaaaaatattaacatcagaaaaagctcttgccaattagaggatcttcttaatcctcagcaattaagtttggggtttgaggggggcaggtcattgttacaacagaagtaaatttggcatctatagaaatcaattatgatttttgaaagatttatctaaatatatcaatatagcatctctttaatgttagtcatttattagaaagatcctttatcctgatttgcttaaacctttcaataaattgcactttaaaggattataaataatccatttaaaaattcaagtacacacatcagtgttggttactatgcagagaatgtcattgtgtatagtttcatgtaatctgttatgtcagctgtattttttattaaaatcatgtcaagaaaacgtgttgtctgtagcttgacaag

SEQ ID NO: 3236 - protein, 352 aa, Homo sapiens
MFNEKGTLKDLIYKAKPKDPFLKKYCNPKKIQGLELQQIKTYGRQILEVLKFLHDKGFPYGHLHASNVMLDGDTCRLLDLENSLLGLPSFYRSYFSQFRKINTLESVDVHCFGHLLYEMTYGRPPDSVPVDSFPPAPSMAVVAVLESTLSCEACKNGMPTISRLLQMPLFSDVLLTTSEKPQFKIPTKLKEALRIAKECIEKRLIEEQKQIHQHRRLTRAQSHHGSEEERKKRKILARKKSKRSALENSEEHSAKYSNSNNSAGSGASSPLTSPSSPTPPSTSGISALPPPPPPPPPPAAPLPPASTEAPAQLSSQAVNGMSRGALLSSIQNFQKGTLRKAKTCDHSAPKIG

SEQ ID NO: 3237 - DNA, 2803 bp, Homo sapiens
ggaaccgggcgggcggcgggagtcggcgcctcgggttcctacctcgcgtccctaggcggcggcggccgggcgtcccgggatggccttcatggagaagccgccagccggcaaggtgctgctggacgacacggtgccgctgacagcagccatcgaggcgagccagagcctgcagtcccacacgattgcaggcctaagtctacctcttcctcccaaaaaattgattggtaacatggatcgtgaattcatagctgaaaggcagaaaggtcttcagaactatctcaacgtgatcacaacaaatcatatcttgtctaattgtgagctggttaagaagtttttagatccaaacaactattccgcaaactatactgagattgccttgcaacaggtttccatgttcttccgatcagaaccaaagtgggaggtggtggaacctttgaaagacataggttggagaataaggaagaaatatttcttgatgaagattaaaaatcagccaaaggaacggctagtgttaagctgggctgaccttggcccagacaagtatttgtcagataaagattttcagtgtctaatcaaacttctgccttcttgtttgcacccttacatctatcgggttacctttgccacagctaatgaatcctcagcgttgctaattaggatgtttaacgaaaagggaacattgaaggatctgatctacaaggcaaaaccaaaagacccatttctaaagaagtactgcaaccctaagaagattcagggcctggaactccagcaaataaaaacatatggacggcaaatattagaggtactgaagtttcttcatgacaagggattcccttatgggcatcttcacgcctccaatgtgatgctcgatggggacacttgccggctgctggaccttgagaattccttattgggcctgccttccttctaccgatcttatttttcacaattcaggaaaatcaatacattggaaagtgtggatgtccactgctttggccacttactgtatgaaatgacttatggacgaccgccagactcggtgcctgtggactccttccctcctgccccgtccatggctgtggtggccgtgttggagtctacgctgtcttgtgaagcctgtaaaaatggcatgcctaccatctcccggctcttacagatgccattattcagcgatgttttactaaccacttctgaaaaaccacagtttaagatccctacaaagttaaaagaggcattgagaattgccaaagaatgtatagagaagagactaattgaggaacagaaacagattcaccagcatcgaagactgacaagagctcagtcccaccatggatctgaggaggaaagaaaaaaaagaaagattttagctcgaaagaagtcaaaacgatctgctcttgaaaatagtgaagagcattcagcgaagtacagcaactccaataattcagcaggatctggggccagctcacctctcacgtccccgtcatcgccaactccaccctctacatcagggatatctgcattacctccacctcctccacctccaccaccaccagcagctcccttgcctcctgcgagcaccgaggcacctgcccagctctcgtctcaggctgtgaatggcatgagccgaggggccttgctcagctccatccagaatttccaaaaaggaactttgaggaaagccaaaacctgtgatcacagtgctccgaagatcggctgaagcttcctgtttacacttggagggaaaagttcttttttattcctactcacccctaccccccaaactaccctcttcctgggaaagtaattgctgagccagtacagccacaaacagtactattttgcagatgctcatgtaagcagcttttcgagagaaataattctttaagcagaataaagttaggctggcattgctcccttaagatcttgctcctttattaaccctgtaaaggagtcttgtttatcctctaatggccaggcttttgggacagcagcatattgaaatattttcaccaactaaaggaaatagacagaaaaacaatgacaatattcaatcacagcagtaaatggcctttgtgttgcaatcccttctaccccatcagacagctcctagaaacattcctcttacagttcatttctctaaagcattttctgattcttagataactccaatttttgctacctttatcttagacattaacactatagcccaaagcatagttactttgctaaatcagaaagcaactgagttctttgttttctcctcaaatagaatggggaacgttcacaacattctcttaagttctaacaggaataccattgtggttatagaactcagggctgctaaagcaactactctagacccatagttctttttagttagatgtattgaaacagacaaaaatattaacatcagaaaaagctcttgccaattagaggatcttcttaatcctcagcaattaagtttggggtttgaggggggcaggtcattgttacaacagaagtaaatttggcatctatagaaatcaattatgatttttgaaagatttatctaaatatatcaatatagcatctctttaatgttagtcatttattagaaagatcctttatcctgatttgcttaaacctttcaataaattgcactttaaaggattataaataatccatttaaaaattcaagtacacacatcagtgttggttactatgcagagaatgtcattgtgtatagtttcatgtaatctgttatgtcagctgtattttttattaaaatcatgtcaagaaaacgtgttgtctgtagcttgacaag

SEQ ID NO: 3238 - protein, 545 aa, Homo sapiens
MAFMEKPPAGKVLLDDTVPLTAAIEASQSLQSHTIAGLSLPLPPKKLIGNMDREFIAERQKGLQNYLNVITTNHILSNCELVKKFLDPNNYSANYTEIALQQVSMFFRSEPKWEVVEPLKDIGWRIRKKYFLMKIKNQPKERLVLSWADLGPDKYLSDKDFQCLIKLLPSCLHPYIYRVTFATANESSALLIRMFNEKGTLKDLIYKAKPKDPFLKKYCNPKKIQGLELQQIKTYGRQILEVLKFLHDKGFPYGHLHASNVMLDGDTCRLLDLENSLLGLPSFYRSYFSQFRKINTLESVDVHCFGHLLYEMTYGRPPDSVPVDSFPPAPSMAVVAVLESTLSCEACKNGMPTISRLLQMPLFSDVLLTTSEKPQFKIPTKLKEALRIAKECIEKRLIEEQKQIHQHRRLTRAQSHHGSEEERKKRKILARKKSKRSALENSEEHSAKYSNSNNSAGSGASSPLTSPSSPTPPSTSGISALPPPPPPPPPPAAPLPPASTEAPAQLSSQAVNGMSRGALLSSIQNFQKGTLRKAKTCDHSAPKIG

SEQ ID NO: 3239 - DNA, 473 bp, Homo sapiens
actttgatgtaagatggaattactgggtttccattttagcaaattatgtaatttgcgtgggtgtcatttaagggtcattatactatagaatgctgcaggaagtggctatttaaaaagctgtatccattctgtagtcatgtttgaggtcaaaaggattttggagtgcttctttgcagtgtttttcttctctggaacatcagctgtctttgaagtcggtgtggagaccagctctcctggtagggcaggagaccatcccacagcggagagtgtagacttcaaaaggcccggagaagggagaagagaagcatgcatgatcatgacgctcatctcactgcagggatcaaagcgtgtttgcaatgtgtgcttcatctcttcttttgcctgtgagccagtgggagccatggaaggtcctggagcagagaagtagcgtggtggtagattccagccaggtcacttgttttcagcattctttt

SEQ ID NO: 3240 - protein, 96 aa, Homo sapiens
MFEVKRILECFFAVFFFSGTSAVFEVGVETSSPGRAGDHPTAESVDFKRPGEGRREACMIMTLISLQGSKRVCNVCFISSFACEPVGAMEGPGAEK

SEQ ID NO: 3241 - DNA, 683 bp, Homo sapiens
caaatcctgcagtccatccatttgtgctgtctcatagatccatacatctttgggaaaaagagcagaaatcaagtccatctcatttacatatatggaaatggatggtatgaattaaaacgaatcagaacatgatgattcatcagaaagtcgataaattaaaagtacttcatttccccggagggctctggctttataattgacagcatcggaacaatttccacagcagcagtttttgattttgaaagtgaatctagaagatggagtctcactctgtcgcccaggctggagtgcagtggtgcgtatttggctcaatccaacttctacttcctggattcaagtgattcacctgcctcagcctcctgagtagctgggagattacagtttttcagtggttattaaagtgttgactctggaggactgtttacagctggaaatctaaagatttttctcatcaatgtacacaataaggaccccattcttatctacagcaactgtgaccttcattgtgaaggttgctcctgccagtgacttcagccctgtatttaaagctgcacactattcattctctgttccggaaacgttgggagatcactgttgacattgaaaatgagaatgatgaagcacctgtctgcacaccctctctatataagacagtcatttttgacaatgttgttcttgggaca

SEQ ID NO: 3242 - protein, 47 aa, Homo sapiens
MYTIRTPFLSTATVTFIVKVAPASDFSPVFKAAHYSFSVPETLGDHC

SEQ ID NO: 3243 - DNA, 479 bp, Homo sapiens
attgggagagttgaccacccaagatcatactttatggatatgaacattcatctttcaattaggattcattcagtttcatcatttcgagcactcttatgcctcaaacccctacacatctctgttaaaataaaatcccattagtcatctaactgtcctaatatcccctcatagtcattaaattgttttgaagtgttcttaacaccttctcctttgcatgtgtctgttttcaaaattgaaacatcagtgtttggaagtttttcagtggttattaaagtgttgactctggaggactgtttacagctggaaatctaaagatttttctcatcaatgtacacaataaggaccccattcttatctacaggatatacattaaaagcagaattgagaatgtcacatgctgggttgagaatgacacgccaacaaactctctaatggaggagactgtacccatgaaaaatgcaataaactatcttgtgtga

SEQ ID NO: 3244 - protein, 34 aa, Homo sapiens
MYTIRTPFLSTGYTLKAELRMSHAGLRMTRQQTL

SEQ ID NO: 3245 - DNA, 633 bp, Homo sapiens
ccactgcactccagcctgggcgacagagtgagactctgtctcaaaacaaacaaacacacaaacaaaacccatgcatacctatggataagtaaaagcattggtttggagagtcctagataatctacgctgcactgtctgtgttgtacatatggctatttacattttagtttcaatgaaaattaagattaaaaattcagttcctcagttgcactgaccagatttcaaagtctcaaagccaaatgtggctaacggctactatattggacaatgcatacttacatcttcacagaaagttccactggacagtgctggtctaatgagttccactccacatagtatgcacagataggccagaatgctaatatactaacatttgaagagtgagaaagtcagttataaaaatccaaactccatccactgttgcccagatgtatgcagtggtgcgtatttggctcaatccaacttctacttcctggattcaagtgattcacctgcctcagcctcctgagtagctgggagattacagtttttcagtggttattaaagtgttgactctggaggactgtttacagctggaaatctaaagatttttctcatcaatgtacacaataaggaccccattcttatctacag

SEQ ID NO: 3246 - protein, 45 aa, Homo sapiens
HLKSEKVSYKNPNSIHCCPDVCSGAYLAQSNFYFLDSSDSPASAS

SEQ ID NO: 3247 - DNA, 1118 bp, Homo sapiens
gagacagaagcagcagatttaaagggcttattgtggaggactcatggtaggacagaacttggtttttgcaaaatctctagacattgagttatgtgtaagtcttcagaggcaaattcatttagcgttttaccttttgcagtcctgaaggaagagatgtcacagataaccgcttggtggttctcctggcccgaaggagtgtgtttccctgggttatctcctctgtctctgcctctacaacatcaagttgtatagtcgcttcaagaaagggggaaaaaggaatctgtaaggatcacaatgaggaacacattcttcctgttaaaaatacagtattcttagaagacagcatcacttgctgcttcagtggctttttttttctttagagttaagaataaaaaattgatttgctcttcccaatcttacactttctcctgcacgcatttgccttttgttatggtcatgacctcagtggacaccaacccagtctttgacaaggtagccacctctctctctcttcgagatttaagtttttcccctgaaccattgtggaattagaaaagtaaccctctaacatgcaaggccctcccttgggtattcattgtggattaaagcaaattttctatctattttcgagaaatgtggctcaaggctcagtcatttacataccattgatttgtctttcctatatccaggagccaggtgaactttggattccttaacattttaaaacatatcaattcagtgcttaactccataaatgtatttataaaggaaactttaaaacactaccataaatttaagactagtatggtaaacaggcattaaaattactatgctaaaaacaaaactatgttattttttgcagaaggcactaaacctgaggttactctctttttctttttttttttctgagatggagtctcgctctgtcgcacaggctggagtgcagtggcatgatctaggctcactgcaagctccacctcccgggttcaggccattctcctgcctcagcctcccgagcagctgggactacagtacttcatttccccggagggctctggctttataattgacagcatcggaacaatttccacagcagcagtttttgattttgaaagtga

SEQ ID NO: 3248 - protein, 78 aa, Homo sapiens
MLKTKLCYFLQKALNLRLLSFSFFFSEMESRSVAQAGVQWHDLGSLQAPPPGFRPFSCLSLPSSWDYSTSFPRRALAL

SEQ ID NO: 3249 - DNA, 1736 bp, Homo sapiens
gacatcagaaccccaggctctccagcctttggacttcaggactgacacaagcaacctgctgggttcttaggcctttggccttgtactgagacttacaccatcagcttccctggtcctgagacttttggacttggattgagccacgctactggcatcccaggatctccagcttgcagacagcctgtcgtgggacttcacagcctccataattatagaatggcaatggtctctgcgatgtcctgggtcctgtatttgtggataagtgcttgtgcaatgctactctgccatggatcccttcagcacactttccagcagcatcacctgcacagaccagaaggagggacgtgtgaagtgatagcagcacaccgatgttgtaacaagaatcgcattgaggagcggtcacaaacagtaaagtgttcctgtctacctggaaaagtggctggaacaacaagaaaccggccttcttgcgtcgatgcctccatagtgattgggaaatggtggtgtgagatggagccttgcctagaaggagaagaatgtaagacactccctgacaattctggatggatgtgcgcaacaggcaacaaaattaagaccacgagaattcacccaagaacctaacagaagcatttgtggtagtaaaggaaaaccaaccctctggaaaatacattttgagaatctcaaacatctcacatatatacaagccaaatggatttcttacttgcactttgactggctaccagataatcacagtgcgtttactgtgtgtaacgaaatatcctacagtgagaagacacagcgttttggcaacaccatggaaagtgggcttaaaaaagggttttctcagtgaaatttttgggcatcatgaagaacgatcaactatcttctaatttgaatctatagttactttgtaccatttgaaatatatgtatatatatatatataatattttgaaatattatctattctcttcaagaaatgaacagtaccacagtttgagacggctggtgtacccctttgagttttggatgttttgtctgttttgctttgttttgttagtcatttctttttctaacggcaaggaagatatgtgcccttttgagaattcaagatggcactgacacgggaaggccagctacaggtggactcctggaatttgaggcatcataatgatactgaatcaagaacttccttctgcttctaccagatggcccaaggaagcacatcgtcctgttttattgctttctaccctgtgcaatattagcatgcaagcttggcttacatagtcatactttatattcaattgatatataataaccgttctaacctcttccaggaaaatatttttagaactactagcttttccacttagaagaaaatgaggattcttaagggagccactccaccatgctattaagactctggcagagttatgggtaggatatggatccctacatgaataagtcctgtaaatacaatgtcttaaggctttgtatagctgtcctagactgcagaaatgtcctctgattaaatccaaagtctggcatcgttaactacatagtgctgtagcaacaagtcttatcatggcatctctttctatgtttggtttgctttttccaagagtattcaggtctcctcttgtgagataggaaggccatgaaaacaattagatttcaagatgatctatgtgaccaaatgttggacagccctattaaagtggtaaacaacttctttctaaa

SEQ ID NO: 3250 - protein, 133 aa, Homo sapiens [sequence omitted]

SEQ ID NO: 3251 - DNA, 2010 bp, Homo sapiens
gatactttagagcggagggatgtattgaaacagactactgctacttacagcaccgtatagcagccctgctcctacattttgctgccttactctgccccgaatgcactggagtggggatggtccatcggcaactataaactgattctcatcaggaaactgcacattatctccccatcacttcaaaggtctcgtcaggcagaggtgacgccaggagatgatttaaaggtgaaaatgacaaggtttccacccctcaaaccttggctccttttctgacaatacagtctgaatgaacccgatgtctttttttttactgtggaaataggatcggaagagagtaacatttttttttttttaatcctgataaagaagattgttgggaagctctttgaaaaaaaattttaaattgtggcacagatggattttaaaaagtgttagatctttccaatgaacactaatagagtactctgctcttggctggatttttcagagaatggcaatggtctctgcgatgtcctgggtcctgtatttgtggataagtgcttgtgcaatgctactctgccatggatcccttcagcacactttccagcagcatcacctgcacagaccagaaggagggacgtgtgaagtgatagcagcacaccgatgttgtaacaagaatcgcattgaggagcggtcacaaacagtaaagtgttcctgtctacctggaaaagtggctggaacaacaagaaaccggccttcttgcgtcgatgcctccatagtgattgggaaatggtggtgtgagatggagccttgcctagaaggagaagaatgtaagacactccctgacaattctggatggatgtgcgcaacaggcaacaaaattaagaccacgagaattcacccaagaacctaacagaagcatttgtggtagtaaaggaaaaccaaccctctggaaaatacattttgagaatctcaaacatctcacatatatacaagccaaatggatttcttacttgcactttgactggctaccagataatcacagtgcgtttactgtgtgtaacgaaatatcctacagtgagaagacacagcgttttggcaacaccatggaaagtgggcttaaaaaagggttttctcagtgaaatttttgggcatcatgaagaacgatcaactatcttctaatttgaatctatagttactttgtaccatttgaaatatatgtatatatatatatataatattttgaaatattatctattctcttcaagaaatgaacagtaccacagtttgagacggctggtgtacccctttgagttttggatgttttgtctgttttgctttgttttgttagtcatttctttttctaacggcaaggaagatatgtgcccttttgagaattcaagatggcactgacacgggaaggccagctacaggtggactcctggaatttgaggcatcataatgatactgaatcaagaacttccttctgcttctaccagatggcccaaggaagcacatcgtcctgttttattgctttctaccctgtgcaatattagcatgcaagcttggcttacatagtcatactttatattcaattgatatataataaccgttctaacctcttccaggaaaatatttttagaactactagcttttccacttagaagaaaatgaggattcttaagggagccactccaccatgctattaagactctggcagagttatgggtaggatatggatccctacatgaataagtcctgtaaatacaatgtcttaaggctttgtatagctgtcctagactgcagaaatgtcctctgattaaatccaaagtctggcatcgttaactacatagtgctgtagcaacaagtcttatcatggcatctctttctatgtttggtttgctttttccaagagtattcaggtctcctcttgtgagataggaaggccatgaaaacaattagatttcaagatgatctatgtgaccaaatgttggacagccctattaaagtggtaaacaacttctttctaaa

SEQ ID NO: 3252 - protein, 133 aa, Homo sapiens [sequence omitted]

SEQ ID NO: 3253 - DNA, 4244 bp, Homo sapiens
gagagccagcgagcgcgcgggcggcgtagccggcctgtctgggccgcctcgtggggagggagggggcgcccggccgcccggcggcgaccccggggcctggccgccaccatgggcttcgagctggaccgcttcgacggcgacgtggacccggacctgaagtgcgcgctgtgccacaaggtcctggaggacccgctgaccacgccgtgcggccacgtcttctgcgccggctgcgtgctgccctgggtggtgcaggagggcagctgcccggcgcgctgccgcggtcgcctgtcggccaaagagctcaaccacgtcctgccgctcaagcgccttatcctcaagctggacatcaagtgcgcgtacgcgacgcgcggctgcggccgggtggtcaagctgcagcagctgccggagcacctcgagcgctgcgacttcgcgcccgcgcgctgtcgccacgcgggttgcggccaggtgctgctgcggcgcgacgtggaggcgcacatgcgcgacgcctgcgacgcgcggccagtgggccgctgccaggagggctgcgggctacccttgacgcacggcgagcagcgcgcgggcggccactgctgcgcgcgagcgctgcgggcgcacaacggcgcgctccaggcccgcctgggcgcgctgcacaaggcgctcaagaaggaggcgctgcgcgctgggaagcgcgagaagtcgctggtggcccagctggccgcggcgcagcttgagctgcagatgaccgcgctgcgctaccagaagaaattcaccgaatacagcgcgcgcctcgactcgctcagccgctgcgtggccgcgccgcccggcggcaagggcgaagaaaccaaaagtctgactcttgtcctgcatcgggactccggctccctgggattcaatattattggtggccggccgagtgtggataaccacgatggatcatccagtgaaggaatctttgtatccaagatagttgacagtgggcctgcagccaaggaaggaggcctgcaaattcatgacaggattattgaggtcaacggcagagacttatccagagcaactcatgaccaggctgtggaagctttcaagacagccaaggagcccatagtggtgcaggtgttgagaagaacaccaaggaccaaaatgttcacgcctccatcagagtctcagctggtggacacgggaacccaaaccgacatcacctttgaacatatcatggccctcactaagatgtcctctcccagcccacccgtgctggatccctatctcttgccagaggagcatccctcagcccatgaatactacgatccaaatgactacattggagacatccatcaggagatggacagggaggagctggagctggaggaagtggacctctacagaatgaacagccaggacaagctgggcctcactgtgtgctaccggacggacgatgaagacgacattgggatttatatcagtgagattgaccctaacagcattgcagccaaggatgggcgcatccgagaaggagaccgcattatccagattaatgggatagaggtgcagaaccgtgaagaggctgtggctcttctaaccagtgaagaaaataaaaacttttcattgctgattgcaaggcctgaactccagctggatgagggctggatggatgatgacaggaacgactttctggatgacctgcacatggacatgctggaggagcagcaccaccaggccatgcaattcacagctagcgtgctgcagcagaagaagcacgacgaagacggtgggaccacagatacagccaccatcttgtccaaccagcacgagaaggacagcggtgtggggcggaccgacgagagcacccgtaatgacgagagctcggagcaagagaacaatggcgacgacgccaccgcatcctccaacccgctggcggggcagaggaagctcacctgcagccaggacaccttgggcagcggcgacctgcccttcagcaacgagtctttcatttcggccgactgcacggacgccgactacctggggatcccggtggacgagtgcgagcgcttccgcgagctcctggagctcaagtgccaggtgaagagcgccaccccttacggcctgtactaccctagcggccccctggacgccggcaagagtgaccctgagagcgtggacaaggagctggagctgctgaacgaagagctgcgcagcatcgagctggagtgcctgagcatcgtgcgcgcccacaagatgcagcagctcaaggagcagtaccgcgagtcctggatgctgcacaacagcggcttccgcaactacaacaccagcatcgacgtgcgcagacacgagctctcagatatcaccgagctcccggagaaatccgacaaggacagctcgagcgcctacaacacaggcgagagctgccgcagcaccccgctcaccctggagatctcccccgacaactccttgaggagagcggcggagggcatcagctgcccgagcagcgaaggggctgtggggaccacggaagcctacgggccagcctccaagaatctgctctccatcacggaagatcccgaagtgggcacccctacctatagcccgtccctgaaggagctggaccccaaccagcccctggaaagcaaagagcggagagccagcgacgggagccggagccccacgcccagccagaagctgggcagcgcctacctgccctcctatcaccactccccatacaagcacgcgcacatcccggcgcacgcccagcactaccagagctacatgcagctgatccagcagaagtcggccgtggagtacgcgcaaagccagatgagcctggtgagcatgtgcaaggacctgagctctcccaccccgtcggagccgcgcatggagtggaaggtgaagatccgcagcgacgggacgcgctacatcaccaagaggcccgtgcgggaccgcctgctgcgggagcgcgccctgaagatccgggaagagcgcagcggcatgaccaccgacgacgacgcggtgagcgagatgaagatggggcgctactggagcaaggaggagaggaagcagcacctggtgaaggccaaggagcagcggcggcggcgcgagttcatgatgcagagcaggttggattgtctcaaggagcagcaagcagccgatgacaggaaggagatgaacattctcgaactgagccacaaaaagatgatgaagaagaggaataagaaaatcttcgataactggatgacgatccaagaactcttaacccacggcacaaaatccccggacggcactagagtatacaattccttcctatcggtgactactgtataattttcacttctgcattatgtacataaaggagaccactaccactggggtagaaattcctgcctcgttcaatgcggcaagtttttgtatataagataagtacggtcttcatgtttatagtccaaatttgcaaaccctacaactctgggtgtcataggtctattttaagggaagagagagaaaaacacccttactatcttggaaggcaatattaacaaacagagcttttttcaaatagcaattgtacttttctacctgtacccttttacataaagtgtttaaatttcagaaagatcttttattaagcatactttcacagaataacttgtttaaactatattcatataaaaaagttaaacacgctttttttcctgcctaaaacacaaatacaactgccagtatgtatttttaatggaaccctattttataatggtacgttactgaatgtgtttcatatgcgtgaccgttaagatattatcatttaggtgaaggtttcaactcaaaaccacccaacccggtggttaacgatttaatacatataaccaaaccggcagcgtttagagttgggatatacatttaaacattttcctggttaaggttcccaagagagtgtaaaggttttagcagaaagcaaaatatcttgcatctttatggaagtttaaagcatgtttgcaaatattgcagcccattgaaagaatttgcatgtacaggaaagttgtggatggagacggtttgtggaattttaagtgctcattgtagtaaacttttgctttgtagatttgaaggtacagacttatacaggcaagttcacaaaatcatgattagttacaaacagtaaaatgaagttaaaataaattattattttctatttgatatgttttgatgtgattcctcattttgcagtggtgcctataaaataaaagccttttgcagtgttt

SEQ ID NO: 3254 - protein, 1066 aa, Homo sapiens; identical to SEQ ID NO: 363

SEQ ID NO: 3255 - DNA, 4178 bp, Homo sapiens
gagagccagcgagcgcgcgggcggcgtagccggcctgtctgggccgcctcgtggggagggagggggcgcccggccgcccggcggcgaccccggggcctggccgccaccatgggcttcgagctggaccgcttcgacggcgacgtggacccggacctgaagtgcgcgctgtgccacaaggtcctggaggacccgctgaccacgccgtgcggccacgtcttctgcgccggctgcgtgctgccctgggtggtgcaggagggcagctgcccggcgcgctgccgcggtcgcctgtcggccaaagagctcaaccacgtcctgccgctcaagcgccttatcctcaagctggacatcaagtgcgcgtacgcgacgcgcggctgcggccgggtggtcaagctgcagcagctgccggagcacctcgagcgctgcgacttcgcgcccgcgcgctgtcgccacgcgggttgcggccaggtgctgctgcggcgcgacgtggaggcgcacatgcgcgacgcctgcgacgcgcggccagtgggccgctgccaggagggctgcgggctacccttgacgcacggcgagcagcgcgcgggcggccactgctgcgcgcgagcgctgcgggcgcacaacggcgcgctccaggcccgcctgggcgcgctgcacaaggcgctcaagaaggaggcgctgcgcgctgggaagcgcgagaagtcgctggtggcccagctggccgcggcgcagcttgagctgcagatgaccgcgctgcgctaccagaagaaattcaccgaatacagcgcgcgcctcgactcgctcagccgctgcgtggccgcgccgcccggcggcaagggcgaagaaaccaaaagtctgactcttgtcctgcatcgggactccggctccctgggattcaatattattggtggccggccgagtgtggataaccacgatggatcatccagtgaaggaatctttgtatccaagatagttgacagtgggcctgcagccaaggaaggaggcctgcaaattcatgacaggattattgaggtcaacggcagagacttatccagagcaactcatgaccaggctgtggaagctttcaagacagccaaggagcccatagtggtgcaggtgttgagaagaacaccaaggaccaaaatgttcacgcctccatcagagtctcagctggtggacacgggaacccaaaccgacatcacctttgaacatatcatggccctcactaagatgtcctctcccagcccacccgtgctggatccctatctcttgccagaggagcatccctcagcccatgaatactacgatccaaatgactacattggagacatccatcaggagatggacagggaggagctggagctggaggaagtggacctctacagaatgaacagccaggacaagctgggcctcactgtgtgctaccggacggacgatgaagacgacattgggatttatatcagtgagattgaccctaacagcattgcagccaaggatgggcgcatccgagaaggagaccgcattatccagattaatgggatagaggtgcagaaccgtgaagaggctgtggctcttctaaccagtgaagaaaataaaaacttttcattgctgattgcaaggcctgaactccagctggatgagggctggatggatgatgacaggaacgactttctggatgacctgcacatggacatgctggaggagcagcaccaccaggccatgcaattcacagctagcgtgctgcagcagaagaagcacgacgaagacggtgggaccacagatacagccaccatcttgtccaaccagcacgagaaggacagcggtgtggggcggaccgacgagagcacccgtaatgacgagagctcggagcaagagaacaatggcgacgacgccaccgcatcctccaacccgctggcggggcagaggaagctcacctgcagccaggacaccttgggcagcggcgacctgcccttcagcaacgagtctttcatttcggccgactgcacggacgccgactacctggggatcccggtggacgagtgcgagcgcttccgcgagctcctggagctcaagtgccaggtgaagagcgccaccccttacggcctgtactaccctagcggccccctggacgccggcaagagtgaccctgagagcgtggacaaggagctggagctgctgaacgaagagctgcgcagcatcgagctggagtgcctgagcatcgtgcgcgcccacaagatgcagcagctcaaggagcagtaccgcgagtcctggatgctgcacaacagcggcttccgcaactacaacaccagcatcgacgtgcgcagacacgagctctcagatatcaccgagctcccggagaaatccgacaaggacagctcgagcgcctacaacacaggcgagagctgccgcagcaccccgctcaccctggagatctcccccgacaactccttgaggagagcggcggagggcatcagctgcccgagcagcgaaggggctgtggggaccacggaagcctacgggccagcctccaagaatctgctctccatcacggaagatcccgaagtgggcacccctacctatagcccgtccctgaaggagctggaccccaaccagcccctggaaagcaaagagcggagagccagcgacgggagccggagccccacgcccagccagaagctgggcagcgcctacctgccctcctatcaccactccccatacaagcacgcgcacatcccggcgcacgcccagcactaccagagctacatgcagctgatccagcagaagtcggccgtggagtacgcgcaaagccagatgagcctggtgagcatgtgcaaggacctgagctctcccaccccgtcggagccgcgcatggagtggaaggtgaagatccgcagcgacgggacgcgctacatcaccaagaggcccgtgcgggaccgcctgctgcgggagcgcgccctgaagatccgggaagagcgcagcggcatgaccaccgacgacgacgcggtgagcgagatgaagatggggcgctactggagcaaggaggagaggaagcagcacctggtgaaggccaaggagcagcggcggcggcgcgagttcatgatgcagagcaggttggattgtctcaaggagcagcaagcagccgatgacaggaaggagatgaacattctcgaactgagccacaaaaagatgatgaagaagaggaataagaaaatcttcgataactggatgacgatccaagaactcttaacccacggcacaaaatccccggacggcactagagtatacaattccttcctatcggtgactactgtataattttcacttctgcattatgtacataaaggagaccactaccactggggtagaaattcctgcctcgttcaatgcggcaagtttttgtatataagataagtacggtcttcatgtttatagtccaaatttgcaaaccctacaactctgggtgtcataggtctattttaagggaagagagagaaaaacacccttactatcttggaaggcaatattaacaaacagagcttttttcaaatagcaattgtacttttctacctgtacccttttacataaagtgtttaaatttcagaaagatcttttattaagcatactttcacagaataacttgtttaaactatattcatataaaaaagttaaacacgctttttttcctgcctaaaacacaaatacaactgccagtatgtatttttaatggaaccctattttataatggtacgttactgaatgtgtttcatatgcgtgaccgttaagatattatcatttaggtgaaggtttcaactcaaaaccacccaacccggtggttaacgatttaatacatataaccaaaccggcagcgtttagagttgggatatacatttaaacattttcctggttaaggttcccaagagagtgtaaaggttttagcagaaagcaaaatatcttgcatctttatggaagtttaaagcatgtttgcaaatattgcagcccattgaaagaatttgcatgtacaggaaagttgtggatggagacggtttgtggaattttaagtgctcattgtagtaaacttttgctttgtagatttgaaggtacagacttatacaggcaagttcacaaaatcatgattagttacaaacagtaaaatgaagttaaaataaattattattttctatttg

SEQ ID NO: 3256 - protein, 1066 aa, Homo sapiens; identical to SEQ ID NO: 363

SEQ ID NO: 3257 - DNA, 1229 bp, Homo sapiens
gagagccagcgagcgcgcgggcggcgtagccggcctgtctgggccgcctcgtggggagggagggggcgcccggccgcccggcggcgaccccggggcctggccgccaccatgggcttcgagctggaccgcttcgacggcgacgtggacccggacctgaagtgcgcgctgtgccacaaggtcctggaggacccgctgaccacgccgtgcggccacgtcttctgcgccggctgcgtgctgccctgggtggtgcaggagggcagctgcccggcgcgctgccgcggtcgcctgtcggccaaagagctcaaccacgtcctgccgctcaagcgccttatcctcaagctggacatcaagtgcgcgtacgcgacgcgcggctgcggccgggtggtcaagctgcagcagctgccggagcacctcgagcgctgcgacttcgcgcccgcgcgctgtcgccacgcgggttgcggccaggtgctgctgcggcgcgacgtggaggcgcacatgcgcgacgcctgcgacgcgcggccagtgggccgctgccaggagggctgcgggctacccttgacgcacggcgagcagcgcgcgggcggccactgctgcgcgcgagcgctgcgggcgcacaacggcgcgctccaggcccgcctgggcgcgctgcacaaggcgctcaagaaggaggcgctgcgcgctgggaagcgcgagaagtcgctggtggcccagctggccgcggcgcagcttgagctgcagatgaccgcgctgcgctaccagaagaaattcaccgaatacagcgcgcgcctcgactcgctcagccgctgcgtggccgcgccgcccggcggcaagggcgaagaaaccaaaagtctgactcttgtcctgcatcgggactccggctccctgggattcaatattattggtggccggccgagtgtggataaccacgatggatcatccagtgaaggaatctttgtatccaagatagttgacagtgggcctgcagccaaggaaggaggcctgcaaattcatgacaggattattgagatgagaaaactggaactgagaacagttaaattgcccaaagcccacagccaggattccaacgctggcttcatcccacaattgctgtccctgcacactccacctctgagctgtgaaaaaggaggaggtcatctggcttgtggaggggcttatttgaactgtatttgattgaaaactgcatgggctactaaaattgttttcttggg

SEQ ID NO: 3258 - protein, 360 aa, Homo sapiens
MGFELDRFDGDVDPDLKCALCHKVLEDPLTTPCGHVFCAGCVLPWVVQEGSCPARCRGRLSAKELNHVLPLKRLILKLDIKCAYATRGCGRVVKLQQLPEHLERCDFAPARCRHAGCGQVLLRRDVEAHMRDACDARPVGRCQEGCGLPLTHGEQRAGGHCCARALRAHNGALQARLGALHKALKKEALRAGKREKSLVAQLAAAQLELQMTALRYQKKFTEYSARLDSLSRCVAAPPGGKGEETKSLTLVLHRDSGSLGFNIIGGRPSVDNHDGSSSEGIFVSKIVDSGPAAKEGGLQIHDRIIEMRKLELRTVKLPKAHSQDSNAGFIPQLLSLHTPPLSCEKGGGHLACGGAYLNCI

SEQ ID NO: 3259 - DNA, 1809 bp, Homo sapiens
agaggcctctcttctgatatccttcttaacttaatctacactggctgtgggttccctttatttttttttctggaatcctagaggatgcacggatacaattcacccaatgtgtccatctctcctctcctaagtgtcagtctataggtttctgacctctagagggtaagcaacttgcccgagatcccctagctggtctgagcagcaaagcctttgaacgcagttttgactctggagctgcattcttcattcttatcctacacttgcttgtgaattctttttcgtccttccagaatccctgaagctgtacagctatactttaccggttacgtctagactataaaggaccacagtgttccacctcaggcaggttcagcgacctgcaagtagtgatacagctgggaaagttacagagcctgcgggaagctccggctgcaacttcagttctgaccagaggttctgtgaaccttcaggatttagcaggtttccaggaccggtgggtgaatctacccggggaagttttggtggacaagagctgctcgccagctgtcggagtgggagaggccagcgtgctggctccatccacttcacctaacacctctgaagtgtctgccctgcagtgtggcaagcgtggtgctgagcgcttctaaatccgtcgctttaaagatcattagtacaatgttgtgagagggttagctccatttgaaaattattttcccgtgattacaaaagaagcgatgctgactgcagaagttagaactgggagaagactcatcacccccatgatcatgtcaacaactgccctccttcagttttggtttgttttgtgtgtacactctgtcatctttccattgaggaaactcaggctagaagaaggataaaaacaaaacagaaaacaaaacaaaacaaaagtgccctgtagggtcctgtaggtcagtgtttctcacattttaatgtggttgcggttctgatacagtgggtctggggcgggttctgagaatctccatactgaaagcacttccaagtgatgccaatgctgctagtccatgctggtccttggattcccacttgattggaaaaccctggcgatccatagatctggacattcattccctgcagtacagcaaacctggctgggtaggattcagcaacagtcctgagcaatggaggaatatttttggaattccaaactgggtgtaaagttcatagcatcatccattgattttattttattttatttttacctcccaaggctatagacattcctaagaaacacgcagtcagcttttggtgagagtggaatcaagctatggaattctcatttggaatctgcttccagtttctgaacagtgaagcgggagagttctgaacagtaaagcaggagctctgtattcagcgagactctggggcctggaaagtgggattacagcatccattttgtctaattgctttccttctttcttttatgtggctgctaaagccccatgaccttcactatttaactgcttcatcagagtgaaagaattgccttgatgttcataaggattacttgtttcacactgacctttaaaaagttgtcactcactagatttttcagtgcatggttgaggtcactggacagtgttctttaatcagttttggtggcatttgttgcctatttgaggtggagactttcttttaattgctttaatcaattaatgcattgctttgataggattctgcatggggtggaatattattggcctttgttcagataagcttgtgccagggaatcctccatcagtatattcattaaactgctcatgggctctc

SEQ ID NO: 3260 - protein, 47 aa, Homo sapiens
MLTAEVRTGRRLITPMIMSTTALLQFWFVLCVHSVIFPLRKLRLEEG

SEQ ID NO: 3261 - DNA, 467 bp, Homo sapiens
tcagtgtccaggaactgggacaatgagataaaagtcaagagacccagcccggggacaaacttagaaggtaaaaatatcaagaaatactgaagcccatgtcccaaaacaacagtcctttaggtggatcacacattctccactacgccaagctctactcagaaactggatgaagcatgagtggaaccagttgtcttggactggctgaaatgagaggtgaggataaaggaacatcagaagctttgagatggtgcatgagatgtatttgatacagtccacctcttgaacagctcagctatgcttttgccttctaagttcaaacaatacacagtctccttcagcgtggtagccaccacaatctctgcaaagacttcatgcaaaggcgttaatgaaccaggttaccatattacttacagctggtcctgaggctgtgattgatattcaataaatttctctttcaccaaccagtc

SEQ ID NO: 3262 - protein, 42 aa, Homo sapiens
MLLPSKFKQYTVSFSVVATTISAKTSCKGVNEPGYHITYSWS

SEQ ID NO: 3263 - DNA, 599 bp, Homo sapiens
atattctctctcttgcctgctgccacgtaaaatgtgactttcgccttccgccatgattgtggggcctcctcagccacatggaactttaagtccattaaacctcttctttataatttacccagtctcagaggaaaaaaagtatcaacagcaacttaagcccactggatggatttaaggttctcctacattcccaacacgtctatcataaagacgccaatgaaaggttataacccagatggaaacaagactccaaatgccagtaaaccaaagacaacttgagatcagagacggggttttaccatgctgctgcacactggtcttgaactcctgggctctagtgatccacctgctcagcttcccaaagtaatgggaatacaggaaacaaagacaagtgaagcagcaaacttgccgaacaatctctgccacaccatatgcacttcgtgagttaaaaagttatgtttttatcctaattatttatactataaattctggtattgcatctaaattctattaattttcaaaaagtttcatttcattaattagcttatggtaggacaaaggggtttcactgtatctacagatgagacttcattccttgt

SEQ ID NO: 3264 - protein, 47 aa, Homo sapiens
MLLHTGLELLGSSDPPAQLPKVMGIQETKTSEAANLPNNLCHTICTS

SEQ ID NO: 3265 - DNA, 670 bp, Homo sapiens
gatttgagactgattttttgctctccttggctgttgcacctgaatagcctttttccctggcaatactttttgtctcagtgattggctttctgtgcagtgagcaatgggaccaaacttctggtgttttggtaacaaattttggtttcctgactgtgaatgcattgcttgtgactcagctgccatgagctgggagagtttcaaaagccctctaagcagctacctgaccattttggccagaggtggattttcgtctctccccatttgggcccacttctgccaaccccaaccatgttcctgattgcctaggaagaacagcctttgaaatttgacgtctatgtacagaaaggtacaaactgttgcctaaggatacagggtgtgtggctggtggcctcaacaggccccacggctcaggcactcagacccaagctggtccctcaggtatggttagcccttgagatattctgcctcatcttctttctgacccctgctggtgatctcatcctcaagctctttcctctggggctgagctctgctttgtattgcattggtccatgaccagccaggaggctcaagtgtcatctactcttcatggcccaaatgtgtgcgatgaagattggtactccatgtagcttccttcttggcttatctcctcggccctctctccccacta

SEQ ID NO: 3266 - protein, 64 aa, Homo sapiens
MGPNFWCFGNKFWFPDCECIACDSAAMSWESFKSPLSSYLTILARGGFSSLPIWAHFCQPQPCS

SEQ ID NO: 3267 - DNA, 2572 bp, Homo sapiens
ggcgttggcctccgcggcccgtgcgagtgcgcccttctcgggtcccctaggtcgcggggcagccggggcggaaggggcttgttcattattttgagagtttgttgtgaacgtcataacctttcgtccttaaatattgccgatacttgacctacgcaagagacaatgtcatgtgattcagcctaatatctcagagggacgcgcatgaaatttggtgccgtgactcggatcggcggacctcccttaggagatcaatcccctgtcctcctgctctttgctccatgagaaagatccacctacgacctaaggtcctcagaccaaccagcccaagaaacatctcaccaatttcaaatccgaaatccttcatctaatctggcaaacacatgtggcaggtttttctcaccgcataaaatatgttatagagtagtccatctatttctcttccatggaagagttcatctggtagattggactaccacttttccttgtggagacctattctgttgggttagagatgacagaaaatcttatttgtcggttggtttgtttgttcaagaatacactgaccttctacaagaaaggagagctctttgacacctggaaattttacagaagcttgggacagctctgaatggcaacacggtcctgagatatgtgattacctgggactttcattggacctgcatttcagctctactctcctcactgccctatgctgctttgaccctaaaagtgaagccagcttggccaggtgcagtgactcacacctgtaatcccagcactttgggaggccgaggtgggcaaatcaagaagtcaggaaatcgagaccaccctggccaacattgtgaaacaccatctctactaaaacacaaaaaaattagccaggtgtggtggcacgcacctgtagtcccagctactcgggaggctgaggcaggggaatcacttgaacccgtgaggaggaaattgcagcgagccaagatcgcgccactgcaccccagcctgggcgacagagagagactccatctcaaaaacaaaacaaaacaaaacaaaaaaaacaaaaagtgaagccaactcaattgtctcatagaactgatctttacggtgtttttaaataaacatagaaattggccctcccagtcttaaaacttcaaaaacttacatttgtcttacctcagttcctttctcaggaatccaatcatcaaggctcccagatagtatcaatgaacggaaacttaccagatcacgatatctggacaatgagatgtcagatccccctcatccatcctgattacctaactgactacctgcttcctgttggccaactactcttccttacccctccctaattcttgttttcccacaaatggttacatttctgtcctgctatagaagcccttaattttaattggtcgaggagatggatttgagactgattttttgctctccttggctgttgcacctgaatagcctttttccctggcaatactttttgtctcagtgattggctttctgtgcagtgagcaatgggaccaaacttctggtgttttggtaacaaattttggtttcctgactgtgaatgcattgcttgtgactcagctgccatgagctgggagagtttcaaaagccctctaagcagctacctgaccattttggccagaggtggattttcgtctctccccatttgggcccacttctgccaaccccaaccatgttcctgattgcctaggaagaacagcctttgaaatttgacgtctatgtacagaaaggtgagtgtcttttatgggtactagacagtgggaatggttcctctccatttgggaaatcccaaaggcatatcagtttgcaggttaaacaagccaaactgatggagagaggataataccttgactgattcagtttgaacactcttggggcttgttcattgctacagaagttggattgtgttttggtgattgtttgcttgtgtatgtctatgtagttatgggatgtcagggtttgatcccagagtgcagcccacatgggtgcattctttgggttagtctgtatgtagttgtgggttgacagagcaggggaaattctacagccataccactctgagtgtggctgatcttgtctgatcgcgatgtctttgcattgtagtgctgtcttacaattgaattcattttgctgttgaatgggaaagcaggatggaggtccatgtatgtatgcttttatgctgctgctctgaacagggttgggcctgattagtactgtgatgctcttctgtggtgctgtttggccccagtgttctttggaatccggggaattttggcctttaaaagttaaactgccatgggaactgatttacccagttttagttcatagccttcattgtattatctatcagggcaaaaaagttagccgtgtgaacatgttcgtaaaccagtgagtttgtattgctatctcatgcctagaattctaaagtaaaaactattgggtctttgtttgtatatatgtatatgggtctaaatgttatgtgttgtttttacagggtacagattggctcataaataaaagagcactcataaattaagtg

SEQ ID NO: 3268 - protein, 38 aa, Homo sapiens
MTENLICRLVCLFKNTLTFYKKGELFDTWKFYRSLGQL

SEQ ID NO: 3269 - DNA, 460 bp, Homo sapiens
tcttcactcccacagtctgtgagcgtgtcactgcccgcagctcggtgagtcagccaggaaagtgttacagctcctttcactcccgctgttcagcaggtcccgagttctcatcccgcatccaggaagaatgaggttatgtggacacctggagggtgagcgaggctgagaaaagctttattgggcaaccagacagctctcagaagagaggtgacctgaagcaggatgagagacgttgagctccaaactcagactaagaaactataagaaatatgcttcaatgaagaagctgttcaaaaatgagtaagattgtttccttgaggcaagaaagaaatgcagaagtcttgacaaacaaaagaagagattgccttagggaaggggactacagtgaacactgagaacttcttcccacgctaagacaatctttacagagcaagactccgtctcaaaaaaaaaaaaaaaa

SEQ ID NO: 3270 - protein, 32 aa, Homo sapiens
MSKIVSLRQERNAEVLTNKRRDCLREGDYSEH

SEQ ID NO: 3271 - DNA, 1109 bp, Homo sapiens
ctaggtcgcggggcagccggggcggaaggggcttgttcattattttgagagtttgttgtgaacgtcataacctttcgtccttaaatattgccgatacttgacctacgcaagagacaatgtcatgtgattcagcctaatatctcagaggatgcagcattcaaggttctatcttggaagcagagactgtgccctcaccagatgctgaacctgctgagcaccctgatcttccacttcaccttcatcagaactactggggctgtggctgagatgtcacatggcagataggatcacaaatttctgttgtatctggatggagatcagcaggaggatctatggactgctgtgattgcacctgccatcttatgcagaaatgacctgaagacagactgaaacaacgtgttctacagcctgaaaatatctaccttgacttacagttttattaatgctggtgtgatcagactggacaaaaattagcatatgttattaactgatctaattcaagtgccaattcttaatagaaacacaaaacaataaaagcaattcagaaaatatttactatttgatttcttcaagctccaaacaggcttgtgcttagctgtagaaacttgaatatatacaaatctacatggatagaattcttagtcttctttgggccaggtgtgttagccccttgggaaaggataaagttttggaatatatttttattcatgaacctgctctctttaagacttctgaggaaaagagctgctgggcagatgagtagaatatgttactactgttccgacatgtctacccatcaaaactagctgatacagtacactttaatgacccttctatagtcaaaactgacattgacattgacattaacagaaaagatttgggacaaagaactgtgttcatgcagcaaatcagcctcaaacttcaccacaagctgcacattttatgctactgtattctgcttaagcacttatttgtatttatgtaaactgaatgatcctttaatacttaaggactttattctgggtgagttagaatcacactgttttggcaggaaaactctttgataggaaaaactgtatggcttgataatttaagagctaaaagtagcc

SEQ ID NO: 3272 - protein, 72 aa, Homo sapiens [sequence omitted]

SEQ ID NO: 3273 - DNA, 1025 bp, Homo sapiens
cccctaggtcgcggggcagccggggcggaaggggcttgttcattattttgagagtttgttgtgaacgtcataacctttcgtccttaaatattgccgatacttgacctacgcaagagacaatgtcatgtgattcagcctaatatctcagaggatgcagcattcaaggttctatcttggaagcagagactgtgccctcaccagatgctgaacctgctgagcaccctgatcttccacttcaccttcatcagaactactgctgtgattgcacctgccatcttatgcagaaatgacctgaagacagactgaaacaacgtgttctacagcctgaaaatatctaccttgacttacagttttattaatgctggtgtgatcagactggacaaaaattagcatatgttattaactgatctaattcaagtgccaattcttaatagaaacacaaaacaataaaagcaattcagaaaatatttactatttgatttcttcaagctccaaacaggcttgtgcttagctgtagaaacttgaatatatacaaatctacatggatagaattcttagtcttctttgggccaggtgtgttagccccttgggaaaggataaagttttggaatatatttttattcatgaacctgctctctttaagacttctgaggaaaagagctgctgggcagatgagtagaatatgttactactgttccgacatgtctacccatcaaaactagctgatacagtacactttaatgacccttctatagtcaaaactgacattgacattgacattaacagaaaagatttgggacaaagaactgtgttcatgcagcaaatcagcctcaaacttcaccacaagctgcacattttatgctactgtattctgcttaagcacttatttgtatttatgtaaactgaatgatcctttaatacttaaggactttattctgggtgagttagaatcacactgttttggcaggaaaactctttgataggaaaaactgtatggcttgataatttaagagctaaaagtagcc

SEQ ID NO: 3274 - protein, 34 aa, Homo sapiens
MLNLLSTLIFHFTFIRTTAVIAPAILCRNDLKTD

SEQ ID NO: 3275 - DNA, 550 bp, Homo sapiens
ctaggtcgcggggcagccggggcggaaggggcttgttcattattttgagagtttgttgtgaacgtcataacctttcgtccttaaatattgccgatacttgacctacgcaagagacaatgtcatgtgattcagcctaatatctcagaggatgcagcattcaaggttctatcttggaagcagagactgtgccctcaccagatgctgaacctgctgagcaccctgatcttccacttcaccttcatcagaactactggggctgtggctgagatgtcacatggcagataggatcacaaatttctgttgtatctggatggagatcagcaggaggatctatggactgctgtgattgcacctgccatcttatgcagaaatgacctgaagacagactgaaacaacgtgttctacagcctgaaaatatctaccttgacttacagttttattaatgctggtgtgatcagactggacaaaaattagcatatgttattaactgatctaattcaagtgccaattcttaatagaaacacaaaacaataaaagcaattcagaaaat

SEQ ID NO: 3276 - protein, 42 aa, Homo sapiens
YLRGCSIQGSILEAETVPSPDAEPAEHPDLPLHLHQNYWGCG

SEQ ID NO: 3277 - DNA, 466 bp, Homo sapiens
cccctaggtcgcggggcagccggggcggaaggggcttgttcattattttgagagtttgttgtgaacgtcataacctttcgtccttaaatattgccgatacttgacctacgcaagagacaatgtcatgtgattcagcctaatatctcagaggatgcagcattcaaggttctatcttggaagcagagactgtgccctcaccagatgctgaacctgctgagcaccctgatcttccacttcaccttcatcagaactactgctgtgattgcacctgccatcttatgcagaaatgacctgaagacagactgaaacaacgtgttctacagcctgaaaatatctaccttgacttacagttttattaatgctggtgtgatcagactggacaaaaattagcatatgttattaactgatctaattcaagtgccaattcttaatagaaacacaaaacaataaaagcaattcagaaaat

SEQ ID NO: 3278 - protein, 34 aa, Homo sapiens; identical to SEQ ID NO: 3274

SEQ ID NO: 3279 - DNA, 1385 bp, Homo sapiens
taacctttcgtccttaaatattgccgatacttgacctacgcaagagacaatgtcatgtgattcagcctaatatctcagaggatgcagcattcaaggttctatcttggaagcagagactgtgccctcaccagatgctgaacctgctgagcaccctgatcttccacttcaccttcatcagaactggtgctaagaattctgaatttattgaggaaataaatgtctgattgcaacaaaagaaaacttgtctggctttgggaaggaagaggcttaggaaaaaaattaaaggcgtctttactagaagttcaagactggggctgtggctgagatgtcacatggcagataggatcacaaatttctgttgtatctggatggagatcagcaggaggatctatgggtgagaagaagcacagttacagatggattctagagcctgcttgctgacacaggcttgcaactgcggactttataagcttagtttttaatctgctatcagctagcataataccataaatgcataagaaactaagtattcagtcttacgagaaatgctatcttgacctgaccctttctccaaataaattgacaaaatatctcatcgtctaggatgccagacagaaataccagttgcaatgttttgttgcataaagtttatcctaatttaaattagtggcatataaagtcatcatcttgcttgaacaaacatcttattaaattgagcatgtcttttatcccatgaaatgaaattaattttgagatagttatttttcagttggaaatttattgagttgatagaaaacaagttatatagtcttccaaagaatatgttacatccatttgcattttgtttttcttcagcaatgtttggtttttagaaaatcttacaagttaaatatactaatgtagaaattgaaagaaaataatcagagatagagcaataaatttgcaaataaagattattcttaaaacaaatgtttactgtagttttatttatataaaaaatcccaaactacccaagtcttcaaataataaagacactattaaaaaactgttacctttccatttatggattattaggtagactttaaaaatattttaaaagactttttaaagggctatgccattttccctaatgtaaaaacaaagtaaaacaccatgacgaacccccagaaaaccgacctgtatattcaatgtaccaaccaattgcatatacactagaatttttgtttgtaaatagatgagtgtgcataagacaatatgttaaagtacagacacttcctacctaatacagattgagttcttactatgtattcagttcccactatactctaggctcttggctaagcactttaagggccttatcacatttaatactcacaggagcacaa

SEQ ID NO: 3280 - protein, 35 aa, Homo sapiens
MSDCNKRKLVWLWEGRGLGKKLKASLLEVQDWGCG

SEQ ID NO: 3281 - DNA, 1364 bp, Homo sapiens
ctccgcggcccgtgcgagtgcgcccttctcgggtcccctaggtcgcggggcagccggggcggaaggggcttgttcattattttgagagtttgttgtgaacgtcataacctttcgtccttaaatattgccgatacttgacctacgcaagagacaatgtcatgtgattcagcctaatatctcagaggatgcagcattcaaggttctatcttggaagcagagactgtgccctcaccagatgctgaacctgctgagcaccctgatcttccacttcaccttcatcagaactactggggctgtggctgagatgtcacatggcagataggatcacaaatttctgttgtatctggatggagatcagcaggaggatctatgggtgagaagaagcacagttacagatggattctagagcctgcttgctgacacaggcttgcaactgcggactttataagcttagtttttaatctgctatcagctagcataataccataaatgcataagaaactaagtattcagtcttacgagaaatgctatcttgacctgaccctttctccaaataaattgacaaaatatctcatcgtctaggatgccagacagaaataccagttgcaatgttttgttgcataaagtttatcctaatttaaattagtggcatataaagtcatcatcttgcttgaacaaacatcttattaaattgagcatgtcttttatcccatgaaatgaaattaattttgagatagttatttttcagttggaaatttattgagttgatagaaaacaagttatatagtcttccaaagaatatgttacatccatttgcattttgtttttcttcagcaatgtttggtttttagaaaatcttacaagttaaatatactaatgtagaaattgaaagaaaataatcagagatagagcaataaatttgcaaataaagattattcttaaaacaaatgtttactgtagttttatttatataaaaaatcccaaactacccaagtcttcaaataataaagacactattaaaaaactgttacctttccatttatggattattaggtagactttaaaaatattttaaaagactttttaaagggctatgccattttccctaatgtaaaaacaaagtaaaacaccatgacgaacccccagaaaaccgacctgtatattcaatgtaccaaccaattgcatatacactagaatttttgtttgtaaatagatgagtgtgcataagacaatatgttaaagtacagacacttcctacctaatacagattgagttcttactatgtattcagttcccactatactctaggctcttggctaagcactttaagggccttatcacatttaatactcacaggagcacaa

SEQ ID NO: 3282 - protein, 30 aa, Homo sapiens
MHKKLSIQSYEKCYLDLTLSPNKLTKYLIV

SEQ ID NO: 3283 - DNA, 961 bp, Homo sapiens
taacctttcgtccttaaatattgccgatacttgacctacgcaagagacaatgtcatgtgattcagcctaatatctcagaggatgcagcattcaaggttctatcttggaagcagagactgtgccctcaccagatgctgaacctgctgagcaccctgatcttccacttcaccttcatcagaactggtgctaagaattctgaatttattgaggaaataaatgtctgattgcaacaaaagaaaacttgtctggctttgggaaggaagaggcttaggaaaaaaattaaaggcgtctttactagaagttcaagactggggctgtggctgagatgtcacatggcagataggatcacaaatttctgttgtatctggatggagatcagcaggaggatctatgggtgagaagaagcacagttacagatggattctagagcctgcttgctgacacaggcttgcaactgcggactttataagcttagtttttaatctgctatcagctagcataataccataaatgcataagaaactaagtattcagtcttacgagaaatgctatcttgacctgaccctttctccaaataaattgacaaaatatctcatcgtctaggatgccagacagaaataccagttgcaatgttttgttgcataaagtttatcctaatttaaattagtggcatataaagtcatcatcttgcttgaacaaacatcttattaaattgagcatgtcttttatcccatgaaatgaaattaattttgagatagttatttttcagttggaaatttattgagttgatagaaaacaagttatatagtcttccaaagaatatgttacatccatttgcattttgtttttcttcagcaatgtttggtttttagaaaatcttacaagttaaatatactaatgtagaaattgaaagaaaataatcagagatagagcaataaatttgcaaataaagattattctt

SEQ ID NO: 3284 - protein, 35 aa, Homo sapiens; identical to SEQ ID NO: 3280

SEQ ID NO: 3285 - DNA, 940 bp, Homo sapiens
ctccgcggcccgtgcgagtgcgcccttctcgggtcccctaggtcgcggggcagccggggcggaaggggcttgttcattattttgagagtttgttgtgaacgtcataacctttcgtccttaaatattgccgatacttgacctacgcaagagacaatgtcatgtgattcagcctaatatctcagaggatgcagcattcaaggttctatcttggaagcagagactgtgccctcaccagatgctgaacctgctgagcaccctgatcttccacttcaccttcatcagaactactggggctgtggctgagatgtcacatggcagataggatcacaaatttctgttgtatctggatggagatcagcaggaggatctatgggtgagaagaagcacagttacagatggattctagagcctgcttgctgacacaggcttgcaactgcggactttataagcttagtttttaatctgctatcagctagcataataccataaatgcataagaaactaagtattcagtcttacgagaaatgctatcttgacctgaccctttctccaaataaattgacaaaatatctcatcgtctaggatgccagacagaaataccagttgcaatgttttgttgcataaagtttatcctaatttaaattagtggcatataaagtcatcatcttgcttgaacaaacatcttattaaattgagcatgtcttttatcccatgaaatgaaattaattttgagatagttatttttcagttggaaatttattgagttgatagaaaacaagttatatagtcttccaaagaatatgttacatccatttgcattttgtttttcttcagcaatgtttggtttttagaaaatcttacaagttaaatatactaatgtagaaattgaaagaaaataatcagagatagagcaataaatttgcaaataaagattattctt

SEQ ID NO: 3286 - protein, 30 aa, Homo sapiens; identical to SEQ ID NO: 3282

SEQ ID NO: 3287 - DNA, 4485 bp, Homo sapiens
atgacaaggggaagtcaagctgtgaaggcaagagggagaggagccaaggaggttcctgtgggtcagaggaaagtgactgtggaggaagtctttgtccagggctttgggtgttggcgtcagctcctcacgcagcagaaactggatttgtcatcctctttctttagcctgtcagctgccatggacttgggggtaggtttgcatagacctggctaccacgaaacatgtggggagccagatcaggagctgaaagaccaagaaatgagcaaagggaatgaagcatccatgggggaggtcctaggtggctgtcacttcctggaatggtgtgactcacctttcagacacttacgcatgagtacgggacacgtcaaaaacataggcacgtttagagcgactgtcagcggaaagctgtccatcacatgcactaaggaagggcagctgctgcagtggatggctgcttctgtgaggtgctcttttgacaatgagagccctgctagcatcagaagcaaaactgaaatgaaattaaaagagagcactgggttgggtcttgaggctgaaccaagctcagatgtgagtctgtctgagctctggctcctagcctcaaaactacccatgaaggggaaaattatggcagggacaaaagaaagtacctctgagacctatggttaccatgaaagatttcattctagtgaggggaagaaaaaggacaaagaggaaaagtcaaagaaagtcattttggatcatgataaatgctctgaacgagggctgggagatgcccttagaggaaatgatgtgagctttaagccaggactcaatagccttgctactgagttaaccaagaaacaaaagagactattgagcaggaaacgatggtgtggaatgtgaagggtcctggaggtctgccagagtggatctccatcctgcaggggctgaggcacccagctgctaccagtactaccaccatgaggctccaactcatcctaactgccctgagaggtttccatgatcaaatccaggagcaggaggcagaagagctgaggctcacaaatggcccatccgggcttttccgtggagcccgtttctgcccgacccccctgaggaatgggacccgagaagggcgcactcgcacgggccgcggaggccaacgccgagcctgcgcggcgggaggcgctgagaactcactgcgcacgcgccggtcggctggccgcacccacgcggcgcagctcccaaagttgcagacagcccggcgaaccgcgcaatgcgcttcttctgcctgcagcagagaaaaggaaagaaaactccgcaggggctccgttggcttctccacgagtgacaaccatgttttcccagatagaagaccggagccctgctcctttgcgatccgccgagggctgcagagagcatcctcatccatttgggcacccctgcccaggaagagcccggccatccctttccggactggatccttaagaggtgaattttcttccgtggattccgatttgctccgtctgaccagcctaggcaatccagcatcgcgtggtaccagtgccgctgggcacactggcttcacgccggctccgcctcaccagcaagcgcattcccaggtggtcaggctcaggatggaccatgagctttcaaaaaggaaaaaggtggaaatcctcaactatgctgccatctgaataagtgtttctttgtagatgcacagagtcaaggaaaattacatccctgcattatgtaatgtaccaacaacgcacttacccactgttttaatctaggttattcttgaaagcagagcctgagacaaaggtagacacattctatttatgagtctaacacccaggagcaggaatgagagataggggagtgaactggggaaaagggaaactaagtccgagcaaaaccagatactgctcttatcaagtggtccacccctattaatggctacataatgcagaactttctcaggattcttcttaaactttatctcagaactgtctgcctcagggagaaaggagaagtatttctccatcagcagccacctcctgtgtgttgagggctgctcctttggggcattaacccactgcctccaccaccccaaccctctgggctgcaaagagctagctgacagtccagctggtaccttagcatcacacattgctgcatcagagaggtcttaagacaggaagctagagtcttggtgcatgctcgaagtgagacggtgtcagcacagagcagggtaaaatcttcccgttaactcttcaccagagctatgactggaatcagaggttgaaaagatgtgagactgtacccaagaagcatcttataagcctacgtaatatactgttagactcatcgaaatctatttcctcccttctttataatcaaaacttcagtgtccagaataaagttggcagaagggttaaattggaaagttaaatgtactagaaggtgtacatttataagttttgaccttgagtcgtgttcaaggagaaagtgacattggaacttggaaaatttaaaaatgattctacttgaaaaatttgaccattgcatagaaatattagctatcgtctaatcttttgtaatcttagaaacaatcgtgaattgtttggtgaaaaatgaaaaaataaccatttcttatgtctccgtgacctttatagaccaatgtcaccaacttttcctaaggtaattgtttcctactgtcaaatagctctagtgatataaatcttaacaatcaatgaagggaaaactggtggaaacataggaggaaaaatactgggataattttcatcacaaagtattggcattaacattggttagaataggggagaaactgcatgacttgacaactggacattcctgtatgttgtatgaggccctgtcttaacagaaatagtgatgtcatcatcatcctctcttatttggtcttgaattgccaccaatcggataaaacctttgaattatttaactcaatatatgttaagtttctactatgtgctgtgtattggtactataaatatgaataagacataagatattacattcaaaaacatcagaatacatgttcttttaaagtataccccaaaacatttaccatgtgttctggggcgcatgttaggctggatcacaaatcaagtctcaagaatttcaaaagattgaaatcatatagagtatgaattaaaccagaaatcaagtacataaaggtaacaaaaaatttccaaaatgcattaatttaaggaacatacacctcatgacccatgagccaaaaaataaatcacggcaaaattgcaaaaatattttgaaatgaattttaaagaaaatacttagcatattaaatacttagcatattaaagctctaagtacatatgttagaaattttaccgaaaggttggctatcagtgtttccagaagccagggaaaaagtttatacaatttgatcgctgaggcagggaaacaaagtgagacctccgatcgccctgcctttctgaggtgagcactctggatcccatcgcaggagatcagagtcttgctgagttgaggagaggaagattggagttgatactgagatagcttgaattttcaggacaaagtatcaacaaggaggaaggtagacaaaaaaatccagaaatctatgtagagaccccattgtgtacattgcggaacactaagcctaacaattctcaaaattagcgtgagattgggaaatatctaatttccatccagccacagtggagagtcctgactgaaaaccaggcattcgctaaagatcccagaaaggttgtgtgttacatacgtagggctaaactatcctgactaaaaactacactacacttgctcctcacccccacaaaaagcttaaaaacaagcctcaatagtataaagctgatctgtaagtaactaaactacctgcagaacaaagtccaaatttattagttccagtactccaaaaaaaacacatgtaaaaaaaaaatagatttacaagacatttatttggggaaaaaaagaatgcctgagggttgaaatggagaggaagccagagagacagagtcctcagaatacataaaatttctggcctccatggaggtgtgatggttaattttatgcatgtcaacttcgctgggccacaggatgccccatatatgatcgaacattatttctggttgtgttcatgaagctttttctggaggaaattcgcatttgaattgatggactgaataaagcagattgcagtccccagtgtggatgggcttgatccagtcttctaaggacccaaataaaataggtggaggaagcttgaattttctgcctgactgtggcgctgggacacccatcttctcctgcccttgaactgggactgacaccatcagtgctcctggttctcagaccttcggacagcagacttggggccttctcggcctccattattgtgtaagccaattccttataataaataagggtttatttattgataaatccttataggttgat

SEQ ID NO: 3288 - protein, 293 aa, Homo sapiens
MTRGSQAVKARGRGAKEVPVGQRKVTVEEVFVQGFGCWRQLLTQQKLDLSSSFFSLSAAMDLGVGLHRPGYHETCGEPDQELKDQEMSKGNEASMGEVLGGCHFLEWCDSPFRHLRMSTGHVKNIGTFRATVSGKLSITCTKEGQLLQWMAASVRCSFDNESPASIRSKTEMKLKESTGLGLEAEPSSDVSLSELWLLASKLPMKGKIMAGTKESTSETYGYHERFHSSEGKKKDKEEKSKKVILDHDKCSERGLGDALRGNDVSFKPGLNSLATELTKKQKRLLSRKRWCGM

SEQ ID NO: 3289 - DNA, 3655 bp, Homo sapiens
atggcgcagcagctgtgcggcattcagttactaaagatggtgtggaatgtgaagggtcctggaggtctgccagagtggatctccatcctgcaggggctgaggcacccagctgctaccagtactaccaccatgaggctccaactcatcctaactgccctgagaggtttccatgatcaaatccaggagcaggaggcagaagagctgaggctcacaaatggcccatccgggcttttccgtggagcccgtttctgcccgacccccctgaggaatgggacccgagaagggcgcactcgcacgggccgcggaggccaacgccgagcctgcgcggcgggaggcgctgagaactcactgcgcacgcgccggtcggctggccgcacccacgcggcgcagctcccaaagttgcagacagcccggcgaaccgcgcaatgcgcttcttctgcctgcagcagagaaaaggaaagaaaactccgcaggggctccgttggcttctccacgagtgacaaccatgttttcccagatagaagaccggagccctgctcctttgcgatccgccgagggctgcagagagcatcctcatccatttgggcacccctgcccaggaagagcccggccatccctttccggactggatccttaagaggtgaattttcttccgtggattccgatttgctccgtctgaccagcctaggcaatccagcatcgcgtggtaccagtgccgctgggcacactggcttcacgccggctccgcctcaccagcaagcgcattcccaggtggtcaggctcaggatggaccatgagctttcaaaaaggaaaaaggtggaaatcctcaactatgctgccatctgaataagtgtttctttgtagatgcacagagtcaaggaaaattacatccctgcattatgtaatgtaccaacaacgcacttacccactgttttaatctaggttattcttgaaagcagagcctgagacaaaggtagacacattctatttatgagtctaacacccaggagcaggaatgagagataggggagtgaactggggaaaagggaaactaagtccgagcaaaaccagatactgctcttatcaagtggtccacccctattaatggctacataatgcagaactttctcaggattcttcttaaactttatctcagaactgtctgcctcagggagaaaggagaagtatttctccatcagcagccacctcctgtgtgttgagggctgctcctttggggcattaacccactgcctccaccaccccaaccctctgggctgcaaagagctagctgacagtccagctggtaccttagcatcacacattgctgcatcagagaggtcttaagacaggaagctagagtcttggtgcatgctcgaagtgagacggtgtcagcacagagcagggtaaaatcttcccgttaactcttcaccagagctatgactggaatcagaggttgaaaagatgtgagactgtacccaagaagcatcttataagcctacgtaatatactgttagactcatcgaaatctatttcctcccttctttataatcaaaacttcagtgtccagaataaagttggcagaagggttaaattggaaagttaaatgtactagaaggtgtacatttataagttttgaccttgagtcgtgttcaaggagaaagtgacattggaacttggaaaatttaaaaatgattctacttgaaaaatttgaccattgcatagaaatattagctatcgtctaatcttttgtaatcttagaaacaatcgtgaattgtttggtgaaaaatgaaaaaataaccatttcttatgtctccgtgacctttatagaccaatgtcaccaacttttcctaaggtaattgtttcctactgtcaaatagctctagtgatataaatcttaacaatcaatgaagggaaaactggtggaaacataggaggaaaaatactgggataattttcatcacaaagtattggcattaacattggttagaataggggagaaactgcatgacttgacaactggacattcctgtatgttgtatgaggccctgtcttaacagaaatagtgatgtcatcatcatcctctcttatttggtcttgaattgccaccaatcggataaaacctttgaattatttaactcaatatatgttaagtttctactatgtgctgtgtattggtactataaatatgaataagacataagatattacattcaaaaacatcagaatacatgttcttttaaagtataccccaaaacatttaccatgtgttctggggcgcatgttaggctggatcacaaatcaagtctcaagaatttcaaaagattgaaatcatatagagtatgaattaaaccagaaatcaagtacataaaggtaacaaaaaatttccaaaatgcattaatttaaggaacatacacctcatgacccatgagccaaaaaataaatcacggcaaaattgcaaaaatattttgaaatgaattttaaagaaaatacttagcatattaaatacttagcatattaaagctctaagtacatatgttagaaattttaccgaaaggttggctatcagtgtttccagaagccagggaaaaagtttatacaatttgatcgctgaggcagggaaacaaagtgagacctccgatcgccctgcctttctgaggtgagcactctggatcccatcgcaggagatcagagtcttgctgagttgaggagaggaagattggagttgatactgagatagcttgaattttcaggacaaagtatcaacaaggaggaaggtagacaaaaaaatccagaaatctatgtagagaccccattgtgtacattgcggaacactaagcctaacaattctcaaaattagcgtgagattgggaaatatctaatttccatccagccacagtggagagtcctgactgaaaaccaggcattcgctaaagatcccagaaaggttgtgtgttacatacgtagggctaaactatcctgactaaaaactacactacacttgctcctcacccccacaaaaagcttaaaaacaagcctcaatagtataaagctgatctgtaagtaactaaactacctgcagaacaaagtccaaatttattagttccagtactccaaaaaaaacacatgtaaaaaaaaaatagatttacaagacatttatttggggaaaaaaagaatgcctgagggttgaaatggagaggaagccagagagacagagtcctcagaatacataaaatttctggcctccatggaggtgtgatggttaattttatgcatgtcaacttcgctgggccacaggatgccccatatatgatcgaacattatttctggttgtgttcatgaagctttttctggaggaaattcgcatttgaattgatggactgaataaagcagattgcagtccccagtgtggatgggcttgatccagtcttctaaggacccaaataaaataggtggaggaagcttgaattttctgcctgactgtggcgctgggacacccatcttctcctgcccttgaactgggactgacaccatcagtgctcctggttctcagaccttcggacagcagacttggggccttctcggcctccattattgtgtaagccaattccttataataaataagggtttatttattgataaatccttataggttgat

SEQ ID NO: 3290 - protein, 281 aa, Homo sapiens
MAQQLCGIQLLKMVWNVKGPGGLPEWISILQGLRHPAATSTTTMRLQLILTALRGFHDQIQEQEAEELRLTNGPSGLFRGARFCPTPLRNGTREGRTRTGRGGQRRACAAGGAENSLRTRRSAGRTHAAQLPKLQTARRTAQCASSACSREKERKLRRGSVGFSTSDNHVFPDRRPEPCSFAIRRGLQRASSSIWAPLPRKSPAIPFRTGSLRGEFSSVDSDLLRLTSLGNPASRGTSAAGHTGFTPAPPHQQAHSQVVRLRMDHELSKRKKVEILNYAAI

SEQ ID NO: 3291 - DNA, 258 bp, Homo sapiens
aatgctaccacaaaaaccattacatcctgaaagtcacgtggaccttcttttttcttctaaatctcaaccatattatctatatggctgtgcaaggaagatcaataaggaggagctctaacaatttccattggttttctgcaatccaaaccgagatgatccaggcttaaacaagacgtagggagtctaggggtagagaaaggctgattctttgctgtatcttacaggaggtctacgcttatgaattccagcttttcaggt

SEQ ID NO: 3292 - protein, 38 aa, Homo sapiens
MLPQKPLHPESHVDLLFSSKSQPYYLYGCARKINKEEL

SEQ ID NO: 3293 - DNA, 1763 bp, Homo sapiens
acccacgcggcgcagctcccaaagttgcagacagcccggcgaaccgcgcaatgcgcttcttctgcctgcagcagagaaaaggaaagaaaactccgcaggggctccgttggcttctccacgagtgacaaccatgttttcccagatagaagaccggagccctgctcctttgcgatccgccgagggctgcagagagcatcctcatccatttgggcacccctgcccaggaagagcccggccatccctttccggactggatccttaagaggtgaattttcttccgtggattccgatttgctccgtctgaccagcctaggcaatccagcatcgcgtggtaccagtgccgctgggcacactggcttcacgccggctccgcctcaccagcaagcgcattcccaggtggtcaggctcaggatggaccatgagctttcaaaaaggaaaaaggtggaaatcctcaactatgctgccatctgaataagtgtttctttgtagatgcacagagtcaaggaaaattacatccctgcattatgtaatgtaccaacaacgcacttacccactgttttaatctaggttattcttgaaagcagagcctgagacaaaggtagacacattctatttatgagtctaacacccaggagcaggaatgagagataggggagtgaactggggaaaagggaaactaagtccgagcaaaaccagatactgctcttatcaagtggtccacccctattaatggctacataatgcagaactttctcaggattcttcttaaactttatctcagaactgtctgcctcagggagaaaggagaagtatttctccatcagcagccacctcctgtgtgttgagggctgctcctttggggcattaacccactgcctccaccaccccaaccctctgggctgcaaagagctagctgacagtccagctggtaccttagcatcacacattgctgcatcagagaggtcttaagacaggaagctagagtcttggtgcatgctcgaagtgagacggtgtcagcacagagcagggtaaaatcttcccgttaactcttcaccagagctatgactggaatcagaggttgaaaagatgtgagactgtacccaagaagcatcttataagcctacgtaatatactgttagactcatcgaaatctatttcctcccttctttataatcaaaacttcagtgtccagaataaagttggcagaagggttaaattggaaagttaaatgtactagaaggtgtacatttataagttttgaccttgagtcgtgttcaaggagaaagtgacattggaacttggaaaatttaaaaatgattctacttgaaaaatttgaccattgcatagaaatattagctatcgtctaatcttttgtaatcttagaaacaatcgtgaattgtttggtgaaaaatgaaaaaataaccatttcttatgtctccgtgacctttatagaccaatgtcaccaacttttcctaaggtaattgtttcctactgtcaaatagctctagtgatataaatcttaacaatcaatgaagggaaaactggtggaaacataggaggaaaaatactgggataattttcatcacaaagtattggcattaacattggttagaataggggagaaactgcatgacttgacaactggacattcctgtatgttgtatgaggccctgtcttaacagaaatagtgatgtcatcatcatcctctcttatttggtcttgaattgccaccaatcggataaaacctttgaattatttaactc

SEQ ID NO: 3294 - protein, 43 aa, Homo sapiens
MFSQIEDRSPAPLRSAEGCREHPHPFGHPCPGRARPSLSGLDP

SEQ ID NO: 3295 - DNA, 1205 bp, Homo sapiens
acccacgcggcgcagctcccaaagttgcagacagcccggcgaaccgcgcaatgcgcttcttctgcctgcagcagagaaaaggaaagaaaactccgcaggggctccgttggcttctccacgagtgacaaccatgttttcccagatagaagaccggagccctgctcctttgcgatccgccgagggctgcagagagcatcctcatccatttgggcacccctgcccaggaagagcccggccatccctttccggactggatccttaagaggtgaattttcttccgtggattccgatttgctccgtctgaccagcctaggcaatccagcatcgcgtggtaccagtgccgctgggcacactggcttcacgccggctccgcctcaccagcaagcgcattcccagataaaacactaactcagagaagaaatttaactgcaaatttggttaatgaccatggattcctaatgagaagaaaagctagacactgagagtttagaataaactcaagaatcttaaaaattttcccatggaactgcctttgcacctctataaaaaattaattgaccatatgaaccgcctgaagtctgcatcatgacttgatggttacccaggggtttatgtgtgtccaactgaacaccgtggttctgggattgaggatccgcacaaacacaggcaggagtttggagggaagaagggggcacagcaggagtgtatctcaagcccacctcaaaggcagcagagcattccaagttgctgaaaacctgtgcaaatggggcctctaaaacaaacattgtactgtgagctctcggggaaggggcaggaaaaggatgttgataattaagggggcattttcttgaggcggcagatgaggagggaggcttactatttttaatcccctcagccccaggacatgataatcagaggagatcatgtccaatcttgaatcaattccctgttcaaaaagaggtgctaataccccagggaccagactctgaaaataccatgaaaatactctgaaaataccgtgctggtcattcctgagtccctgttctatgccctacaacatattagaagggcaagggaaggtcagagggtagtggcttgtgttctgtggaagtaaaacaccttagttcatattaagcactgataaaacccaatgactgggaccacagatctgttgagaggtcactagtagggaccaagagtgggag

SEQ ID NO: 3296 - protein, 60 aa, Homo sapiens
MVTQGFMCVQLNTVVLGLRIRTNTGRSLEGRRGHSRSVSQAHLKGSRAFQVAENLCKWGL

SEQ ID NO: 3297 - DNA, 618 bp, Homo sapiens
tgacaaccatgttttcccagatagaagaccggagccctgctcctttgcgatccgccgagggctgcagagagcatcctcatccatttgggcacccctgcccaggaagagcccggccatccctttccggactggatccttaagaggtgaattttcttccgtggattccgatttgctccgtctgaccagcctaggcaatccagcatcgcgtggtaccagtgccgctgggcacactggcttcacgccggctccgcctcaccagcaagcgcattcccagaggagaaaatgagacactgagtgggactcagggattgctccaggccacacagtcagcaggaggcaaagcccagattcaaatgcagattactcagctccacaatccacatcctcacaggaggctgcactccttgcccaagcgtcagacaggagcaaagagaaagaaggcaaccagctggctactttcttcccttcttggatgcctccaacagggtgagaaggactaaacaaatgaccaagtgtcatcccattttggacatacttaaaacaccccatggaatttttattctgactttcttctgcctgtgtggcatttatgtttaaataaaagagaattcaactcgt

SEQ ID NO: 3298 - protein, 48 aa, Homo sapiens
MQITQLHNPHPHRRLHSLPKRQTGAKRKKATSWLLSSLLGCLQQGEKD

SEQ ID NO: 3299 - DNA, 1764 bp, Homo sapiens
agcaacagcagcgtagctgaacatcttacggatggcccagggctccaaaggctcgtttcctaagtgagagagagcctggctgaagctgtattaccattcattctccagcctccgaagtctcaaagcatcacttccaccatactctaactgtcaagacaaacacaaaggcccagaaactgccagactgtcttctgaagtggctataatatttacactcccatcagcagtgtagaaggggtctcactatgttgtctggagtgctgtggtggagtggagtggctattcacagagcctgttctgctgggacacagaatcacttgctccatctcatacattgatgatgattaatttgtatgtgtaccttccaaaaaagatggttgtgtttgaatggaggccttctggacaggaaaatatggagagtgcgtgctttggattcaagactgggaatgaggggaccagaaacctattctgtggctgtttcttgttaggactttcctaagcctctggaaaagtgcaaagtacaattaacatttgagtctgtctgagtcatgaagaaatggagattactgaaaataattcattttggtatcttcttacatcctgagagactaatctttccaagttcatctgaggctcctcttctccatgacaacctcatccagggatttcttcctgtcctggtgttttatgacatgtggaaggggactgtagcaggtgatctccaaagtctctggagacttactaatgtgcatcctcatctcgcttgtaaggataatagccttcctccaaacctcacacacttttggaggagatcactttttttaaagtgcatggaaatgttttgaaacagtgaaatctataatgataggtttcataattctaacatccacaccatatgaatcacatccttcctgagataatgagcacacaattgcctggatacctgaaggaatggagacagcggcagaaaacactgcagagaggtggaaacatccgttaatattttaaaatcccattactgctaccaacaataataatggatgcatagaaatagatctggattagctgagcttgaaacagtccatctcacacacacacaaaagaatttcagatacagtgaacccacatgttgaagctttctagtataataaaaatttcaactgttctgttgaatcatctgcctgattggaggctacagaaaagatgtcatcttaggagtgcttgctctgagtgaggctcatcttcaaatctgaatgaccacaaggagatttgattatacatgtgaacacctcagaaggcacagcccacccagaaggcagacaggtcaggctgctttttcttcattgcttggattcaatcctccgggcggctcaggctcaaacataacttaagcatgattaaactttagaagaagctgccaggaagactgtgaaatcttcatgcccaaggatccctaaaattaggagcaacaaccacttggctcagacggtttatggaggcaaaggtttggatgggattagagatttctaaatgtgagttcgtgtcctctgccagaccaccttacttccaccattcctcagcaaatcaagaaaaacaggagaaaagacatgcctttccataagttaaatctattctgttttaattctatattatatctgctgtacaacttcttttgtttgtaacaccatattgttgctagtaactggaaattaattttcacatgcctcagcttagaaaaataaaaagcagccctgcatcaatccc

SEQ ID NO: 3300 - protein, 98 aa, Homo sapiens
MKKWRLLKIIHFGIFLHPERLIFPSSSEAPLLHDNLIQGFLPVLVFYDMWKGTVAGDLQSLWRLTNVHPHLACKDNSLPPNLTHFWRRSLFLKCMEMF

SEQ ID NO: 3301 - DNA, 1195 bp, Homo sapiens
atagcaacagcagcgtagctgaacatcttacggatggcccagggctccaaaggctcgtttcctaagtgagagagagcctggctgaagctgtattaccattcattctccagcctccgaagtctcaaagcatcacttccaccatactctaactgtcaagacaaacacaaaggcccagaaactgccagactgtcttctgaagtggctataatatttacactcccatcagcagtgtagaaggggtctcactatgttgtctggagtgctgtggtggagtggagtggctattcacagagcctgttctgctgggacacagaatcacttgctccatctcatacattgatgatgattaatttgtatgtgtaccttccaaaaaagatggttgtgtttgaatggaggccttctggacaggaaaataatcacatccttcctgagataatgagcacacaattgcctggatacctgaaggaatggagacagcggcagaaaacactgcagagaggtggaaacatccgttaatattttaaaatcccattactgctaccaacaataataatggatgcatagaaatagatctggattagctgagcttgaaacagtccatctcacacacacacaaaagaatttcagatacagtgaacccacatgttgaagctttctagtataataaaaatttcaactgttctgttgaatcatctgcctgattggaggctacagaaaagatgtcatcttaggagtgcttgctctgagtgaggctcatcttcaaatctgaatgaccacaaggagatttgattatacatgtgaacacctcagaaggcacagcccacccagaaggcagacagaagaagctgccaggaagactgtgaaatcttcatgcccaaggatccctaaaattaggagcaacaaccacttggctcagacggtttatggaggcaaaggtttggatgggattagagatttctaaatgtgagttcgtgtcctctgccagaccaccttacttccaccattcctcagcaaatcaagaaaaacaggagaaaagacatgcctttccataagttaaatctattctgttttaattctatattatatctgctgtacaacttcttttgtttgtaacaccatattgttgctagtaactggaaattaattttcacatgcctcagcttagaaaaataaaaagcagccctgcatcaatccc

SEQ ID NO: 3302 - protein, 63 aa, Homo sapiens
MTTRRFDYTCEHLRRHSPPRRQTEEAARKTVKSSCPRIPKIRSNNHLAQTVYGGKGLDGIRDF

SEQ ID NO: 3303 - DNA, 702 bp, Homo sapiens
gggctccaaaggctcgtttcctaagtgagagagagcctggctgaagctgtattaccattcattctccagcctccgaagtctcaaagcatcacttccaccatactctaactgtcaagacaaacacaaaggcccagagaaggggtctcactatgttgtctggagtgctgtggtggagtggagtggctattcacagagcctgttctgctgggacacagaatcacttgctccatctcatacattgatgatgattaatttgtatgtgtaccttccaaaaaagatggttgtgtttgaatggaggccttctggacaggaaaattgcaaagtacaattaacatttgagtctgtctgagtcatgaagaaatggagattactgaaaataattcattttggtatcttcttacatcctgagagactaatctttccaagttcatctgaggctcctcttctccatgacaacctcatccagggatttcttcctgtcctggtgttttatgacatgtggaaggggactgtagcaggtgatctccaaagtctctggagacttactaatgtgcatcctcatctcgcttgtaaggataatagccttcctccaaacctcacacacttttggaggagatcactttttttaaagtgcatggaaatgttttgaaacagtgaaatctataatgataggtttcataattctaacatccacaccatatg

SEQ ID NO: 3304 - protein, 98 aa, Homo sapiens; identical to SEQ ID NO: 3300

SEQ ID NO: 3305 - DNA, 713 bp, Homo sapiens
caacagcagcgtagctgaacatcttacggatggcccagggctccaaaggctcgtttcctaagtgagagagagcctggctgaagctgtattaccattcattctccagcctccgaagtctcaaagcatcacttccaccatactctaactgtcaagacaaacacaaaggcccagaaactgccagactgtcttctgaagtggctataatatttacactcccatcagcagtgtagaaggggtctcactatgttgtctggagtgctgtggtggagtggagtggctattcacagagcctgttctgctgggacacagaatcacttgctccatctcatacattgatgatgattaatttgtatgtgtaccttccaaaaaagatggttgtgtttgaatggaggccttctggacaggaaaattgcaaagtacaattaacatttgagtctgtctgagtcatgaagaaatggagattactgaaaataattcattttggtatcttcttacatcctgagagactaatctttccaagttcatctgaggctcctcttctccatgacaacctcatccagggatttcttcctgtcctggtgttttatgacatgtggaaggggactgtagcaggtgatctccaaagtctctggagacttactaatgtgcatcctcatctcgcttgtaaggataatagccttcctccaaacctcacacacttttggaggagatca

SEQ ID NO: 3306 - protein, 88 aa, Homo sapiens
MKKWRLLKIIHFGIFLHPERLIFPSSSEAPLLHDNLIQGFLPVLVFYDMWKGTVAGDLQSLWRLTNVHPHLACKDNSLPPNLTHFWRR

SEQ ID NO: 3307 - DNA, 1234 bp, Homo sapiens
cctcggttccgttgcgtagcgtgtccctcagtgggacactgcagggtgcggggacaactacgaagatggcggttgcgcgcttggcagctgtggcggcctgggtaccttgtcggagctggggctgggcagccgtccccttcggtccccaccgtggcctcagcgtgctgcttgcacggatacctcagcgggcgccacggtggctcccagcttgtagacaaaagacgtcactctcattccttaatcgaccagaccttccaaacctggcttataagaagctaaaaggcaaaagtccaggaattatcttcatccctggctatctttcttatatgaatggtacaaaagcgttggcgattgaggagttttgcaaatctctaggtcacgcctgcataaggtttgattactcaggagttggaagttcagatggtaactcagaggaaagcacactggggaaatggagaaaagatgttctttctataattgatgacttagctgatgggccacagattcttgttggatctagccttggagggtggcttatgcttcatgctgcaattgcacgaccagagaaggtcgtggctcttattggtgtagctacagctgcagataccttagtgacaaagtttaatcagcttcctgttgagctaaaaaaggaagtagagatgaaaggtgtgtggagcatgccatcaaaatactctgaagaaggagtttataacgttcagtacagtttcattaaagaagctgaacatcactgcttgttacatagcccaattcctgtgaactgccccataagattgctccatggcatgaaggatgacattgtaccttggcatacatcaatgcaggttgccgatcgagtactcagcacagatgtggatgtcatcctccgaaaacacagtgatcaccgaatgagggaaaaagcagacattcaacttcttgtttacactattgatgacttaattgataagctctcaactatagttaactagtatcacatgtttagttggtatgtaaactaatgtatccagaagattggaagagggataagaaatgaaagatcctgatactttaggtttttccctttcctctattttgtaaatataagatgagtattatttaatgatgtatttgcataagtaatgcaaattgtgaagaaggaccagctgctgtttagaaaattttctccttccttctgtccttgattttttttcattaaagtatttcctttttttaattc

SEQ ID NO: 3308 - protein, 306 aa, Homo sapiens; identical to SEQ ID NO: 367

SEQ ID NO: 3309 - DNA, 938 bp, Homo sapiens
cctcggttccgttgcgtagcgtgtccctcagtgggacactgcagggtgcggggacaactacgaagatggcggttgcgcgcttggcagctgtggcggcctgggtaccttgtcggagctggggctgggcagccgtccccttcggtccccaccgtggcctcagcgtgctgcttgcacggatacctcagcgggcgccacggtggctcccagattcttgttggatctagccttggagggtggcttatgcttcatgctgcaattgcacgaccagagaaggtcgtggctcttattggtgtagctacagctgcagataccttagtgacaaagtttaatcagcttcctgttgagctaaaaaaggaagtagagatgaaaggtgtgtggagcatgccatcaaaatactctgaagaaggagtttataacgttcagtacagtttcattaaagaagctgaacatcactgcttgttacatagcccaattcctgtgaactgccccataagattgctccatggcatgaaggatgacattgtaccttggcatacatcaatgcaggttgccgatcgagtactcagcacagatgtggatgtcatcctccgaaaacacagtgatcaccgaatgagggaaaaagcagacattcaacttcttgtttacactattgatgacttaattgataagctctcaactatagttaactagtatcacatgtttagttggtatgtaaactaatgtatccagaagattggaagagggataagaaatgaaagatcctgatactttaggtttttccctttcctctattttgtaaatataagatgagtattatttaatgatgtatttgcataagtaatgcaaattgtgaagaaggaccagctgctgtttagaaaattttctccttccttctgtccttgattttttttcattaaagtatttcctttttttaattc

SEQ ID NO: 3310 - protein, 149 aa, Homo sapiens
MLHAAIARPEKVVALIGVATAADTLVTKFNQLPVELKKEVEMKGVWSMPSKYSEEGVYNVQYSFIKEAEHHCLLHSPIPVNCPIRLLHGMKDDIVPWHTSMQVADRVLSTDVDVILRKHSDHRMREKADIQLLVYTIDDLIDKLSTIVN

SEQ ID NO: 3311 - DNA, 1286 bp, Homo sapiens
cctcggttccgttgcgtagcgtgtccctcagtgggacactgcagggtgcggggacaactacgaagatggcggttgcgcgcttggcagctgtggcggcctgggtaccttgtcggagctggggctgggcagccgtccccttcggtccccaccgtggcctcagcgtgctgcttgcacggatacctcagcgggcgccacggtggctcccagcttgtagacaaaagacgtcactctcattccttaatcgaccagaccttccaaacctggcttataagaagctaaaaggcaaaagtccaggaattatcttcatccctggctatctttcttatatgaatggtacaaaagcgttggcgattgaggagttttgcaaatctctaggtcacgcctgcataaggtttgattactcaggagttggaagttcagatggtaactcagaggaaagcacactggggaaatggagaaaagatgttctttctataattgatgacttagctgatgggccacagattcttgttggatctagccttggagggtggcttatgcttcatgctgcaattgcacgaccagagaaggtcgtggctcttattggtgtagctacagctgcagataccttagtgacaaagtttaatcagcttcctgttgaggactctggaaggaaaaactatatttctttacattcagcctaaaattgcatgactaaaaaaggaagtagagatgaaaggtgtgtggagcatgccatcaaaatactctgaagaaggagtttataacgttcagtacagtttcattaaagaagctgaacatcactgcttgttacatagcccaattcctgtgaactgccccataagattgctccatggcatgaaggatgacattgtaccttggcatacatcaatgcaggttgccgatcgagtactcagcacagatgtggatgtcatcctccgaaaacacagtgatcaccgaatgagggaaaaagcagacattcaacttcttgtttacactattgatgacttaattgataagctctcaactatagttaactagtatcacatgtttagttggtatgtaaactaatgtatccagaagattggaagagggataagaaatgaaagatcctgatactttaggtttttccctttcctctattttgtaaatataagatgagtattatttaatgatgtatttgcataagtaatgcaaattgtgaagaaggaccagctgctgtttagaaaattttctccttccttctgtccttgattttttttcattaaagtatttcctttttttaattc

SEQ ID NO: 3312 - protein, 205 aa, Homo sapiens
MAVARLAAVAAWVPCRSWGWAAVPFGPHRGLSVLLARIPQRAPRWLPACRQKTSLSFLNRPDLPNLAYKKLKGKSPGIIFIPGYLSYMNGTKALAIEEFCKSLGHACIRFDYSGVGSSDGNSEESTLGKWRKDVLSIIDDLADGPQILVGSSLGGWLMLHAAIARPEKVVALIGVATAADTLVTKFNQLPVEDSGRKNYISLHSA

SEQ ID NO: 3313 - DNA, 2632 bp, Homo sapiens
cctcggttccgttgcgtagcgtgtccctcagtgggacactgcagggtgcggggacaactacgaagatggcggttgcgcgcttggcagctgtggcggcctgggtaccttgtcggagctggggctgggcagccgtccccttcggtccccaccgtggcctcagcgtgctgcttgcacggatacctcagcgggcgccacggtggctcccagcttgtagacaaaagacgtcactctcattccttaatcgaccagaccttccaaacctggcttataagaagctaaaaggcaaaagtccaggaattatcttcatccctggctatctttcttatatgaatggtacaaaagcgttggcgattgaggagttttgcaaatctctaggtcacgcctgcataaggtttgattactcaggagttggaagttcagatggtaactcagaggaaagcacactggggaaatggagaaaagatgttctttctataattgatgacttagctgatgggccacagattcttgttggatctagccttggagggtggcttatgcttcatgctgcaattgcacgaccagagaaggtcgtggctcttattggtgtagctacagctgcagataccttagtgacaaagtttaatcagcttcctgttgagctaaaaaaggaagtagagatgaaaggtgtgtggagcatgccatcaaaatactctgaagaaggagtttataacgttcagtacagtttcattaaagaagctgaacatcactgcttgttacatagcccaattcctgtgaactgccccataagattgctccatggcatgaaggatgacattgtaccttggcatacatcaatgcaggttgccgatcgagtactcagcacagatgtggatgtcatcctccgaaaacacagtgatcaccgaatgagggaaaaagcagacattcaacttcttgtttacactattgatgacttaattgataagctctcaactatagttaactagtatcacatgtttagttggtatgtaaactaatgtatccagaagattggaagagggataagaaatgaaagatcctgatactttaggtttttccctttcctctattttgtaaatataagatgagtattatttaatgatgtatttgcataagtaatgcaaattgtgaagaaggaccagctgctgtttagaaaattttctccttccttctgtccttgattttttttcattaaagtatttcctttttttaattcaagaaaagtttacctttcttatgcttatgttagctatgccagctcttaattgcatccttttctaattaggattattaataaagcgtgaatattttgttttttattatagacagaaatttgtaacattacttctgatttgaaaatgcaattcacaaaatatagggaaatttttattgaagtaaatttgaaatgatggagaaatttcagaagcataataaagttcacaataaggataatactttatataatgtataaagtatatataatataatatatatgttatataaactgcacattatattcaaacttaaaattgagctttttttttaaaggcccaaaattgtacagtgatacaaggagctatttctaaaatttggcttatgtataatatatttaaatggggaatttcatctaaaacaatgatgtagtatttttaatattctgattggtaaaattaaagaggaaattaatctttatatattatttcttgcagaaacattcattattttattaatattgccctaagtacaactaggcaagtgattgccacctaaatcagaagacgttctaaagtcagtaagaaagtgtgaaatgctagtataaaggttattttttttctttcctaaataactaaagtgaggtgtagattgagccttgatattatttagttaatgttttttattaattaattttggctggactttatttagcttgattaggttattatctgtcaaaccttttaagttgacaacatgactcatatatatacatgtgtataagatgagcatgtgtcgaagacttattcgactcattaatgaggaaaccagcagatagtaaacctggttcaaagtacaattcaagaaactgagtatttatgggcattgaagaaaaaatgttgagataaaattgctgtgcagaaaaaagtgttaatgaagccgacctgactacttaaccttagagacctgctttacaaggttggcccttgattggcatctgggaacttggagttcagggggcttccaccattcccagaactgatcaaagtagcttactatatctaaactgtaaaacaatatagtttctcctgaacacctgctttccttctgggagtctggaattttggtatgtgccaggcagagactacctttgtgaccagctcccagtaaaaaccccaggcactcagtctctaacaagcttttctggttgacagtgtttcacaagtgctgttacaactggttgctgggagaattaagctcatcctctgtgattccactggcggaggattcttggaagcttgcacttagtttcccctgacttcaccccatgtgtcttttttcctttgctgattttgttttgtatcctttcactgtaataaatcatggccgtgagcagaactgt

SEQ ID NO: 3314 - protein, 306 aa, Homo sapiens; identical to SEQ ID NO: 367

SEQ ID NO: 3315 - DNA, 2684 bp, Homo sapiens
cctcggttccgttgcgtagcgtgtccctcagtgggacactgcagggtgcggggacaactacgaagatggcggttgcgcgcttggcagctgtggcggcctgggtaccttgtcggagctggggctgggcagccgtccccttcggtccccaccgtggcctcagcgtgctgcttgcacggatacctcagcgggcgccacggtggctcccagcttgtagacaaaagacgtcactctcattccttaatcgaccagaccttccaaacctggcttataagaagctaaaaggcaaaagtccaggaattatcttcatccctggctatctttcttatatgaatggtacaaaagcgttggcgattgaggagttttgcaaatctctaggtcacgcctgcataaggtttgattactcaggagttggaagttcagatggtaactcagaggaaagcacactggggaaatggagaaaagatgttctttctataattgatgacttagctgatgggccacagattcttgttggatctagccttggagggtggcttatgcttcatgctgcaattgcacgaccagagaaggtcgtggctcttattggtgtagctacagctgcagataccttagtgacaaagtttaatcagcttcctgttgaggactctggaaggaaaaactatatttctttacattcagcctaaaattgcatgactaaaaaaggaagtagagatgaaaggtgtgtggagcatgccatcaaaatactctgaagaaggagtttataacgttcagtacagtttcattaaagaagctgaacatcactgcttgttacatagcccaattcctgtgaactgccccataagattgctccatggcatgaaggatgacattgtaccttggcatacatcaatgcaggttgccgatcgagtactcagcacagatgtggatgtcatcctccgaaaacacagtgatcaccgaatgagggaaaaagcagacattcaacttcttgtttacactattgatgacttaattgataagctctcaactatagttaactagtatcacatgtttagttggtatgtaaactaatgtatccagaagattggaagagggataagaaatgaaagatcctgatactttaggtttttccctttcctctattttgtaaatataagatgagtattatttaatgatgtatttgcataagtaatgcaaattgtgaagaaggaccagctgctgtttagaaaattttctccttccttctgtccttgattttttttcattaaagtatttcctttttttaattcaagaaaagtttacctttcttatgcttatgttagctatgccagctcttaattgcatccttttctaattaggattattaataaagcgtgaatattttgttttttattatagacagaaatttgtaacattacttctgatttgaaaatgcaattcacaaaatatagggaaatttttattgaagtaaatttgaaatgatggagaaatttcagaagcataataaagttcacaataaggataatactttatataatgtataaagtatatataatataatatatatgttatataaactgcacattatattcaaacttaaaattgagctttttttttaaaggcccaaaattgtacagtgatacaaggagctatttctaaaatttggcttatgtataatatatttaaatggggaatttcatctaaaacaatgatgtagtatttttaatattctgattggtaaaattaaagaggaaattaatctttatatattatttcttgcagaaacattcattattttattaatattgccctaagtacaactaggcaagtgattgccacctaaatcagaagacgttctaaagtcagtaagaaagtgtgaaatgctagtataaaggttattttttttctttcctaaataactaaagtgaggtgtagattgagccttgatattatttagttaatgttttttattaattaattttggctggactttatttagcttgattaggttattatctgtcaaaccttttaagttgacaacatgactcatatatatacatgtgtataagatgagcatgtgtcgaagacttattcgactcattaatgaggaaaccagcagatagtaaacctggttcaaagtacaattcaagaaactgagtatttatgggcattgaagaaaaaatgttgagataaaattgctgtgcagaaaaaagtgttaatgaagccgacctgactacttaaccttagagacctgctttacaaggttggcccttgattggcatctgggaacttggagttcagggggcttccaccattcccagaactgatcaaagtagcttactatatctaaactgtaaaacaatatagtttctcctgaacacctgctttccttctgggagtctggaattttggtatgtgccaggcagagactacctttgtgaccagctcccagtaaaaaccccaggcactcagtctctaacaagcttttctggttgacagtgtttcacaagtgctgttacaactggttgctgggagaattaagctcatcctctgtgattccactggcggaggattcttggaagcttgcacttagtttcccctgacttcaccccatgtgtcttttttcctttgctgattttgttttgtatcctttcactgtaataaatcatggccgtgagcagaactgt

SEQ ID NO: 3316 - protein, 205 aa, Homo sapiens; identical to SEQ ID NO: 3312

SEQ ID NO: 3317 - DNA, 2336 bp, Homo sapiens
cctcggttccgttgcgtagcgtgtccctcagtgggacactgcagggtgcggggacaactacgaagatggcggttgcgcgcttggcagctgtggcggcctgggtaccttgtcggagctggggctgggcagccgtccccttcggtccccaccgtggcctcagcgtgctgcttgcacggatacctcagcgggcgccacggtggctcccagattcttgttggatctagccttggagggtggcttatgcttcatgctgcaattgcacgaccagagaaggtcgtggctcttattggtgtagctacagctgcagataccttagtgacaaagtttaatcagcttcctgttgagctaaaaaaggaagtagagatgaaaggtgtgtggagcatgccatcaaaatactctgaagaaggagtttataacgttcagtacagtttcattaaagaagctgaacatcactgcttgttacatagcccaattcctgtgaactgccccataagattgctccatggcatgaaggatgacattgtaccttggcatacatcaatgcaggttgccgatcgagtactcagcacagatgtggatgtcatcctccgaaaacacagtgatcaccgaatgagggaaaaagcagacattcaacttcttgtttacactattgatgacttaattgataagctctcaactatagttaactagtatcacatgtttagttggtatgtaaactaatgtatccagaagattggaagagggataagaaatgaaagatcctgatactttaggtttttccctttcctctattttgtaaatataagatgagtattatttaatgatgtatttgcataagtaatgcaaattgtgaagaaggaccagctgctgtttagaaaattttctccttccttctgtccttgattttttttcattaaagtatttcctttttttaattcaagaaaagtttacctttcttatgcttatgttagctatgccagctcttaattgcatccttttctaattaggattattaataaagcgtgaatattttgttttttattatagacagaaatttgtaacattacttctgatttgaaaatgcaattcacaaaatatagggaaatttttattgaagtaaatttgaaatgatggagaaatttcagaagcataataaagttcacaataaggataatactttatataatgtataaagtatatataatataatatatatgttatataaactgcacattatattcaaacttaaaattgagctttttttttaaaggcccaaaattgtacagtgatacaaggagctatttctaaaatttggcttatgtataatatatttaaatggggaatttcatctaaaacaatgatgtagtatttttaatattctgattggtaaaattaaagaggaaattaatctttatatattatttcttgcagaaacattcattattttattaatattgccctaagtacaactaggcaagtgattgccacctaaatcagaagacgttctaaagtcagtaagaaagtgtgaaatgctagtataaaggttattttttttctttcctaaataactaaagtgaggtgtagattgagccttgatattatttagttaatgttttttattaattaattttggctggactttatttagcttgattaggttattatctgtcaaaccttttaagttgacaacatgactcatatatatacatgtgtataagatgagcatgtgtcgaagacttattcgactcattaatgaggaaaccagcagatagtaaacctggttcaaagtacaattcaagaaactgagtatttatgggcattgaagaaaaaatgttgagataaaattgctgtgcagaaaaaagtgttaatgaagccgacctgactacttaaccttagagacctgctttacaaggttggcccttgattggcatctgggaacttggagttcagggggcttccaccattcccagaactgatcaaagtagcttactatatctaaactgtaaaacaatatagtttctcctgaacacctgctttccttctgggagtctggaattttggtatgtgccaggcagagactacctttgtgaccagctcccagtaaaaaccccaggcactcagtctctaacaagcttttctggttgacagtgtttcacaagtgctgttacaactggttgctgggagaattaagctcatcctctgtgattccactggcggaggattcttggaagcttgcacttagtttcccctgacttcaccccatgtgtcttttttcctttgctgattttgttttgtatcctttcactgtaataaatcatggccgtgagcagaactgt

SEQ ID NO: 3318 - protein, 149 aa, Homo sapiens; identical to SEQ ID NO: 3310

SEQ ID NO: 3319 - DNA, 875 bp, Homo sapiens
tttagatatagatttttttcccctttttccaggtttgattactcaggagttggaagttcagatggtaactcagaggaaagcacactggggaaatggagaaaagatgttctttctataattgatgacttagctgatgggccacagattcttgttggatctagccttggagggtggcttatgcttcatgctgcaattgcacgaccagagaaggtcgtggctcttattggtgtagctacagctgcagataccttagtgacaaagtttaatcagcttcctgttgagctaaaaaaggaagtagagatgaaaggtgtgtggagcatgccatcaaaatactctgaagaaggagtttataacgttcagtacagtttcattaaagaagctgaacatcactgcttgttacatagcccaattcctgtgaactgccccataagattgctccatggcatgaaggatgacattgtaccttggcatacatcaatgcaggttgccgatcgagtactcagcacagatgtggatgtcatcctccgaaaacacagtgatcaccgaatgagggaaaaagcagacattcaacttcttgtttacactattgatgacttaattgataagctctcaactatagttaactagtatcacatgtttagttggtatgtaaactaatgtatccagaagattggaagagggataagaaatgaaagatcctgatactttaggtttttccctttcctctattttgtaaatataagatgagtattatttaatgatgtatttgcataagtaatgcaaattgtgaagaaggaccagctgctgtttagaaaattttctccttccttctgtccttgattttttttcattaaagtatttcctttttttaattc

SEQ ID NO: 3320 - protein, 149 aa, Homo sapiens; identical to SEQ ID NO: 3310
